United States Patent Application Publication US 2004/0214272 A1 - sequence listing, part 23

SEQ ID NO: 94883 - DNA, 1440 bp, Zea mays
  Clone ID: MRT4577_186525C.1
ccggccggagcccggaatctgcaacctcgccagcggttgctgggggttcttccccttgttcgatcggttgagaaggaaagcatcgcgagttcgccatacggatgggttccaaagcgcctttctgtctcacgctcctcttgctgctcgccgcggcctgtggacctgctgcacatgccaacgatgctgtcgagctcccgcatcatggctcagccttgaaggaacatatttcttcaaccaagattcctgcccgtctcaagaggggcagcggactatgctcggcctatgaaaacttcacgagcgaagccgtcacttatctcggcaaggaacagacacaggacaggatcgtggagttccttcatgatgcttgctcccaatcattctcctttgaacagaagtgtgtcgagctgatggactcttatgcgactctcctgtttgccaagatcacggagatcagaccggaagcgttctgcaaacggtatggcctgtgcagggacacggctcttctctccggtgtgggaagtgacagcacgtgtgtgttctgccaccatctgctcgatgaaatcatgtccaaactgaaagatccagatgcggagtttgagataattcagattcttgtcaaggagtgcaataagatcgaaggtcacgtccagcagtgcaagaggctggttctgcaatacattcccctcatcttggtgaacggtgagaagttcctcgagaagaacgatgtctgcgcgctcgcacaggcttgtccagcgagcagtaggaagacgttcagctcgatgttgaagggagcgttgtggagtgacgcctggcttgaaggttgaagaagaacacacggagcggtttagcagtggtcagaaatagtgtgaacaagtgctgtgctgtacatataataatgtcgtgtataaacgcatgaaggacgtgtgccctgcattcttttcgtcttgtatcataaattcataaacacgtcgtcttaagtaattgtttatggacacctagaggggatgaaggttaaaatatttggccttgaggtaagatgcaaaaaaaaaagcggcatccacaaagtttcagcgctggcgacttgaaactgcaaatgatgtggtatttttatttgaaaaaaaaaaaaaaaatgcggcctaggaaagagtggtgtttcagaaacaacagaatacgttgctgttaaaagtgacgctggaacggtttgctgcacttactgtttgtgtgtaaaaatagtgaagttagtggaatgaatgatcctggccagtttctcttaatgaatgattctggccggtttatgttaagaaaaaaaaaaaaaaaaaaaaaaaaaaaaaaaaaaaaaaaaaaaaaaaaaaaacaaaaaaaaaaaaaaaaaaaaaaaaaaaaaaaaaaaaaaaaaaaaaagggggggccgcccaaaaggttccaagcttacttacgcgt

SEQ ID NO: 94884 - DNA, 3324 bp, Zea mays
  Clone ID: MRT4577_186526C.1
ccggcagggagtgggttcttatcttgatcgggaggggaatccggcacgcaacagcaacgaccgccccgaaagagagccggaaaaaaagggcaggaaatcgccaccgcccgcacctatttgagcagccgcttgttccttccgcaatccgcgtcctcgctgctcctcaattcgattggctccgtgtcgacctccaggttgagaaggaaagcatcgcgagttcgccatacggatgggttccaaagcgcctttctgtctcacgctcctcttgctgctcgccgcggcctgtggacctgctgcacatgccaacgatgctgtcgagctcccgcatcatggctcagccttgaaggaacatatttcttcaaccaagattcctgcccgtctcaagaggggcagcggactatgctcggcctgtgaaaacttcacgagcgaagccgtcacttatctcggcaaggaacagacacaggacaggatcgtggagttccttcatgatgcttgctcccaatcattctcctttgaacagaagtgtgtcgagctgatggactcttatgcgactctcctgtttgccaagatcacggagatcagaccggaagcgttctgcaaacggtatggcctgtgcagggacacggctcttctctccggtgtgggaagtgacagcacgtgtgtgttctgccaccatctgctcgatgaaatcatgtccaaactgaaagatccagatgcggagtttgagataattcagattcttgtcaaggagtgcaataagatcgaaggtcacgtccagcagtgcaagaggctggttctgcaatacattcccctcatcttggtgaacggtgagaagttcctcgagaagaacgacgtctgcgcgctcgcacaggcttgtccagcgagcagtaggaagacgttcagctcgatgttgaagggagcgttctggcctgacgtcgagcaggaagttggaccaagcacatactcgctgctcttcaattcgattggctccgtgccgacctccaggttgagaaggaaagcatcgcgagttcgccatacggatgggttccaaagcgcctttctgtctcacgctcctcttgctgctcgccgcggcctgtggacctgctgcacatgccaacgatgctgtcgagctcccgcatcatggctcagccttgaaggaacatatttcttcaaccaagattcctgcccgtctcaagaggggcagcggactatgctcggcctgtgaaaacttcacgagcgaagccgtcacttatctcggcaaggaacagacacaggacaggatcgtggagttccttcatgatgcttgctcccaatcattctcctttgaacagaagtgtgtcgagctgatggactcttatgcgactctcctgtttgccaagatcacggagatcagaccggaagcgttctgcaaacggtatggcctgtgcagggacacggctcttctctccggtgtgggaagtgacagcacgtgtgtgttctgccaccatctgctcgatgaaatcatgtccaaactgaaagatccagatgcggagtttgagataattcagattcttgtcaaggagtgcaataagatcgaaggtcacgtccagcaggtaggctttttggctcttcctctgtccttgtgattctgtgcaaaaggcgagctcgtcctcttccttaatgaggttcttaagagtgtttcctcagctgtattggttacccttactactttggattttggaaacagtccgagacccttattagttaacaatatcatagttgttgcaaagatactctactttttttcatcatctcttctttaccattcatatctcccagttgttgcaagggaaaattaactccagtaattctttcttgaggggtagaacaggagtgtcgttctcagattcaatgattatcaaacaacatgtactaattatattttagcaagctggcagttgatgtgattctctatgtttacattttgtcaaattaacgacaagagggttaagttttagaagcaactaccctgcactggttaataatatctgtgaggacccaagttggtcccagtcctcttcgattggtgctctgtccctgtgatttgaggaaagtttcagtacaacacattgtattttgattagtgaatgaagcatttagacgatattgttgcaggtgtgcattctctttcttacatttgatttaagctttcttatttgagctttatgatactatgtactcaatacttgtgctcttctaagataggttgagcagatagtggttgaaaggtctgaaggttggcattgtggatatttttgctatcatgcatggattcccagacaatgtgaggacgaaccagaagggcgagttctgggtggcgatccactgtcggagaagtatgtatcctcggctaatgagctgccatgtcaagctgaggaagtttttgctcagcttcccaatccctgccaagtaccactacctgatgcatatcgatagcaagctctacgcgttgatcatcagggacagcccgatggccagatgcttcacatcatggaggacgacaagggagaggtggtgagagttatcatcgaagtggagggtccgtctgatgccattcatcgctgtctttgacctcgtgaaggcgtcttagccacttcaatttgattggaaatattgttgttttaagatacgggtccatggttaatgttgtatgcttctctgagaagacctgtcattccaataatttggttctggagcaacctggagctgtatactgatctagcttcttttagtaacaaatgtaagttgctcacaaaaaaaaaaagatattgttgcaggtgtgcattttctttcttacatttgatttaagcttttttatttgagctttatgatactatgtacccaaaacttgtgcttttttaaaataggttgaccaaatagtggttgaaaggtttaaaggttggcattgtggatatttttgctatcaggcatggattcccagccaatgtgagggcgaaccaaaagggcgagttttgggtggggatcccctgtcggagaacaagctttacgcgttgatcatcagggacagcccaatggccaaatgtttcccatcatggaggacgccaagggaaaggtggtgaaagttatcatcaaagtggagggtttgtttgatgccatttatcgctgtctttgccctcgtgaaggggttttagccccttcaatttgattggaaaaattgttgttttaaaaaacgggtccatggttaatgttgtacgcttttttgaaaaaacccgtcattccaataatttggttttggagccaacctggagcgtgtattctgttttg

SEQ ID NO: 94885 - DNA, 354 bp, Zea mays
  Clone ID: MRT4577_186527C.1
acccactcttcctctaagtttttaggctttattggtactgactttccatttttgaagagaatgtagaattcaagatctctgtctattatcatatgggatcgaaagtatccaatcttcacctaattccttattatcagcatttaacatccttgcatactgttcagttagtctgactcatctgagtatcaaccgtgattaaatcttacatcgtttgaatacttatatagtctgaacttttgatggtgctcatctcaccctaatttattattctcacagtatatgatctcttatccaaacaaataccactctatactacttaacactatatactgtcacgttaatagatttctctat

SEQ ID NO: 94886 - DNA, 585 bp, Zea mays
  Clone ID: MRT4577_186528C.1
gatatttgatagatctctctgcctatccatctagcgagacatagacaggatgattttctacgtagcatgcagtgtcctcattagactgctcatcgcgtcgcgtaggaactgctcgtgtctcgcagctggctgctagctccaaccgccggcatgcccgacgcctgcaccttgtacctgcaccgtgtcagtactgacttactatcatcagcagagactaccatctcgctgcagatcctactgtgggaacaaacctgtgactaccaacaaagctatccataaatcatagttggacatgattatgaactattccgcaggaagtgataaccgatctatcgctatttgaaaatagagcagatagactctctctgacggtacggtggtgttcggcctcatagcatgcgcatggtgcatctaataggtaccgtataagaagaagaaatatgctgcatgtgtacccatcggcctgatcctgtacatcagtgttgacatataaatactcccttcgttccacaatgtacgacgctctctctctagtgatacgacagtgatgcctaatggatagagataactcactacatttgtcga

SEQ ID NO: 94887 - DNA, 2457 bp, Zea mays
  Clone ID: MRT4577_186529C.1
atgtcgtcttcttcctcgtctgctgcaaagacgccgcaggccgattcatcgtcggaggataccttgagcaacgtggcggcggtggagctacatccgggtgatatggatatgcagcagctggggtattttggcagcggagttgggcgtgtcccgggggcggaggaggttctcgatcccgagggcgagttaatcgtgtttgaggcgttttttaccgctggccttcgcctgcctgcacatcgctttgtggcggaggtcctggagagatttgaggtccaggtccaccagctgacacctaacgccgtggtggccctggagaagtatgtctgggcggcgacttcatatggcggtcagccttctgtggaggtcttcgccaaacattactgtctgcattggcaaaaaagaaaaattgggcacaagattgcacagtttggatcatgcacgtttacgtcgaggaccggaaagacttcaatggaagtcgtggagttagttccctatgcccgcaataagtggggcaactggtgggatttctggttttatgtttctgagagcgaagtcaaaaaccacctagggctccctgtggccgtgatgtgctcccattattatgtggcgtacccgcaatttgagtcggcagaggatgatgaaaatgaaggagcccttcggtgcgctacccgcatgagtagcgggcgtgatttagttgaggaattcatcggttatggggtgtggcccttggcacatggttgggcgaagtatgccctcgcgagatgccctccctgggcgggcagcaagtgcgaagtccagcctttgcgttggatctgcatggcctggatccagccgcattcgttcgtgaagtggaggacgattttcccttacggacggaatgttgctgctgttgagtcggtagtgatggagaaggatcgtcaagacgctgcacagaagcgccgggcggtcgttaggatcggggatcctttccgcgaggccaagaggaagtcttcgacgggtgcgaaggctgcctcttctggcgcgggcaaaccaccctcgggcgagcccgtcaaggggcgaagggtgccctcaccggcgcgtgttgatgaggtgggggcgcgtgtcgccgacttcgacagagacatctatgtgtcggattatcttgttggctcggatgcggggcaactgcctcttgtcccgactccggtggcggccccttcgtctacgacggcgattggggcgaagggtgcttcgcgggacccgtggtccgccttctgcgcgagcggcacgatttcatcggccaccgccgctaaggatgtggcgggctccgtgtcccagcaggtgaggcgggcgtcgcagcagctgaatcatgcagccgacttcgccgaccatgtcgcgtcgggtgctctgactgcagagtttgctgccgaagtcgagcgtctccgggtgcagcatgcggatgctgtccgggagaagtcggctgcggaaagcaaaagccaaaggctgacggagaagttggccgctatggaggccgagaagggggaactccggtgccagctggtggaggagaggcgggaggcgaacaaggccattgccgatgcgcatgctgcgcaggccgatgccaagcttgcacgggcggagggcagtctcgcctgccaatgcaccgaggatctggaggcaaggctcaacagcctgcgcaatcgcgtgtataaagctgaggcctcgacgcgcacggaggaggagctggcggtgcttccgaccatcgtgacgggcctcatgtcttttgcctcccttgtcacctgcgagggtgccgtgagtgctttgtcccgcgaggggtgcgggcatttcgtggtcttcgaccaatcggacgagaacttcgaatgcgaaatcttccaggtcgaagacccgatgcttaagcagtcggcgggggcgctcttcgacaggatgtggggtccgcacggccgggaggtggtccgggagaggtctgaccgggcaattgatcagatggcacatgccgaggaggtcgaagaccttggtgatctggacagtgcactgctcgtgacatcgggggtggaggtggcgccgccatccgatgccagcgagggcccctcaacggtccctgcaccgacagtgccgactggagccagcgaagacctcgcgccgacgggcggggacgccttgaaggcggttctgaggtttgggcctgcgcacgcagccgctactgacaatactatttttgtggcggcttcgaccatggctgccgatgatgattcgtttggctctgtgtctaagtgttttgagtctgatgattctgggagttcgattgcgtggacggaggagtcttcagatgaggacttggattattttgcagtgttagatgtggctgcagcggagccttcgccgcgcgtggagggttctgaggggctcccgggtgcgagtactgggtataggcggcggagggcggtggcgaaacggaga

SEQ ID NO: 94888 - DNA, 4643 bp, Zea mays
  Clone ID: MRT4577_18652C.1
atggtgaaccaacgtcaaggacctaacaaccggaaccagcgtggacaacaagcaccaccaccaccgccaccaccaaatcccaatatggagcagttcatcgccgcccaaatgcagattctgcaaggactcactgctgtggttcaacaattacaacaaaaccaacagaatcagcaaccccagcagcagcagtatgcgcccccggccagagataagcaccgggacttcatgagtcatcacccgccgacattctctcatgcggttgagcccttggatgccgatgactggctcaaagtcattgggaagaagctggacataactcagtgcaacgaccgggagaaggtcttgtacgcctcgggaagactcgagggagctgcgtccgattggtgggatgccttcacagcggcacatcccaacgctgataccataacctggcaggagttccaagagaacttccgtgctcatcacatcccctctggaatcatgaagctgaagaagaaggagttcctttcccttactcaggggaatatgtctgtcagcgagtatcgtgatcgcttcactcagctttcacgttatgctcctgaagaagtggacactgatgagaagcgccaagagcgtttcctggaagggttgattggacctctgaactaccaacttcagagtcacacattccccaacttccagacactgctgaacaaggcaattggccttgagagcaaaaggaaagaattatctgaccataaaaggaagttccaaggtcagtcaagcaggaacactcgcccgaataatgctcaaggttcgcagttctgctctggaaatcagggtggaaacaattatcaagtgcaacgctctggacagcaaggccagagaaataatcagagtcagaatcaacaaaggagtaacccccagaccaaccagaggtctggtggaaattctcagaaccgtcaaggtggcaccaacaacactcaggccagaaacaacgcacctgtccaacccaacggctgtttcaagtgcggtgaactaggccactatgccaacaactgtccaaggcgcaaccagcaaacaccccagaaaggcaataatcagaggaatgaccagaacacccccgctcgtggatctgctcagaacaagactccacagaaccagagcagaggaagggtcaatcatgtcactgcggaatcagtgcctgaggatgccgacatagtgtatggaatagattttacagtcgacccagtggtcctaggatccaacgggattgatgtgattcttggatgcaattggttgaaaagttgtgatggagtgatacagtgtgccaatggaactattatgttgacaagtcctcaaggtgaaagaatccaagttaacatagacaagtcaacagatgaaaaagggaagacagtgatcaatcacttggaagaaaagcccttggaaaatatcaaagtagtgtgcgaatacccagacgtatttccggaggaattgccaggtatgccacctgaccgtgatatagagttttctattgaattagtacccggaatcgcacctatctcaaaaagaccatatagaatggatgtcaaggatttagtagaactgaagaaacaaatagaagaattactagaaaaaggtttcattcgcccaagttcatccccttggggagccccagtgctatttgtgaacaagaaggatggttcaaggagaatgtgtgttgattatagaagtttgaatgaagtaaccatcaaaaataaatacccgttacctcggattgaagatttattcgatcaaatgaagggagctaagatattctcaaaggtagatctaagatcgggatatcatcagttaaagattcgagcagaagacgtacccaagacagccttcacgacgagatatggattatatgagtttttggtcatgtcgtttggactgactaatgcaccagcatactttatgaacttgatgaataaagtattcatggaatatctggatcagtttgtggtcgtatttattgacgacatactgatatattctccgaatgaagaagcacatgaagatcatctaaggctagttctacaaaagcttcgtgacaaccaactgtacgcaaaattctcgaagtgtgatttttggttgaaagaagttgctttcttagggcatattgttaccaatggtggaattaaagtggacccaggaaagataagagagatactagattggaagcaaccaaaggatgcgtccaagatcagaagttttcttggattggcaggatactatagaagatttattgaaggtttctccaagttagtgaagcctcttacctcactactggagaaaggcaaagagttcaaatgggatgaagcttgccagaattgttttgaagaactcaagaagaggttaaccactgcaccaatactggtaatgccagacatccacaagggatttgatgtgtattgcgatgcatcacaccttggacttggatgtgtgctaatgcaagaaggaaaagtgattgcttatgcttcaagacagttgaggaaacatgagaagaattatcctacgcatgatttggaactagctgccgtagtacacgctttgaagatttggaggcactatatgattggaaacaagtgcaaaatcttcacggatcacaaaagcttgaaatatatattcactcagaaggaactcaacctcagacagagaagatggcttgagttgattaaagattatgatttggaaatacaatatcaccccggaaaagcaaatgtagtagctgatgctttgagccgtaagggtcaagtgaacaacatcactactcatttgatgtcacaagaattgtgctgggaaatggaacgactcaaccttggatttctcaataatgtagaagcaacagtgatggaagtcgaatctactttggaagaagagattcgtaaaggacaagaatctgatgagaagattaaggaaattaaaactttgattagtatgggtaaagccccagatttcacggaagatgaacaaggcacaatatggtttaagaagagaatatgtgtaccagaaatcgagcacttgcgccaacttattttgagagaagctcatgattcagcttactctattcaccctggaagtaccaagatgtaccaggaccttaaagaaaagtactggtggtacggattgaaaagagatgttgctactcatgttgcattatgtgacgtgtgtcagcgagttaaagccgaacaccaaagaccagcaggattgctacaacctctcaaggtaccggaatggaagtgggaagaaatcagtatggatttcatagttggactaccccgtactcgagatggctatgattcaatatgggtcatagtagacaggttaactaaggtagcacactttatacctgtgaagacaacacactcgggagcccagttagcagaattatacatgtcgaggattgtttgtctgcatggagtaccgaagaagattgtatcggatcgaggaacccagtttacctcgctcttttggaaaagacttcatgagtccatggataccaagctaaactttagttcagcttatcatcctcaaacggatgggcaaacggaaagaacaaaccaagtattggaagatatgctaagagcttgcgctctaaagcatggtagaagctgggataaaagtttgccttatgcagaattttcgtataacaacagttatcaagcaagtctcaaaatggcaccatttgaagcactatatggacgaaagtgtagaacaccgctttattggaatcagactggagaaagtcaagtatttggtccagaaattctccaggaggcagaaaagcaagtgcagattatcagagaaaatttgaagacagcacagtcaagacagaagagctatgctgataatagaagaagagaattgatgtttgaagtaggagacttcgtataccttaaagtttcaccgatgagaggaatgaaaaggtttaaggttaaaggaaaactatcacctcgctatattggcccgttcaagattttggaaagaaaaggtgaagtagcctaccagttagagctacccgatagattatcagatgtgcatgacgtatttcacgtgtcacaactcaagaagtgcttaagagtacccgaagaacagttacccatggaagaactgaatgttaatgaagatttgacttattcggagtacccaatcagaattctggaaacatctcgcagaattacacggagtaaagtcattaacatgtgcaaagttcagtggagtcatcattcggaagatgaagccacttgggaaagagaagatgaactcagagcagaattccctcagctattctcggaagtttcttaatctcgaggacgagattctttttaagaggggtaggtttgtaacaccataaaagccatcaattaaaataataaatttagatattatattaattagggtaataaataaaaaaaagtgtttaattatttattttcatcgttttctttgcatgcatttgatttcttacgagatgtttaatatcagattcattttaaaaagagatactagtaattagaataataattaagaaaatatagtgagttattagtctaaaaataagtacttcatttacaaatatttttggtaattttcttataatttttagagttctttaaaaa

SEQ ID NO: 94889 - DNA, 426 bp, Zea mays
  unsure (1)..(426): unsure at all n locations
  Clone ID: MRT4577_186530C.1
cccacgcgtccgcccacgcgtccggtgccgccgagcgggtggtgggagatatccggttgggcggagtcggcagcgggcgcaaggagtcactagcgaggtgcctgattgggattagtgaagggcggggtggtgaggtcgccggtggccggggcagtgctcgaggcagtggagggaggagaaagatgggtgcagacagaggaagaagaccatgcggcagaaacctttctgacacgcctgcacggacgacctttattctatggattgaagatgggtgtnctaccatctggagaaagagctctaaaggtatcaatgcaggccttccttctttcccttttcatgattttctttcttccctggcaattcagaacgggaggttctattggaagccaattacttactgagatcagcatttttatagtgaccact

SEQ ID NO: 94890 - DNA, 283 bp, Zea mays
  Clone ID: MRT4577_186531C.1
caccatccgtgctcctggtaaagggggacagagagcctcaccttgccacatatttgaacagtgatgagtttggggctggtttctgggaagggaacgtttatttagtaaagagcagaacacccttgcgttttgttgggacatgtggaccgtgagtcgcaaacactctggagaaggctgagatgccaccattcccacggggactgaagacacattacgtggacctggtcccaggctcagtgaggagatggcctcagctgtggggctagtccatgttgcccactca

SEQ ID NO: 94891 - DNA, 384 bp, Zea mays
  Clone ID: MRT4577_186532C.1
cgctgcgcatcatgccgatatcagatcacgtggatgaggggcatcgatactccctctacgtttgaagctcccgaggagtctggatctgtcccttgcactgcagaatccgagggggagctgcgacgagggagacgcagagccgctgatgcgggtcggcgtcctgttgatgtggactgtggatatatattggtaagcttcccattcgaaatgcattacgcctatgtgtatctgtctttaccgagacaactgatactcgccatgggctagaacttgtcggacgaagatttaggggtgcgagcctgtgtacaactaagaagctgaagctttggaacagataaatacatgggctgggtgaggctcgcttgcgttgtcaaaaaaataaac

SEQ ID NO: 94892 - DNA, 898 bp, Zea mays
  Clone ID: MRT4577_186533C.1
gcaagtgatgatagcaagacagggacatcagaacctttcggggttatgacagactacgtctataatgggaatctctctgatgtttgcaacagtagctatagtggtactggtagagtggtactagctcagaaagttgtagcaaatcgtgtgtcgtgccatgtcgctacgccgcagttcggcggctgcgctcgcggcgctgctggcgctggcggtgctgctgggcacgtcggcggacgatggcggccagcccatcgtggcgcgcatcagcaaggacacctccacccccacccccctctacactatcgccatcaaggtcggcggggtgccgctcctgctcgacctcggcggcccgatgctctggctcgccaactgccccaccccgcaccgcatcattccatgcgtctcccacgactgcgacgaggtctccactacataccgcccgcctggctgcccgaagcccagccttcgcggagacgggccgtgcgcctgccccgcctacccgcgcaacccggtcgacgggcgctgccgctccgacgacgccaccaccatcacgctcgccgccaacaccacggacggccagaacccgctcctccccgtcatcttccgcgccgtcgggtcctgcgcgccgggggagctcctggagtcgcttccggcgggggcggccggcgttgcggggctctccaggctgccgctatcgctaccgacccagttcgcgtccttgctcaaggtggcgaacgagttcgccctgtgcctgcccagcggcggcgacggcgtggaaagtctttcggtgggcggcccgttccagctcctggccgcgccgcccgtggagctcgccgagcggcttcgcgagaacccgctccctctccctcagcacccctacaacggcggctactacttc

SEQ ID NO: 94893 - DNA, 228 bp, Zea mays
  Clone ID: MRT4577_186534C.1
cccattcgatagccacgcgtccgcggcttcatggaggacggggagtcggggcacaagcagggggacatgctgctggtggtgcacaagggcgcgcacgcggagcggatggacaacgaggcgtcgatccggcagcgcctggccgtggcgcgcggcgcctactacgccatcacgggcagcgcggagcggacatgcgcgcaggcggagcggatgaacagtgccggtgagccc

SEQ ID NO: 94894 - DNA, 264 bp, Zea mays
  Clone ID: MRT4577_186535C.1
ctgcgccgtccttcacctccgccgccgaatccgagactctgatctcgggttcaccgcagcgcacagatgcactccccgagctcccgatcccgattccgcgctactcgctctacgtacgcttcagtgcatggcaggatatggcacccgaggtgttctcagttatgatgctaagcactatgattctaaaatgcaggagctgctgagcactggtgagactgaggagttcttcacttcatatgatgaagtttttgaaagttttgatga

SEQ ID NO: 94895 - DNA, 186 bp, Zea mays
  Clone ID: MRT4577_186536C.1
taggactccgctgcccggcgccgcacactacgataaggatgttacaccagagctccgtgtacagaagacctatagcgctactacgccgctctcccgctcctcctccagcgaacgcgacagggagttcatgcctacgatgatcgacatgaacggagcgactgactaagtcgcttgcagtcgcagcaa

SEQ ID NO: 94896 - DNA, 345 bp, Zea mays
  Clone ID: MRT4577_186538C.1
aactagatacccgagaggatgggcgtgacattcaaaatgttctcctggacctagttgggcgtcgtactgtgccacaggtgtttgtcaatggccagcatgttggtggcgcggacgatacagtaaatgcactttcaaatggacagctcgagaaacttcttgggaagagtcagtcacaatgatggatcactggacaagcttgcactgtcaagaacacgtgagtatatgtatgggaggggtgttcttttctgtttagggctgacagaatgtgtgagcatggtagtgttgcgacaaccatctgtactgctggatttgtgtgatctcttcaattgcatataatttctactt

SEQ ID NO: 94897 - DNA, 800 bp, Zea mays
  Clone ID: MRT4577_186539C.1
gacctccattacaaccttcccttctctggaaaattgagccacttgatagacaggcttaatgatgctcatctttgaatattaccaaagccagaaatgaaatctcttgcccaatacagcaaagaagcttcaatatttgggtgaccacaagagccaattccatgaactgccccagaagatgcttcaatattggtcctccatccatttcttgcaaaaatctccgtgaccaccacttctacagatcgacataccgcaaggacctcttggtgatcttctcagaagtgcatatatacctttgaaggatctgtcaccaattttgctagagtaggagagcagatctgatgcctccaattatggattcactacagcaagaggctcagaagatggatccacatgtacccacataaggggatgataaacatccatccccacggcaatagggttagataagctgaagcatacgtctgctgaagaaggcgctgtcactgaagtaaaccaagagcaacaatgcctgcatggaaccatcactatagtcatgattccagtagaaaccataggacctagttggctacggccctattctggtgacttatctatctacaaagctggccatcaggatgccaactctcctccccctcctgaaactgcagtcacctgagaaccacccctgtagccctgtgttgttgaagagacagtttctatttttactttattctgcgcatatttttttatgtttcaaaatccattcccattgaaaagaatatacaattgtgatcctgacgttctaagtaatccttgttctg

SEQ ID NO: 94898 - DNA, 299 bp, Zea mays
  Clone ID: MRT4577_18653C.1
ggggtctggggggaaaaaaaaaattttataaaaacccattccttgccaacaaggggttggttcctttaaacgggtttttttgggcatggccctggggggggggggggatactttttcagggggggtttggaacatgggggggggggggggcccaaacaacgcggaaaaaatttcccgggggggcccaccccaaaattggccaggggggacatggggacaaacccacgggggaacactagggcactttgggggggaactttatgtaacttaagggccttttaaaaggttaaccgctacca

SEQ ID NO: 94899 - DNA, 425 bp, Zea mays
  Clone ID: MRT4577_186540C.1
ccaattagcaaaattacaaagtggaaaaacaaaaataaaaaaaacaattttcaaaaattggaaacaacatatttccggggggggggacaaaaaatacttcgaattaggaagaggcccaatccttaagttcaaaaaacaccattttaacaaattaaaaggctaaaaaaaaaagctttaaccaaggaaaacaattcctgtgaaaaccaccacaaaaaaaaattaaaaagcttcaaaaaaaaaaatttagataaaaactagcgtcccttaaaaacagccgccccaataattagccgaagcctttaaaaaaaacccggtgtaaaacctcccccagtgtcccaccccggaatctgacatagaaattagctttataccggaaccccttacgggcaaaccccccaaattggacactcatactattgccccaa

SEQ ID NO: 94900 - DNA, 1215 bp, Zea mays
  Clone ID: MRT4577_186541C.1
cggcccggccgggggtcgtacactcgtactccggcccggcccggtccggcctaaacacgcattcttccttctcccaacgacggaagaaacttcctgcctggatatccatccatccaaccgctcctccctcgtccggcaggcgacgactcgattccttcctcccttcctcctcctcgtctctttcatcggcgactccgatcttctctgccgtcgccgccgccgccaagagatcgacccgaccccgagcgcccgacccgaccccccaatccaaccaccaaccgccggcgcgcgcggaagattcagatttggcccctcgccggtaagggagaaagcgaggatgggtgcgtggatgtcgcgcgtgtggttcctcatgttcccagcgcgggagtacaagctcgtcgttgtggggctcgacaacgcggggaagaccaccacgctctacaagctccacctcggcgaggccgtcaccgccgcgcccaccatcggcagcaacgttgaggaggtcgtcttcaagaacctgcgcttcgaggtctgggatctaggagggcaagaaagcctgcgcacttcgtgggcgacgtactaccggggaacacacgccgtgatcgtggtgatcgacagcacggaccgcgcccggatcaacatcatcaaggacgagctgttccggctgctgcagcacgcggacctggagggcgcggtggtcctggtgttcgcgaataagcaggacctgaaggacgccatggcacccgcggagatcaccgatgccctctcgctccacagcataaaggaccacgactggcacatccaggcctcgtgtgccatcaccggcgatggcctctacgacggcctgggctggatcgcgcagaaagtcgccggcaaggcgaccgcgagctgacgtgcaggagagcagtggttgtgtgttcatgaacggattggatttgttgaagggtaggggtggtggcagggcgggtttgtttcttcctcggcgtcacgcccaatgcttatttatgtttttttaagaaaagtggcttgaaactttgtgtctgtattccaatcaatatgaatatatgaaaattgggaaatttgcatgccaaaaaaaaaaaaaaaaaaaaaaaaaaaaaaaaaaaaaaaaaaaaaaaaaaaaaaaaaaaaaaaaaaaaaaaaaaaaaaaaaaaaaaaaaaaaaaaaaaaaaaaaaaaaaaaaggggcgggcccttt

SEQ ID NO: 94901 - DNA, 725 bp, Zea mays
  Clone ID: MRT4577_186542C.1
tgggtccctcgggccggccggtagtcagagccctatctgatacgataaggatctgagccgttatcggagcacgagtctatcgatttgtggataacctgtagatcggatcgcgggtccttatcggtccgtggacatgaccctatataaggcgcctgctaggcagcgccaaacccatcgcctttgagatcatgcaccgggagagggcaaataagttttttgtgaagcgttctcacatgaccgctcgtgatcttgtcgtcgaccctgctgcttcgacgtcatcgaccctgctacttcgacgttgtcgaccatgctgcttccaccaacgtcgtctactagtatgtctgatcagtacacatcatctgatttgacctcatatttcagtttatctgtttggtacaggtgtgttgtatttatacaattatgctattaggtaacctattaggttacttgtagtggaacagacacctagactatttattgttggtcatgatttttattcgaaaattaatatgaaaatatctaatttctcaaaagcaattgtatgtattggtaactgtgcaatcaatacacaaggatagaggtctacctctatgtttatgtcttggttggacggatacaccaatatgtatggttgcaacaaacatgttctccttaatctctatgagtatatgactatatacaagactcatttgtggggagtgctcaatatctctactactctaaca

SEQ ID NO: 94902 - DNA, 272 bp, Zea mays
  Clone ID: MRT4577_186543C.1
acactctctccttttgtcctctttagaagccaccatggggctcagtgatggggagtggcagatggtgctgaacatctgggggaaagtggagggcgaccttgctggccatggacaggaagtcctcatcagtctatttaaggctcaccccgagaccctggaaaagttcgacaagttcaagaacctgaaatccgaggaagagatgaagagttcagaggacctgaagaagcacggctgcaccgtgctcacagccctgggtaccatcctgaagaaga

SEQ ID NO: 94903 - DNA, 396 bp, Zea mays
  Clone ID: MRT4577_186544C.1
gagcattgcaaggtgtgtaaataaacttttataaaagttcaaaatccgataggcaattgctattcattgaaaaaaatttaaaagggttctttttgatagggagttgctattcattgaaaagggtttataagggttcttttttggggggctttgtttttttggttatgggagtaccaaactaattggaggggggggacaattttccaaaaaaatggagcatagcgacaacaacgatgaaaccaatgcttatgatcaaaaaggggtttggggaaaatttgggggccgcaaccttaatggggtaaaaatggagcattgaacttggaccaactcctccaagaaaaaaaacggttgggggcctaacccttgccaaggtttaaaattccccccaaattcctt

SEQ ID NO: 94904 - DNA, 249 bp, Zea mays
  Clone ID: MRT4577_186545C.1
aggtaaacccgatcttgattccaacatcatcagcgcattcattaaagtgacgttccatactaatgctccgcacacgcctgccaaatatgaaacaggtgtatctacggtcttcagtgtcatgcgtatcttctcggagaccaatgatgctgctaatgcatacggtcatgagcataaggattaaccgcttgcgatgaatatgtgctcaacgtcgacggtggccgtagcacagtatgagatgtctctccgcac

SEQ ID NO: 94905 - DNA, 457 bp, Zea mays
  Clone ID: MRT4577_186546C.1
cttcccccctctccgatctcgacgcgcaccgatgcgggcgatgtcgtcggcggttagtggtatgctgcgggcacggctgctacgtgacctccttcctcaccgtcgtcatcctcggcgtcggcctcaacgcgaagcccgaccttacaatcgagacgtgggcgcaccagaaggcgctcgagcgcctccagcagcaggaactcgccgctgccgacacccaggccgagtgatccgcgcgtctcaggtcctctcgaactctcggctgcctctgatttggctccaataagatggccacaatgtgcggtcctgaatgttctggacttctggtattgatggaacacgagctgaacgctatgctgctgcttttctggtctgttttgaaatttgccccgtcgagatggggaatgtcctgaatattctgaaaattttgaaatgcttgaccgtcgtattatcatcttat

SEQ ID NO: 94906 - DNA, 341 bp, Zea mays
  Clone ID: MRT4577_186547C.1
gtggattggaagaggttttttcggtccatgggacacaagaaaaccaggaaagagcacatgcctaaaaaattaaaaagtttacacgctaacacaagccatcactatcattgctttttatgaacaaatctccgtattggttaaacctgaactcgatccaatcattagatattcatagtcctctaggcaaactcaagaccattcattttctatttgtgcacactcttaatgactaatactgttgccgattcccctacattaaccacagctgagataccttggggaggacactctgaaaacgtctgcaccaccatttgctcttgctcaatcatatttaccatacc

SEQ ID NO: 94907 - DNA, 900 bp, Zea mays
  Clone ID: MRT4577_186548C.1
cattggtttcctcgaggccggccggggagccccagcccattttcagcgcctccaggctccggccaactcgcagccagtctccacagcgcaacgaacctcgagtcctcgacaagcacccaaatcgacgaattcttcccccctctccgatctcgacgcgcaccgatgcgggcgatgtcgtcggcggttaatggtatgctgcgggcacggctgcgcggggcagcgcgcgttcgcggcggcggcggcgagggggccgggcggtggacgaccccaggtcacgaggagcgccccaaggggtacctcttcaaccggccgccgccgcctccgggggaatctcgcaagtgggaggattgggagctgccctgctacgtgacctccttcctcaccgtcgtcatcctcggcgtcggcctcaacgcgaagcccgaccttacaatcgagacgtgggcgcaccagaaggcgctcgagcgcctccagcagcaggagctcgccgctgccgacacccaggccgagtgatccgcgcgtctcaggtcctctcgaactctcggctgcctctgatttggttccaataagatggccacaatgtgcggtcctgaatgttctggacttctggtattgatggaacacgagctgaacactatgctgctgttttttctgttctgttttgaaatttgcccggtgatgatggcgaatgtcctgaatattctgaatattttgaaatgtttgactgttgtattatcatcttatccttccgttgtactaccgcatgagcacaatttaggattttacttgtttatcacttccgcaaataacactgtcgtgaaaagtataaaaaaaaaaaaaaaaaagcggccccccccccctctacaatatgggggggttcttttcttttcttttctttctggt

SEQ ID NO: 94908 - DNA, 407 bp, Zea mays
  Clone ID: MRT4577_186549C.1
gccggccggttcggaaccgcgtcccaccaacttccattccctaccgcccgcccaccccactccactccgctcctcccactcgagccatcatggccctcgcctcccgcggcggcgagctctcctccgatgacggcgaccgccctgttggctgccgtggcggctcccctgctcgcctactactgctgctacctcttctgagggtttccttctgctgctgctgccgtctaggctgagtgacctatttctatgtatgtgacgattcaagttaacttgtggagcgcggctgcgcgtgcgtttgtgcttgtgcagtcgccactgttgctgtgttcttgcgatactcttgtcacttgagaggtggtgttgtaaaaaaaaaaaaaaaacaaaaaaaaaaaaaaaaaaggccccta

SEQ ID NO: 94909 - DNA, 642 bp, Zea mays
  Clone ID: MRT4577_18654C.1
aaaaccaaaggaacccccccctatttttcccatgctggggaaacgaaaaccttttacaacatagggaaattttgtttttgggcccttacacccaatttatttccaaggaaccttggcccgagggacatttgtggggggcacattttttaacatgcatgacctttggaacccccaatttttaggcgcccactgaacacttttttggttttaaaaacccccttcccaaaaaaaatctttttaccccccaaactttgaaaggaaccggtcgaaggaacacagcgttggcagttaacagaaatgggggggcctttgttcataagttgggcaaaaaaacgtttttttttaaaaatcctgccaaaataactgttggacgaaaaattcaccattctttttttcacaaaccctcatgccctcaaatagtttttgctgtttcccaaaaaaaagggcttcacattggggggctacccccttaaaaggcaaatcctggtttgttaaccctgacaaccttccaacatgctgagatgtttccaaaactgaataaaaaagccgtttgacatcaaaaatgtttttacatggcgggatgttgcagagggaggttttactgacctgtaaaatgcttcagcgaaagtttctttttaaaaa

SEQ ID NO: 94910 - DNA, 298 bp, Zea mays
  Clone ID: MRT4577_186550C.1
tgcgcggatggacggtctagatttaccgaagcgagcggacggtgcagattcaccgaaggcagaaccaggggaggcagcctaccccttacagccttaatatgtagtaaagatatgcccctaataagctgggttttctatttgcaggtgaatggctcaaattacatggtagaaatggcttgggtaaaagatatttatggtgtgagcacagcagaagcaatggacctattggaacatttcctggcaatgaatccagataacgatggacgtgtgaaagcacatgatttttgggctcagtttg

SEQ ID NO: 94911 - DNA, 2328 bp, Zea mays
  unsure (1)..(2328): unsure at all n locations
  Clone ID: MRT4577_186551C.1
ggacgcgagcggccgcccgcgnactaggtctaatctctgtgtaacgactaacgacttgcgcctttatcaaccgaaggtaactctatgcctcactatcagtttcactgtcttttcttttacgtccgtctaatctctgtgtaacgacatgcgcctttattacactctatgatttttaggaacaatcggcacatattagtacttagattatgctctatgaatttttgcagtgttaggcctgtttagaactttagatcttcaagtatgaacagaacaaatatatgctagaactgtacaataacttcaactgggaaaaaacaagatctgaattttttagctgtccgttttccaagaataaagtttttgtttttttaaaaaaaatggaagaaaaaacagaattcttagctgtcacaagagtataaatgtgtttgtctttcttctgctagaaaagaagctgatgagctgtaacacgctcaaaacatctccacatgcatgtgtggtgttccgctcctttggcataactatgggtccgcaacatttttgtttgccagcaaagaatcctcagctgttatttccaatcacctttgtatctttgcgagtgattgcatggcatgtgcgctacaaaacaatatagacagaattatatataggagtgaagagaagaaacctgtatgctagccaacggttcggtttctttaaccatcgcctgattcagttgagctgtagaaagcgatagagtgtggtcagctgatcgttctgttgaagtttgaaatagatctaggcatgatcggtacgaccgagtgtgttagaggggtgaccctgcagctcatctgaatcagacgattttattaccttcagcagaggagtgactgagagcaaggctaatagaagaattaactaaaaggcttcgtactcttgccatagccaataataatacccgatacatatagtgagcttattcttctatgactcttaagttagagagagtcatcatttagattgacagaaaaaaaagaaagagtcatctttaactcacgcaagcaagctctttctccccctagaattctagggagccataagcactcactttcttctctccctctatgttcccacctaggattttggtgacatagagctgtttgaagcctgcctagttagcctcgttatgatggcactattattattaggccatctcgagcatgtaaaatatattgaccagagtttaaagtagagagttgaatatagagtttgaaataaagagtgagatatgagatgggtaaggattctgttgttggagataacttgctactctaggtttagcattccaacatgaaacatttcatcgcctgtccttcagtactagaccatgggtcgccgtgcaaaagtatcattacttaattcctggagacctgcagccgtttctctggcacagttgtcacgggcacagtctgactggcaagtcacgggagtactcggccagcattttttttcttctctttaatgcctgtggaataatgtatgttgactacactacacacctttggccaaactagtggatggactggagtggttttgttcgttcgtggaaccatcctgaaatgggcgttcagtaatacagttgctgttatgatccaactgtaataaagctgtggtgggttctgagtttctgaccaccaagctgttgtcattcgcagcacctgcaccgtccgccgccggggggtcatcgagcggtggcgcggcggcatcttcaccgcgcgccgcggcggcgagctctcctccgatgacggcgaccgccctgttggctgccgtggcggctcccctgctcgcctactactgctgctacctcttctgagggtttccttctgctgctgctgccgtctaggctgagtgacctatttctatgtatgtgacgattcaagttaacttgtggagcgcggctgcgcgtgcgtttgtgcttgtgcagtcgccactgttgctgtgttcttgcgatactcttgtcacttgagaggtggtgttgtatggactggtttagctggctcccccgtgcttccatcgacccgcttcgcgcttcatgtttactacttgcgatactgttgttacttgtgattgatgatgataaaagccacggcctgtgttactactgctgtaacaagtccgacagaagaaccatccaatgcaggcccacgaaggggatccaggctgcgccggcctagtactcggcttagggagtttgtgtgagttgtaattgagatataagggaatattgattagggaaaaggcatcagacttgtaataagaattctggacagactgtcgctctgcctatctact

SEQ ID NO: 94912 - DNA, 446 bp, Zea mays
  Clone ID: MRT4577_186552C.1
gttgtctctttttttttttttgatcatgggtctttgtgatagctttaaagatctatgggatggcaaaactcctattatgactacgctaaaactgtgcaattaataacccttttctttttcagcctagaaaacaaaatgtaaaaatctaaactttttatattgtcggttgatcggtgtgcaggggggttgatttaaacaaacactgctttggtttcataactttacttggcgggccattcacccttgtgaaaggagatgattctcatctggtcaggcggttggcttatacaatcgtacaaaaattaggctcgacgaaactctcaactcgttcaagtcaaaacaggacatgctatgcttgtgtctgacgactggttccaatcaaaacgtgagctccagcctgaccttctgtccctcctggtcctccaccaacacctggctctggctga

SEQ ID NO: 94913 - DNA, 1350 bp, Zea mays
  unsure (1)..(1350): unsure at all n locations
  Clone ID: MRT4577_186553C.1
cctcgaggccggccgggaaagactcctgattccagttcatgccaacctcgccgccgtggaccgttgccatctgtgcatctggattccataaaggcacgcgtgccctgacctctccacaccccgcgtcccaccaacttccattccctaccgcccgcccaccccactccactccgctcctcccactcgagccatcatggccctcgcctcccgcgccgccgcagccgccgtggcgtgcgtcctcctggcgctcgccgcctccgccgcgggggcgggctccaactcccctgcaccggcgccggcggtggactgtatctcccaggccgccagcctgatcgactgcatcgactacgtccagaaggggagcagcgcgcgccgtccgtccgctgcctgctgcggcgaggtcaagaccgcagtggccagccccgtcatcgtgggctgcctctgctccctcgccggctccaactccagtaacctgggctttcccatcgacatgaagcgcgtgctggcgctccccggcgcgtgcggcgcgtccaacgccgccttcagcaagtgcaacatttccgcgctttccccaaccgaagcacctgcaccgtccgccgccggggggtcatcgagcggtggcgcggcggcatcttcaccgcgcgccgcggcggcgagctctcctccgatgacggcgaccgccctgttggctgccgtggcggctcccctgctcgcctactactgctgctacctcttctgagggtttccttctgctgctgctgccgtctaggctgagtgacctatttctatgtatgtgacgattcaagttaacttgtggagcgcggctgcgcgtgcgtttgtgcttgtgcagtcgccactgttgctgtgttcttgcgatactcttgtcacttgagaggtggtgttgtatggactggtttagctggctcccccgtgcttccatcgacccgcttcgcgcttcatgtttactacttgcgatactgttgttacttgtgattgatgatgataaaagccacggcctgtgttactactgctgtaacaagtccgacagaagaaccatccaatgcaggcccacgaaggggatccaggctgcgccggcctagtactcggcttagggagtttgtgtgagttgtaattgagatataagggaatattgattagggaaaaggcatcagacttgtaataagaattctggacagactgtcgctctgcctatctaaaaaaaaaaaaaaaaaaaaaaaaaaaaaaacggtggcggggaggcgtcggtaccgggcgccgaagcgaagaaggaagagagaatatactanagatgaaaggaaaaaagaaaatgaaagaatgaagaaggaggat

SEQ ID NO: 94914 - DNA, 1088 bp, Zea mays
  Clone ID: MRT4577_186554C.1
cggacgccgtgggtgtttatagatgagtttgaaatagagaatacaatagagagtttaaaacagagagagataggaggtggggtacggattctgttgttggagatagcctttttactctaggtttagcattccaacatggaacatttcatcgcctgtcctttaatctagcattactagaccatggatcgccgtgcaaaagtatcattacttaattcctggagacctgcagtcgtttctctggcacagttgtcacgggcacagtctgactggcaagtcacgggagcactcggccagcattttttttcttctctttaatgcctgtggaataatgtatgttgactacactactacacacctttggccaaactagtggatggactggagtggttttgttcgttcgtggaaccatcctgaaatgggccctagatattttggttcagttgcaatgtccggtgcttgctccctccctccagtagtgggggaagtcatcgcgtggacggacgcatgcggcacgcctaggaaactgacaaccctcgccttgttcctttgttattacgtagtggcagctcatctctgaagcaggaaacaaacaagatggggggcggggggtagtggcgttcagtaatacagttgctgttatgatccaactgtaataaagctgtggtgggttctgagtttctgaccaccaagctgttgtcattcgcagcacctgcaccgtccgccgccggggggtcatcgagcggtggcgcggcggcatcttcaccgcgcgccgcggcggcgagctctcctccgatgacggcgaccgccctgttggctgccgtggcggctcccctgctcgcctactactgctgctacctcttctgagggtttccttctgctgctgctgccgtctaggctgagtgacctatttctatgtatgtgacgattcaagttaacttgtggagcgcggctgcgcgtgcgtttgtgcttgtgcagtcgccactgttgctgtgttcttgcgatactcttgtcacttgagaggtggtgttgtatggactggtttagctggaaaaaaaaaaaaaaaaaaaaaaaaaacccccccacccacc

SEQ ID NO: 94915 - DNA, 329 bp, Zea mays
  unsure (1)..(329): unsure at all n locations
  Clone ID: MRT4577_186555C.1
ataaatcctgtgcgcgagcccnggcggagcggccgtcggggcaaatctttgtggtcgcagcggatattcaaatgagaaccttgcaagccggaaaggggaaaggctccctgtgtacagcacttgcacattggttagacgatccttatggaccggggtaacccggcaggaagggcgatcacacaagccacccgcaaaggcatccaggttatatttccctttacaaaacacaaaggtattctggggccttttgtcactcttattttcccgcaggttccagggcaatgaacaaccattttttcacccagagaaaaatcggcttgaaataagca

SEQ ID NO: 94916 - DNA, 241 bp, Zea mays
  unsure (1)..(241): unsure at all n locations
  Clone ID: MRT4577_186556C.1
aaaacaccnccacagacccatccacctttaactacactacaatcaacttttgcctaatcgaccaaacctacccttcctatcatctactcaaaaaccattacaaatacctcactcattatcagctcttctaccaccagattcataagataaacactaagtctaacaataatataccaatacaagtgatctctttctaacccaacacaatataatttaccacaacactttctaacaccactat

SEQ ID NO: 94917 - DNA, 174 bp, Zea mays
  Clone ID: MRT4577_186557C.1
tcccggcgaaatccttcccccaagacacccctcctccggctgcctctgccgcgcctccgctccggaaggtgtagtacatgatggcgactgggtaaattttctctaaaactacccaagaactattctacaactacgagctacttcccatccaacgcatgcttgattttgactatc

SEQ ID NO: 94918 - DNA, 3367 bp, Zea mays
  unsure (1)..(3367): unsure at all n locations
  Clone ID: MRT4577_186558C.1
cgatttctattctcagcattatattggtgatatctcagagttggatgcattggaaggctttgctaaaggttttcctggtttttatcatagatctgtgcataagatttgtcttgattttttgtttgtttcagagaaagcagtattctaacatggcatgttcctaccttgttttgttatttgtctgtgttgtctcctgcatgttctacacaaaatctttgtacccacaatctttgtattctaacatcgataagtgcccaaaatctttgtatgcttctaaacagacctttggtattgttatacacattggattcaataccacttctgttgtcccggtaagtaattgtccatatttatattattaagggttttcaattatttacagtgtgttcccatgtgtttggtgaacattagccatgctgtttggcatatacatctttcagctgcacttatcatgtcatttacatttcaccattttgaagtggatctgaagtcacattgntatttttttgtattgatctactactaccttgtcaagacgagccgcgctccgtcgcatccacctcgtctcgtcacacactccactcgaacgcactacttgatcggccaaagccaaacgaactgggctccctcccctccacttcctctccccatggcgcagcagctcccctgcgtctcgtcgccgcgcccgctgctcgccgtgcccgcgggccggtggcgcgccggcgtgcggggccggcccaatgtggcgggactggggcgggggcggctgtctctccacgccgccgccgcgcggcccgtggccgaggcggtgcaggcggaggaggacgacgacgacgacgacgaggaggtggccgaggagaggttcgcgctgggcggcgcgtgccgggtgctcgcgggaatgcccgcgccgctcggcgccaccgcgctccgcggcggtgtcaacttcgccgtctactccagcggtgcctccgccgcgtcgctgtgcctcttcgctcccggcgacctcaaggcggatagggtgaccgaggaggtgcccctcgatcccctgctcaaccgaacgggaaacgtgtggcacgtgttcatccacggggaccagctgcacggcatgctctacggatacaggttcgatggcgtgttcgcccctgagcgcggacagtactacgatgtgtccaacgttgtggtggatccatacgctaaggcagtggtaagccgaggtgaatatggtgtgcctgcgcctggtggtagttgttggcctcaaatggctggtatgatccctcttccctataataagtttgattggcaaggtgacctaccccttgggtaccatcagaaggaccttgtcatatatgaaatgcatttgcgtggattcacaaagcacaactcaagcaagacaaaacacccaggaacttacattggtgctgtgtcaaagcttgaccatctaaaggaacttggagtgaactgtatagagctaatgccctgccatgagttcaatgagctagagtacttcagctcctcttcgaagatgaacttctggggatattccacaataaattttttctcaccaatggcaagatattcttcaagtggcataagagactctggatgtggtgccataaatgaatttaaagcttttgtaagggaggcccacaaacggggaattgaggtgatcatggatgttgtcttcaatcatacagctgaaggtaatgagaaaggcccaatattatcctttagggggatagataatagtacatactacatgcttgcacctaagggagagttttataattattctggttgtggaaataccttcaattgtaatcatcctgtagtccgtgaatttatagtggattgcttgagatactgggtaacagaaatgcatgttgatggttttcgttttgaccttgcatctatactgaccagaggatgcagtctatgggatccagttaatgtgtatggaagtccaatggaaggtgacatgattacgacagggacacctcttgttgccccaccacttattgacatgattagcaatgacccaattcttggaaatgtcaagctcattgctgaagcatgggatgcaggaggtctctatcaagttggtcagtttcctcactggaacgtttggtcagagtggaatggaaagtatcgcgataccgtgcgtcagttcatcaaaggcacagatggatttgctggtgcttttgctgaatgcctatgtggaagtccacagttataccaggcaggggggaggaagccttggcacagtatcaactttgtatgtgcacacgatggatttacactggctgatttggtcacatacaatagcaagtacaacttgtcaaatggtgaggacaacagagatggggaaaatcataatcttagctggaattgtggggaggaaggagaatttgcaagtctgtcagtccgaagattaaggaagaggcaaatgcgcaatttctttgtttgtcttatggtttctcagggagttccaatgttctacatgggcgatgaatatggtcacacaaagggagggaacaacaatacgtactgccatgaccattatgtcaattatttccgttgggataagaaggaagaacaatcctctgatttgtacagattctgccgtctcatgaccaaattccgcaaagaatgtgaatctcttggccttgaggacttcccgacttcagaacggttgaaatggcacggtcatcagcccgggaagcctgactggtcagaggcaagccgattcgttgccttcaccatgaaggacgaaaccaaaggcgagatctacgtggccttcaacaccagtcaccttccggtggttgttgggcttccagagcgctctgggttccgatgggagccggtggtggacaccggcaaggaggcaccatatgacttcctcaccgatggcctgccagatcgtgctgtcaccgtctaccagttctctcatttcctcaactccaatctctatcctatgctcagctactcctccatcatccttgtattgcgccctgatgtctgaaagaagcagatacaatagagtatactatagcggttgttctctaggctgtagcatgcagtggaaactggaaaatgttggggttgctctgttgtcggtagtttacatgcgcatgtcggtatgtgtagctaaagctggtggatctcagttctcagatcggactcgagacggggaaaaccattgcccagttggctggttctctgaagttttgtttggtgtaaagaaatggtggtccatcatctactcaaatttttttctcttttttaatgaaataagttgactcccttttgtagatctaccaaacacaaacacaactaagcaatgtagcacatactattggctcgtccctcc

SEQ ID NO: 94919 - DNA, 1201 bp, Zea mays
  Clone ID: MRT4577_186559C.1
tcggggatgcaggaggtctctatcaagttggtcagtttcctcactggaacgtttggtcagagtggaatggaaaggccaacacttaggagtatgtttcaaacaatagcctcactgacaacattagtatcgcgataccgtgcgtcagttcatcaaaggcacagatggatttgctggtgcttttgctgaatgcctatgtggaagtccacagttataccaggcaggggggaggaagccttggcacagtatcaactttgtatgtgcacacgatggatttacactggctgatttggtcacatacaatagcaagtacaacttgtcaaatggtgaggacaacagagatggggaaaatcataatcttagctggaattgtggggaggaaggagaatttgcaagtctgtcagtccgaagattaaggaagaggcaaatgcgcaatttctttgtttgtcttatggtttctcagggagttccaatgttctacatgggcgatgaatatggtcacacaaagggagggaacaacaatacgtactgccatgaccattatgtcaattatttccgttgggataagaaggaagaacaatcctctgatttgtacagattctgccgtctcatgaccgaattccgcaaagaatgtgaatctcttggccttgaggacttcccgacttcagaacggttgaaatggcacggtcatcagcccgggaagcctgactggtcagaggcaagccgattcgttgccttcaccatgaaggacgaaaccaaaggcgagatctacgtggccttcaacaccagtcaccttccggtggttgttgggcttccagagcgctctgggttccgatgggagccggtggtggacaccggcaaggaggcaccatatgacttcctcaccgatggcctgccagatcgtgctgtcaccgtctaccagttctctcatttcctcaactccaatctctatcctatgctcagctactcctccatcatccttgtattgcgccctgatgtctgaaagaagcagatacaatagagtatactatagcggttgttctctaggctgtagcatgcagtggaaactggaaaatgttggggttgctctgttgtcggtagtttacatgcgcatgtcggtatgtgtagctaaagctggtggatctcagttctcagatcggactcgagacggggaaaaccattgcccagttggctggttctctga

SEQ ID NO: 94920 - DNA, 263 bp, Zea mays
  Clone ID: MRT4577_18655C.1
agttatgataaacaattgtgggcgacaagcacgcaacgcttggcacatgggagaaagccccacgtttgaaagatggcgtacaccggcgcccacgcggcaagaaagaacacgttgagacgttcgatcacagggtcgacatattgggcagaccacagcactgatggctgcgcctgtccagcaggggggccagggggttgggaaacatcagggcccatgacatcgggaggctggggcatttaactaactggggttattttacagcc

SEQ ID NO: 94921 - DNA, 544 bp, Zea mays
  Clone ID: MRT4577_186560C.1
cggacgcgtgggattccgcaaggaatgtgaatctcttggccttgaggacgtcccgacttcagaacggttgcgatagcacgatcatcagcccgggaagcctgactggtcagaggcaagccgattcgtcgccttcaccatgaaggacgaaaccaaaggcgagatctacgtggccttcaacaccagtcacctgtcggtggtcgtcgggcttctagagcgctctgggttccgatgggagccggtggtggacaccggcaaggaggcaccatatgacttcctcaccgatggcctgccagatcgtcctgtcaccgtctaccagttctctcatttccttaactccaatctctatcctatgctcagctactcctccatcatccttgtattgcgccctgatgtctgaaagaaacggatacaatagagtatattggagtcgtagtattatattttctttgacttccttttgtagatctgccaaacacaaacacaactaagcaatgtagcacatactattggcacggcccttcactcatttacattctaaatttta

SEQ ID NO: 94922 - DNA, 287 bp, Zea mays
  Clone ID: MRT4577_186562C.1
tcggcaaggcttgtctgctgggggcatatgataaccagtcctccgtgagagaaagaagccatggcggccgcactctgagggctcagaagatcgtcaagagatgtccatcctgtgcaactgacatcagcgacttcctagcggatccacagatcaaccgagacataatggatgtgattgagtcactgcaacggaaaggcgacaccaccaccaaggacgacgctgcttcatatggatatggggctgacaaggccgaggaattccgtggtggtgacctgcaaggaggaacg

SEQ ID NO: 94923 - DNA, 400 bp, Zea mays
  Clone ID: MRT4577_186563C.1
gatatttagactatttgcaactctctgctctatatcacactatacaaccacgtgatttagattctaccctctacttttctccttcccgcagcggttcccccaaaattcacccatttaccctactacaacgataattttattattttctatacatttgcatcatctattatcatttttttcctcgactaacaaacactagcgtgcgtggatagcgaggcaagaggttgtataaggttgtctgcacggtttgccgcgcgagctccacctccccttgcatgccaattgtagtagaaccccacgcgtgcatcgcttgccgctacgtgacccccgagcagaccgtttctctctccttcctttcctggcgtgtcactgttcactagcgctaccactgtatggcact

SEQ ID NO: 94924 - DNA, 132 bp, Zea mays
  Clone ID: MRT4577_186564C.1
cagacgtgagcgagtacgcatgggcgagacgcgtggggctcgggcacgtactggtgagaagctttgaggttctagccgtacaaggaactcatcgccctagtcggcgagtgacggtacacgacggtcgtcacg

SEQ ID NO: 94925 - DNA, 891 bp, Zea mays
  Clone ID: MRT4577_186565C.1
gcgctgtccaccaagggccacgaggcgccacccgagcgcaaaaagaggaagacgccgccgcccgagtggacgggcgccaaggcctcggatgccacagagccgtcatccaagaagaagctcgtgctattcgggcgcgcgtgccgccccgacgacgaggctcgcgtcccagagaccctcgccgcgccctgctgcgccggcggcggcgagcaatctagcaagggcgccgcccaagtgaagaacgccgggcatcaatccatcaatgacgcgctggggcacaaggccaagactttagatgagatgcgcgaattgtatcctcacctcgtcgatgagtcgatggccctccttgacccggcggtgctggagagggtgctaccccgcattgatgacaacgaggcccaggcgttggacaagaagatcaagagggcgaggaggcagctcaccaaggccatcagggaatcggcaatgatgaaaaacatggaaacatctgttgtatttctttgtgaggctactaggcttcaaatggaaaagccaagaatggataaacaggatggtctggatatatgtgctcaagaacgattggcacgagtggaacgtgaaatagtggaactgagacagattgtgatagattctcactatcaggcaacgatacaaagcaatctactccatgataattcatcattgaagggtgtaagatgtaaatctgaagagagtcaccctcaactggctgtagctgaaaatcagattccacacaaaatactacaaatagaagatcgatgtgccatatggcttcccccatgaaaagaatgaggaggttacatctaagtataaataatgatggtgtcgttcccccaagaaaccacatgataatctgacactgcaagggttgataaa

SEQ ID NO: 94926 - DNA, 176 bp, Zea mays
  Clone ID: MRT4577_186566C.1
gcagagcgtcttaattattttttttgttggaaaaaaaaggcaacacagttttttttaaggtattattaattgatatggatctgaggcagcacacggggacacacctagcgtactttatgacaaaaaacagggccgaagctggttatgaaaactagtggctcttacatggtatgtta

SEQ ID NO: 94927 - DNA, 408 bp, Zea mays
  Clone ID: MRT4577_186567C.1
caaaggttaaaaccaattttaatttggaacagatggggtcctttttttcttttcatttcaattgttcattcaggtcattgcttattttttccctgccacccatggtgatgcgtgacacatttttactcaatcatcgccgctaaatgactcaacttgcttgcttgccagcggtttttctacaacacattttttttttagtgggggacaccccccgcagcaacgtaggggcattgagtcggttttttcaggccccacattgccctcagttgtttggcttttttggccgccaacagccccccgacctggccgtttttcggtttttttttcaggatggactggaggaccaaacccaatatcgcctggtaccggtgctgcggttccacctgcctgagctgttggcaacacttt

SEQ ID NO: 94928 - DNA, 188 bp, Zea mays
  Clone ID: MRT4577_186568C.1
cgttaacacgtcatgttaatatcaatcagtttccctacacaaaaaagaaccggaaaaaaaaaattctataaaaccccaaaaggtcttcaccataaattactcccctttttccatcccattcacgcgcctgtttaagtatcctataatatcacttcaatgccattcacttgtctaatttttacaacggc

SEQ ID NO: 94929 - DNA, 782 bp, Zea mays
  Clone ID: MRT4577_186569C.1
actcggcggccaatctacagctgaccggattaacaataacagtcgcttgtttctcaagcaagcaagcacgatctcggcaaatcccacggacagaggacctttcgagagatctcccaaaatcatgtgtaaacccaggaaaaagtagcaagaactcggtacacgcacacggaacgcaaccagcgggcagcctagcgcaagagataaacgaaccccgcgtccgcgtgcatcacgactgacgtgtagcgcacccgagccacgagggcgtgcgcgtttctcccaaattccccagcccaagctaaaaaacagagcagacgccagacggcagacgggcgccgcgagtcagagcccttctagaaggtcgcctcgctacccggttcccctatataaacgccgctcccatctcgctaaccgactagcagttgctccccttttccctccccacgccgaacgcacccgatcgcaaacaaagcgagcagcagaaacatgcgagacatgccggttgtccgccgccaggaacccaccgtcgtcaggacggaggacgacgtggtttccggcggtgaggactcggacggcgagttcgagttcccctccgtgagccgggagtccgcggcgggcgttggcggcgccgcgtctgccgacgagctcttcgcgggcggccacgcccgggcgttctacccggtgtttggccgagtgctggacgaggccgcagcgccggcaccgacggcgccactagggcggctgttccagctggagcaggcgcggtactcgtccgtcgcgtccac

SEQ ID NO: 94930 - DNA, 174 bp, Zea mays
  Clone ID: MRT4577_18656C.1
cctttcatcttttttctttttttgttacggcaaaacaccttttagagatacaagaatgcgaattctattccatggtctggatgaactagggatgttacaagggcaattatctacatggctgctctacaacctaaatctaaaatgccaatggatttctatacccggaatcataag

SEQ ID NO: 94931 - DNA, 322 bp, Zea mays
  Clone ID: MRT4577_186570C.1
ggccgcttttttttttttttttttctagggaagtcttgtacaactacccgataaaataggaggaaagatcaacacgcaaggacatgaaacgtctatagaggggacacaagaatgaccaaattggggggacacctcacaacactcaatggaatggacaatacgagggccttactttaaaaaaacccacgcggaagcatcctgctgtagcagcagggcccgggaactaaaatgagccagccaagaaacgatacaccagcaggagcttacaatgacgacgcatcttaggctgcagcagccacatgcacctgatcggcggatcacg

SEQ ID NO: 94932 - DNA, 628 bp, Zea mays
  Clone ID: MRT4577_186571C.1
cggctcgagactgacccttactccttcgctcgcgccggcaccgacgacgccgctacgccccgcaccgggcggtatttagtgtgcccaagatgacgaagcgcactaacaaggcagcaattgatgactaatatggaaccagccatggtgctagccttgcgtaagcaaatcaagaacatggagcactctgagcattacagtactttcgcgagttctgcgggaagatcgttgtgaagaggaaagcagtgggaatccgggggtgcaaggactgccacaaggagaaggctggtggcgcttacaccatgaacactgatagtgcccgcaccgtcaggagcacgatccgtcgcctgagggagcaaactgaagcatgatataacgacttgtatattgattgaggatttgctgctgctgcttttgtcatgcatgtggtgggggcctatatgtagaggaaatgtggcactactgtactggctgatgatgccgagacaaagctgcttatattcggcttatgcatctatgatctcaaagtagacttgatgagatatgccctcaagtacccatcttaatctcacacatgatatttgatcctctgccatcatgtgcgtctcgtcagattgaaaaaaaagcggcc

SEQ ID NO: 94933 - DNA, 259 bp, Zea mays
  Clone ID: MRT4577_186572C.1
atggcttctgaggcccagaggagcaggtgggatgggagcagcccctggggctggtgtcccgaagatgaaatgaagggggctgcctatctcagttggcgggaggtgttagaagtggatgtgcaagaccagccactggaggtagctctctggagtcaaagagaggcctgcttttctaccagacatgggagcagcatgtaggatacaagggcctacccagagaccagagagagtcagcctagtccttgcagcctcaggaagt

SEQ ID NO: 94934 - DNA, 347 bp, Zea mays
  Clone ID: MRT4577_186573C.1
gaagccaggcccgcgttccaccgcagcggggccacgcccaccgacgcgcgcgcctggttgtgcggcgccaggtactcattcgccgtcacgttgctgccgctgccggtgccaccctgctgcgccttggtcaccgagcccgcgccgtccgggatgaggacgcgcgcgccgagggtcggagccggcgcggagcaaaacgcgaggagggtggcgaggagcaagcacaccaagatcatgggcgctgtgagcaagaggaggtggaggtggctgcacgagtacgccattaagatctggagtcggtgatctgagctaatggcttatcgaatgatcatctactgcgtgccagtgca

SEQ ID NO: 94935 - DNA, 242 bp, Zea mays
  Clone ID: MRT4577_186574C.1
acaccagggagacatacacagaggagagccgccgagacccccaggggcagggaagacagcgccgacagctgaagcaaggcagggcaagagaaaagcgacgtcgaggactacgacaagcgccaccgcgcgcacggggacgcctactacggcgcactgggaggccaggacgacgccaccgccgaggggacgagggccggcgccggcgccggcgccgaggaggacgagcaggagacgcgggaggc

SEQ ID NO: 94936 - DNA, 242 bp, Zea mays
  Clone ID: MRT4577_186575C.1
ttgggtaaataccccctcaaacaaggcgcgccatgggcacggtttttgacgggtgcttcattgtttaaaaaaaatacaagggggatcgcaaaaaggacgttgaccatttgtcgccactatttgaaaaccagccgtggtgttacatgcctgcatggtctgacttaacgagcccaggccattaagcacacagaaattaaaggtggggtggtcctctttacccgtggtcgtcggccttggggggg

SEQ ID NO: 94937 - DNA, 1191 bp, Zea mays
  Clone ID: MRT4577_186576C.1
ttttttttttttttttttccgtaatttcgtagccttaacggtttcctttctaccagtgcttgttaagatttggtactcccgaaaagtgcacagttacgtccacccataaaatcccaattcttttcggactttacttttcaacgggcagacgccgtacacaattcacctccgcgttccgttggccgcctgcctgcgcgggtcaaggacgcaacggcaacggcaacggcccgtaatgtcccgggaacgtgagaccctcagaaaccaccacaacctaggctacggcctgtgtgtcagtgtgtgctgtgtacatagacgttccctccatcgatacatgcgtgcactactagctgataatcggaagttgcagaaggccatggccagtcacgagcacaagatcgaccagccctactacgggcgcccgcccatccctcccgaagcaccggccgccggcgtccgcccgctggcgcgccgggacgcgtcgtacgcgctcctctgccacgccttccgcgcgctgacgctggcgctcatcgccgtcggcgtcgtggcgctggtgctctggctcgtctaccagcccagcagcctcaaggcgtacgtcgactcggcgcagctcacccgcttcgacctcgacaacagcggcacccagacccaccagctgcgctacaacctcaccgtgggcgtcagcatccgcaacccgaaccggaagcaggccgtgctgtataggcgcctggacgccgtggcgctctacggcggcgagcggctcgggtacgtggacttcccgcgggcgcggcaggagcgcaggagcacgatggaggtgcggcccagcttccgtggacaggccgccctcgccggcgccggcgcggcggcggcgctgttcggcagggagaagggcgaggggttcttcagcatcaacgtcaagctccacacgagggtgcggctgaaggtggccgtcgtggacagcgccgagtacaggccggacgtggactgctacgtgagggttcccgacccgggcaacgccacggcagtggcgctggggttcacgccgacgcagtgccatgtcgacgacttctcgtgacacagagagcggaaactgcgaggaataagtttgatgttacgtggacgaattgatctgtcatttcctgtttttatttaaatctaaagccaactaatcgtagctaggacgattgttctatt

SEQ ID NO: 94938 - DNA, 229 bp, Zea mays
  unsure (1)..(229): unsure at all n locations
  Clone ID: MRT4577_186577C.1
agagaanggaaagctggaacgtattcagagatacttcagtggaacatcatanttacacagtggctcatggatncattcttgcacaacnnggatctatgtnanggggctcnatgaggcatgtaatngcgccttctgccncncatagagtgtaccantangatgagaagtagcgtttcagttgtanttcgtgacacganngaaagncannantataaagcantnaccnntt

SEQ ID NO: 94939 - DNA, 376 bp, Zea mays
  Clone ID: MRT4577_186578C.1
agccagtacccagtagtgctccacttgctagtccactcccctctcagtcgaggcaatggcctccgcttccagtagcttccgcctcgctctgttcttggttctgctggcgtttgtcagcttggcacggcacgccacgggggaggccagcccgagcaggaggctcatggagctgtacaagccgccgcccagcgatctcctaaggtaccacgacggcgccgtgctgagcggcgacatccccgtctccgtcctctggtacggccgcttcacgcccgcgcagaaggccatcgtcaccgacttcctcctctccctctccgccgcgccgacgtcccctgcgccttccgtctcccagtggtggggcaccatcgaccggctctac

SEQ ID NO: 94940 - DNA, 374 bp, Zea mays
  Clone ID: MRT4577_186579C.1
cctatgcttacgattggcttattctccatctccgggtcgtgtccgggttcctgagggtctcgaggattcgggtcaccccgtgagcgaatcgagacctctaagtcggatagtagatactactgattttcaaggggtctggcctgagccactaacgaccacatctttatacatacttaacacctactgagagggcctcgaatccaatatcatcctagatcggaatacacaaacgtcccgctgcatgaggcttcgtcaccttatccacggaggaggcgatgcagaacgccatgaagggcatgaacggcaagtacactgtactgacgtaacatcaccgtcaacgaggcccagtcccgagatgcccgtgtaagcatctg

SEQ ID NO: 94941 - DNA, 399 bp, Zea mays
  Clone ID: MRT4577_18657C.1
gggccgggaattttttggtccgggttaaaaacccccaaaaaaaaaaaatgaccgtttttttttttaccctggaaggtttacccgaaacaagtttaccagtttggccaacggggaatttccttaccagggaccaacgttttttctttaaaccaaaaaattttaccccggggggggggaaaaaaaaaaattgcttttagggggccgaaaaaatttctgtgcaaaaaaaaaatccccagggggaacccttgaaccgggcagaaatttttacccccggggggccgggaaaccacattttaatttgattggaccggggccattttgggtaaccagataaaaaaccccctttggtttcgccactgggggggccaatgtggttcgggggaaggggaattcttttcg

SEQ ID NO: 94942 - DNA, 677 bp, Zea mays
  unsure (1)..(677): unsure at all n locations
  Clone ID: MRT4577_186580C.1
ctacttgcgatccnagctccgcgttggtaacacaaatggctatatcgccaagtacaccggctgcaccttaatagcctgctacaccaagtgaacaagcacagtcacacctggtaacacaaatgcatagatatacacgtcctccggctgcaacttaataacatgcgctaacacctaaacgtgcgcgcggtatactgcaaccactcaggatggcataaacacaagctaggctacactagaatttaccacaagcagcacggtaccagctcacaactgcatcttagcaacaaaagacaccactgagtgctttgctggcttcaacttagcataaacaactagtttcaccaccaacacaactgccgccggcggcagcacctatataaggtgccatcgcaactgagttcggtgcgcctacaaaagcaacagatacaacaaatgcattagaacaaattaaactggcaactgcagctacgtcagatcaatgttaatccacaattcaactatcatcacaaacatcatactaaccgccaacaacaccactgcaacatgcactgtacttgataccacactcatacactgactgtgcacaaccaactatacgttcaaaataccacataacaaatacaattgttaatcatcacggacatttcacaacatactacattcacactctatccaat

SEQ ID NO: 94943 - DNA, 573 bp, Zea mays
  Clone ID: MRT4577_186581C.1
tccgaaaaaaaaaaaaaaaaaaaaaaaaaaaaaaaaaaaaaaaaaaaaaaaaaaaaaaaaaaaaaaaaaaaaaaaaaaaaaaaaaaaaaaaaaaaaaaaaaaaaaaaaaaaaaaaaaaaaggggaagagggttttgggggtttaaggtttacagtcttgggttgggggggtggggagtttttttttgggggggggggggtcaatttattggggggtgggtttaaaattttgggcgggggaaaaggggggggtcccggattttattggttttggggcttttgcctttttccccttttggcttattgggaaaggggccaggagggtgggcctttcccatttttccaaaattttgatgggttatggggacacgggcttgtcggggtgttttaggcctttgggggggggggggtttggggtttcgggcccgtttaattgtcaagtttcttggggccttgcctttgggttttttgctttttttttttggcttggtccgcgggtttcccgggttgggctttaaagggggggttcggtttggggtttggtgtttgggttttagggtttctgggccccaaa

SEQ ID NO: 94944 - DNA, 471 bp, Zea mays
  Clone ID: MRT4577_186582C.1
ccgggccccctggcggttttttttttttttttttttttttttttttttttttttttttttttttttttttttttttttttttttgggaaaattcgacggaatcatagtttccaaggctgttacagaaaccagggattttttcaagattaaataaaacaacggggctgacaaaacaaaaattttttttagctggatgccacatactgggggcggcccgaaatcaacatgaactttgaaagttaacaacagctacgtttaggcttggaccaggctttcttttctttttgtacagcctccgccgccgaccgggcggcccccggccccggcctaagaaaccgagtaccgccggttccttgacaacaagctggaccacttggactccgggggtttccccgacgaccgggggctttgggagctcccggacgtgtccgacgaccccttgcccgcggggggggcctccccgggcagttt

SEQ ID NO: 94945 - DNA, 201 bp, Zea mays
  Clone ID: MRT4577_186583C.1
tttttagaacttgccccaagcggtctttctagcttacatacaccagcttgcaaccaaatagtgcacctatcgggccacctaacaacaaggtaccgacgatcaccagacatcgccgtgactgggcatacatgagaagctaccgcactcactcgcatagaaggacacccgacattcgccagctggcgttctggcgatcaggcc

SEQ ID NO: 94946 - DNA, 794 bp, Zea mays
  unsure (1)..(794): unsure at all n locations
  Clone ID: MRT4577_186584C.1
cctccaagcaaagtaatattgccactcctgataatgcagctgaagaaaggaatgaactggaaagtgatccagatccatatgcccagccagcagaacaggtagaattatccaaagacaatgagaacagccagcttgtgaagacagaagaaacctcagaccaaagcaattttgtcgtccttagaaggactacagaagattctgttgcaagagaaattgacccacctgttgccattaaacaagagcaaccagtggaagaaatcaagggtgtcgatgccactgaagctgaagaagactttcgtacaacccaagctgttgcaatagagaaactagcttcagtcaataaaatagcaacagtagaaccgacttatgatattcagcgaatggatgacttggaagcaacagaggaaaagaagcacgctgaagccattaatgaaggagatcaatccaatattgctgtttcagaggaacaaactccaacatataatggagaaacaccagaagatcatcatgtagaatcaaatgaaggaacgatggggaatgaaactgacaatatcattttggcacacggaatcaaagatgaaatacagaagtcagcagaactaaaggacggtccatgtgatttgtctgaaactgttttaacaactcggagaagtgagaacatgattgatgaagataatgttcaaacttatggcaatgatacagtagaggcttcaaacagtatccatcaagtcaaagaagagccagatgctggaaccgaacataattcaagccaaaatgntagtgaatgttgtgga

SEQ ID NO: 94947 - DNA, 237 bp, Zea mays
  Clone ID: MRT4577_186585C.1
tgggggtgttctgtaaacaaggggggtcctgaataagaccacaggacgtggaaagaaccgcctcttcaggagtacatgcaggcaactacttattgctcaatgctgaacagggtgcgactacacgacattttgcatgacacccctcgttctggtgagaccatacataagtcacatgcccatacgtgacggcgggagaaaaaaaataacaactgtcgaccacctttagacgaggagtgt

SEQ ID NO: 94948 - DNA, 600 bp, Zea mays
  Clone ID: MRT4577_186586C.1
ggccgcttttttttttttttttttggtgtttttttttttttttttttttttttttttttttttttttttttttttttttttttttttttttgggggaaaaacccaaaggaactatagggcaaggggaacaagctcttatcggggttatggcttggatcaaaaggggagcttgagcaaaaaatttgggccctggccggggaccaaaaaagagagctttgaaggccatagccaattcaaactggcgaggctgaaaagggaccttcacaaaaaacaaaaaccccggccaccggggaggccctggagttgatcttaaatacaaaccccgggaggagggaggggggcttcatagggcacagaagttaattttcatgcggggacaacaagggttcatataaactaactccaataaaagggctcccaccctccggttggcattcgaagctacaacaaacaaaacacaggggcatctttcgggaaaaacaaaaaaaaacttctcaaatataacaaagggaactaaaaatcccccaaaaggcatctagatacgtttttacggggggaaagaacccctttcgcaggggctttgaacggttgggggaaccc

SEQ ID NO: 94949 - DNA, 280 bp, Zea mays
  Clone ID: MRT4577_186587C.1
aaaacccaaccctggaaaatgcttttattaatgttccaacaaaaataagggcctccatttgggactggttagcttttacaggaaaacaaggggggaaactttggacttcctgacctaaattaaactttgggcctggaaaaaaaaaatcaaacccagttcctccctgggggggggaatatgattgattcctccacacggggggtttctggcttattccaacccgaggccctgttcaaaatttggaggtgcgcccaatcttgaaccactggggggggaaaaa

SEQ ID NO: 94950 - DNA, 246 bp, Zea mays
  Clone ID: MRT4577_186588C.1
cgtggagacggaggaaactaggagtaccgcacgaggagatgaccccagggagtgtttgcatggcgtacagaggaagcgccctataccattttctcgtgagtagcgtggtaacgatccacaggctcaccggaagcaagagcgtttacacgcatatgacccgaaagatcgaccagcagcacaagaacgtttagctgatccatgcatcagtagcctttctggataggaacaagagccatcagcacaacc

SEQ ID NO: 94951 - DNA, 147 bp, Zea mays
  unsure (1)..(147): unsure at all n locations
  Clone ID: MRT4577_186589C.1
ttccttggtcgagcacgcgtgcgcnacgcgtccgctgaaaagacctctcgtcatagatgagttatctgatgactcagatgacgaggggccgatggggttaatgagaaaggttgaggagaaaaaattgaaaggagttgatactccggt

SEQ ID NO: 94952 - DNA, 613 bp, Zea mays
  Clone ID: MRT4577_18658C.1
ctcgaggccggccgggagatcttcgcttcagagttcagaggaattcgttttctctgatcgggatctggaagggaagcgaatcgacatgggtttcttggtgacgacgctgatcttcgtagtgatcggaatcatcgcgtgcctctgcaccagaatttgctgcaacagaggaccttctaccaatctatttcaccttactttggtaattactgcaacaatttgctgctggatgatgtgggcgattgtatatctggcacaaatgaaaccactcattgtacctatactgaacgagggcgaataattctttaaacagatgtagctccttgtaagttagagaatatggttcgcagattggctgctggattgaatttgattttggctatcatgagttgttcagtattttttcagggtggagctgtatgtatttcttgttggataatggcattccagttggcatttctattgctacctggcattggtcgtgttacggatgttgtatttagcattcattcatttcatatgtccgtggataatgataccaaatatgtattttggtgaaaaataagttgatgaaagagaagtacgttttgtcaaaaaaaaaaaaaaaaaagcggcc

SEQ ID NO: 94953 - DNA, 1648 bp, Zea mays
  Clone ID: MRT4577_186590C.1
cggacgcgtgggcgactattaacatgctacgcagggttgagccatatgcaacatatggccatctcgcccgtcacccgtcaggacccggaccagacaccaatcaagggcgtctcggctcatcacaggcgctgcggcaaccagggcacgcggcacggaggtcgattggccgaaggttgggggaccggcggtcggcaccccagccgtggatcgagtgcggagggggagaagcgtctaccccatgtcccgcgcctgcgggcacgagccaacccatcatctcgcccgtcacccgtcaggacccggaccaaaccaatcagggcggctcgggcgcggcggcgacacagggcaaggaggccggacgttggggggaccggggctcgacgccagccgtggatcgcgtgcggagggggacaagcgtctgcctcatgtcccgcgacggcggggaatagggcgacggcgtcggcggcggggatcggttgcggcggcgtgacgaggcggctgcggcggcggctcgggagggaggcggcaccatgtctgcggtagtctgtggcaagaggtcctcctccatcttcgccgacgagctcctcccgccgtctccttcctcccctcactcctcccaccagccggcggccaagaggtcccgccgctccccctcgcaccgcggcggctccgacggactccgaccggaggcgctcgtcgactatctacttgccctcttccccgacatggatccacagttgcttgaaaaagctctggaagcatctggagatgacttggattctgcaataaaaagtttgaatttgctgcgcttagagtcagcagaagctatcttgtcatcgactggtttcaaacctgaaaattgtctgcaaacagcaattcagccttctcttgaaggtattcctaatggtggtgtggatacggctacagaacatccgcctagcgtagataattaccagacaagttataatggctctgaatgggttgagctattagtcacagagatgagaaatgcttctgacataaacgatgcacgggctcgtgcgtcaagagctctggaggctttggagaaaacgattgtagagcgtgcaggagctgaagctacacaaaacctgcataaggaaaacatgatgctcaaggagcagttgactgttgttctgcgagagaactccgtgctgaagcgggcagtcgccattcagcacgagcgccaaaaggagttcgacgagaggtctcacgaggtccagaacttgaagcaacttgttctgcagtaccaggagcaagttaggactctagagatgaacaactacgccctcacaatgcatctcaagcaggctcaacagaacagctccatacctgggcgtttcaaccctgatgttttctaagcgtagtagctgctgaacggtccgccccagattaataagctatgtatgaatatatcttgttctaccaactgctcctgagatggggatatccgataggtggattcaccgcccaagggtccagaattttcaagtcactatggttttgatttcgatatactccgtatttatttaaacgtgttgctttcatgcaattggctaaaaaaaaaaaaaaaaaaaaaaaaaaaaaaaaaaaaaaaaaaaaaaaagaaaaaaaaaaaaaaaaaaggccccta

SEQ ID NO: 94954 - DNA, 205 bp, Zea mays
  Clone ID: MRT4577_186591C.1
cacccagactctgaccctgcgacttctggttggggtacatggttttgaggatttgagctgatgcttgctctaccctagatattagatctgcggcgaacgtctcaatatttatggagttcttggtagtgagacttcttgtctttggaactaggaataacctatccattctgtataacacatagttcgaacgcggatgtgaaggaca

SEQ ID NO: 94955 - DNA, 398 bp, Zea mays
  unsure (1)..(398): unsure at all n locations
  Clone ID: MRT4577_186592C.1
gagttctttagccggcggccgccctcnntttngggggttttttttaattttaacccccttttccccccccangttgaaggccaaacctaattactattgaaagggcaagggctttggattcggacaagcattaccatattatcacacaaacactccacccttgggtatatatctggccaggaccgaaggtttaaaacaaaacctaacatgccctgatgcacccaaggaaataaaatcccatgccttattctgcaagcaaatgcaaggaccgggataaaccacgccttaactgaaaaaatggggtcaaggaaatgggcaggaggccaacgtggagataccaaaagggccgacgcccatactgaggtggatgaaaccgatctcaccccataccgtgcccc

SEQ ID NO: 94956 - DNA, 690 bp, Zea mays
  Clone ID: MRT4577_186593C.1
gcgattgggaccctcgaggccggccggggtccgaccgtgcgcgcacgagactcggtatttcgaacgtgcgggacgttgatcgctgacgcctcctgctcttcgccggcggcgtcgggttacttctcctacttgcgcgacatcggacaactaccccctcggcgacatgctgctcgggattcacgtcacgcatcgcatcgatgtcttctgctcacggcacatcgagaacagatgctatcccatgcggattatcggctctgatgcatatgccgctcgtcacatgccaccacgactacggactataaacattaatctcggattccagggatggctatatctgctccctctttgcaacagcaactatatcctgacgcgagaaaatgaatgatgcttctggcatcaaactgcatgttgtgaagccagcagagggattgaatcgaatagttggtgaacttccgtctgaacaccccttgtcgtgagacaagagcactgcgataacttttaagacatactccaactcaggaggatgctggggcattgctggggtgcacaataaccgcagtaagacaattattccgttgaactaccaatgtgcggtatacatgttgtaacattggcatcgcaggtacttgagaagaactttctccagcggtctgctactttaggtattgataagattcgcatgctgttgct

SEQ ID NO: 94957 - DNA, 610 bp, Zea mays
  Clone ID: MRT4577_186594C.1
tttttttttttttttttttttttttttttttttttttttttttttttttttttttttttttttttttttttggattgaaaccatcatggtttcttcttttaaaaaacccccctggtttttttttcgcccaaaaaaatttttggggaaaattttaagggggtttcgggcaaacggtaaacgggcccccccggggggggcatgacccctttgcaaaaaggaaatttttttcgggggtcctaggagtgggaaagggaaaaacacaaaaggttgaaacggcggggggacatttaaaggggcccccctcaacgagcttcaagggttgggttcccacccgggggggggattttttcaaggacctccttcttacccggaaaagggccatccggccaattgtttggggcccaaacgggctcccccacaaaaaaacccattgccttgagggagttgcccctacccaccgaaagggggggaaactttcttgcaggaaaaacaataatgccccctttttttcccgttccccggaccccctgatattttgggccccccacctaaaagaaccccttcccctaaagggaaaatcggattttttaatcaaaaggcaagggttctt

SEQ ID NO: 94958 - DNA, 208 bp, Zea mays
  Clone ID: MRT4577_186595C.1
ctcagtccctcacacactcactatacactgctctgctgcagcaagaaggaagaagctagcgcctccctagctctcgttgtcagcaatggccaccaccgccgcgtccagcctgctcaagtcgtccttcgcgggctcccggctgccttcggccacgcggaccacaaccccgtcgtccgtagccgtagccaccccgcacaccggcaggagc

SEQ ID NO: 94959 - DNA, 558 bp, Zea mays
  unsure (1)..(558): unsure at all n locations
  Clone ID: MRT4577_186596C.1
ggaacgggccagctcagatcacaatcacatcctgatcaagctggactacccgcacgaggtccgnagctgcttttacgggtactacaacgcgtgcgccgaggaagggcccagggtgctgcgttcgctcaccctcgtcagcagccgggggaggtacggcccgttcggcgacgaggtcggcgcctacttcacctccgccacgacggaggggaaggtggtgggcttccacggccggagcggcctctacctggacgccatcggggtgcacatgcagcactggctcggggtcggggtcggggacgccagaaccgctcgcgcttccgctccttccaagtactacatttccaggtacctgttctgaagtgtatactatactagcagcgtcttctctgcatgcacgcggcaacaggttcactgtgcagttctgaacctcgtcatgtcatgtctaatgattggcggcggtagtttgctgcttttcggagccaatgatgtgttcctttcatgttctccacatgatattacaagccacgttcactggaaaaaaaaatataattaattata

SEQ ID NO: 94960 - DNA, 626 bp, Zea mays
  Clone ID: MRT4577_186597C.1
taggggccggccttagggtctttttttttttttttttttagcttgaataatttctttctgaaaatgggaccattggctgtttctctttctgcgaatcacggtatatactaagacacttgcctatatgcgcacacaactatccctataaatatttacatcactgcataacacactctattataatctcgcgatgtctgattgttattatcaccgcaaacgcaccatcctggtgttgaatgcaatttttgtggtgctgttagtgcaggagatatccagagccacctttcggtgagtgctctgtggatggaggtcgattgctggcagcggacgaccgattggaggagtttcgagctcgagcgcttggagatttgagctggcggagcgatgtccgaggacgccgtgcacaaccgtcgtcgcgctgggtcgatctggcctagtcgcgctggccgcagcaccggaggtagccacgacgctcccgaaatgatgaccaacccatagggaaagcccggtcgccacagcacaccaaatttcttggaaccctagcagtgggcgatggatgcaaataggttggtcagaggcagcttcgatgcgcagcaataccatgtcctttttctgaccgggccggc

SEQ ID NO: 94961 - DNA, 1802 bp, Zea mays
  Clone ID: MRT4577_186598C.1
gcgttcttttccgggccagtatctctctgttgcttttgcccacatcctttcagaagtttgtaggggatgttgtcaacttgaagtttgatgaagaacccgactatgcaaaatgcacatcactttttcatagtgtactaagtgtagtaggttcaaatccagatgtcagaccaattaacactgatggtgctcagaaagcttatacatcaatttggtcaaaagagaggccgattttttatagaggaagaagcagatgaacaaccaaagaagaagatcagggtgggaatgcctgcaacacagtggataagtgtctataatggcagagtacctatgaaacaaaggtaccactacaatgtttcagattcaagagttggacagcacatcgaaaaagggaatgccgatggactgtttatcagttgcataacatcttgttccgatctatgggctctaatcatggatgctggaactggtttcacatcccaaatttatgagctcattccacatttccttcacaaagaatgggtaatggaccaatgggagagggactactatataactgcggttgctggggcaaacaatggcagctcgttggtagtgatgtctaaaggcacaaagtacacacaacaatcctacaaagttagcaatagtttcccctacaaatggataaacaagaaatggcaagatggtttctatgtaacttccatggcaactgctggaagtaggtgggctgttgtcatgtctcataatgctgggttttctaatcaggtggttgaactggatttcttgtatcccagcgagggaattcataaaaggtgggacaggggttactggataaccgcagctcctgctacttgtgatcaggctgctttcgttttaagtgtaccaaggaggcgacttacagatgaaacccaagagacactgaggacaattaatttccctagtaaacatgtgaaggacaaatggtctaagaatctctacctagcatcggtatgctatggtcgtactatatcctagggatcttttcgagcggaatcctgccagcaccatcttttgacgtaggtagttcactgtagcagctcctatgtgcgggtatcctgagtcgtgttgcgaaggcgtctgctatcgttcttgattatagactagcatatcatgtacaacagttcatgttttgtactacctgtgttgtcgaaggtttgtcgcaggagttgagcaatctctgtggagctgttagagcgctatcgttcttgattatagactagcatatcatgtacaacagtacatgttttgtaccacctctgttctcgaatgtttgtcgcctgtgttgaatgcaattgttatttgtgcagctgttagagcaggagatatccagagccacctgccagaagaaagcagaggaagaaaaaaacaaaacaaattattagtcggtgtatggatatacagtgatatacggccagaaaaagtggaagaagagcacccctacaagcatctacggatgaccaaattggcatggccacaagcacggaagtttattaggattattattcatttagattaaattagttcctattttctagagtaagtcagttttatgtttggtcagggataaactagaaagtgaagttgtttagatatttatggagtcggttccgattttctagggtgagtcggttgtagatggattataaagccttattgtaataatgcagagagggcaagacctacagttatcatttcatttaatctagatctattttttcaaaaaaaaaaaacaaggggcggccgtatagaggaacaaagttacgacg

SEQ ID NO: 94962 - DNA, 161 bp, Zea mays
  unsure (1)..(161): unsure at all n locations
  Clone ID: MRT4577_186599C.1
gccaaccatcanagggcgnanagagaggggccacgacccacccagggggggagagaagaacgagggcaaagacaccaaaacanacaaccgcagagcccggcgncgacanacagganaaggcagccaagaaccaacacnaggngcagggacaanaagagaaa

SEQ ID NO: 94963 - DNA, 433 bp, Zea mays
  Clone ID: MRT4577_18659C.1
gccacgcgtccagatgttttggtgctgcacataccatatgcaagtgtaaggaggctacgatgctatattgctgagacatagactttttgcacatgacggaataactatcatgcacaggaactattgtatttaagtggagatctgaggcacaaactcacaaaatgcctgtatcagtggacaacttcacaagaaaggcttcgcacttgatcacttagaagactattttgttacattgagagcatgtggctggatgttcgctggactgaatactgtgtgaaggcatatgccttgatagatcatgatgtgttctaccgctggctaactagatgatgatgtatttgtgacactgactaagagggaaagtctaacaaggttcttagactatgctgattaagcagaggaacactattatgatgatctattggactcagac

SEQ ID NO: 94964 - DNA, 620 bp, Zea mays
  Clone ID: MRT4577_1865C.1
ccggccgggacccgcccgcccgctccaccggtcgcctcccgtctcgcttcgtctccattttctccccaccccaccacacccgcgtcaaccaaccaaaccctagaaggctctcgccctcgtccccaatccctcgccgccccgcgatccccgccgcccgcaggccaaaaccctacgcgtattgctcgacgccgggtatagacagtgtaatcactttgtcagaaatgccttctgcatccaagtccaaggcaaaagaaagatcagctgcaaaagttgcaaaagagcaacccaaggttgctgcaaagccaatgggaaatgctacacttgcaagttcttataacaacctgtctggaaagttccatgttctggaaccatcaagctctttgttgggtagccaaggcatcgataaattcaggaatacagatgaaatagatgagcattctcgcagctcccatggtacaggggatttcgattgtgcctccaacaatggtagctgttctggtgactcagaagatacaaaggaaaaatcaaccagcactgcgtcccgagtagactctgttcctggatgtgatattgataaacgtgagaaaattagacagaaaaatgagaacgagagaaaatca

SEQ ID NO: 94965 - DNA, 866 bp, Zea mays
  Clone ID: MRT4577_186600C.1
gcaaacagagtagttgcatgcctcacaagatctctatcatttgtcttggtcctcatcaagtcatgaatcattccatatccatagataaataaggtggttgaactggatttcttgtatcccagcgagggaattcataaaaggtgggacaggggttactggataaccgcagctcctgctacttgtgatcaggctgctttcgttttaagtgtaccaaggaggcgacttacagatgaaacccaagagacactgaggacaattaatttccctagtaaacatgtgaaggacaaatggtctaagaatctctacctagcatcggtatgctatggtcgtactatatcctagggatcttttcgagcggaatcctgccagcaccatcttttgacgtaggtagttcactgtagcagctcctatgtgcgggtatcctgagtcgtgttgcgaaggcgtctgctatcgttcttgattatagactagcatatcatgtacaacagtacatgttttgtactacctctgttctcgaatgtttgtcgcctgtgttgaatgcaatttttgtggagctgttagagcaggagatatccagagccacctttcggtgagtgctctgcggatggaggtcgattgctggcagcggatgaccggttggaggagttccgagctcgagcgcttggagatttgagctggcggagcgatgtccgaggacgccgcgcacagccgtcatcgcgctgggtcgatctggcctagtcgcgctggccgcagcaccggaggtagccacgacgctcccgaaatgatgaccagcccgtagggaaagctcggtcgccacagcacacccaatttcttcgaaccatgttgtttgggctgatttcagtaca

SEQ ID NO: 94966 - DNA, 404 bp, Zea mays
  unsure (1)..(404): unsure at all n locations
  Clone ID: MRT4577_186601C.1
tttggtttgagaaatgagatgagtccatcttctcaaaaaaaaaaaaggaaaaaaaaaaagaaaagaaaaaaaaaaaaaaaaaaaaaannttaaaaaaaaaaaaaaaaaaaaaaaataataaaaaaaaataaaaaaaaataaaaaaaaaaaaaaaggggggggccgttttgggggttccaggtttccttccccgtgcttgcgccgttttggtttttttttggggccccctaatttcatttccctggccggcgttttcccccgtcgggcctgggaaacccctggcgttccccccttttttcgctttgcggcccttccccttttcgccggttggcgtttttccgagggggcccgccccgttcgcctttcccaccagttgccccccctgtttggcgattgggcccccc

SEQ ID NO: 94967 - DNA, 654 bp, Zea mays
  Clone ID: MRT4577_186602C.1
tatgcatggtcactaggtaggttgttttctggaagatagctctggaagatagctctgaaccatatgctacttaatatacaattgttctagtatgtgttctgaggtatcattactattataaagttcgggacccttgcaccaataaacaatgttaattgttagagctactgtgtaatgtctattgtaatgtgttgtatttgtgtaatgggcttaggccctaactacacctattataaatacatcttctaactctggttagggttagggtttcagtcccactaacatgatatcggatcccctgcctccctcgacgccctctacacgaccgtgctgtgggaagccgcgcccacgccacacgtttctctgcccgacgccgctactctttgtatcgagcttttggctccgcactttctgtacatgggtatggtgagcaaggttattaaaacgataaaacgttgaaatgctcatgggtgaagttttgacttttaaatgtttaaacaaagtttaagcgtagttttaaacaacataggaaaaataccaatatatcataattttagacaataacatgaagttaagtaccaaaaaaaagaggttagtggcttaccaaaacatcacccatgagccggattggaccccaaaagtaactaacaaact

SEQ ID NO: 94968 - DNA, 538 bp, Zea mays
  Clone ID: MRT4577_186603C.1
cgagctcgaattccgttgctgtcgctgcacttaaaggtcccttggtttctattgatgaaatggaggctattaaaaagatgaattatcgaggttggcgaagcaaagtgcttgacataacttatccaaaaaagtctggaaggaagggcttggaagagactttgaacagaatttgtgctgtagctcgtaaagccatacgcgagggatacactattttggttctctcagatagaggattttcctcagaccgtgttgctgccagttctctcttagcagtgggagcagtgcatcagcaccttgttgcaaatcttgagaggacacgcataggattgctggctgagtcagctgaacctcgtgaagtgcaccatttctgcaccctgggtggatttggcgctgatgctatatgcccttatttggctattgaagcaatttggcgcttacagaatgacgggaagattactcctaatggagatggacaaccttactcaaaggaagagctggcggcgaagtatttctatgcttctaactatggaatgatgaa

SEQ ID NO: 94969 - DNA, 298 bp, Zea mays
  Clone ID: MRT4577_186604C.1
gggggaaaaacaggaagccttgttttaaccccacgtccccaaaattcccaggcctggccaataaattaataacctcccccgggttttattttttcaaatttgggggggagcccccacaattcccttaggtttattaaaaaagggcccgggcctttaaattaaccgtttttaataccaaggccttttacttccccatttccccaagaaaggttttttgggttttcaaaaaatggttgggggccctaaacccttggagccctggccccaaaaaaattccgggaagaaaaaaccccttttt

SEQ ID NO: 94970 - DNA, 574 bp, Zea mays
  Clone ID: MRT4577_186605C.1
gtgcggcgctcaggcggcaggttcagaatcattgctaaggtctcgaaattttgtgcgcggaggcggagaggaagggtgcacgttcgtacgtgtagcggcaaggtggagaaagaaagggtggatggaatggacccattattatgagtgtggctgggtgaaggaatgatctctctctctctctggctgtgtctgcaggtgcgccctgcagtggcttcaacactagcagatcggccctgcagtggcctcatcactagctagatgcctaccactggtaccatacaggcttcgtgctcgatatgatgacacagtttctcctcggcgaggtttctgttgtggtgtcagatcgccgcctctgggtttttttttaactgggtgggacgcgttcgtgcggtgcagccgtgcagctcggcgaccatcacttcccccctcctgtagctcgctcactgactgctgatttgtttggatgtctatgtattcatcttaatcgatgtatatcttaatctatacgtgttaatctggtttgatatataacttaaattaaatctcataaaaaaaaaaaaaaaaaaggccccta

SEQ ID NO: 94971 - DNA, 990 bp, Zea mays
  Clone ID: MRT4577_186606C.1
tcccgttgtacctgacgctgtccaacaccagcagcaaagcagactacaacgcccggaccgggtgccttcggaggtacaaccgcctggccttccaccacaacagggagctgaagcagcagcttgacgagcttcagaagaagtaccccaagacgaagatcatgtatggagattacttcaaggctgcactgcagtttgtcgtcaaccctggaaaatttggttttagcacggccttgcaggcgtgctgcggcgcaggagggcagggcaactacaacttcaacctgaagaagaagtgtggcgagcagggcgcgagcgtgtgctccaacccgtcgtcgtacgtgagctgggacggcatccacatgaccgaagctgcgtacagaaaggtcgccaatggctggttgaatggcccgtatgctcagcccccaattctcaagtcatgatcgagattactaggctgtgcgtaataccgccgcagctgcatgctgcggctagagatatatatgaggagtgtttcaggcaatagatatgctaagttatggtaaagctatttggtctgttcattggaagatctgtataaactgcgccggtatagatatgttcccagctgaaatggctctagcacagatgtgcatggcatgttctctgattcttttcatttgttctaaaaaaatattgcggcagtaatatgagttgatgcccccaattctcaagtcatgatcgagattactaggctgtgggtaatacccccgcagctgcatgctgcggctaaaaatatatatgaggagtgtttcaggcaatagatatgctaagttatggtaaagctatttggtctgttcattggaagatctgtataaactgccccggtataaatatgttcccagctgaaatggctctagcccaaatgggcatggcatgttctctgattcttttcatttgttctaaaaaaatattgcggcagtaatatgagttgataaaagtaactaaatttctgcc

SEQ ID NO: 94972 - DNA, 448 bp, Zea mays
  Clone ID: MRT4577_186607C.1
cggggtgctggcactttcccgcaagtaaaacttttatgaagtcgcccggtgttgattcggccgtgcttgtcacaacgtacgtactacgatcgggtgacagccggggccttgttctgtgaagtcctggtgcctgcaacccgcgcgacatcatatacaaatgaagagatctagagatatggagtgtgtgctgggggtgctcaaagcaaaggggcagcaactagtgcacctggacatctaagaccccctcacccactacagccacacctgcagcagatctcctgcaccagaaggcttaatggagaacaaacatgaaatacctggacgatctgtccggaatggaacgaggaactcaccctgaccatcacgatcatgacgaaatcttccaggagtcacctcttctaccatgacacgatgcccaaagaccacaacgtgaccaactgcaaaatca

SEQ ID NO: 94973 - DNA, 513 bp, Zea mays
  Clone ID: MRT4577_186608C.1
aattcggctcggcccgccaagaagcggccatggagcagaagccgtcgtccctcgtgctcatcggcctcctcgccacgctctgcgccggcccgggccacgccctgcgccttctgaacggcggcctggagttctccttcggctccaaggctgccacggcaggcgcggagaccgagccgctggacccgtccctgggcgtcgactacgaaaacgagatcagacacgtggagttcgagccggagctcggcagcgcggcgccctacgccgcggcggcagcggggccggccacggggcctgtgagggcccggaacaccgcggccgggcgccacagcatgaaatggtggctgccgccgtcgaccatgccgtcgttcccgctgctcccgaaccccgtcggcatgcccgggcccggcatcccggggctcccgctgcccggcatgccgttccaccccatcggcgggtggggggcgcccgcgcctcccgccccgtcgcagccagcacctgctgccacagagaccg

SEQ ID NO: 94974 - DNA, 448 bp, Zea mays
  Clone ID: MRT4577_186609C.1
tctggaagctgatcatggagggctccctgggcttcttcgaaaaaagagaagctgacagtgtcctgatggacagcacgttctgcatctggaatcctaaacctcctgatagagaagcctgcagcagcgtcagtcccggtgctgcgacagctacttgtggctcaaggagaagacgatctttttaaagattttcatgttctttagcttttatcctctactaggtaaatacccaggagaacaagtacttggcattaacctgagggtttatcttgtcaagctgcaaaacgatctcacccaagaacttgtacccagaaccatctttcgcgtggaagttccacaggtcgaaagcagggtgagacagcagcttctgaacatttgcaacatttccaggaatctctgaagtagcttgaagagcaaacaacttgcttacaacctatcagagtaaaacaaa

SEQ ID NO: 94975 - DNA, 398 bp, Zea mays
  Clone ID: MRT4577_18660C.1
cccacgagtccgaccaagatcctgacctccgagcaggggttgaagtacgagttcatcctcagggagatcctcaaagatctcttgtgagatgtctcattcattcatgcaccggtacttgacccagaacttgaactggtgattcatctccagagggaccagaggaagaacctctcgcattccctcattcagaccgacgttctcaacaaggttcacattatgattgatgcgctctgagccatcgccgactacatatgaatccaaccccagatgcttggccagcttattatatataatacatgaggaggagcatgtgtacctggctgaggactaggaggacgcctagtacgccttcttatcactcatactatgacacatattggtctatgcttgctctatgc

SEQ ID NO: 94976 - DNA, 382 bp, Zea mays
  unsure (1)..(382): unsure at all n locations
  Clone ID: MRT4577_186610C.1
ccccgagagtacactcntcctcaaaactctccctttcctctcgcttttattttacaccctccaaaanctacatcnaatggagcatttttctaaccctaacacgaaatccccccctcaatccactcttggcattctccttacaacctattcatctatccacctcctgcacaaattaatacaacacattcgtcactctaaaccattttcaccataccccccgaactctatttcccacactcctgctccctatacccacccatccccgaatattcctaaccctacccacacaattctttcaatcccttccgcaaccgcttgcccctttcaacgaccttcaacgaacccaacacgctcttcaaaattccaaacataccttgctcat

SEQ ID NO: 94977 - DNA, 310 bp, Zea mays
  Clone ID: MRT4577_186611C.1
tcacaaaattccctccaaacccaaaaaaacgaacaaaacgggagggtctatgagcagaaccacacgtaccaaacccgcaacgaacgaaggaagggaaaccacccaagaaacccaacagacgacacaaaccaaagggaaaaaacacggaccaacgccacacccaccccaaacgaggaggacagcgaaggagcagccacacgggaccacccaaacccggaacaccgacccaaaggcgcatgccccgcagaagccgacgcaaaacccgcagacgcgaaggccacctaccgacccagctaacgatggccgccga

SEQ ID NO: 94978 - DNA, 159 bp, Zea mays
  Clone ID: MRT4577_186612C.1
ctcaagctatcgaaaccatcggaatctatgcctcagtactgaaagcacaggagattgcaaaggggtgaggatactctgatgtcatttatttggatgctgatcatgacaaatgtcttgaagaagtctcttcctgcaatatttttggtgtgcaaagacaat

SEQ ID NO: 94979 - DNA, 557 bp, Zea mays
  unsure (1)..(557): unsure at all n locations
  Clone ID: MRT4577_186613C.1
ggccgggggagacgcacaccnatagtgttagccatcccaccggcgtatccccaactcctccggattcgagcgaccatgtccgagcagtgaaaagggcggcaaggctctgggaacatgcggaaccaagcgtcaccgcatggatgtgcgcgacaacacccatgggcatctctgaagccgacgatcctgacgctgctgaggagggacatcactaaaacgcatctccgggctgatatacaaagatacccgtgcggcactctacatcttactcgagaacgtcacccctaacaccacaacctacacggcacacgcccggcgaaagatcgccaccgacattaactgcgcttaccttctcaaacaccactgtcagaccctataatgattctgataatgatacgatctaccttcaactttggccggatcaataagatttagtcgccttcaaaaaattccatagtacttatatatgactgccttactttcaaacttatattataactagctcttattgttccttttgtctgtgaacgaccactataaagcactgtaaatcatgaata

SEQ ID NO: 94980 - DNA, 231 bp, Zea mays
  unsure (1)..(231): unsure at all n locations
  Clone ID: MRT4577_186614C.1
cagcancgggccgcgcaagcagnacggaaccggggagggagcccccgggcgggcnaccacnancnacaaggagaaacgccgggggggggagancccnnggcggcgccccagaaacaccaggcccgggcacancnacnnannnacaagaggcgggggcnnccgggcaggggnancggcgcnccnaaancnncaacaggccnnccaacacgcgaagaacancagcgcggggaa

SEQ ID NO: 94981 - DNA, 280 bp, Zea mays
  Clone ID: MRT4577_186615C.1
attcccgggtcgacccactcgtccgtcggactcgtgcgttcaaaaacacaccattcgaaactacctagcaactactcagcatggatatctaccaagatattatcccttctttcgctttttgacctgtcagcgagcgcaacatatgcattcattattcctcaacgctcatttgctcctagtaccattataccacagttcttacgaccattatcttcaatgggcttctaacacctatctctgcatgcctacaagctacaacatgcacttgcttcgagcgtgt

SEQ ID NO: 94982 - DNA, 1612 bp, Zea mays
  Clone ID: MRT4577_186616C.1
cccccgaggttggccgggaaaaaaatctccctgtcgggtcatattctgtctgttcttttatttgctatagatttcttatgctagttgcacttgtttattgttttatactatgtggatagtttgatgatagttttgtttcttgacatctcaaagttgtgaatatatatgaatgtcaagactgtttagtgggtcatttgaagtctgtagataattgtttgttgcatcatacagcgatttgcttaaattgtctcctttgccttgtatttactttttatacaaaatatgtttttgctgctaatgtctatgtactatgatttatcgcgggcttgcagcatgtcttatttatttttaacatttgaatttggtgtatcttgtttccattttaatgactatagtcgcatatatctttagttttatgatttgtacaattgtgtccttgttttccagtggtactgttcacaaaactagtaattgctaaatcgttaggccatcagattaattgtacggctctcttactacatatgaaaatctttttggacccaacttgaaagttgctgcccctggagaattcatcggttcaattgcgatccctctccctgtcggatctgtgctagtcctgaatggcaatggtgctgatgtagcaaaacattgtgtcccagcagtccctaccaaaaggatatccattacattcagaaaaatggacccagcaaagcgtccatttggctttgaagatgacccggaactacttaatcttgctcctctagggacagttgtacaagaaactggcatatcatcagatgaaggcaagggcaagctacctgacgtccaaataacaaatatgggcaaagcatccagaggcaagaggtctaaaggaagaacagctgctgggaaatatgggagcggcattcttggagaacagtctcctgggcatgcccaagcccctgcagtggaagtgcagtcactacggaatccgcatggccagcgtcctgtctccgcttcaagtgctgagagggaaaggaattctgctgggaggtcaagggaatcgagacatcaatctagtacgcttgtggtgcactcacaagtggacaatagcaggcagtggccacgtcggtcggcgcaagagaggtggcatagtaatggcatgagtttctctgaagatggtgtgggatccgcggaaaggagaccacgggtggagcatagacagatttcattgataaaccaaactataagcgacgacatggattccctgtcgctctcaggccgtgaatcaggcgaccagcctcgtgctagtgtgcggaccgtgtataacaagcccaggaggaccagattaagcctagatgattgagctcttgggttgctcgtgtctgcatacttcatgcgaagaccgatgacatcaaaaatgatatttactataaactgtattgtatattttcattgggtttcggtgtcatgaaagcaccaaaaagttaagcgtagaattcctacgtgtactgaatgaacttaattgagacgaaatcagttgcaatcgggcgcctgttctgtagataaaatctcatgtaattttgactgatgcattggtgatctggcttacaattcatttgcaatttgatgc

SEQ ID NO: 94983 - DNA, 483 bp, Zea mays
  unsure (1)..(483): unsure at all n locations
  Clone ID: MRT4577_186617C.1
gatgacgaacacccnccatataaagcctcaatttcaacgacctcacttacctgatgagaatacaaaatcagaagcagcaactaagaactcagctgctgcaattgcagctgaggccgcagagaagcttttttctgcggcgtggtggcagccaaacaagaccccngnccncacaacaacccgcagcggaagaggcaaaaagagcncgcctaacccccgaggccacggcaaaacccagagaagccaacacctacaccagagccaaaacgcccgggggccccacaacagncaaaggccacacccaagcacacataccccttcagctgtgggacctcaacccaccttgcagaatccaactgctgcatcacagggtcaatatcaaatgctttggaattcatcctcccaacattatttgcaatcaacacgaggtggcatttcttcttatggctatgggagcatcacaccattaccacccgggaccactcc

SEQ ID NO: 94984 - DNA, 1171 bp, Zea mays
  Clone ID: MRT4577_186618C.1
cgccgtagggttcaacggacccatccaaatgcccgaaccccatcagcgcatcccttttcgcctgcctgcacacgccgccgccggcaatggccgcctgcgacgacgacgtcgccccgtcaaccgcctccgcctaccttgacccctcttactgggacgcgcggtttgggaaggaggagcactacgagtggttcaaggacttctcgcacttccgccacctcctcgcgccgctcctctccccgtccctctcggtcctcgaggtcgggtgcggcaactcgcggcttggcgaggatctcctgcgggagggcgtcgccggcggcatcacctgcgttgacctgtcccccgtcgccgtccagcggatgcgcgaccgcctcgccgctctaggcaccaaaggcgtggatgctgtggtggcggacatgcttgatctgccgtttgagcaagagagctttgatctcgtcattgaaaagggcaccatggatgtgttgtttgtggacagtggcgatccatgggaccccaatcctacaacagtggaaaacgtgatgaaaatgcttaatggtatccacagggttttgaagccagaaggcatctttgtatcaattgcctttggacagccacactttcgacgccgattttttgaagctcctgagttcacatggtctattgagtacagtacctttggcgacagcttccattatttcttctacactcttaagaagggcaagaggtcactggagtccagcagttaccaaaacacattaccatcacctgttgctccaagaataaatatggtccacgaagagctcgagagcgaggattttatattcctcacaaaccttgatgggttgtgagtggctgcttaaacaagcatctggctaacagcctaacacatcaaaagggtgaccaggccagcgttggtgaccctgcagtgatgtttttttcctgggcggcaaatgagaatgatgcctgtaaaatgtgtaatttaggatagatttaaattttgagctttgttgtctagtaatactataatactctatattactgcaggctagaggtctgtatgatcttgtaaaaattagtattactttccttttgaaatctaatgcttcgacttaacttatgcattgtttcggctgttatatgaaatccatagatgaaagtacttgttggtcattcc

SEQ ID NO: 94985 - DNA, 153 bp, Zea mays
  Clone ID: MRT4577_186619C.1
tgcgcggatgcgggatatggagacaatgaacgcctattgatttctgcagactcaccactcaggtttgaatgagtgctaccaacataaagccgctccacacgaggttacaaacgatggagatcattatggtcccaaagatactcccaacattcg

SEQ ID NO: 94986 - DNA, 458 bp, Zea mays
  unsure (1)..(458): unsure at all n locations
  Clone ID: MRT4577_18661C.1
aaagttcagaaacatgcgtcctgtccgtcgtctctaattgattaatgtcgtttggcactgagaacagtttgtgctccgtgagatccttgtgacttccacaaagcagctgattgaactagcctgaggatgttttgggcggtggctctttttttcttcgnagtttccgtcgttgtgcgtgtctgctggcgctgcacttattttaagacttggaaaatggcgcgtatcacatgatccgtcagtgacaggacatgtcatgtcatgtcacggcagtttgctcacccgtgggggctgcgacttctcccggtgtcgcgggagatggatggcattggcaggcagggggcacttggattgcgattatagatgtccaaaaggggggcacgggccgacccaacccgagcccgactcggtccggcccgtttgagctcggccacttaaccgtgccgtgcccgcccgcgggc

SEQ ID NO: 94987 - DNA, 264 bp, Zea mays
  Clone ID: MRT4577_186620C.1
gccagcaggagacaggaccctcgaagctgatgcctttggattgagcattaatcctgagtggctgggcacgctgccgccttcgccatcacggaggttccagactgtccactcgggggtggagtgagactgactgcaagccccatcctccttgagactggagctgtcgtctgcatacgagagacttggtttaactgtggttggtccgtgtctgctccctcgactagaccacacttttggacttggtatctggggctgaagttgctc

SEQ ID NO: 94988 - DNA, 297 bp, Zea mays
  Clone ID: MRT4577_186621C.1
ggccggccgggaaactcctctgcacccaaattcaacgctggcagaggcgaccccagggatacacgatggacatgggattatgctgtatgaggaatagactgggtctgcatgagcataagctcgggcacagatcggtgctccatggccgccgagaagtccttgaccaccagccgtatatacgcaggtggattgtgatccgggtggaagtattcagggcacgaagactttagagcggaaggatggtatcggggccattgacgacacacatgtccatgcctctgttcctaaagaaatgga

SEQ ID NO: 94989 - DNA, 699 bp, Zea mays
  Clone ID: MRT4577_186622C.1
aatccaaacgaatatatcctagctactcgatcttgtcccagccaataggtagctgcttctgtctgcctagtgaacttttctcgctagctaccagggaaaagaccacctcaccggtcaccaccatggctgggctagtgctagccaagtgccttcttctgttctccctctccgccgcgctcctctctctgctcggcaccggcgcctccgccattggcctgccccagcctcatgcgccagtgaacttcaccatcggcgtgcagggcatggtctggtgcaagacctgcaggtacatcggctacaatgccaacatggacgcctccccactcaaaggcgtggaggtgtacctgcagtgccggcacggcccggggcggctgaagaaggtgcaaggggcatcggggcagggcggctactttgtcatccagtcggcgcagatggcgtccttcaccaacgacgagtgcaaggtgtacgcggagagctcgtcgtcgaccgcgtgcagcctcgtcgacgaacccgctgccggcgaggggctgccgctcaagttcgactccttcgtcaagcacggcgatggcctgcaggcgctctactccgtcggcaacttcttcttccgccccagcaaccccaacaagtgctactgacgcatccatccgtcatgtacatacttgtgggacttgaataaatgggtcaggaactcaggatgaa

SEQ ID NO: 94990 - DNA, 356 bp, Zea mays
  Clone ID: MRT4577_186623C.1
gacgcctgcggttccggtccggaattcccgggtcgacccacgcgtccgaatgactgtcctgcctttttgttgaaacaccaccttagtaatgtgtgttcacagactgaacaatggattgtatccagttactagctcacaaatccttcctcaatgcttactttcccttgtaccattcccctgcctcttcctgaaccccagtagtaactggtatcctggcttctgactgcatacagtagcggggctgatttagacttgaacagatggagtcataacggaatgtccacttgtgtttctggttgctttcaggcagcattacattggttgacggggtcagtattttgttgcatgggcttatc

SEQ ID NO: 94991 - DNA, 268 bp, Zea mays
  unsure (1)..(268): unsure at all n locations
  Clone ID: MRT4577_186624C.1
tccatgacactagactggccgcatcggaggcctgcgatctagtagcgcgctagtagagcctcggatagatagagtgtgtgattctagaatttatcactgcatcacgtctcgtntttaactagacttgcaaattacgtgatcacaaaccactaatcgtctacaccaaacattaaatacgccgttgacaatacatgtctacatatctccagctggcttaatagcgaaataactcacaataaatcgctcttgctaacatgtccgctttcca

SEQ ID NO: 94992 - DNA, 1918 bp, Zea mays
  unsure (1)..(1918): unsure at all n locations
  Clone ID: MRT4577_186625C.1
aaaagaaacgccggccgacttggaacgcagtcgcatacacgtctgccgccggccgcgcgtccgtcgaacttcgaagccaagattgcgaggttattgccccccaaatttctttcccctccgggccttccgtgcaaaccaaatctcaacgaaacattgccgcctccccctgaccgcgccccactccccagacgccgtcgcctagatccatgagacttcccgatcttcctgcggcccgaggatgtcccagagcgacgtcgactacagttgcggatcttgtggataccctctaaacctttcatcttctaaccgaagcacatctgaagtaggctcatataagaagtctctgaagaaaggactgatttcattcatttctgttgatctcagccgatttactcaggtggacgaggtatcttgctttcccctcacctggcgtggttacaggccaaaaactaagcttctgtgccgaatatgtggggcatctattggctacggatacggtgagccggctgttttgtgtagttttgatccagcaagttcatcttcctccagtacatcccagaagtatttaataaagatccaagcactccaaccttcagacaggactcagtaagtgaaatatggaaagagaggaaataggtgtcagcctagagaactccatcagttacctatctgatgattgcttgctttctatatttaacaagctagaaagcgggtcagagaggagtgctttcggtttaacttgcaagaattggttcaaggttcggaaccttggccggaaatcactaacattccattgttcttttaatcctgccatagacaaggagcatgccaagtgcatccccaagatactggctcactcaccttgtctgaaccggatatcccttgctgggctcacagagctacctgactcagctctgagcacgctgagaatgtctggatcatctctaaaatccctttcattctactgctgttctggtataacagacgatggcctagcacaggtggcaattgggtgccctaatttggtggtggtggaactccaaagctgctttaaaattacagatgttggcttggaaagcctttcaaaaggctggcgtgcccgtgctttgaagagtctaaaaccttggttcttgcatgggcatttcggaccaaggggtctctggcgtcttcagcaattgttcaatcatctgcacactaagcattacaggttgcaggcgtctgtctggtgctggattcaaaggctgttcgagttcgttttgttgccttgaagctgagtcttgcatgctttctccagatggtttattggtaaccttgcttttgctaaaagcctctgcgttctgaatctcaggatgtgtcgctacctcacagatgattagcaatagccagtgggtgcccactgcttgaggagtggaaccttgctgtttgccatggtgtccatttacctggctggtctgcaatcgggttgtactgcaataagctaagagtgctgcatatgaaccgcggccggcacatctgtgaccagagtttgctggccctcggcaatggctgtctgtgccttgaggttctgcattaaatggttgcgtcaagatcaccaacaatggcctggctgatgaagtcatatccattggcccttccattgagaacttgttccggctgcattgaggagaaactgtagttaggttttctaagcctggggctaaaagtttagtagccccgtcccattacagctgattatgtgcattgtgtttgctctagtgtatacataacaagacccaccctactcatgtgggaaacatgggcactgggccagccctttaacaatagtgaatcgtaatatacaaatgaactgagcttatgtaaggtgtatttttttcctaatatgctctggcttgctctggtttacnnaaaaaaaaaaaaa

SEQ ID NO: 94993 - DNA, 326 bp, Zea mays
  Clone ID: MRT4577_186626C.1
tcggccgggaaaccctaaccctatctgtgtttcttattgactttgtttcttggccgcggatcgttggatccataagcctgtgcatcgtctctgttgacggcttaaccgattagggttaggtcataaaccctaaccctagttagttgtgagagctctctggtttgaggccgagacacactgtgtcttttagagtggccagacctaaaatcttaactctaacccgagagcatgaaactctttctatctattctaatctctattctcgggtgatgaatgatgataaaaaaatgagttcatcacataaaaaaaaaaaaaaaaaagcggcc

SEQ ID NO: 94994 - DNA, 1149 bp, Zea mays
  unsure (1)..(1149): unsure at all n locations
  Clone ID: MRT4577_186627C.1
ttaacaggctagnaagcgggtcagnggggagtgctttcggtttaacttgcaagaattggttcaaggttcggaaccttggccggaaatcactaacattccattgttcttttaatcctgccatagacaaggagcatgccaagtgcatccccaagatactggctcactcaccttgtctgaaccggatatcccttgctgggctcacagagctacctgactcggctttgagcacgctgagagtgtctggatcatctctaaaatccttttcattgtactgctgttctggcataacagatgatggtctagcacaggtggcgattgggtgccctaatttggtggtggttgaacttcaaagctgcttcaacattacagatgctgccttggaaagtctttcaaaaggctgccgtggtttgaagagtctaaaccttggttcttgcatgggcattacagaccaaggggtttctgcaatcttcagcaattgtccaaacatctgcacgctaatcgttacaggttgcaggcgtctgtccggtgctggattcagaggttgttcaagttcatttcgttaccttgaagccgagtcttgcatgctttctccagacgttttctgggttacttgtccctagctagtggcagtgggtgcccactgcttgaggagtggggaaccttgctgttttctatgggtgtccatttacctggctggttgtactgcaataagctaagagtgctgcatgtgaaccgctgccggcacatctgtgaccacagtttgctggccatcggcaatggctgtctggttctgcatgtaaatggttgtgtcaaggtcaccaacaatggcctggctgatgaagtcatgtccattggcccttccattgagaacttgttccggctgcattgaggagaaactgtagttaggttttctaagcctggggctaaaagtttagtagccccgtcccattacggttacggctgattggttcttcggtcattatgtgcattgtgtttgctctagtgtacttgttgtaagataacgagaccccccgtactcatgtgggaaacatgggcactgaatcgtaaatatacaaatgagctgagcttatgtaaggtgtattttttttccgaaaaaaaaaaaaaaaaaacggccaaaaaaaaattatt

SEQ ID NO: 94995 - DNA, 602 bp, Zea mays
  Clone ID: MRT4577_186628C.1
ccggccggggccaccaattccaacaaccaatctctcactcaacataaccaaacaaccttcatcatgcagctgaccaacctcttctgcctcgccagtgtcctgacctccgtgtcagcaatcaccgtatcctacgacccaggctatggcgaagctggccgcgccatgacagccgtttcctgctccgatggcacaaacggcctcatcacgcgctacggctggaagactcaaggccagatccccaagtttccctacattggcggcgcgcaggccgtcgctggctggaactccccgagctgcggcacgtgctggaagcttacctacaagggcaagagcatcaacgtcttggccatcgaccacactgctgcgggcttcaacatttctcccgcggcgatgaacgctcttaccaacaaccaggctgttcagcttggtcgggttgatgcgactgctactcaggtcgctgttagcaactgtggattgaagaaataggtgtgaggctttgggtgatgagatgggacgggatacgtttatgatcgtaatgtttagtagtacattaattgatattactttaatctcacaaaaaaaaaaaaaaaaaacccgcggcc

SEQ ID NO: 94996 - DNA, 855 bp, Zea mays
  unsure (1)..(855): unsure at all n locations
  Clone ID: MRT4577_186629C.1
aattcccgnnnnncgagctcactagtttttggccgcccttttttttttttttttttaaggaaagtaaaatatattacaagacattggagacaccaaacacaaataaataataaaaaaggaagtacaaagaagaatttatttcttcacaggcactgctttagcaccggcagcaggagcagctggggcagctttcacggaggcagctgggacatcggcggtattaccgtattcagtataggtcacttggtatttgtttccgggtaaaaccttcttcacgacggccttgtaccatttaccatctgtccataaagcttgcactttatcgtttgctttgaatgctacggcgctaacagctggtttctttgtgattggggccattggagtagaaccaccaattgttaaaactttcatgccagtgatagcatctttctcttccttaacatcactttggaagtcaccagtcttttgactagagtgaacagatccaccacctggattcttcttgataagattggcgacgttgttcacactaccaccatcttccatttcttcaatgaaagtataagtagcacgttcagcggctttcaagttatcgaacaacaagaattgtcctggaacaacggaaaggaactctttggcacatcgggttaagaaatcacgattgtgggacactaataataaagcacctttgtatttgttgcatgcaccaatcaaagaatcgacactttccaaatctaagaaattggtaggttcatccaaaatcaacaagtgaggacaaatgaaagtaagtttggcgaaaacgacacaagaacgttgggagaatgataaacctcgagccgaattccgagcttacgt

SEQ ID NO: 94997 - DNA, 508 bp, Zea mays
  Clone ID: MRT4577_18662C.1
ggtgttgttttttttttttttttttttttttttttttttttttttttttttttttttttttttttttttttttttttttttttttttttttttttttttttttggaaaaaaaaaaccccccttgagtggcctaccgccattttttaatgaggggggggggacccccaaatttattgggtaatttgcccaaccatttacaaaaagggccaaaaaacccttttacaaacaaaaccacaaaaaaaaaatggggggggaaaaaccgcccacccccaaaaaaaaaacttatacaccatttttttccccctaaaaaaaaaaaactaaaacttttttaagcttctgaaacaaaaaaaatttcttcatcccaacttactaaaaaactaactggctggcaacactacttgaatctccactggcccggggcttcaaccgatttaccaaaaacaaaacaatggttttggccccaagggtaactccaaacccaaataaaaccccaacccctgggtccacc

SEQ ID NO: 94998 - DNA, 724 bp, Zea mays
  unsure (1)..(724): unsure at all n locations
  Clone ID: MRT4577_186630C.1
aattcggcacgagggcaaatttctcgtttaagagctgtgcatgtgcagtgaatctcgcctgctttggtggtccttgtccgggtagtttttgcggtgaaccatctagcggattgttctacttctatgaagtcaggcagaaaaaaaaactaaataaattgccgatgtttggtttacccgattcccctggagcccgagtgaggagcggggagcattagcgatgcctgcctttttcataccgctccacagattaaccctactttttatggagggaagaatggatggcgtgtgcccattctcctccttggtagaaatactattgggatacatcagcagcccctgtctgtgtctactgtctataaaaggccaggtggggtttatgggagcccgttagctgtacacgtggtcagtgaatatggtagttcttgtccagcggatttttacgaaaaaatcatctataggattgttctgtgaagttctgccgacttttttttagaaggacctatggggtggcttactgatttccatggagcgtcaagtgaagggtggggagcactagcgatgcctgcttttttcataccgctccacagattaactctattccttctcatggaggggatggatgccatgtgcccattctcctccttggtaaagtcgtaaagataccattgggatacatcagcagcctttgtgtgtctatggattgggttagnagtactattaccta

SEQ ID NO: 94999 - DNA, 473 bp, Zea mays
  Clone ID: MRT4577_186631C.1
ccggcacacacatcagtgactcggtctaattaccggctccgattaaaaaaaaaaaaaaaaaaaaaaaaaaaaaaaaaaaaaaaaaaaaaaaaaaaaaaaaaaaaaaaaaaaaaaaaaaaaaaaaaaaaaaaaggtccgactcccagccgtggtcggttggggactccgcctccatttggctttgttttttgaaagtggctctgggggaagttccccaaactgccaccatgcaaaacgaggggggtaagacgggggacctttatgtcccaaggaagggctgggccacaaacaggaacataactgccaaggaccatgcctttgaccaaaaaaaaattggccactgggatgcaaagggcctgtataagggccacttaacaacgttggctttttctgggtttgcccgggctaagggcaacgcaaacagttctttgaacaggctggggaaaaaaaaggctgatataaagcagaaaatt

SEQ ID NO: 95000 - DNA, 230 bp, Zea mays
  Clone ID: MRT4577_186632C.1
ctctcttttccgatatgtttactactcctacctgggggtttcaataaaacaggggggggtaaaatgacacacaataaacgatatactgaccaaccttctcctgcacaagattctaccgaactctaacgatatgtctttgactcatagctacttactcgcagaaactcaagctggaacagctccccctgatgctaacgatcctcaacatccatgatgcatccacaacaatc

SEQ ID NO: 95001 - DNA, 195 bp, Zea mays
  Clone ID: MRT4577_186633C.1
gcaggccgcctttttttttttttttttttttgaaaggccaaaagctccgccccagctgggggggcctctgcttcttcaaagttcagattggcaaaaaaaaacttcatttgtgcactaacaagtgggaagctcacttagaacagcttttcaagttttttaaaagagagctttctaaaaaagtgctccccctttttg

SEQ ID NO: 95002 - DNA, 997 bp, Zea mays
  Clone ID: MRT4577_186634C.1
tgtagcttttttctttattcaaggtggtcgcagcgatctgtgattgtttatgcccaaagcgtagggttacccgtcttgttagcgctaccttagtgccgcttttttgaaccctagacatctcagaagaggtaccagctgtactttcacgggctttaacaaattatttagaaagccatatcggggtgatctctctggtctggtgacctgatctgagttttttgcctttattccaggggaagcactcggagatgaagctgaagcagagcaaacgtgagacgcaccgtgggcattctctatccaagggggaaggatggcaagttggtgtcagaaatgcatctacctaatgcccagaatggagaagatagcaggacaatatcctgggttactcagaccttactcctgcccctctctcctgtttattctattatctggctccatttgtgcagcacaaaacttagcactttgtttcattttggaatatgcttgcttttagtttctgatttaattgtagcttcttgctaagtgattgacattatctggttcttattcatttcaagttgttctttcaaaaaaattggaatataagtcattttggaatcgtgtggttctattgctgctagcttagtaaggtaaaatagcctgacctcgtcaacaattagtttttttaggagaaaaagatgcaacaaatgaggattgatgcttcccgcaagagtacatgatgtacaatatatatctttagatggtttcattgttgactgttgtagctgatactaagaatgtagcttttttctttattcaaggtggtcgcagcgatctgtgattgtttatgcccaaagcgtagggttacccgtcttgttagcgctaccttagtgccgcttttttgaaccctagacatctcagaagaggtaccagctgtactttcacgggctttaacaaattatttagaaagccatatcggggtgatctctctggtctggtgacctgatctgagtttttt

SEQ ID NO: 95003 - DNA, 241 bp, Zea mays
  unsure (1)..(241): unsure at all n locations
  Clone ID: MRT4577_186635C.1
aaaatnnaaataacnnttgtgagttgtgagaccccttaaattagaatggncgtaattatattnnaagcaacangcgcgggaggaaaaaccacacggcaggggtcttggcgaaaatggtgttgttcccaaattagctgcgtgaagctcaagtttcagncggatgtngttgggcgcccccccactgtgtttcaaggagcctgnntcgaagcnnngttgttcccaaagggcnncgcagcaaggg

SEQ ID NO: 95004 - DNA, 2943 bp, Zea mays
  Clone ID: MRT4577_186636C.1
gtaccctcgggctcgccgggtgtgtcctatgtgttgaccgggaaaatcctattggaagttccaccagttttagggaacatggcctcatgtttactgttggtaccagtgacattaagatattgaagtttgctgattacataaggaaagaggaagtatatggattgcctggatctgaactgactgatcaccaaggatcggcattgaaggaaaatgagacagagccaggtgctggacccttggagctcattgttgaacttggagttgttggaatatctttgattgatcataagccaagagagcttttatacttgcatctgcagaaggttttcgtttcatacttgactggttatgattttgggaccactagcaggtttaaattaatccttggcgagttgcaactagataatcagttgccactgtctacaatgcctgttgttttgtctaccgagagcaggcctgattcaaatcgttctgttttcaaagcaaacgttgctgttagcaatgtaacttctaatggcattcaagtttacccacatgtctatatccgggtaactgatcaaacatggagactaaacattcatgaacctattgtttgggcactgtttgacttctacagcaatcttcgttttgtcaccaccagcaacagcacaactgtcacggaagtggatcctgagatacgaatagagctcattgatatttcagagataaggctaaaaatatctctggaaactgcgcctagtcaaagacctcgtggtgtcctaggcatatggagccccatcctatctgctgtgggtaatgcactcaagattcaggtgcatctgaggaaggtcatgcacagaagccggtttatgcggaagagctccatcatccctgctatcacgaaccgaatcaagagagatctgattcacaatccgctacatctaatcttttctgtggattttcttggagtaacaaaatcaactttatcatcacttagtaaaggatttgcagagctctctactgatgggcaatttcttcagctgagatcaaagcaggtttggtcaaggagaatcactggtgttggtgatgggctagttcaagggactgaagcatttgctcagggtttggctttcggggtttctggtgttttaagaaagccagttgagagtgccagacagtatggtgttataggtattgcacctggcattggccgtgcttttgtgggtttcattgtccaacctttaagtggggctctggattttttttcactgacggttgatggaatcagtgctagttttatgagatgtgttaacattttaagtaacaaatctgttccgcagaggataagagatcctcgtgctatacatcgtgatggtatagtaagagactatgacaaatttgaagctgctggccagatggccctttatctggcagaagctagcagatattttgcatgcacggatttatttcgagaaccttctaagtacgcatggtctgattactatgaagaccattttattttaccaagccagaggattgctttagtaactaataagcgggtgatgctgcttcagtgcttggatctagataaaatggacaagaaaccttctaaaatactttgggatgttccttgggaagaagtactttcattggagctagcaaaagctgggtatcagaggccttcacatgtaatcatacatctgaagaattttaggaggtcagagaactttgtaaggcttattaagtgcaacattgacaacgaacgggaacctcaggctctttcactttgctgttcaattcggaaaatgtggagatctcaccaagcagcaatgaaagttataccattgaaggttccatcaggccagcgtcatgtgtattttgtgtcagatgatgataaaaaggaatcccacagtttatctaggcctttgctaagctcgggaggaacctctactgatgttgagcaacagttcataaacaatacagttcactttcagaaaatgtggagcagtgaaccagaaattcagagccgatgcaaactagttgccaagcagattgcggatgacggaagggtgttcagcatatggaggcctctctgccctaatgggtatgtctcaattggtgatattgcgcatgttggcatccatccaccgcattttgctgctgtatacaagaatatcaatgggaactttgcactgcctcttggctatgacctggtttggagaaattgtgctgaggattacaagagccctgtatcaatatggcttccaaggccaccggggggatacgtagctcttgggtgtgttgctgtcccttcattcaaggagcccactcttgactgtgctttctgtgtggatgagagactcgcggaggatgccgcgtatgaggagcaaatcatatgggcctcatcggatgcttacccatggggatgctatatctaccaagttcagagcgcctcaatgcagttcatggcacttcgtgtcccaaaagaacaatctgagctaaggcccaagaagatattggagtcatttctgcagcaagcatcagagactcaaacgtcccgtgcatgaagaagctgcacatgatgcttgtgcgtgcaagagaactcggctgggacaaagggcaagtctcgtgcaagaaagctcgaagaatgccacttctttcggatcactccatttctccgttgtcaaagcatacacagaggacagagccttgcatgccaacactcgggttgacggaagtgttgtatactagaatagtaggttaaaggttgtaaatgtaaagttttgtaacgtttgatatagtttttgtccagctacatttgttaaggcccatgtggacgtgggccatattagttgtggctacatattctactaagaagttctcaggactaatcatactttctctaaaaaaaaattgttaaggcccatgtggacgtgggccatattagttgtggctatatattct

SEQ ID NO: 95005 - DNA, 298 bp, Zea mays
  Clone ID: MRT4577_186637C.1
cgacgcatgcgtacgacgacaaccttccacgtgcatacgacactaaccagcagcaccaaccatcatccgcgccgggcacacagcgcacactgatggcgtctgtcaccatgatggcgtccttccccgccgtggccatcgccgcgctgtcccgccgccgcaccatcggcgcggtcacgtcctccaagatctaccactgccagtagcacagcatcactccagcagccgagaccagcgccgacgaccacaaaggccacgccgtattcctcgcggctgctgacgaggtcgaggaactcatcgc

SEQ ID NO: 95006 - DNA, 471 bp, Zea mays
  Clone ID: MRT4577_186638C.1
cggacgcgtgggttattattgaattacatgtaattagcaatctaaaagaggtcaccatgaacgatatgtcagtggaaggaggctactgagtttgtaacatcatgacgtacaatagggctacaattgaattagcattatgaaggtttcttcttttcgatcatttatctggtgttactgaataatttctttatatatctaaatttgttttttcttttttttttttttcttattttttatgagacttttttcttttttgtttatatattatttttttttttattttttttttatttttttttatttttatttattttattttatttttttatttttatattttttatttttttattattttttttaatattttttattttttatttttttatttgttatattttatttgtttatattattttatatattttatttattattagtttattttttattttattttattattttaat

SEQ ID NO: 95007 - DNA, 894 bp, Zea mays
  Clone ID: MRT4577_186639C.1
atgtccgtagaagaactaaaagaacttaagaaccaactaactaagttacaggaggctgggtacattcgtccaagttcctcaccttggggagcatcggttctatttgtacagaagaaggatggatcacagaggatgtgtgtggattatagatcacttaatgatgttactgtgaagaacaagtattcgttacctcgcattgatgatttatttgatcaaatgagaggtgctaggaagctacgagataatcaactttatgccaagtttagcaagtgcgagttctggattgatgagctgccattccttggacacatcatatccaagggtggaatctcagtggatccgtctaaagtaacggcaatagttggttggaagataccaagttcagtcacggaggtccggagtttcttgggacttgcaggctattaccagcgatttattgaagggttctccaagattgctaagcctgtgacctcactgttagagaagggcaaggagtttaaatggacctgggactgcaaagatagtttcaatcaactgaggtttaaattgatggctgctccagtgttggttatgccagatctacaaaagggatttgatatctattgtgatgcatacggccaaggcttgggatgtgttcttatgcaagaaggacatgaaatccgcaaaggacagattggtgatgctaaaatccaagagatcaaggatctgattactcaaggtagaggtctagaattcatggaggacgagcaaggcacgatatggttcaagaaccggatatgcgttccagaaattgagagcctctgtgagactatattgaaggaagcccatgactctgattattctattcatcttggtagcattaagatgtaccaagatttgaagcaaaaatactag

SEQ ID NO: 95008 - DNA, 286 bp, Zea mays
  Clone ID: MRT4577_18663C.1
caaaccaaccaaaaaaattcgggggttttttggggggtccaaggaagggggccccccgggccctgagaaaaaaaccctggccattttttttaattggggggggggagatagaccccctgaatttacctggggaaaaaatccttttggggcctcgcgggtaatcaccccgggaaggggaacctcctcctgttaaaatcgggacccatggcccccaagggcggcctttggctgagtcggcaactggcgtttgggggacacccccccagcgccccccccccactttgcc

SEQ ID NO: 95009 - DNA, 385 bp, Zea mays
  Clone ID: MRT4577_186640C.1
aaaacgaccaaacgaaccccggataaaaaacgggaaaagcaaacagcagcggtcggaagggccaggaccgggaaaggggccgcggaggcaaaggcgcgggcgaggggggggagcccgggggcggggacacaaacggggacccgggcaccgagggggccccccccgacacggaaaccaaggcggaaaccgacaggagggccaccggggagggcggcggtgaggggacggggggcacgacggggggccccgcgggcaggagggggagccggagcgcaagcagggcccccggcgtgcccgggccccaggccggcaacaggacccccaccaccaaaagcgagagcagcaggcccagccggaccaccaaccacagggacaggcccggccg

SEQ ID NO: 95010 - DNA, 546 bp, Zea mays
  unsure (1)..(546): unsure at all n locations
  Clone ID: MRT4577_186641C.1
gtacgcctgcaggttccggtccggaattcccgggtcgacccacgcgtccgggcgtgtggtggaaccgaagagagctgtttctagagaggattctgtaaagcctggtgcccatttaacggtgaagaaaatttttgttggtggtattaaagaggatacggaagaatataacctgagagactactttgaaaagtatggcaagattgaaaccatagaggttatggaagacaggcagagtgggaaaaagagaggatttgcttttgtaacttttgatgatcatgacacagttgataaaattgttgttcagaaataccacactattaatgggcataattgtgaagtgaaaaaggccctttctaaacaagagatgcagtctgctggatcacagagatgtcgtggaggtggatctggcaactttatgggtcgtggaggaaactttggaggtggtggaggaaactttggtcgtggaggaaactttggtggaagaggtggctatggtnggtggaggtggtggcagcagaggtagttatggaggtggtgatggtggat

SEQ ID NO: 95011 - DNA, 381 bp, Zea mays
  Clone ID: MRT4577_186642C.1
atggctcggcggcggcgccaaccgactccgatgagaaatcaagcacaacagagagcaagggagggaaaaggagagggcaggggaggttccttacctcaaggcgcacccctggaacctctcggtggcggtgaaggcacgacgatggctcgggtcaacggtggcggcaccgggactgcacggaggacggcgggtgagcgcgggcagagaaaatcagggagggagaggagaaattggagcgtgtcccgagttgcggacgtcgaggcagagctcactgtggcagagggcacggcagggctccgacgtcgacggggaaacgggctcgggacggcagcggacaacagcggctcctccctggcgtgcgcgcagcgtgggaggggttga

SEQ ID NO: 95012 - DNA, 354 bp, Zea mays
  Clone ID: MRT4577_186643C.1
atggccgccgatgccgacgcagccgaggtggagcggctttacgagctcggcgagcgcctctcttccgccaaggacaagtccgagcttgcggcggactacgaggcgattattgcagcagtgaaggggcagagtgtcaaggcgaagcagctcgcagcgcagctcatcccgaggttcttccggagcttccctgcactcgccacccgcgccatgtcggccatgttcgacctcgttgatatggaggagctcgcgatgttttgggacaactccttacaagcgaggaaaatgtggaacgtgatgctgttcataaagcactcatgtcccttatacgagaagatgttaaaacttacactgtga

SEQ ID NO: 95013 - DNA, 540 bp, Zea mays
  Clone ID: MRT4577_186644C.1
cgataatgtacacattgcccgtccgtgccaccacatccagcatcgtcgccagcctcgccacccccgcgccgtcctcctcctccggctccggccgccccaggctcaggctcatccggaacgcccccggcttgggcggccccgccaccgtcgtcggccatgaaccccaccaccacagtgatagcaacaaatgaacgaccaacataaacactagaatgctactaaagaataaagtgactgagagctgattacagaaccagaacaggaatgtatgtagccaaactaggttcagacaagattaccaaattgatagacaaaaagaaaatttttctgtttttatcagcccccgacacagaaataatttcgaaatatatatgttatttcctccaccaacacaaaaacaatactaggacaaccagttactgaaaaaagtgcagataacttgataaggctgactagattataataataagaacacgctgcaagttgagatgattgcaagagaaaggtatcagaaccaatgaatgcaaatgatatcaaagc

SEQ ID NO: 95014 - DNA, 1495 bp, Zea mays
  Clone ID: MRT4577_186645C.1
ttgcgctgctccataattacttgtgctctaagctttgatccaaatccacacacattgatctaagggccaggttgcagaatggagagaacactgatcacctctaacctctgcttgagtgcacacgcttcaagatcgtcccggagggttcactacatccctacttccgcctctgctgctgcacacaactccagctacaggaagaagagtgccccgtctctgccgccgtcggccgccgcatctgccactgttgtcaccgcccttccgtcaactgacaatgtccagtccactgctccaaaaatgacaccacagatcgcaaaaaagtcgcggatttgcttctggaccttgaactctaagccgcataatggcttagaagggttaacggggctgactgaattggatgatagtattgaggcccataggttgttcattctcttatatgtccattggttccttctgttaatgcgtaccttatattggccagattctttacaacctttatttaagcatgtggagcaaggatcagagattcgtgagaagattatttgttttcttcgagacaaggtttttcctcttaaagcagagctactgaaacctcaagcagaaatggagagatttataacggatttggtaaagaaaagtgtgcaagatgtaactggttcagaatttgaactattcatggggtttctgcgaagcttgagcatatttggggattctgctcctagagagtcctttcaagaactaattgaaattattcaagcacaggctgatctcaactcacaattcaatgtttcggacattgaccacattgaaaggtggatttcatgcatgtatatggctcttcctatcttcatgagaggagcatcagcaagcaagttcctcaattacttcgttaagcaaattgttccagcattcgagaagattcctgaagaaaagaaactggatttgctcaagactattgcttcaagttcaccgtacgcgacagctcaagattcacgtcagctgcttccatctgttgttcagttactcaacaaatatatgcctgggaagaaggtggacgatatcaaccataattatgttgaatgcttgctgtacacttatcatcatttggctcataagactccaaacacaacgaacagtctatgtggttacaagattgttactgggcaaccatcggatagacttggagaggacttcacagagcattacaaagattttacagagaggtagcttacagtagctaatttgtatgttctgttttgttttgtgtggctttgtttaaaagcactagctgagcgagctagttgttagttctagccacttgctttgtaattttacaccaagctttctgttcatgtagcttgacctcccatttcctcgtcaatccttttggcttcatctcattaactgtggtgtctagtctgcattagagtcctttcggatgtgaatattgagctgctggaattgaaaggttttaataccaaattagactagtttt

SEQ ID NO: 95015 - DNA, 2506 bp, Zea mays
  Clone ID: MRT4577_186646C.1
acattggatacctcgaggccggccggggtggcaagaaccacttttccccatcccttcccagttctgtccctctcgaaccctaactccaaaaaccctcgctctcctctcatggccgccgccgcagctgacgacgcagccgaggtggagcggctttacgagctcggcgagcgcctctcctccgccaatgacaagtccgagcatgcggcggactacgaggcgattattgcagcggtgaagggacagagtgccaaggcgaagcagctcgcagcgcagcttatccccaggttcttccggagcttccctgcactcggcacgcgcgccatgtcagccatgttcgatctcgtcgatatggaggagctcgcgatcagaatacaagctattcgtggttttccacttcttggcaaagatactgaatttgtgtcaaaaattgcagatgttttgggacagctccttacaagcgaggaaaatgttgaacgtgatgctgttcataaagcgctcatgtcccttatacggcaagatgttaaaaattctttacaacctttatttaagcatgtggagcaaggatcagagattcgtgagaagattatttgttttcttcgagacaaggtttttcctcttaaagcagagctgctgaaacctcaagcagaaatggagagatttataacggatttgataaagaaaagtgtgcaagatgtaactggttcagaatttgaactattcatggggttcttgcgaagcttgagcatatttggggattctgctcctagagagtcctttcaagaactaattgaaattattcaagcacaggctgatctgaattcacaattcaacgtttctgacattgaccacattgagaggtggatttcatgcatgtatatggctcttccgatcttcatgagaggagcatcagcaagcaagttcctcaattacttcgttaaacaaattgttccagcatttgagaagattcctgaagaaaagaaactggatttgctaaagactattgcttcaagttcaccatatgctgcagcacaagattcacgtcagctgcttccatctgttgttcagttactcaagaagtatatgcctgggaagaaggtggaagatatcaaccataattatgttgagtgcttgctatacacttttcatcatttggctcacaagactccaaacacaacgaacagtctatgtggttacaagattgttactgggcaaccatcagatagacttggagaggacttctcagagcattacaaagatttcacagagaggttaactggaacagaagagacggtacgagcagcctcaaagcgactaactcaggggatggcagatttcaacaaggcaatatcttcagcaaaaactgacgaggaaaagactaaaattaaaggcgatcagcaaacttcaacaaggacaatgaggtcatataacaatatattggcaatgacacagtcattgcattcaaaatcccctttatttatcggtgataagaaaatcactctgtcatggatggagcagcccaacaaagcagcagctacgaaagcaggggggaagaggtcacaacctagtacaaatgggaatgaccctgcaaacaagaaggggagaggaggaatgcaaaaccagctagtgaacagagcttttgaaggactgtctcatgttggaagaggcagtggaagagggcggggcaggggtggccgaggaagaggaagaggatggagtgggtaccactgagatgacctggaaattctgttcaaacctgacaagggatgagctttctgcttccaccagagagtaaactccaaggtcgatgttttattggtgtgcattactgcaacgcgttgaaatggatcaaggcacacaacagcagaaatgcgtacacagagaaaggatgctaagaaatgtctgcaagtttgtgcatctttcttattcatttaccatctcatcgtgttctttgccaccctaaccgtcgtgtcacttgcgttggctggctgtttgatgaactgggcagttcgatatctttgttctttattttattttacagtgtttgaagagacgaccaagcttgtgctgactttgtttgagttcgttttatgtttcgtccttgtactgacacagatgtattagtgatgtttaacttttatgtaacgattgatctagctgtaatataagttaagcatttaagtaagcaaaaaaaaaaaaaaaaaaaaaaaaaaaaaaaaaaaaaaaaaaaaaaaaaaaaaagggcggacgataaaaagggtggaggcttaagaaaggaaaatgcgaagcatatgtttctatagggacatctaaattaaatgaactggacgtaaatttacagggtggtgactgaaaaaaccctgacgggaaaaaacttaatggtaccgaagtaaatccccttttagaaaattggctttaaagcaaatagggcaataccgattgacttgacaaaaatttgccttccctaaatggggaatggtacacgccctgtagggacgcattaagagcg

SEQ ID NO: 95016 - DNA, 696 bp, Zea mays
  unsure (1)..(696): unsure at all n locations
  Clone ID: MRT4577_186647C.1
ctcgaggccggccgggaacgacactgccatacctgccccctctacccgactggccatgttctcgccagccgttggcagagtcgctcgctctgcaaacaccttctctgctgcgccttatgccgcgctaaatgcatgtgcccgctctgcgctgagcacaagcactgcaccgcaacagcctttccggccgagtcaccagcgccgctactcgtcgtccaagccctcgacccccgcaaacaacaagaagaagcccgccgaattagatcagaatgctacagcagaacttcagggtgcaggacagaagaccaaggggcagaagaagctgaaacagccttcgactgcgaccttgggcaacaatgtgccctttgtgccgccgaccaaccacctccgggaagatgatgtcaagttatcggccttcttcggtctccaccgccccatttctatttcgcgcgcgttcccaaactcgacctcgaccgccgaatttgacgccttcttcgacgtggaccgagctagtcaggttgagaggatagaggcaaccaagaacgtactcagcggattcctcgagcgcatgcatgccgagattgatgcgcaggaggagcaacgagctgatgcgacacagtcggaccagcaggtatatcaccttgatgntcaaccgacacaacacagcgtagagagttgggcagctcgtctcgttccctt

SEQ ID NO: 95017 - DNA, 683 bp, Zea mays
  Clone ID: MRT4577_186648C.1
cgttgctgtcgcccccccccttttttttttttttttcatcatctcaaggatctcccacataacaggtatattacagtaatcacatttgatacacacacattggagatagaacggaagacttttacaaagtacactttacattccagaactcaagttttacatggtagaatgagatgtatttattacaagtcctgatagtactcaaagtgcataacttattacaataattggaagggtgaagcctttccataagagatatataaaaacattctaagcttcaagtcctccacatgaagtaactaacccaaagataagtgaataaaacttctcctttgttgcagagacggaggtctaaatccctctattaaaccccagttagatggctcccattacttgttgagcaggcactaaagcagactcctcttcagaaaccacttcttgaatttcatcttcttcttctgggaattacctcacacaaatagtgaacaaaagctggaacttgaggactgggaggaacttttctgaactcagcactcaaggtagctgaacatgtaatcaattatctctgaacttgtatacaactcagtggagaaagactcccagggtgccagcacaacatggacacaaatacatggcttacaagcaccaacaccacgccaacattcaagccgagccaggacact

SEQ ID NO: 95018 - DNA, 291 bp, Zea mays
  unsure (1)..(291): unsure at all n locations
  Clone ID: MRT4577_186649C.1
gccattctcgctgacncggggatgacttaacagagcacacaggcaggatcccaactacacacagcacacgtctgtcgtacagactactactgcatgaccggtagctacgacttctatatagtatacccacctaaaggaaagatgaaacccctcggcccgggcttgcctctctgtaaatacgattgtacagggcacataacctagtcaggcgcacttaatgatgaatatcaacttccttaaaaaatatttgtatttcacaatgtatcatcaccactaaacatgtctattatt

SEQ ID NO: 95019 - DNA, 501 bp, Zea mays
  Clone ID: MRT4577_18664C.1
ccacccaaaaaacttcattttggacctttacctcataagcaatctaaaggggggcccccccaagggggggttgtgggtaaaacactgtggggttggcaaaagcaggtgggttgaagggcaacaattgttgcagttgaaaaaggggcccagcgttaggcatagcgggcaggtaaaacggcaacaactgttgttgtgtaaaaaaggcagcagggctcacataacctagctggctaaatggaagtagttgttgctgctgaaaataaccagcaaagtcaaatgctgctagtgggttaaatggaaaaaattgctgggggtaggcacaaactagctggctaaagggaaattgtgggggcaaataaccagcaaagttaaatgcacccagttggttgaatggaaaaaactgatgttgctaaaagtatccacaagggtttgctaccacaagttgttgtatttgttgccccctgattttttgggccacaaagggcccaaaggaaactgctg

SEQ ID NO: 95020 - DNA, 698 bp, Zea mays
  unsure (1)..(698): unsure at all n locations
  Clone ID: MRT4577_186650C.1
cccacataacaggtatattacagtaatcacatttgatacacacacattggagatagagcggaagacttttacaaagtacactttacattctagaactcaagttttacatggtagagagagatgtatttattacaagtcctgatagtactcgaagtgcataacttattacaataattggaagggtgaagcctttccataagagatatataaaaaaacattctaagcttcaagtcctccaaatgacgtaactaacccaaagataagggaataaaacttctcctttgttgcagagacggaggtctaaatccctctattaaaccccagttagatggctcccattacttgatgagcaggcactaaagcagactcctcttcagaaaccacttcttgaatttcatcttcttcttctgagaattctggtcacggcgagggtggcatgccagctctaggcagaccaagcttgatgactggggagaggctacaccaactagaacacaagtagctccacaccctgcagtggtctgtaggtggaactcaaggcagggagggcgaccttcactgaattttgccttttaagcagctagaatggacagatgccccgtaaacctgttcaacatttttttttttttttttttttttttntaatttttttttttttttttttaatttttccccggccggcctcgagggtcccaatg

SEQ ID NO: 95021 - DNA, 322 bp, Zea mays
  Clone ID: MRT4577_186652C.1
ccccccaaaaaattaacctgggccgggggcaaaaaccggttctacctaacaaaggtaaaaccaaaatttaggggaaccccccaacaaccggccccaaaagctttaaacggatttcccccataaccacccccggtttggaaggcaacctttcctaagaaagctaacaaaccccccccctttgaaagaacctccgggaggccccccctaacccctcccctaagagccctttggggcgggggggtaaaaccccccaagttccttttgcccccttttaaaggggcgggcaataaaggcacccctttttaagggggccagatttttt

SEQ ID NO: 95022 - DNA, 251 bp, Zea mays
  unsure (1)..(251): unsure at all n locations
  Clone ID: MRT4577_186653C.1
tattgaggnccggcgcggtcgccctggatgcttaccttggcaacctgcaagaagctctcttcaagatgaacccggacactactcaaatggacatgctgttctgctccactgaagatggccttccgctcctaccggcgcccatggagataacaagagatttttatacggaggggtgttcctgctcccagcctatgtacgtgttcacagtgccccagtaggaggccatggccacggtcctcggccaagtctac

SEQ ID NO: 95023 - DNA, 204 bp, Zea mays
  Clone ID: MRT4577_186654C.1
taaacaaatacattcttgtccgttacaattcctaagcactctatcctcttccacacacctgctatgttttccatcgttctcaccacccactcaccttcagctcaattctccacctattccctgttctaccctaacattccaccattttactgatatcaattacattctgaactattctcctttacctaagaggcccactgcact

SEQ ID NO: 95024 - DNA, 367 bp, Zea mays
  unsure (1)..(367): unsure at all n locations
  Clone ID: MRT4577_186655C.1
cgagaatgccggcgcccctcctcgatttccatactcgttcccccaaccgaaccacaggnacacacctacgacgnggccaccacaccctcctccgncgatnccttctatatacgacgacgacgacgagaagatagacaccaagnagccggttttctcatcatacagaccgagagaacggagccgttccctgcgcacccagacttgcagttgcagatcagccctcctcccccagccaccaaaacaacggagctagggttctggaagagggctctagacgacaccaccacgcctgcgacttcaacagccgtggcggcagccacggacccctccctcgcctaccacacctcggcgccgacataccgccgcc

SEQ ID NO: 95025 - DNA, 640 bp, Zea mays
  Clone ID: MRT4577_186656C.1
aattgaagaagattggattgtttacagtatttgatacaacagtttgtcacagtgaaacatcataattcatttctagcagcgagacaacatctttcgataagccctccttttttttatttgttagctgatcttccaaatcttatagagggcgaatacacaagacaacatgtagcagcacatccttgccattgtagggcttaggaggaaaaaaaaccagcagcacgacactcagatgttagtagctctagctacccgagaactaggctatatgtacatgaaagaatcgtcaaccctagaagagttagaaccgaagaacaaaaaagcaacaggagcacctagctagactgaatcaaacaatggccaagaagaggagcggagcagcagggggatcagtcgtggtagcagaggagcatgacgacgcatcgtcggatgatgtagagcctggccttctgctccctcagcaccccgctgagccctcctcctgccctgcgcttcccatggctgctgctgctgctgctgctccacctccatggcttatccatccgggccaaacgagcacaggctgcgttgctctgggagctgcgaggctctgcagcacagctagctactagtggtgctggatcctggatctcaggatctg

SEQ ID NO: 95026 - DNA, 188 bp, Zea mays
  Clone ID: MRT4577_186657C.1
tctcactaaacatagtgactctctcaccgctcttgatccccgccagaaacgctactacctccaggacgtatggaggcccccccgctcctcctccccagaggagcagtcccggcgccaaatgagcctggtatgggcgagatctacgagattgcccgacccgcaggaggcggtcggccatcaacaacccc

SEQ ID NO: 95027 - DNA, 360 bp, Zea mays
  Clone ID: MRT4577_186658C.1
aattccttctctacccactcatcctgcacacccattaccaacgccaataacaataaaccacacatcacatcccctaatacgatgcaaatatacttcaaaaacccaccataccactataccacatctccaataacaatatccacatatcatcctacacacaccaaacctcaccctcaaaatcaaccccacaaacaccaactcaccaaactcatatcctccatctacctatcatcaattcaccacctatcacaaaccaatcaccactcctctattacatcctacaccttcaacaacctacactcattccatcctcactaacatcaatttttatcttaaacacattacctttccacatttcaa

SEQ ID NO: 95028 - DNA, 292 bp, Zea mays
  Clone ID: MRT4577_186659C.1
cctttctttttttttttttgggtttcttttattttttttgtcactggcaactgaacattaacagaaataggtgatggcttcacggaggaaaacacgagccctttagtcagaaacaggttgtttgccgtcgctaagtacaaccacaaatgggagggaatccacattacatcaaagttactggcattcgaacttgcggtctcaacggctaaagacctttgacagaggccacatcggtagagaacctaacgggccccactacgagcctattcattgctccacacaacttgaaaaa

SEQ ID NO: 95029 - DNA, 583 bp, Zea mays
  unsure (1)..(583): unsure at all n locations
  Clone ID: MRT4577_18665C.1
agcgccatccgctcggccttaagccgcgccgcgcccaacccacgacggccggcagatcatcgtgcttccactctcgcctttccatctgcgagtccccttcccggctccaatctcacatcaactcgggtctttccctgagagatcgtcgttttccctgtttctttcctcccccagcccggttccgattccgacaaagatccgttcttcctagatagacaaggaaagaaagaaaccaagaaccaacctttggcacatggcggagccggccaagaacgaggcccacgtcgtggagatcccggtctccgtcgacggcggcgaagcctccggaggcgaggaggcctttcttgacaaggcggcggcggcggcgggcgagggtcaccctctcggggagatcgcggcgagcgaggggcacctgctgctgctgaagctgtggcagcgggaggaggaccgcctgggccgccgcgcgtgtgcgctggaggcgctcatggacgcggcgcgccgggacgccttctacctctgcgcggccttcctcgcctttcacgggctttgcctcgcgctcctcttcgccgcgtncgtggtcgcc

SEQ ID NO: 95030 - DNA, 779 bp, Zea mays
  Clone ID: MRT4577_186660C.1
aaaataggttactagatgataaaatatttcatgatttatgtaacgaaattgataaaaaaataaaatgtaaagaattcattttagtatattttgctaattataagctgaccggaccatggccagaatactacgaaagcttagaggctaaatcatcaatttcaggacctagatctaattattttataaatgttgtgggaccgcgggtcaattataacataatccaggacccaacattaattaactgaagggggtgtctgtcttctaatttcagtcgttcacaggacaccctacggttcggatccaatcccaccaaagcagcatgtttgttttgatcctgaccgctggttgaccgatcaacggccaaggctatccctctcacctccctttccatccttcatttcctaccccgacggcgctgcgcttctcacgacagcggctatggccggacatcagggagatcggctaccccggcgtacaacttcgctccgacatgctctactcgaagaggaagattggtcggacggcatgggtggattcttaccggccctagagtagtagcagtccttgtccacgaaacaaaggagcaccgcggcggtgatgtactccggcggcgaattcctggtttcccggacgctctccagaccagactccaatgcttgtcgatggcgtagacacgagggggcttcctcctctctttgacccgcatagcaatgttgatggctctcagatttcttcaacaagaacatgcggtggcccctgtcgtgacccccggcccggcc

SEQ ID NO: 95031 - DNA, 232 bp, Zea mays
  Clone ID: MRT4577_186661C.1
cgctgttctcatgaacaaggtcacggtgcacacggtcatcatggagattatgctcagcgtgcctggaatggttgtgctgagcaacacagattatgaagccttcttgctactcggatggatcggcgctgcactattattacgccgagcaccagtaggagtccactcgtaggatacgctggaggactcgcgtctgctgcgcgtccgatggcatggatcgtcgtgttgaagagag

SEQ ID NO: 95032 - DNA, 447 bp, Zea mays
  Clone ID: MRT4577_186662C.1
aaagaaaaacaaaggggcaaacattttttggggccccggcccacgatcatacgggggggcaggcatacccacacgtttacatacgaaagattacggagccccgcttattcgggcataaaacgagggcaaacatacgtacgcgcgcacaaaagggggggcgctcgatatcactctcacacccccccgtaacacacggggggggaccacgaaacggggggatcaatcagccgaaaaaggggggctttttttcgccgccggccccctgggcctccttgggggccttttttttctgggggggcccggggaaggggaaacccccggaaccgacgggcgccgccccccaaaccttcttctggatcttgggggggggggcgggccccggggccttttttgccccgggctttttgaaaaaggcaaaggcccccgcgggaaaggcccccccccccc

SEQ ID NO: 95033 - DNA, 206 bp, Zea mays
  Clone ID: MRT4577_186663C.1
aagctcggaattcggctcgtgcctggtcaccacacaggtttggactagggagacagccgctaggcaccggggggcttttgcacgacagaggcggaccgccctgaatgcccagcgagcggtccacatccacacatgaaattcaggaagcgaaaggacgactaccctatacaaaaacacatctagccggtcaatctcaggaaaaagac

SEQ ID NO: 95034 - DNA, 261 bp, Zea mays
  Clone ID: MRT4577_186664C.1
atctttaacttgtgattactcaaacagatactcaaaacttagagaaaatatcgtctgaagtactctatacgtcctaattagagaacgacatggtggacatttgcgatgattgtgattaagtctgataataggtctactaccttgtttttaaggatggacggagcatctctgtgccactatggatctgctcatagatcagggccatgataaacgcatacagcgactccattgtgttcatgacgacaatgcagactcttttga

SEQ ID NO: 95035 - DNA, 362 bp, Zea mays
  Clone ID: MRT4577_186665C.1
cgaacaacgtacctcgagcagttgtatcacgttgccagaaatatgtgttctctaagatcaaagatattgacactgtgtgccggctgaggaaaatctgtgtaaaggaaaatcttgatgttgagctagcagctttggatttgatagctctgaattcagatggctcgctacgagatgcagaaacaatgttagatcaattgagcttgttagggaaaaagataactccttcacttgtcaatgatttggttggtgttgtctcggaagagaaattgcttgatcttctggagatagctatgtcaggagacacggctgagacagtgaaaagatccagagagctgatggattctggcactgatccaatggca

SEQ ID NO: 95036 - DNA, 387 bp, Zea mays
  Clone ID: MRT4577_186666C.1
cggacgcgtgggcctccctcgaaaccctagcatagccactgccttcccgcacgctaggaaggggaagatatgggcgccgaggaggacgccgctgcacgccgcgagcgtctccgcgccctccgtgccgccaaggacctcctctccacccccgacggcgccccaaccccttccaccgacggagaacaccagtaagatcaccacccccaccacgggaacttccctccttataagaatcaaggcatgctctcgtttttcgtcatggatcaaggcttttcatcactaactcataagaaatggcaaccatgagatggcagaagagccagaattaccaggtcatcaggatgcacctggtgaggctgctaaagaggatggtagccccactgagga

SEQ ID NO: 95037 - DNA, 346 bp, Zea mays
  unsure (1)..(346): unsure at all n locations
  Clone ID: MRT4577_186667C.1
ttcatataaaaaaaaaaaaaaaaaaaaaattaaaatttaaaaaaaaaaaaaaaaaaaaaaagaaaaggaaaaattaaaaaaaaaaaaaggaaaaaaaaaaaggggngnnnntttggggggtccctatataaaatcccaatttactgccccgtccatccaccgtcatagctctcctaaacccaaccaaaatccatccactcccacccttttaacaacaaaacccctggaaaaccccagcctatccccaactaaaaccccccccataacacccccctttttcaaactgaaaaaaccccaaaaaaccccccccccaacccctttcccaacatttacccaacctaaaacc

SEQ ID NO: 95038 - DNA, 1091 bp, Zea mays
  Clone ID: MRT4577_186668C.1
agaaaatagagcctgctccgcagaccagtatgcccttggtgaggcggcggccgggaaaaggcccatcaaccgagagccttcgtcttccttctctcatcctttgctcctcttcaaacgctcgagaaagagagagagactaaatcctccctcgaaaccctagcatagccactgccttcccgcacgctaggaaggggaagatatgggcgccgaggaggacgccgctgcacgccgcgagcgtctccgcgccctccgtgccgccaaggacctcctctccacccccgacggcgccccaaccccttccaccgacggagaacaccaaaatggcaaccatgagatggcagaagagccagaattaccaggtcatcaggatgcacctggtgaggctgctaaagaggatggtagccccactgaggaggccgaagaggttgaagatgatggtgagcttccagccatgaagttcagaaactaccttccccatgatgaacaacttcgaggaggcaagctggctccagtgtctcttcccaagtttgaagacccaattagtgccgaaactgcagagccaaaggaagtggagaacctttttggaaacatagcaccaaagaatccaaattgggatctgaaacgtgatgtgcagaagagaattgataaactggaaaggcgcacgcagaaagcgttggctgagattgcattggaacagcagagggagaaggaagccttggaggaatctcaagattgaccgacctgtataagtgaccagtgactcatgctggttggtccctcgagcagacgtcattatcttatttagataatgtaatgtactttgggatgctctgtgtatctaccatcttgggatgtactgaattgagtttgggacgtgtatctacctaccatcttgtattgtcagctcaaggatgtagcaaactagtagcaacttcaaaaaaaaagagatgtagcaatcctgttctgttagacggacctggtcaaactaccgtactgaatacaaacaaagcacaccttcatgctgtgttggactcggtaaaaaaaaaaaaaaaaaaacggccgccttccaaggaccaagctacgacgcgtgc

SEQ ID NO: 95039 - DNA, 688 bp, Zea mays
  Clone ID: MRT4577_186669C.1
cggggacggaagcagcgtgcagcgatacgtaccacagatcgacgactgcgactcgatcgtcgtggagactgcgggatgcctgacgttgtggttatgggaccaaaggtgattatggatgtttccagttccattgagggtgttctgctcggacaaaaaacaacaaaacaaaaaaagcaaacttgatcgttggggttatcttgttgctctgaaccaaaaaaaaaaaaaaacaaaaaagtggaagagcggagccgaagacggaagcagcgtgcagcgatacgtaccacagatcgacgactgcgactcgatcgtcgtggagactgcgggatgcctgacgttgtggttatgggaccaaaggtgattatggatgtttccagttccattgagggtgttctgctcggacaaaaaacaacaaaacaaaaaaagcaaacttgatcgttggggttatcttgttgctctgaaccaaaaaaaaaaaaaaaacaaaaaagtggaagagcggagccgaatacggaagcagcgggcagcgatacgtaccacagatcgacgactgcgactcgatcgtcgtggagactgcgggatgcctgacgttgtggttatgggaccaaaggtgattattggatgtttccagttccattggagggtgttctgctcggacataaaacaacatagcataaaaagcaatctttgatcg

SEQ ID NO: 95040 - DNA, 1511 bp, Zea mays
  Clone ID: MRT4577_18666C.1
cacaatagaagctccggacttctgtattcaaaagttgtttgtcactttacacagttcaacagtttcatgttgaatctaatatttgcattaaaggcatctaatccatttatcaaaactaaaatctacaacggagttgcatatgcctggctatctacagggatcatcagctctccggttgtccagcatcccactgatgatacaccatcccgctactggttcttccttctcgatgacagcggcttcgtagatcttggccaagcttgggactttgaccagaaatggcctgatgaacttggccacgaaatcctcctccgtgatggcagcgatgttgttgaagtccctgccgcgccacagccgccgcgcctgcagcaccctcatcacctggaaccgcggcaccagccgcccctccaggtcgtacctcagcagcgccgggaagctggccacgcgctccgcgtccatcccgacctctgtggtcaggaactcccagttcctccggatccgctccgcggagaccgtcatcagcgtcggcatcttcgcagctgccgtcttcacctgcgcctccgtccacccgagctcgtccctgaagaacgcgaccttccatgcgagccgctccggagtgacgctgaacgccgcgattatcgcgtccttgaacgcccgcgtcttgcgcggcacgccgaactcgtcggcgcgggctaggacggagtcgacctcgtccgggctggcgacaagcagcttggagcagtatgagatggcgaaccagccgacgtcgccatcggtgagggtgccttcctcttggagcagcgcgacggtggacttgaccgtccggaggtcggcggtgaggaggcccgggttgcccttgagcgcggcgacgagcttgtcgacgcgacgacgcagatacgggagccagaactggacactggggacgagcgcgcgtgagcggaatgcggccgcgccgcaacgcgcgacgataaggcccatctgaaacgcggtgaaaccgagggcgcggagctcttccgcgcacggcgcgagcgtccttggcacgctgcaggtgagtatcgtcgggtcgcgggccactgccacggcaatgagcggcggggagagctcgagcgtgttggcgaggaaggcgagcacggcgtcgggcttcgagggagacctgatggcggagagctccggcgccacgcgcgcggccacgttggcgtagaggttgcacctgttcacgaggtagtcttcgacggagaaggacgagggcgtggcagcgtctgcggcggtggaagcagatgtgggggcgttgctggtgcaagggagggggcggagacgggatggtgacggcgagggggagtactgcagcgccggcgagagcactggacgccccgggaggagtagcatcgcggcgacgccgatgtgacgctgtacgtcgggatgagcccggaaatcggataggttgtggctgacaggtgtggcgcggagactgctggcgacggtcactgaccccggccggtgataactggccg

SEQ ID NO: 95041 - DNA, 375 bp, Zea mays
  unsure (1)..(375): unsure at all n locations
  Clone ID: MRT4577_186670C.1
tattggcggcacggcgagctttctagacggcgggcgccctaaccgacaagagacttactgtcngaccaggcgagcaagcaggcgtttatatacagagccaaaggtgcctccaatcacaaccatactctgaacgacaccaggactgcccaaatacgctcaatcgaggaaaaaaaccgagaaggaaccataactgttggaaaccaagatcacctgactgacactcccccattaagaatgcgaatagccttgaaacagatggcaatgaccgcgatgggtattccaccggcaggtatgatcatgcttatttcacgatgctaatcaaaggacaggggaacctcacttggcaggctaatgtactgtagggcgtagaacata

SEQ ID NO: 95042 - DNA, 636 bp, Zea mays
  unsure (1)..(636): unsure at all n locations
  Clone ID: MRT4577_186671C.1
cccacgcgtccggttagctttgacatgggtatggatcttcttgtcccgtcatttatccgcatttgaaagtaaacaggattgcttggaattgtagattgattgatcaaggtacagggaatagatgtatatatagtccggagatcttgggtttatagaagtataaccaaacaagatctcctcgttattccctatccataaagtcctatacctatccataataaatacaggagagagctggctggctataggaaacacaacatcattgaaatcgtttgacaaaacttatctgtgttgacaaattcatgcttctattctatgtttatttaaactctggtggatagaggttgcaagttgccactgtgttggtttatattttgcgggcgacccaaaacttgctaaaataaactagcatagtaacatggcattgccacctgttagcacctctgtgttgttaaccattgcttacccacttgcatccctgttgttgtaaccttggaattttaactgtattttctttgcaaaatactatttatattaaatatcacaaggttaattgattaggtttgcatgttgggacatctcanatcgaataattcattggtattttgtaattacaatacgaccttgattttttac

SEQ ID NO: 95043 - DNA, 1463 bp, Zea mays
  Clone ID: MRT4577_186672C.1
gggaccgtccatttggcctttcttcatcaagcaacaaacattacaacaacaggagaacaggcaaaggcctccctcccttcttccctccctcaaatcaggaaaccatccaacttgtcgatcggccttgcttgccttggtactcctgcttccgccatggttcagatcaaagagttgtatcctcccccattccaagttcttgtgtcagcagtgtttaattctggtacccgcgtttgaattttgctgtatatattatttgcgcgtataccttgactcgaatctcgcgcgacgtacgaaagccggatcgtcatgcccatgtccatggaagagtacgagatagggctgagctacaccatcatgaagatggagcagcagaacaccaacagcaaggagggcgtggaggtgctgcagcaggccccgttccacgaggatgccaagcttggcaagggccacttcacttccaaagtttatcatctgcaaagcaagattccgtcatggatgaagggctttgcacctgccagtgccctcgcggtgcacgaggactcgtggtgtgcgtttccaaagagcagaacaggttagcagttttccctttggacagactctgtaatgtaatgaaatgtaaatattccagtggctgagaatgttctctcaacttgtcccccattgtgtttccatgaacggcggcgcgggttccatccattctgactcgcccgcacgctagtgatcaagtgcccgctcttcagcaagtgctcactcaccattgacactgtgaccagacccgacaacggttgctctgaaaatgcgcacggtttgagcggcgagcagttagccgcgagagaagtcgagatcatcgacatcgcttccgtgtcgcgggactactggagcaaggcgatcggcgctccgagtgtcgacctgactgccttcaagtcacagcggacagaacgtggccctcttctcaagggatggatggactcgtgccatccggtgatgaccacgtacaagctggtgaccatggacgctcccatatggggcctcggcgaacgcctggaagactgcatcattgcgggggagagggcgctgttcttggcatgccaccggctgtgcttcgcgtggatcgacgagtggtacggcatgaccgtggagcagatccgcgagatggagcggcagacggacatgctgctcaagaagacgctgaagaaggccgggagcaagcacgagggcaacaggaagacgctcaaagacgagctagtggccgtggggagctagtggccgtggggcatcaaatatgtcacagattaggcatgtgtaagtgtaatgtgtccacaattaactgaagaaaatatgcatcgctgtatgtatctatataggagtacaatcaaggcagccatctgtggtttgtctttaaccccctaaaactagcaagctagctcgtgcaaatagtattatgtcactgcttcctgcattct

SEQ ID NO: 95044 - DNA, 1452 bp, Zea mays
  Clone ID: MRT4577_186673C.1
cccgttcttgtgagtacgtgtagaatataaaggattccacatctacaggaggggagttgcgtaagaaagcttggagactaaaaatcgttctttcgctacgtccattgcctttcttcatcaagcaacaaacaaaaaaacaacaggagaacaggcaaaggcctccctcccttcttccctccctcaaatcaggaaaccatccaacttgtcgatcggccttgcttgccttggtactcctgcttccgccatggttcagatcaaagagttccggatcgtcatgcccatgtccatggaagagtacgagatagggctgagctacaccatcatgaagatggagcagcagaacaccaacagcaaggagggcgtggaggtgctgcagcaggccccgttccacgaggatgccaagcttggcaagggccacttcacttccaaagtttatcatctgcaaagcaagattccgtcatggatgaagggctttgcacctgccagcgccctcgcggtgcacgaggactcgtggtgtgcgtttccaaagagcagaacaggcgggttctgatcaagtgcccgctcttcagcaagtgctcactcaccattgacactgtcaccaggcccgacaacggttgctctgaaaatgcgcacggtttgagcggcgagcagttagccgcgagagaagtcgagatcatcgacatcgcttccgtgtcgcgggactactggagcaaggcgatcggcgctccgagtgtcgacctgactgccttcaagtcacagcggacagaacgtggccctcttctcaagggatggatggactcgtgccatccggtgatgaccacgtacaagctggtgaccatggacgctcccatatggggcctcggcgaacgcctggaagactgcatcattgcgggggagagggcgctgttcttggcatgccaccggctgtgcttcgcgtggatcgacgagtggtacggcatgaccgtggagcagatccgcgagatggagcggcagacggacatgctgctcaagaagacgctgaagaaggccgggagcaataagcacgagggcaacacgaagacgctcaaagacgagctagtggccgtggggagctagtggccgtggggcatcaaacatgtcacagattaggcatgtgcaagtgtaatgtgtccacaattaactgaagaaaatatgcatcgctgtatgtatctatataggagtacaatcaaggcagccatctgtggtttgtctttaactccctaaaactagcaagctagctcgtgcaaatagtattatttcactgcttcctgcattctatttctatcttttattaggtgagtgtccgtgcgttgcaacggaaccgtataataacacaataacttatgtacatatgtgtgttatattgttacatgtatgttctcgtgcgttgcgacagaagtaaaacatttgtataaaacattgatacggaacgac

SEQ ID NO: 95045 - DNA, 989 bp, Zea mays
  Clone ID: MRT4577_186674C.1
cgccacgcgtctgggatccaaactaataaacaccacgcgaggccgccgcgtgcgacctcgaggctccacgtgggcgcccgcgtgccatggctcccacggcgccgacgcagcggccgacgatgcgccactcctccgcgttcctcctcccttcaaccgcaccgtcatcgcccgcgcctggtcccgatgacgccgccgtcgcgctcgtcgtcctcaaccagccgctgccccgcttcgcgcccctcctctggtccagagcggcggtgcgggtgtgcgcggacggtggcgccaaccgcgtcttcgacggcatgccggccctgctccccggccaggaccccgacgaggttcgcgcgagttacaagccagatgtaatcaaaggggatatggactcagtaagaccagaagtgaaggagcattattccaacttgggcaccagaattgttgacgagtcacatgaccaggacacgaccgatttacacaaatgcatagcttttatagctgagaattattctgccactaacaaatctaaccagctcagcatcttggtccttggagcacttgggggaaggtttgatcacgagatgggaaacatcaatgtgcttcatctcttcccaagcatcaatatcgtcctcctatcagatgattgtctgatctttctgctctcgaaaatgcatacccacgagattcacgttgaaaagtcgatcgagggaccccactgtggattgatcccgattggcatgccgtcgactagcaccacgaccaccgggcttcgatggaatctagataataccagtatgagcttcggaggattgatcagcacgtcaaatatcgtggaagaggacaaggtaacggtcacctcggattcagaccttatctggacaacatcgctccggaagtgacactggagtatagagtaccattatactgttgtaatattagagaaataagtgacatgctttcaatatatatatatatatatatatatatatatt

SEQ ID NO: 95046 - DNA, 246 bp, Zea mays
  unsure (1)..(246): unsure at all n locations
  Clone ID: MRT4577_186675C.1
cccggtcgacccagcggtcgggggggtccaaatcaactctcctgggccaactctggaagccagcttgtgtggctgtcataagaaagacaaattaattgttgcaaatgctggggattctcggtgtgttatctcacggaagggtcaggcttacagtttgtcatctgttctccngccnnctcttgaggntgtgtggggggggggggggttttttttcggcnnncgngntgccggccggggggggggggg

SEQ ID NO: 95047 - DNA, 577 bp, Zea mays
  Clone ID: MRT4577_186676C.1
atttccgctctctcttggccgccggtcagctcatcttcgccgctgccactccgctcctcgagccgccagcacgctggctgaagaaacaacgtgctcgtgctgtgcacgagcttcaaagaatgcatcctcagaggctgcctttccgtctgcgtgctcggtgctgttttatgctgctcacctacctactatgttggacgattgacctccttcactctactcatttctacagatacgtctaccatggagataaagaccctcgccacctctaacgtgcaaccatacactacactgctacacatggcgctgacgttgatgatgaaggatgaaacgttggatcaaaccctcgtccacgctgctgagacgaaccacttgatgttcaaatttgctgatgtcagctatgatgatcagcaagagaagatctacgaggcccctgccactgatgtggacgttatgacagaccctttgatgcctgtatacgagacgcgcatagacgagaacttctctgcattatgtcccagattactgtgaacttgatccaaggatacgtctcggattataccttactaccgtgacctct

SEQ ID NO: 95048 - DNA, 547 bp, Zea mays
  Clone ID: MRT4577_186677C.1
cagcatcttggtccttggagcacttgggggaaggtatgatcacgagatgggaaacatcaatgtgcttcatctcttcccaagcatcaatatcgtcctcctatcagatgattgtctgatctttctgctctcgaaaatgcatacccacgagattcacgttgaaaagtcgatcgagggaccccactgtggattgatcccgattggcatgccgtcgactagcaccacgaccaccgggcttcgatggaatctaggttatcctcgtccttatccttcgtaatgcaggcttagcaacagaagttgatgtttacaacgtgattacctctgtacagataataccagtatgagcttcggaggattgatcagcacgtcaaatatcgtggaagaggacaaggtaacggtcacctcggattcagaccttatgtggacaacatcgctccggaagtgaatctacactggagtatagggtaccattatactgttgtaatattagagaaataagtgacatgcttttaatatatttatatatatatatattaaatattctaattct

SEQ ID NO: 95049 - DNA, 213 bp, Zea mays
  unsure (1)..(213): unsure at all n locations
  Clone ID: MRT4577_186678C.1
ggcgtacgtcgtcgtcaaggccatctctctcctcctcacttcctcccctcacgggacagccacgtacaaaggcagctcgccaacgcccagcacctccctcgccgtnnnnctttaaagacagcgcgcgacaagcttaaagctgcagaggaggtgacacagaggccagagcgtcgcnnnnaaccgaaagcagagaggagcgcaatggcggtgacc

SEQ ID NO: 95050 - DNA, 322 bp, Zea mays
  Clone ID: MRT4577_186679C.1
ggggcaaaacaaaaatattaacttcattgtatatagggacaacaactccccattttttccacacacgcattaacatatgatttaatcatatttaacggggggggggaagatgcctcacaataaaagggcagtttagctgtataaggcgtcatcgtcggttgcagccccagcggatgcaaaggggtcggccccaccggcagaacctgcaactgccgtcggttggtcggaaaaccggaacttgttgccaaacccacgggactggtggagtgtctgggccaaagcccggcacttgcggatggcggcatcactgacactggggggg

SEQ ID NO: 95051 - DNA, 244 bp, Zea mays
  Clone ID: MRT4577_18667C.1
tttagttttttattcaaataaggatgcataaggtgatgtttgaagcattaacactcacaaaatatactaaacaaattcgatacaagtactggtttaatttaaaggtgaaggtataaaccatacactatgtccgattattttggttgaacaaatgaatctatttaaatcatggatatttcatatagtacttaccatatacatacaagggttgaacccatttaaagccaactcgtacgttcacgct

SEQ ID NO: 95052 - DNA, 268 bp, Zea mays
  Clone ID: MRT4577_186680C.1
ccacgcgtccggcggcagctgctggcggccgtgggcgcgcacgcgacggtgatcgagctggaggaggccggcgaggaggccgcggcgtctgccgccgcctccgccgtcgtgccggcgctgttcgtgggcggcgcgcccgtgggcgggctggacgggctcatggggctccacctcagcggtctcctagtcccgcggctccgtgaggtcggctgcgctctgcggctaaggccggtccggggcggagttttcacttgctggtggtctggtc

SEQ ID NO: 95053 - DNA, 171 bp, Zea mays
  unsure (1)..(171): unsure at all n locations
  Clone ID: MRT4577_186681C.1
ggttgtcacttcngtccaactggcctgaacacttnaggtgaancntgttnaaatgcacaannaggttttccangaaggcctttcntggntgacaaagtnggtttcantntgagaacnntngccgggggaaggagnttcaaaanttggggangtnggctccaaattctaagg

SEQ ID NO: 95054 - DNA, 308 bp, Zea mays
  Clone ID: MRT4577_186682C.1
tttttttttttttttaacttacaactgcatgcttttgcatccattactccttatgataacttttatgaaaaaaatgggcctgacctattggatgaccgattatacattgttcaacacgcccgagggccattcgggaacaaaagaaagcaatctgatgccggcattttttattcgaagatgctcttaaagaaaggcctggggcaaaggttaataaggttttggctgggcaaaatccctaggggattaacccccacccggttgggggccaaatgtttgtttataaacaaggatgcccggccaactggttc

SEQ ID NO: 95055 - DNA, 555 bp, Zea mays
  Clone ID: MRT4577_186683C.1
tgggaccctcgaggccggccgggattctactaacagacgccattacaggagcagctggacaaccatggcatatgccgctgctcacgtatcattctcagctcacctgcgccgccgccgctctggactccgcgaggacgagcagacacgactaccctgatacaatacacctgaggaggttccatagcaccacgggatgcacgcaccggcgtcctcacacatacgctccaggaaagctgggcccctctcccgacactggactagctgacggtcatggagaccatcacgaatcaccggcacctgatctggcactacgacgagaactggaacatctgccatcacagagacgtatgcctcaagagcgactatactctatctacggcatgctacacagtatgtcagagctctagcttcttcacgatcgtgagggatccctgctacgaccctgataactacgagagcaaggtgattgaagacaacgcgccctgtcactaccatgggcctcaggacctggacgctgctgttactgaggagctgctgcagacactagcatgctcg

SEQ ID NO: 95056 - DNA, 141 bp, Zea mays
  unsure (1)..(141): unsure at all n locations
  Clone ID: MRT4577_186684C.1
ctaggtcatggnnatggtacacatagcaccanngaccaattaactaggcgttcttgctagcgngnctagctaggcnntcgtttggctgcagagaagaggtaacanngcgcaggnnncatggaggggggaagnngaggagga

SEQ ID NO: 95057 - DNA, 397 bp, Zea mays
  unsure (1)..(397): unsure at all n locations
  Clone ID: MRT4577_186685C.1
aaaaaaaaaatggatcatgcccaaccaaatatttcattttaacagaaaggggggggaacgggtcgttcaaacccatacttgctatattaccataatgggggtattgggcacaaaaagggcccccaaattattatacacaggactttccgcccaaaatattataccatgaccacgactaccattttttaaaaaggggggccaccacaaaacagaaggggacaattgttttggatacctttagtttaccaaggaaagggaccgtgtggaaaagggaaaaataaaaatttggggatggccttgtnctcaaactggatatagaaattttgggggccgggtttttttgtttaaaagaatttttnggtgagaataaagttggggggttaagcggggttttttt

SEQ ID NO: 95058 - DNA, 453 bp, Zea mays
  unsure (1)..(453): unsure at all n locations
  Clone ID: MRT4577_186686C.1
ggccgcccggggggggggggnnnggagaaaaagagcgggcgagaancnnngggacaggggcnaagggcacacaanacnccggcnccagagcacaggcggcagccgcggcgcnncnanacagagggcnaacaancgcaaagagaaggcaangggacagcaagaccggcgagggcacgacaagccgaannggagagcagnnannagcnccaacncggccangaaaacgcnnacnaggganaacagagagaccacnggaaaaccccannncggcccccaggagcnccnanagaacangaaangagnngaaaggacannccaancnnccaaggnnacngganggcgncncnncggaanacccgggggcaccaccccgggagagganggnnngncacacnaaganccacccccggaggcggggaannnganccnngcccangagnacgagccgggcgc

SEQ ID NO: 95059 - DNA, 439 bp, Zea mays
  Clone ID: MRT4577_186687C.1
tctttcgcgagcgagcgaccttcctttttttgtgtgagcgaccaacacatacggggcccatggcaaggcaacctctgggatgacttacagctctagcaaactgcatgcacgccacgcacccaggcccaggagacagacctttctttctatatatatatacaagctcgtctcttgtctgcatgcagcagaactggaagctcaccgagatagcgagatacggagtctggcttatggactcatgaatactcccatcatgtgattccatccgagggtgtgaattgacaaggatagacactaccagagagctccagtttgtatatttggcacgtgtggatctaacctaaaataaaaagcagggactagaaagtaattcctagaaaccaaacacccgctaaataagctgcaaactaagacgctctgactttctttttgtacataa

SEQ ID NO: 95060 - DNA, 215 bp, Zea mays
  Clone ID: MRT4577_186688C.1
ttacacaagagagcacgctactactggtcagtcgacaacaagcagacctcgcccaagcgacactccatccactgactgaccgctcatggcgaaggtccacctctacgtcgccgcggcctgcgccgtagaactcgttcttttcaccccggccctcgccggaaaccccgacatgcttcaggacgtctgcccggatgactacccctccccgatgaaac

SEQ ID NO: 95061 - DNA, 621 bp, Zea mays
  Clone ID: MRT4577_186689C.1
cattgggacctcgagccggcggggacaatagcttccttcctccgcctgtgatgtacaatctagccgcgacgaagaggcagactaccccgcaccaagtccagcgaaacaaccgcctgcagttgcaaagtagcacctcatgacctccatatcgtcgctgcccttaacggcgctccgatgagccgccgagtgaagatcgccctcgacagaggccggcgactccggcgctgtcttgagtccgccagagaccacaacagcactcacgctctgagccgcaatgtgtcctcccaacgagtgatctacgacaccctgcgggacaaccacactgaactgccttacgacatacaagccgcccagcccctccattaagactgcagggccacaagaactcttggaggccgaggacctgatgactgctaaaaaacccatcaggaggatgcagtgtacgctattgcattcggcactgcctacgattacctcatgagcgggtaccccagtaacgcggacaacgacaccatcttcgacgcatagataacagcattacatgaggatcctgatcgagacagagctcatgcactaaacaaggaagagtgggcacgttcccagaacggtagtgcctaattt

SEQ ID NO: 95062 - DNA, 258 bp, Zea mays
  Clone ID: MRT4577_186690C.1
cgcccgtggccgtggccgcggcgaacagagccgtagctatatatgctagggcaccacaccggacactgcaccaggcgatctccaaacagttgttatcatatctacttgtgtgcacaggcttcggctagacgaatagtttctcttagatcttgctattttgcttggaacttaacatttcataacttcctaaagtttaaacataaggttaattatattgaactcatagcgtgagagatagaaattggttatatagatctc

SEQ ID NO: 95063 - DNA, 274 bp, Zea mays
  Clone ID: MRT4577_186691C.1
gggggggaccaccaattttaaaaccccgccctttgtttcccaaaaggggtgcttccccctcccttgaaattcccccaaaattccttgcccaacaagttccccccctttacttaccccttggaggggggcgaccacaacctgggggaccggtccccccgaaaagacctttggaggctccccagggaacccccccccccccttttattaaaggggggggggcccttgaacctgggggctgcccccgcctttattccccccctgtggggggttgccc

SEQ ID NO: 95064 - DNA, 424 bp, Zea mays
  Clone ID: MRT4577_186692C.1
gcggcaaatcccaatgctcccagcttgcgcctaaaccctatgttgcctatacgtggcgccgaataagcgcatggccgatcccgtcgagtcccccgacgacgtgtaggcagccaccaccaaccactcgccaccgagcctggcgtcacttacgagcccagagccacgcggcttcatctacttccccatcactgacgacccatccgaacccaacgccgccgaacaggacgaggacaagggcgccggccactacgatgacaactcctgaggacattgtcaagctacttgatccgctgacgccggagcagctcgttgagctgctccgcacggcggcggaggctagccccgccactatggcagacgctcgccgagccgttgaggcctaccctgccaggctgaagctcttcctacacggtctcggatgggg

SEQ ID NO: 95065 - DNA, 543 bp, Zea mays
  Clone ID: MRT4577_186693C.1
ggaaacggggaaccccctttttttttttttgggtggctggaaagggccaaattgattggaaacaagggttttttaccccggggggggaaaagtttcccccaaaaacctttgggggggaaaaaaaaaaaaaaattttgggttaaaaaccaccccccattttttttggggcggcccccaaataagggggcccccatttttaaagggggggaaaaaattttttgggggggttttttgggggggtgaaattgtttaaacccttgggaaaactcttttttggaccgggggcattttttggggggggcaaaaaaaaaaaggccaaaacgttgggggaacccgggaaacctttaaaagttgcccaaaaaaaaccaaggaaagaacccttgcccttttgaccccaagttttttgtttctttaaaagaaccaagggggcccggaaggaaaacaaccctttgggagccattaaaggccccccccggggggaggggggtttttttggaataaacacccccaattcctttttccggaaggaaaaaaggggggttc

SEQ ID NO: 95066 - DNA, 394 bp, Zea mays
  Clone ID: MRT4577_186694C.1
aaacatacgctccttttttctgttacataaaaccaaggcaattcacataaacgtagaattggcccggaatcccccaaacaatatgcaccgatcaacaccggccagggacaggatgatcactgccgcgggcagaacgacaggaaccgacaactactgacctaccgaggggagacctcctgaaggacaaaaccctcacggcaaaaaacgcaccatacgagatctacaaagcactaggcaccggccccaatgatgcccggcccagtcgccgacactagatgcacactacttgctcagggccgacagggagcgaaaacacatgaagcccagcggtctggtttgaaccccactggggcgctacccgccattggtactcccatgtaccagacgcgggttt

SEQ ID NO: 95067 - DNA, 1124 bp, Zea mays
  Clone ID: MRT4577_186695C.1
cttccttctttgtgctctctcgcggccgggcaggccagtactccaagtttaatttcccacaccaaacctcagctcccaccgatcggttccatcaacctaacaatccctcgcttgttagcccgcgcgcgtgtgtcgtgtgcgctgcgtgcgtcccatggctcagcctcgcgtgcacccaaacgcggcggcggcggcggggtgacctggagatgggcggcaacggcggcgtgttcccgccgctgccagttcgcgggcagcccgcctccgtgaaccagcagcagctcggcggcggcccccacacctgggtgggcaacgacgccaacacgctgctggtggtggccacgctgatcaccacgctcacctaccagctcggcaccagcatccccggcggctactggcagcaggacacgacggcggcgtcgagggacggcaaggagcaggtcacgtaccgcgccggcgaccccatcatgcgcgacctgcaccggccaaggtactgggtgttcatgggcgcgagctgggtggggttcgcgagctccatgatgatgacgctgagcctgctggtgcggatgcccgttgactcgcgccacgtgcgctggtccttcgtggtggcctactccagcctggtgctcaccttcgtggtgtcgcagcccaagacgcacctgtcgctggacctcctcatctgggccgccgtcctcgtcttcctctggatcatcgtcagcctccacccggaccgccgcgcgcgcgtcatccaggagctctgctgcggtggccgcgagacctgaagcagagcaaaccccgaccgacgtaccacgaatgattagttgttgctttttttttttttggtgacgatggggtaattgactgtcttttctcttctagtcgaccaagatgtaaacaaaatcccgctgcacaaggtagccagagcctatgtccttgattgagcgctacagtagtctacattcgtatcaagtagaatctagataggcagatgaacacgctggcatgatttagcgtaatcttttcggcacccgcctgcaatttaaaaaaactagactagatatttccaagtcaacgtgtaaagaaaaaaagaaaaatcaatggccattcgctagttttcttagtcc

SEQ ID NO: 95068 - DNA, 169 bp, Zea mays
  Clone ID: MRT4577_186696C.1
cacccaaagaccccaccacccgacaaccctgctctacactgcaacgcaagctgagcttcgcctacacgacgcaccagccaaagacaatgcaaccggcagggcagcccacccggccacacagaaacgtacacacataagcaaccctacaacacattaacgctgcccaccc

SEQ ID NO: 95069 - DNA, 287 bp, Zea mays
  Clone ID: MRT4577_186697C.1
ccgggaaaaagattcaccaaaggacaggaacaattccactttgggttttccgtcaggcattccgtagggaaactcccattttaggagtaaaaccaggacgtattaaaaaaggatcgccgcggaaggttccgatggaaataggatctaaccagggagaagcactggccattcgttggttattagaagcatcccaaaggcgtccgggtggaaatatggttttcaatttaagttccgatttaatggatgctgccaaggggggtgggggtgccttacgcaaaagggaagcg

SEQ ID NO: 95070 - DNA, 559 bp, Zea mays
  Clone ID: MRT4577_186698C.1
aattcggcacgagggagagaagcaaaatgtaattgatcaagatcctgagggtaagtacgaagctttggataagtatggaaaggatctgacagctatggcacgtcaagggaagcttgatccagttattggaagagatgatgagattcgaagatgtatacaaattttatcacgaagaacaaagaacaatccagttctaattggtgaacctggtgtagggaaaacggctatagctgaaggactagctcagaggattgttcaaggagatgtcccacaagctctgacaaaccggcgagtaagttattcattcatgtattatgcatttatgttcttcagagtcaagcacatttttggattctcttctaaattattgaagaatttgttccacatttatcatgatattttgtcgtagttctagagtacatgacgtgttgtacgttaaagtcttctgttgtctttgagcacttttttatgttgcaaccgattaatgttgaagtagttcatctgaacatagttttcaaaacataatttttccacataattcttccccctggtctatttc

SEQ ID NO: 95071 - DNA, 146 bp, Zea mays
  unsure (1)..(146): unsure at all n locations
  Clone ID: MRT4577_186699C.1
ggcggctgcggacttgctcagcatgcgtaccagcgcgcgcgcggcgcccaggcaccggcatcttttagcaccgcgggggcacgntattttcgctcgtcgtgtgcgccagcgccagcatgaacgttgtcttcatcggcgccgagatg

SEQ ID NO: 95072 - DNA, 682 bp, Zea mays
  Clone ID: MRT4577_18669C.1
ctgcctctctcgtgctctgcttgcgagacagcgagaggatggtgcaatcaaccgcgaggatgatgaagatgaacaaccacacgaagacggcgaggcctaatccgcccacctacaagctctcccacaagataggatctccctgggcgaggagactttgtcaggactgataggcatctgggaacttccaccttatggtcctgaatgatactacctcacgcatgcatcgcattgtactggaatatctacctaatgaaagggatcctggcgggtcggcttcacagagacagctacagaggacgacagatgaatgcaatccacgaccaccactgcttctgcaatcacacacgggaaggtgactgcacgaaacatactgctctagctgaagattatgctgatcatcgaagtgaatcccaagggtggacgcctcatcaccagacactagacgcaaggcgtaatctgaaccgacaggctggaagggtcgctgtctaagcgagaacaaagatctctttggcaaccaaggcgtcacgcataatgggtcgacaaagcagttactctatttgctcttatgagataagattttccactacatacgactttaaggcccattgcatctaggctatgggcccacactatgttaccatagtacctaatgtgataccgagactcaattctctcatctcac

SEQ ID NO: 95073 - DNA, 397 bp, Zea mays
  Clone ID: MRT4577_1866C.1
gccggccgggtcgggatgatctcgagcgccatcgacctgattgcctctgctattgcaccgagatgttcctcaacttcaaggtactcgacatcttcaacagtcccactgcgtgatgttgctccgtgtaccaaatacttctatgaggccatatttcaccgaacaaggaacccatcgagaacctcgatttccacattgcctaccccgagatctgcaaggattgcaacctacgtgcatgccacttccacgatctttgacactccatctactacagagatgcacataatctgtgcagatgaatgtaagcccaagatgaactacgaggagaagcataataagatccagtggttcatgaagaagaaagaagatgtaggccaaagaggacgacagattcttccta

SEQ ID NO: 95074 - DNA, 1273 bp, Zea mays
  unsure (1)..(1273): unsure at all n locations
  Clone ID: MRT4577_186700C.1
cggaagcgtgggcggncgcgtgggcagtcataaaaaatctaaaaatggggtttttaaatttgtagaattctgatgaaaggctgggcaggcagatgcttctgatataaagtgtgctctcccgatgaattcgacagggagaccttgcatgagttgcttacttcccatgaagtaataaggctgaggttaattagtggtgcacaacaatacaaataaatttattttaacatccttacctcatttatcagcttcagatagtgctgttttgtctggatgctaatgagcagcagaatgtgtaaagcgtatttagctgaacgtgctgttcagtcctgaattttttttggtctttggttgtcaatactatacaataatggatgctcccttcgttgagaaggtacatcaattatgtaaggaggaagtttaaaccagtgctgacaaaggaggctgaaagagttatctcaagctattatcatctacagagaaaatcaggaacacataatgcagcaaggacaacagtgcgcatgcttgaaagtttgataaggctagcacaagcacatgcacgactaatgttcagaaatgaggttagacaacttgatgccattgctgccatattatgcatggaatcctccatgacagcatctcctatagtggacatcgttggaaatgctttgcactcaaattttacagttgacggctcgagagaatataaaacacaggagaagaagattctcaagaaactcggaataactcaaggatccccataattcaatacaaacatcagttgctgcatcctgtagatttattaacgtatggacttacatgctattctgcatattgaatcagtgatacatgaagtctcttggtggaacaaggcctgcctttgcagttcatggtgtatatacttcttttgggcatgtaatttgtccaaatttgcaatatgtatcagattggtcttttttgtgagctctttgatgatgggaatgttgtctactgctgaaagtacaacgtcattaaatcctgtaatattcgctcccattggagtcgagtccaggacctaagatgctactaaggcttttataacccctaggctatagttccttttgctgtatcagattggctttgtaatgtgtaacaatttcttgtcacttagtttattacttatgacatctatctgttcacttagtttatatcttatggtatctatctgttcaaatagaaagaaattaagttattgaatgagtgtcgtctgtcaaaaaaaaaaaaaaaaaactcgagg

SEQ ID NO: 95075 - DNA, 736 bp, Zea mays
  Clone ID: MRT4577_186701C.1
cggcttaagcacttaagcaagacttcattaagattttggcgataaagttcatcatcaattaaaacatacttaaaagttgtacgctgaacatttctatctgtcctaacactaggatatcgtaggtagttgattaaaggcgtcctgcagtcaaccgcatcggctgcattgccagccgaattaactaagttgatgtctcttgtgccactggacggtccaaccgtattgcggacggtccggtgacccagcccggatggtctatgaccttggtacttggcccaacacctgtcattggattttcaaaattatgaaattttcctcgctttatccgataatccaatgcattttgtgccaagacgttagctctgcaattcttaactctaaatatatgccaaataccaaattcgtcaaagaagcggattatgtcccaaaacttctcaagataaccatttaaagtatcatttaaacgttgatactcctctaaaatttgttggacgaccagctaataatcaccaaataccttcacatgtttcactcccatgtaatctaagagttctaaaccgaacaagcaagcttcaattgtttgtgcagtgagttttcaataggctagaaaactcaaaagtgggattccttggtgaaacaagcatgatgccaatccatttcccttcattgcagaccgatccatcaaaatatagagtgcagggaagcaacgataaggtatgatatgtctagctcatga

SEQ ID NO: 95076 - DNA, 873 bp, Zea mays
  Clone ID: MRT4577_186702C.1
ctcgaggccggccgggcaggatgtcagaagccgcacacgcggtcacgcggaccgcggacgactgccgccgccgtcgtcgtcgattggctcttctgctctccatcccgacacatcgcgccgcttcaagctaaagtgccactgcgccaccatccatcccggcatctcgcgccgcttcagtctcaagagcagatacgcaggtatggagccacgcactgagggagatgcttccaggaacttgcgccaaggtcgattgctagagccgccaccggtacctgctgtgaggacttctccagaaggagtgcagaggcacacaggtcaggatgtgattgctagtagaagtcaaagtgcagcagcatctgagacgggctcttctttgccatgtgaagatggaaatgcaacggctgaaactattggcagcagcacccatcctgtgcacattggtgtgcaaaaccaagacattgaacaagagcaagttcatgagactggaaagagatacaagaggttgacatctgatgtatggaattactttaccaagaaaaaagagataatagaggagaatgggaagaagtgtgagcaaatttggggttattgcaacttcccaaattgtaagcggcgatatagagcagagggccgccaaggtacaactgcatttaagaatcatttgaggtccgcacacagcatagttcgaggccaacaacaacttaaatttgagaaggaccttggtaataacattacccatatccagcctttcatgtatgatcaagaagttagcgtgaagaaacttatcatggcaataattatgcatgattatcctttcatatagtagagcatggatatttcgttgatttcattaaatcacttcatcctagcttt

SEQ ID NO: 95077 - DNA, 2894 bp, Zea mays
  Clone ID: MRT4577_186703C.1
agccacgcgccagggcccaggaggccagaagccgcacacgcggtcacgcggaccgcggacgactgccgccgccgtcgtcgtcgattggctcgtgagtcctgctcgctgctccttcctacgccgtgccaccgcctgctgtttcgctcgctcgtgcttggctgctcctgactgcaccgcgccgccgccgccgcagttctgctctccatcccgacacatcgcgccgcttcaagctaaagtgccactgcgccaccatccatcccggcatctcgcgccgtttcagtctcaagagcagatacgcaggtatggagccacgcactgagggagatgcttccaggaacttgcgccaaggtcgattgctagagccgccaccggtacctgctgtgaggacttctccagaaggagtgcagaggcacacaggtcaggatgtgattgctagtagaagtcaaagtgcagcagcatctgagacgggctcttctttgccatgtgaagatggaaatgcaacggctgaaactattggcagcagcacccatcctgtgcacattggtgtgcaaaaccaagacattgaacaagagcaagttcatgagactggaaagagatacaagaggttgacatctgatgtatggaattactttaccaagaaaaaagagataatagaggagaatgggaagaagcgtgagcaaatttggggttattgcaacttcccaaattgtaagcggcgatatagagcagagggccgccaaggtacaactgcatttaagaatcatttgaggtccgcacacagcatagttcgaggccaacaacaacttaaatttgagaaggaccttggtaataacattacccatatccagcctttcatgtatgatcaagaagttagcgtgaagaaacttatcatggcaataattatgcatgattatcctttcaatatagtagagcatggatatttcgttgatttcattaaatcacttcatcctagctttccaatcaagagttgtaatgctgttggtaaagaagtaatggatacatatttgggagagaaggagaaattatatgcacatttaaaaactgtgcattgtcgctttagtgtaaccatggatatgtggacatcatgctcgaataaatcatacatgtgtgttactgttcattggataaatgatgattggtgtattcagaagaggattattggtttcttcaatgtcaaaggacgacacactggtaaaaagttgtcagagacctttactgaagctatggttagatggaatcttgataagaagctattttccttgaccttggataatgctagtgcgaatgaattggcagtcaaagatataatttcagatctaaaagatggccaggcttccttagtttgtgatggtctgttttttcatgtaagatgtgcatgtcatatactaaatttagttgctagagatggcctgaaagtaatttcgaaaacaattgacaagatcaaagctcttgtactagctgtgaagggatctccattgcagtggaaggaacttatgaagtgtgctagcgagtcagaattagatacaaagaggggcatctcacttgatgtttcagcaagatggaattcaacttatttaatgctgcgggatgccttgtactacaaggatgcttttgcaaggcttaagtcttcaaatcgtcatatgtatgtaaaaatttatccatctccggatgagtgggacatggcactaaaaatctttcaatgcttgaaaaaagtttatagtctcgctgaaattctctctggcacttcatatccaacagcaaacttgttctatagaggtttttgtgacataaaagtattgctagatgactggtgttctagtgatgatgccaccatcagtgaaatggcaattgccatgagtcaaaaaattgagaaatattgggaacattctaacttggctcttgctgtggcatgctttcttgatcctcgatacaagaaaaaagttatagagtattacatgaagaaattccacggtgatgggtaccatgtggaacttgaaaaaattgttaatgtggtaagagggctctattgtttttattctagctctacacctgcaccagcaaagagtacatcaccggaaccagctaatagtgcatcagatattttaatggcaagtgtatctgatgaactggacagttttctgtatggtacaaatgaacctactctagttcggtccaatgagttggaaaagtacatggcagatccacttttgcgtcttggtggtccatttgatggcccatttgatattttagcgtggtggaagagcaagagggaagtgtatcctattctttcacaaattgttcgagatgtgatggccatacaagtatcaacggttgcatctgaatctgtttttaatgctgctggccgttttgttgatccttatcgtaatcgtcttgagccggagatggtagaggcattgatatgcaccaaagattggatagctgcagaaagaaaagattctaagattgttggttcaattgtgagtgaccttgaaattgagactttatctaccgtcatggctaacaaaataagagctgtggatgacaaggacatagaatggaaggaccaggagcatgatggtgagaacgaatatattgatagtgatcttgatgttatggatgaccacaatgaactttgagctatagctgtaggcttctagtttcagcttaatgtctactgcctttgagttactatgttatgtgtcttgggacttttataaactattatcgtgattgtgcatttgtgggtgtctgcttaattaattagacattgatgttgacttgttatatactccgtccgtcccaaaatatagctgtttctagtctactttttttgtccatatttattcaaatgataataaatatagacatatatg

SEQ ID NO: 95078 - DNA, 452 bp, Zea mays
  Clone ID: MRT4577_186704C.1
tatgacgaaaccgcgcgcgtccgtaagctccggacccgaatagtggccggatctacgagcttactcctctgtggtcacacacttgatatttttgcagaacgacatagatgcgcccaccgaatggtgatcagaaagatcataaggggcctactgacgaggctgctgcatataggctaactccgcaaggaggacaacctgagggttgctagagatatggagaagccacaagtgcaaccactcacaaagcctgacacctgtcataagccggcggagcctccaaagctaaaggccgcatcacctggttttgggaaagcaacaaccgtgtgggagctcgcccacgccttctatacgcctaagtctgatactgcaccacaaacataggccgacccgggctcccaattcaagagttcctcctatcacaaaggctagtaaggatcagtctgacttttcaa

SEQ ID NO: 95079 - DNA, 731 bp, Zea mays
  Clone ID: MRT4577_186705C.1
taacccaaccaacccctccactttccacggcgagccagtagatccaccgatggccggcaccaagcgtggtgggcggaaggggcggaaggcggcggctggcgacgacaagcattctccccccaaaaggaaggcggccagctccggcgacaaggccggggcgtgcgaggcgtccctgccgactctcgacgtcgcgatgctgcggaagaggctcttggaggacctgcaagccttccccgaggcggcggtgttggaggaacatcagctcaaggaggcggtcgacaggctcatcaaggagtccaagcccgagaccgcgaccccgaccgccaaaggcatggttcgcttcggcgacgattagatcagcatggccttcatccacggcaactggttggggttccccaccacagaggacttcccacccaccggggtggtctcgctagggtggctcgatgagcggaggcggcagctagaccttgaggtgcagccggagaagagggaggaacccgacaacatgcgactcctgctcgccaagatccgcgtcgacttgctcaccaagggctacgtcgagctccccgagctgtaccttgactacacgcccccgaaagtcgttgcccgcagcccgcccaagcacatcccaacagcagtggcgagtggataaagcagctatgcaaaggatggctctttgtggtggtggattcatcctgtcctgcacctcgtatctgtcagtatctatc

SEQ ID NO: 95080 - DNA, 357 bp, Zea mays
  Clone ID: MRT4577_186706C.1
ccccccaaagcaccccagggggggaataaaacggaccaatccccagggggggggacccccagacccagccccccaggggcaaaacaccaggaaccaaaaattggggggcccaacattcccccctacaacatggagggcccccaaaggccaaaaagaaggaaaaagggcctgggaggacccttttatggccccaaggatccccaccaaacggatctgaaaaccacccgtgaaaccaggggctgaccattggcaaagggaaaaacacacaggggcagggggaacggtaacttaaaaaaacggccccacaagggagaaaagcatccttgacccctgggacaatcccacctttgaggaaaa

SEQ ID NO: 95081 - DNA, 1204 bp, Zea mays
  Clone ID: MRT4577_186707C.1
ttgggtacctcgaggccggccgggagaactccacttccgtgttagctttgccctcgtgcgagactcgggtactcaatttctgaaggtcgaggcgtgaaagaaaaactccggaggtcgaaatggcggcggcggagaagcccgcggcggtgcgccgagcggaggagctggtggagagggagatgggcgggcgcgacgcctcccacgacgccgcgcacgcgctccgcgtccgagaccttgcgctctcgctcgcagccgaagagggcctctccgctcccgaccgcctcctcaccgtggaactggccgctctcctgcacgacgttggtaacttcctacgcctccatattatcctttatcgatttcatttgctttacctctccaatctatttgagcatcactattttttgtgcaggagattacaagtataccaagtaagggagcttctagtgttttgttaagttcattccttgtatttccgaagggtggaagtggaaggaaattgaattagagttagtggaaccctttgtgctgtagagactgcattagttatagactgttgactgtgttgaggagcgagtttgattctttcatatgtaatgaactgattacttaagtggatgttgggtaggaacaatgtggaggatatgagcgtcgttgagatgtttcttcaagaggtaggattggatgaaggccaaaaggatgaaatagtggcaattattaaggggatgggtgagctattcagttattcatgtttatgcatcttcatttctgttcgaagacatacctcattgggggcacactctagtttaaacattgcatttatgttgtttattcctctttgatatgcatgtgcccattttacttcatccctgattattgatcttcatccacttgttccttcactttactgctgcaaagaattgaaattcgttatgccatttgctaaggtacctgttttgttattacttcatctgaataacccaagtaattcacaggaaaaagcaacatccataagtatgcttattgtataattgtttattcctagcgaattattcttgcaattatgattgcaaaatgtccttctaacccctttaataaactgcagggttcaaaaatgaagtttcaaataaatctattgttgagcccactctctgaattgcaattgtacaagatgcaaatcgctagtatgcaattggggcaattggta

SEQ ID NO: 95082 - DNA, 461 bp, Zea mays
  Clone ID: MRT4577_186708C.1
gggggatcaaaattccggggtccccctttccctttttttacaacctttttccttgttttacccgggcattagctcaaacaaaaaaaaaacaaagaagacgggaagcttatccttgcttttagtaaactaaacaacgagccccttgccgggggaaacggggacgggcaccggcaacccggtccccagggggcttggcccctggaccccccccggggtgggggggggctcccccttttacgtaaccaccaaaatggccgggtcggcgggggccccctccacgtgctttcttgccgggcatccccgcacagggctggacttgtagaacccccgggggtaaggggagcccttgatgggcttttggccgtacttcctccacaagaactcttccggggggatgtcggggaccttcgagctgatccccggcactttgatgctccttttcacgcgggttttcctttttt

SEQ ID NO: 95083 - DNA, 101 bp, Zea mays
  Clone ID: MRT4577_186709C.1
cgtgaggcggttatcaaaggcatggaccataagggtttgcctataatgttattcagcaccgattatgcatcatacgaagccagtttcgatgctggtgtgcc

SEQ ID NO: 95084 - DNA, 297 bp, Zea mays
  Clone ID: MRT4577_18670C.1
gaaggtgtccacggtggtttgatcaacaagaaatgttatgaaatggcctcccaccttcggcgttcccagtactgacctcgtctgtcccttccccttcaccgctccccacagctttgcacccctttcctccccatacacacactaaccattttattttttgggccattaccccataccccttattgctgccaaaaccacatgggctgggggccagggctggatggacagacacctccccctacccatatccctcccgtgtgtggttggaaaacttttgttttttggggtttttttttt

SEQ ID NO: 95085 - DNA, 1277 bp, Zea mays
  Clone ID: MRT4577_186710C.1
gaaaaaatacaaaaaagggggcacgaaaaagttggaggttggagccagcctagaactccacttccgtgttagctttgccctcgtgcgagactctggtactcaatttctgaaggtcgaggcgtgaaagaaaaactccggaggtcgaaatggcggcggcggagaagcccgcggcggtgcggcgagcggaggagctagtggagagggagatgggcgggcgcgacgcctcccacgacgccgcgcacgcgctccgcgtccgagaccttgcgctctcgctcgcagccgaagagggcctctccgctcccgaccgcctcctcaccgtggaactggccgctctcctgcacgacgttggagattacaagtataccaagaacaatgtggaggatatgagcgtcgttgagatgtttcttcaagaggtaggattggatgaaggccaaaaggatgaaatagtggcaattattaaggggatggggttcaaaaatgaagtttcaaataaatctattgttgagcccactcttgaatttgcaattgtacaagatgcagatcgcttggatgcaattggggcaattggtattgcaagatgttttacatatggtggtagcaagaacagcgcattacatgatcctagaattctgccacgtgatagcttgtcgaaggaaaagtacatgtccaaggaagagaagcagacatcaatcaatcattttcatgagaagctttttaaactgaaggacatgatgaagacagaggccgggaaaaggagagctgagaaaaggcataggttcatggaggaatttgtggctgaattctacgaagagtggagtggcagggcttgaggttgaacaaccaggttttgacttgagcctatgtcaaagtgtgcagttggcgaaccatttctcaacaacccatgatgatgttgtctacctgggcctactttttgccgatgaagccacgcaaataaacaatggaaagcctatttagattggctggacaaatcatacggttctgtgataagcaatcaacccactaccaattccgtggatgaagctggatttttttttccaaacagatgccatggcatcttgctgctgttgtattgaaataatactgctacaatattaccggttacatcacctgaaggtcaagcgttttgccaacacatatacatatgtatctatacatatatataaaagttctatactagatgtaaatgaaacaaatgaagagccctgcttctttcatactgtatatctctcttcaaagaagggggggggggggggggg

SEQ ID NO: 95086 - DNA, 265 bp, Zea mays
  unsure (1)..(265): unsure at all n locations
  Clone ID: MRT4577_186711C.1
ctctcggaacggatatctcggctctcgcatcgatgaagaacgtagcaaaatgcgatacctggtgtgaattgcagaatcccgcgaaccatcgagtctaagatataccgtgatccatctcttgcttctatcttcttgatgcataatggcaagtacatcatacacaaggtgaatgacagtgagttgggtgttttactcggtgatgagtggataaagcagatgacaaatagagntcgacgctggagcatggattatcagcgggcaacat

SEQ ID NO: 95087 - DNA, 232 bp, Zea mays
  Clone ID: MRT4577_186712C.1
cctcgagcgaatcggctcacgcgacaataatgacgagccactgcatggcatcatcagccgcactcttggatgctcaccctcgcgctagtggcggccaccgccccacaggtagcggaggcaaagaagaagagcagcggcggagagcggcgaggcggcggcggcgaagaagatccaggacgacttctactcgacgctatacgaagggcaagaacgggacgaacctggtcgtgtg

SEQ ID NO: 95088 - DNA, 499 bp, Zea mays
  unsure (1)..(499): unsure at all n locations
  Clone ID: MRT4577_186713C.1
atggattaacccgtagttagctatctgattatacatggataccttacatgctgcggccgtacagaatccacaacagggcgtgataacgactaacactttctcatctaagattgactactacgatgcatctcattggagatcctagaaacatgatactggtatgggtctcccaattgcgaaagattgttaaggactctgcaccaggactaccttcagacaaaagaggttctttctaaacagatctattccaaactcttatatgtgtaaagttaatatgtgaaattctttgacaggttttcacttactttgtgcgtgtgaacaaacaactccaaataccttgactttttcagaacaggtccaagtgaaataggtactgattagaagaacttntttttgcattacactattgtgaaaacctacagactcgatcgtattgatatgtaaaatacaggattttcggtcctattgttgataaggagagaaatggaatactcaattt

SEQ ID NO: 95089 - DNA, 744 bp, Zea mays
  Clone ID: MRT4577_186714C.1
tggcccgcgccctgcccccctccattccctctcgcgcctccagcaccgcccctctggccctggctccgtcgcctccgctggccttcgcattcccctcgccgacggccatgattgactgcccgcggctgcttcttgctgccgcgagctccgcccccggcccctcgtccgccgcttgccggaggttcgccaccgggtgccctcccttctccctttcatgccgcggccgcctttcttctttccctgacttggatcaccacagtgcaatctgcatcctctggggcggggagccagtcgggcgtcgtggatgagccggaggccgtcgaatgggccatgcaggacttctacgctttgcgcaaggatgttgagttggccgtagagcgtgtcaatgaagtcaggcaggatgctggactggaacagcttctggaggaaatcgcttcactggagaacaagtctggagatatcaccttgtgggatgatccttccaaggcacaggagttgcttgttgctctcacagagctcaaagagaaagtcaaacttcttaacgatttcaagtcgcaggttgaagaagcggataccattgtgcagcttacagaggagttagactccatagacacaggccttcttgaggaggcatcaaagatcataaaggcattgaataaggcactagataattttgaaatggcacggcttctttctgggccttatgacaaggaaggagctgtaattactatctctgcaggcgct

SEQ ID NO: 95090 - DNA, 291 bp, Zea mays
  Clone ID: MRT4577_186715C.1
ttttttttcgttgcaaaacacaaaaggtgggcgtttcttttgattgcatatcacagacactataaggaagccctcataccggcataagatcctaaaatatcaatatattggggatgattaattaacatacatacatcacaaattattttttattcaaatcaatcattaagtgcggcctctcaacaaatccatgtgtacatttgcaaacatactaccatatacctcttcttattaaccaacccttatttaatttaacaaaaaagaacgtacgaatatttttcttctccttat

SEQ ID NO: 95091 - DNA, 285 bp, Zea mays
  Clone ID: MRT4577_186716C.1
tggaggagcggcggcgaggtctatgggggggatttttaagtacctggggcggttctcaaatcaaaacgtgctgatgttctttccctaccaaatggataattatggcccttttggggcaattgttttttgtggaggaattcaattagaaagaataaattattggtctacttcgtttgcttggtgaaaaaatgtaaccttaatttattcttacttgggacaaaaaaaaaattgcacttcatgttgctaaattttaataagtagcttattataacagggcttaatttt

SEQ ID NO: 95092 - DNA, 557 bp, Zea mays
  unsure (1)..(557): unsure at all n locations
  Clone ID: MRT4577_186717C.1
ggnnactgaagaagcncggngngcagcgaccggaccnngnnaaagggggngnccaagcangggcaaagaaccnncgngncaaagaacngaaaccngagacngcannaacgncaanaaangaggangnngaggaaanccnagaacaaanaaagcccacnccaacncnngngnnnggagcggggcngggccncncggcaccccccaaagcnnaacnngaangggagangacnnngcaanacancgcngnnnnaagcgnngggcngacnancaacnngcganncncnacanangaggaccccgaggannnggagaaagaccnaaagcngnngcngncnccagnaagagnaggcgcagacgccnngncangggcagcnaagaagaaagagccaaacaaggagggccngccaacgncnccnnccacgacggcggngaaagaccgggnncnncaggccgcggcgaagcacgagncgcagccancggangccgacgaggcgccgggccaaacagccgaggcangacacgcgccgaaagcnngggagccagncgagccggcccgc

SEQ ID NO: 95093 - DNA, 332 bp, Zea mays
  Clone ID: MRT4577_186718C.1
tcttactctctcacatcacacacgcacttcctgaccactttacctacaagcataccctttcttacaccgatcattctcaatgtaactgatcacattgaatctcttacttacctacctgcttcccaaataataccatctcctaacttcctgaacacagcactcaacaaagcaacctgcacaaaggtgatccagaccgaccacatccgaatacatagcatactcagccccaagctctaaacctactcaccctcaaaatatatcgcataacactactatacactcgaaacactaatctatcccacaagctactaccacactgctaaacttacctc

SEQ ID NO: 95094 - DNA, 407 bp, Zea mays
  Clone ID: MRT4577_186719C.1
gggacaagcaaagggtggaacctaaagggttatggggccccacacgggcccccccccaatcccccccccccaggatgggaattaaattaaaaaaaaaaaccggggaatttggggaaagggcacatgctgggaccgggagggggttttattaggggggggggaaaatgcttttgggaaacttgggccccaaaaaaaggtgtttgggaaaaacagctagggactgggcatttgggcccccaccggggaaggacttgaacagccctgggggaaagttaaccctccccccggggtttttgggcagctccgggccgatcgaaataaaagaccccatgttctccttgggggggaaggccccgggcgaggggttcccagaaaaaggatcatccgggaggggaagggactttttt

SEQ ID NO: 95095 - DNA, 288 bp, Zea mays
  Clone ID: MRT4577_18671C.1
cctgtatagccgtacagccttcttccttttttttttaacataagtacaattgagggggagtgttatcttaacacaaaaggggagactaataaggtatactgttttaatgcggcactagcacacaacgaccatatgcttctttgagccatacaacatcacagaacattcagtattattgaaatgacacgcatccattggagcaccagactaactggaacgcgttgcccggaacagcgaatcttacaggagttggacttggagagggctttaaactcggtcagaacataa

SEQ ID NO: 95096 - DNA, 249 bp, Zea mays
  Clone ID: MRT4577_186720C.1
accaactaacaacatataaatcacaatcgtctaccaaccatcacatggaagatatataacttccttatgcacacccctctatctgcaaacacttctaccaaaaccatacacccacaatactcacaaacttctatacctacctttcttcccccatacctctcactacctcaaaaccccactatattaaaacccaattcttcaaccctacattatccaacactcaataccattaaacatcttaactttatc

SEQ ID NO: 95097 - DNA, 800 bp, Zea mays
  Clone ID: MRT4577_186721C.1
tttctctaattttagcaacaatataaatatggtaataagaaaatatttttctaggtgtcatttgctcgtactttgttatggtttgtagttagtggtacttttggcactttctataaacaaagggtagccttttattctggacgagattattgttttcttaaataatccagtcattgattggtttaaactttaaaatatatttccctttgtaggtttcgtcattcttgcctaccgctgtccctttgcttcagaatacggtgaaacagaagtccttcattggctcttctcatcttggctcacatgcagtacttgaataccagtttcttcctgagcagccaagtgatgcatatgagaggggaagccagttgcgcttctatgatgctctagcagaagtgttaaactcaagggtagattcgttttctataggatcacactttacccatgtagttgagcaggcacctagctatacatttcacagtcaatcatctggttctagctgtttgtcaaatattattgctagcatggctcaaatccaaatattattgctagcatggctcaaatccacggtcaaaaattggcatccctcaagttgtcagatttgaaagctccctcgcatcccctaaaagattgggttatcatgatgaagaacatgtcacgtggacagaaaaacacaagaactatatttatggatatactatttttttcttcttttgtattattatattcatatccttttttacctttatattattattttttatatatgttgtatttgtctaatattacttcatcataatgag

SEQ ID NO: 95098 - DNA, 329 bp, Zea mays
  Clone ID: MRT4577_186722C.1
aaatctaattctacatgttcatactggacagtaaccttttgggcaaaaaccaacacattcccaaacttccaagagaaaaaagaattcccgccccaaaaaggaaaacccacagaggcaacgaggctaggggggagacaaaacaaaacccccatgggcacaggaaaggccaggccccccaccaaggggggggggaataaaagggggagcgatccaacccggtgaccttaaaaactgacccaaaggaagcatccccccccgggggggcaacacaaacactaaaccttgtgacagggacggccaggacaaacacccgaaaccagaaccatggg

SEQ ID NO: 95099 - DNA, 478 bp, Zea mays
  Clone ID: MRT4577_186723C.1
ccggttccggatttccgggttggaccacacccttccggttgttaagccctgaggggctggacctttcttaggaggacctgatggaaaggttggcaacgggtgtttcaatggtggcctccttgcaactggcaatctgttacccgaccttggttgttgggcccaacatgttaataatggggtccaagaatgtgctggttgttgttgccaagacagactactcgtcccaacatgctgccaggaccaaggggtccctaagggcccaaagcaggtttgttgttgccgccccggttgttgttggggactctggcgctgaagttgttccaaaggaagaaaagaaggctgcggaccctgaaaaggagtcggccaaggaattgggtttaagccttttcaacaactagagctgttgttttcggaaaacggctgcaagttttggcttttttttttataattaacaagtactgtttcctttattttttag

SEQ ID NO: 95100 - DNA, 630 bp, Zea mays
  Clone ID: MRT4577_186724C.1
ctgcgtagacagctttgaaagggaacagatttcgtaatccttgtggcatataaatggtaacattgttcataacttttaaactgatatagaacccagttgttaaatataaaaaaaaaaaaaaaaaaaaaaaaaaaaaaaaaaaaaaaaaaaaaaaaaaaaaaaaaaaaaaaaaaaaaaaaaaaaaaaaaaaaaaaaaaaaaaaaaaaaaaaaaaaaaaaaaaaaaaaaaaaaaaaaaaaaaaaaaaaaaaaaaaaaaaaaaaaaaaagggccccagggggccgggccgcctaaaaaaaaggggcccccccgggggggggaattttaaattaaagttttttaaaccccccacccccgggggggggcccggaccccaattccccctaaaggggggcgtattaccccgggccccggggcgggtttttaaaacctgggggggggaaaaacccgggggttccccaaattaaagcgtttggaaaaaaaccccctttgcccagggggggaaaaaaaaaaaaggccccccccgatcccccttcccaaaagttggcccccctaggggggaaagggaaattgcaagcttttaaattttggaaaaatgcgcgtaaaatttttgtaaaaccagcctttttttt

SEQ ID NO: 95101 - DNA, 335 bp, Zea mays
  Clone ID: MRT4577_186725C.1
agcgaatccctcgaatcgtattctcagcctttgctgcatcgcacacccgcgcaaccccagcagccgcatccatggcgcccaaggcagcgaagacgcccgctgcgaaacagccagcgacggatgcaccagctgccgtgaatgcccgaacggcgaacaagcccatggccatcaagcgcctaccaacggccaagtcgatcagccaataatgcggctacatgaagggtaacaggattgcgaagaagtcggtggagacctacaagatctacatcttcaatgcgctaacgcatgtacatcccgacatgatcgtctctttcaaggccatgtacatcatgaac

SEQ ID NO: 95102 - DNA, 1102 bp, Zea mays
  Clone ID: MRT4577_186726C.1
caaaagcacactctgttcggcttgccttgtcctttttccttgccatatggctaccaagatggtcctgtgtcgctttgtagccctcgcggctgtcgcctgcctcctccgccctggcgcgcccgtcgagctccaccgcaagctctccgggtggtccgacgacgcgggcgcgacgtggtacggcgcagccaccggcgctgggagcgacggtggtgcatgcgggtaccagaacgccgtcgaccagccgccgttctcgtccatgatcgccgccggcagtccatccatcttccagaacggcaagggctgcggcgcctgctatcaggtgaaatgcaccgggcacgcgtcgtgctccggcagcccggtgaccgtggtcctcaccgacgagtgccccggcggcgcgtgcctggacgagcccgtgcacttcgacctgagcggcacggcgttcggagccatggcgaaggccggccaggcggaccagctccgcggcgccggacacctcaggatccagtacactcgggtgccgtgcaactggcgagggctggacatcgcgttcaaggtggacgccggctcgaacccgaactacttcgcggtgctcatcgagtacgagtccggggacggcgagctggagtccgtggagctcatgcagcgcggcggcggcggcgggggggcgtgggcgccgatgcagcagtcgtggggcgcggtgtggcggtacaactccggcgacaccctgcaggcgcccttctccgtccgcctcacctccggctccggcaggacggtcgtcgccagcaacgtcatccccgcggggtggacgcccggcgccacgtaccgctcggtcgtcaacttcgacaactaacgaggacggacggacggaccgaaataacggcacgcccgcccgcccgcccgccggccggccgccgggatggccgtgaaaggcgtggcgctatagcttttagtttatgattcgagctgtgcgcgggtgcctactatgccgacgacgctactgtactgttgcgtgcgtgacatgtgcaaatccgcgcagtcaccgtgtaccgccggaatggcgtgtgtttctttgaataaaataaaggctggaccggaagcgaac

SEQ ID NO: 95103 - DNA, 342 bp, Zea mays
  Clone ID: MRT4577_186727C.1
cttgtactatttattttatttggcgaccgtcacaataaggagcgttgcatatctcaaacatcgggccttcatcaactgaggagacagtattttttgctttcgacggtgtaataaagggtttgaccaacaaaagctaccgcccatgagcaagaccaaaggggtgtctgccaagcaaaccgaaccctgtaataaattgttgtccaagctggggacgacgcccggaaaaggggggccgaggggtccaaccaccaagggtcccccaaacctttcttggggcgccctatgtgagcaaaaacctcccaggcactgacggggtcaccaccggcgcttcagttttctaac

SEQ ID NO: 95104 - DNA, 831 bp, Zea mays
  Clone ID: MRT4577_186728C.1
gtgtaatgcctaaatttaatttggtagcctctttacgcaaactaacaatatgcatgcaaatgtctaatgtccactatattagattaaagtaatcaatgacactcttctttggcatacataccaagtggtgattagaatcattatatgcatagcaataggaagagcatcaaaatgaatccttaatttttttctaataaaattcatttagacccgtatcaattaagctaattcagttttatgcaaaaatatatttgtatgctattattagcaacgtgtcggagatatttatgcgctacattcttactctacatgagtgagccaaagagtgttctataagttgcagagtagaaacaaattctaatgatatataaaatcatttcccattctccaccccatgaatctgagatagacttatatccgaacattagaaagtggtggaatgccaaattccaaactaaataggttattttattaagtaaattccaattccttcgagatgaatagatccaaacaccttgtaagagaatttaactatcatatttagctcatgtatgaatagtatgatagaaaaataaaatagcatagataatcatattaaatgggagacagtggtcatttatcatggtgatctccatcaccaagttccatatgtggttgttatgtttcgctcgaggcattcataacatttttctgtaaaatcaaattaggggggagaatcggatagcattgtagatgtaaaaaaggatttgttcaattttccatccgtgagactgagaaacacatccactatggataagggttcgagctattgattgttgtacctttttacca

SEQ ID NO: 95105 - DNA, 1747 bp, Zea mays
  Clone ID: MRT4577_186729C.1
cctcgaggccggccgggaaaccagattcctctccatcgcactccgcctccctccgcctcccttggatcacctccccgtccccaacccaacgaggcaacgagtccccaacgccacccaaagtccagttcacccacacgcgcgctcaccggccgcctagcgcgctctgccccccacggaaatctgcagcgaatagaaaggatttccatcctttccaatcccttccaattctttacggcgtccctcaatccccctataggatccaggttgacccgcattgcccgagccagtcggtttccgtttttggaatttttgtttccacgtgctgccgccgccgctcctaggttcttgttgcaagcgtggaagacggcgagctatatggcgtgcaatcgcggcgtgaaggagcaggaggaccccagcgcggcgtctgcagccccagctccggcggctgtggctagggcgagggcggcgcggcctccgaggccaaggagccgcaaggggctcggcgtgcggcacctgctgaagccctgccgattccttgcagctgtccagagggcgaatgccagggtgagggaagcgggggaggcgaccctcgtggcagcgcttgcggcggcccaaaaggagagcgagagggagaacgaggtggtggccgatgtatgcggcgggtggaagagtgaggatggaagtttaaattgtggatactcaagcattagaggcagaagggtaaacatggaagacttctatgacataaaatcttctagagttgatgataagcaaataaatttttttggagtatttgatggtcatggaggtacccatgctgctgggtatttgaaacaacacttgtttgaaaacctcctaaaacatccagcattcattggtgatactaagtctgcaatgagtcagtcctataaaaaaactgacgcagatttcttggatactgaaggcaatattcatgttggggttgggtcgactgcatcaacagcagttttgattggcaaccatctgtatgtggccaatgttggtgattcaagggctgtactatcaaaggcaggcaaagctattgcactctctgatgaccataaaccaaacagaagtgatgagcagaaacggattgaggatgctggaggagttgttgtttggtctggaacatggagagtaggtggtatacttgcaatgtctagggcatttggcaatcgtttgttgaagcagttcgttgttgcagaccctgagattcaggatctagaaatagatggtgatacggagtttcttattttggccagtgatgggctctgggatgtggtgccaaatgagcatgctgttgcatttgtgaaggacgaggatagccctgaggctgcagcccggaagcttacggagatcgccttcaggcgtgggagcaccgacaacatcacatgcattgttgtagaattttgccacgataagatggttgatggttctcccccgtcaaccaataagagttgacttcatcattcgtgttttaattatcccagatttgctaccatgatgctgcgcctctcgaagtatggtctcatcattggttgtctattatgttcgtttatagtcctgccatgctgattttgtttgcttcggcgcccccaattggttagcctgttgtttggatgcccagcactgtttcgtgcacgctggaccctgactccctgagcacccaggtcaatattatagttccttttcgatttggctgaaaaaaaagaaaataaaaaaaaaaaaa

SEQ ID NO: 95106 - DNA, 2508 bp, Zea mays
  Clone ID: MRT4577_18672C.1
atgtctgaagataaaaaagctgttgccgaaacgaagctgagtctttctgaggagaagaatcttgggtttcttgaatcaatagcaaagacaaatacagagaagatcactaagaagattttagaaggtttatctgaagacactggtgatagtgacagttatgatgtggaaagtgggggcgaggactccgaagatcgaccgtggcgaccaagtcacgcagcacgagaagacattaaagagataatcatgcgccctatctggcagcgcttcgggcttcggaagccgaaggtagaaattaatgaagcagccgaaaaatgccgaaaggcctttggcatagtttgttccttcatcgggacgagggacttagtccaagagcacgtggcctacaggatatggccattagtagccaactgggagatgccgaaagaggccatcagcaacccccacgaaggtggtttggttcgactaaaatataccttcaggtttggagaccaatttattaagccagacgacgattggctaaagtgtgtcgaagctacaagtgatgaactacttgggccgtactccaaagcggaagataatgagctatctgcggccttcggaagccggaaaaagaagagactgaacagagtttttgatgctattgggttcatgtaccctgactaccgctacccgtcacgggggcaaaaaagaaaaagtgcaacctccgggaaaggtgatgcttcagttgctgcaagcgagcccgcgccgaagaggaaaaaggtgaaagtccttacttaccgaccgcactttattgaaccggccatagtgcctgaatttggcggtgaaacctattcggctactgaagccaaagaacctgcagctacgcagaaagctgaagatccggttgcgatgccgaaggcatcaccagccaaatcaggtgagccaaaggccattaatattgaagaagcagaagttgaaagaacaaaaatattagaagtcataagcccttcggcagaggtgacagtgccgaaggcgcaaaaggatcttacaacgactcctaagaggaagaggacagtcaacatactagatgtgctagaaacgataaaaacttcaagctctactccgaagaagattgtcgaagcttcaaaaacacaaattgaggcaaaactatctgaagccgaagctgccaggagccaggccgagaccgaagctgggccttcagagcccgccaaggagaaatccttggaaatcggagaagaagaaacgggaaaagaagctgcaaaacaaattctgtctgaaaaaactgccattcctattcctgaagcatcttccgaagctctcgattatattgtacggcatgcttcgggaaaaaggttatctgaagaggaaaaacgagaagctcaatattatgcccagaaattaaaatatccaaagggggcattaatattcaacggcagcggagaagaagatttcttgtattgtctcccagatagcaagaaaatttctgtctgccaggagatgggcaaaagcttcggattcccgacgctagaagatgggctttcggtgctatcgaaagatgaactggcggacaacttagcatataatagcctaaatggcctcattcttagcaacgccctcagggcacaaaaaagtgccgaagacgaaggatgtactatagctttgaacaaccttcgttccgaagtaattgaactaagtaacaaaggtcttgaaaaagataagattttaaactcattgttgaacaaaataaaagaagacgaagctactttcaaagcccaggctgaagcccagagaagcaaaattgaggatctttggaaactgctggcagaggtaaaattaaaatgtgctattgctgaagctgaccgagacgccattgtagagcttcgctcttcaaaagaaagatgctatggaaaatctatagcatgtgtacaaaggataaaaactagcttcgcaaatattggcgcatattcaaatgaagacaacttcatactgggcgatcccgaaggtccaattgaatggatcagcggcgaagccgaagcttttgaggaagttttgagtggccgtggggacgtctgcgccttttttggtgcaagaggagtcgcatccattttggagaaagcaggatgcgaacatgtgaagattcaggcccaagcggaagctgctttctctattgatgacacgaaggatccctcggccgaagcaagcttaattggcggaaaattctttactgatgtttgggaaaatggcggccaagggatggcccatgcgataataaaaaagagcgaaaaagatactcacgatacgagagaagcagcgaaggcagctgaaaaagctgcggaactcgagagacggatagctgaactatctcctcccccggagcccttcgagtcattgaccgaccccgaagcaaaaaaggaagatgaaattactaagatggccgaagctattatggacgaagttgtgagtcaactactaaacgaagctgcggaagcagttttaaaagaagaatag

SEQ ID NO: 95107 - DNA, 683 bp, Zea mays
  unsure (1)..(683): unsure at all n locations
  Clone ID: MRT4577_186730C.1
cattgggtacctcgaggccggccgggaggacttctgattctctaccaggctctcgngaggtatccagtatcagactcgtagacgatacacaggaagacgagcagcagaagtgtaccccttgtctgtggaggtctcgccggcgctctcctccctcaactcatgcacgcagcactgctacatctgttcgagaaaagactactcctctgctcccagataaggaggatccccaacttctacgctcccacctcgagagaggcacgagcgcacactgccctcaccatctactcatggaacaacaccccacaccatcttacaaatatcacatgaaccacatctgctcgtgactgatgctgaaattcccacaaaggtacttgcatggatcctgaaactactgacagaatcacccacatctgatctttgcaaccgatggatgccttggaaacattggcaagaccttatgtgctgtctgcatgctgctcgtacgaaagaaacttgagaatctgcatgaagaactctcgaacaccagaactgatggcgatggagccctgctacgtgagggctcagctgctttcctgaattccattgtcaacaagaagatcccctttaccacacatcaggcggaggactgcatggctgtgtccgcgacctctgacgatgctgcttctgcccagaagggatcttca

SEQ ID NO: 95108 - DNA, 555 bp, Zea mays
  Clone ID: MRT4577_186731C.1
aaaaaaaatttgggatggccccgggcaggacccaaaaacaaggaaggaggaaaaacccaaccccttgtttattttgaaaaaaaatgggggcaaacggcccttgtacccacacaaaactttgggttggtaacccgggagggtttggggaggggaaaaccaccccccaccccccttgaggaagttgccgaaggggctcaacgggggcaccctaaaaaacgggtgggggacgtccccaaaaacctgggcctcgccggaactgatgctttgaaggaggaacggttttgggctttgattgtaaggcacaaaaaccatggccgtttgtttgttttgtttgaacctcatgaccagggacatttgggggggcttccccataaaaaaggccccacaggggctagccatccccgggaaggggagggctccggccattgacaccaaacattgccctcgggggggaaaagacacatttttcacgacggtttttaaaagttcatcgatcctgaaaaaatttgtggggggcacaggaatacctataccccccagggtatttccaaaggc

SEQ ID NO: 95109 - DNA, 246 bp, Zea mays
  Clone ID: MRT4577_186732C.1
tctctctttccaatttctttcaatctgcacctcgccttccttgtgtgcaatccccacctctccggggggtccctcccaaagtggagcggggccccctcaccaaactcctttgacggatgtacggaggagccggctttccgggcacgcagccggtctaccgctcgccgaatgacatcttccgggactaccgggcgcaccatgccggcctaatcagggtgctctccaccgttgtggaaaaattctacc

SEQ ID NO: 95110 - DNA, 855 bp, Zea mays
  Clone ID: MRT4577_186733C.1
gtcacagaatggccgttgagctgatggcttatgccttccttgtggtcagtccacctgacatgagtcaatgctttgaggagatggctgctgctgcatctaataaaacttcatccaaacctggattgaattatcctgacctggaagaacaggcccttcagtttatcttggactgctgtgaatctaatatagaaaaatatacaaagttcttagagggtggcgctggctctccagaagttccaatgaatgcaaagcaagccaacagaacattactgctaaaacagctagcaagagatctgtgcatcagtgaacggagaatcctgtatcgcacacaatatatattgcgtagaagattgagggacatgagaggcggcgaacttagagctctgtcacttttcaacgggctgagaaaactctttaaataaatggatcggctatcttatcttggcagatcttactggacagatttgatttctccagtaacatggtgctttgaccttgccgccaaagcctcagatacttgtatgccaaatcagactgcagtccaggctctcggccgcaaatttcatctagatgctagaaacaagtaaaccttcgatgaaggatagctgtgcgttgagattgaacaacccagagcttatatgtatgtgtgtaatgtagattcagtccaaccatggagtcgttttacgctaggtgcgagcctggccttctgttacgtatataattataaatccagtagccagcaaggcaaccccccacccccatgtgtacacaggatcgatctcagaacagatgatttggttctcccttcaaaaaaaaaaaaaaaaaaaaaaaaagggcggccgccaccgcggtgga

SEQ ID NO: 95111 - DNA, 683 bp, Zea mays
  unsure (1)..(683): unsure at all n locations
  Clone ID: MRT4577_186734C.1
cgtgcctctacacatccggcgtcttcacaancgccgctctcccccgctccgtctccctcccccctcctcccccgatccgctccctccgccgtcagatcccgtcgagcccccccgcgcccccgcgtctaagatgagggagtgcatctcgatccacatcgggcaggccgacatccagggcggcaacgcgtgctgggaactttactgcctcgagcacggaatccagactgagggacagactaacggagacaagatcatctttaggtgttgatgacgccttcaacaccttcttcagcgagaccggagccggcaagtacgtgccccgcgcggtcttcgtcgacctcgagcccaccgagattgacgaggtccgcaccagcgcctaccgccagctcttccaccccgaggagctcatcagcggcaaggaggacgcggacaacgacttcgcccgtgggcactacacaatcggaaaggagattgtggatctctgcctgtaccgcatccgcaagctggtcgacaactgtactggcctgcagggcttcctgttgttcgacacggaaggcggaaggaacgtgtctgggctcgggtagctcctcctccagcgcgtgtccgtggactatggaaaaaagtccaagctcgggtcccccgtgtaccgatcccctcggtgtcgacctctgtggtcgagccct

SEQ ID NO: 95112 - DNA, 823 bp, Zea mays
  Clone ID: MRT4577_186735C.1
ctctgccgccagagatcccaggcctggggtttccggtggaaatatggagggagacagcagcgagatctcggcgccgccgccggcgaacgagcacggcgtccccgacgagctactcgaactagtattcctgagcctcccctcctcactccacctcgtccgtgccgcatgtacgtgcaagcgctggcgccgcatcatcgctgagggcgccttcctcggccgcttccgatctctccgcgcctcccctgtcgtcgccggacactaccgcgtcgatgagcgtacgcatgggtcgtgtccgccgggatgcaaccccgtcttctccctctcgccgtcggcagacaccgtcgacatgctccctcggcacttctcgctcgactttctcccggactgcgacggcggctcctgggacatcgccgacagtcgaggcggcctcatcctcctaagtcagtgcacgcacgccgaggacgaggaggagccgtatctcttccacgacctcctcgtctgcgagcccttgacgcggcgcagcagggtggtcccatgcccggaccggctcgagggctacctctgctgcggcgccttcctgctcgacggcgacggcgacgagactggtgagcgcatcagcctgtcaaatttcagaataatggtggcactccggttggatggcattgccagggcgtgttcattctcctccggcagcgagggtttctggaccatggcgcggatcacggcagacagccacgtgaggcccgagagcagcttatacttcgctcgaaatttcgcccgctatgtctactggaggaccgtagaagccgaaatcattgtcctt

SEQ ID NO: 95113 - DNA, 443 bp, Zea mays
  unsure (1)..(443): unsure at all n locations
  Clone ID: MRT4577_186736C.1
ccggccggggccgngttcaatcacacatgagcaaggcagaagtagagacggtctctagccacccggcgcacgagtcctttaactagactacactcaccttcaaaacaaacacacagggtctgcggtgggtgaactctgaccggggctaaaactacggtgaccgttttatcaatcaacagaagggggttaacgtggcttggtggctgagagcttgccctacagtgcacaagcgggccgagggtgttcccgctgaggccctgacgaacacgcttggacgccatcgtctgactagccgttatctgggcctcaaagcctcgtggactaccgccgagcaggaggccgaccctgtgattgtggacgacgggttacctggactttaattgaggaggagcccgatgatggagagctcgcaaaacagtgggactggaaacacggatgatgca

SEQ ID NO: 95114 - DNA, 316 bp, Zea mays
  Clone ID: MRT4577_186737C.1
gggaccattagcattaaatattattgaatattaattaattgggctaagcccacatttatccaacaaccactacaattcgtctggcataccattcatgattcatcatattggacacaagatcaaatcatcttgatgtaccaaggattagatgactcacggtctccgccctgccaaatccgacacggacttggactttggctgattcttgttcaggtccaaacctgaggacttgcttttggtgagccttcctttttccttccttctccctgcatcgatggaactgctgtgtgctgctgagtgagctgaactgaaccct

SEQ ID NO: 95115 - DNA, 357 bp, Zea mays
  Clone ID: MRT4577_186738C.1
atcacacgtactagtgtcctatggcccgcgagaggtgatgtccaagctcgctgcagtcaatccgacagcggcactgaccctgagcaatactctggatattcactatccatgctcggaggcgagactctgtttccgtgcccacgccatcgtctaaggtaccatagcccatactaatcgagccatgtctgcgacgaggctaaacatttgctcactcatgcgatggatgagatacatgaagatcgatttgccaatagaaaaactgaggacgtaaatctgcacatgagaagactccatggatggccatgagcagattatgatcgacgtgttggagaccatcagctgcaccgctcgataagg

SEQ ID NO: 95116 - DNA, 286 bp, Zea mays
  Clone ID: MRT4577_186739C.1
gggacgcctgggcgggactacccgcttgttctaagcatataaataagcggaggtgaggagacttactaagatatctggagtcacggcaagcgaacacagtgcattcctgctagagaatagggcgaccttgccggcctaattgtacactggtgaggagtacttctggactgaccccgactaagttgtccgtaaagggacgcctgagaaggttagaacctcttgcggcccgtaccctgttgcaccactaggcgccgacaacaagtcgggttgtttgggaatgcatccc

SEQ ID NO: 95117 - DNA, 2241 bp, Zea mays
  Clone ID: MRT4577_18673C.1
atgactcaagataaaaaagctgttgccgaaatgaagctgagcctttctgaggagaagaatcttgggtttcttgaatcgatagcaaagacgaatacagagaagatcactagggagattttagaaggtttatctgaagacacagatgacggagagaagactgtgcctactcccgaagagaatgaagtcgtgatcttccgaagccttttcaaagctgggcttcggttccccttaaatagatttgtggttgaggttttaaagatctatcaggccgcgaggagccagggcttggagccaaatgcaaaaagtttctgcagtatgcacgaactgctatatgagacgaagccctggggtaaagaacagtatcataacaattttggctgctatagcttcgttgcccgctctggctcaagctccccagtgccgacttttcggaagagatggtctggatattggatgaaagaatggttctatgtgaaaaatgatttaaaggcacaagaagacattaaagagataatcatgcgccctatcttgcagcgcttcggccttcggaagccgaaggtagagattgatgaggcagccgaaggatgccgaagagccttcggcatagtttgttctttcatcgggacaagggatctgatccaggagcatatagcttttagagtatggccacttgtggaaaagtgggaaatgccgaaggagactgtcactaagactggcgaaggagagctagttcgattaaagtacaccttcagatatgaaggtaagtttgttgagccggatgatgactggttaaaatgtatcgaagctacaagtgatgaattgcttgggccgtactccagagcggaagataacacattatctgcggccttcgggaaccggaaaaagaagagactaaacagagtttttgatgctattgggttcatgtaccctgactaccgttacccgtcatgggggcaaaagagaaaaggtagaacttccaggaaggatgatgcttcagctactccaagcgagcccgtgccgaagaggaaaaaggtgaaggtccttactcaccgaccgcgctacattgaaccggccacagtgcctgaatatggcggtgagacctcttcggctgctgaagccaaagaaactgcgcctatgcagaaaactgaagagccggctgcaacgccaaagacgccattggccaaattgggcgagtcgaaggttgataatgttaaagaaacagaggtcgagagaacaaagatattagaagttacaagtccttcggcagaagtgacagtgtcgaaggcacaaaaagatcttacagttacccccaagaggaaaaggatggtccacgtactagatgtactggaggaaataaagacttcaagctctactccagggaaaacagccgaagcttcaaaaacacgaattgaaacaaaacaaactgaagctgaagctgcaaagagtcatgccaagaacaaagctgggccttcagagcccgtcaaagagaaatccctggaagctggaggagaagaagtggaaaagaagctgcgaaacaaattctgcctgaaagaaccgtctcttcaactcccgaagcatcttccgaagtatctaactatattgtacgacatgcttcggggaaaagacagcaaggatatttctgtctgccgggagatgggcaaaagcttcggattcccgacgctagaaggtgggctttcggtgctatcgaaagatgaactggtggacagcttagcatataatagcttaaagggcctcattcttagcaacgccctcagggcacaaaaaagtgccaaagatgaaggctgtactatagctttgaacaaccttcgttctgaagtaattgaactaaggaacgaaggtcttgaaaaagataagattttaaactcattgttgaacaaaataaaagaagacgaagctacttccaaagccgaggctgaaaccgagagaagcgaaattgaagatcttcggaaacaggtggcagaggcaaaattaaaaagtgctattaccgaagctgaccgagacgctagtaactactggaaaaattactgggaaaaaacaattgtagagcttcgctcttcaaaagaaagatgctatggaaaatctgtagcatgtgtaaaaaagataaaaactagcttcaccaatattggcgcatattcaaatgaagacaatttcgtactaggcaatcccgaaggtccaattgaatggatcagcggcgaagccgaagcttttgaggaagtttga

SEQ ID NO: 95118 - DNA, 284 bp, Zea mays
  Clone ID: MRT4577_186740C.1
agatcggagagaagctccttccataattattgaaggttattgaacatatttgggagagtcactgtcctttggatgtctgctactcgtacaggtatagatctcgcattatggtgcactatgactctttgggacatacatatacatatgtgcaaactatacataccgagaatcctactcccagttcaatgactcgccagtaatttcagcatcgatatacatctggtacgactcattctaaatttaactcgtcttatgcgtcaccttaactttactgctatagctat

SEQ ID NO: 95119 - DNA, 363 bp, Zea mays
  Clone ID: MRT4577_186741C.1
atattacagatcattccttgcaaggcctaccaatttcccacagacccgcgggccaactcaccgctagacaccccccccgcccccgggggccccccagttcaactgtaataccctcacaaaaccccccaccccagggaatggaaaaaccggtcccaaaaacaaaggaacctccccaaccaaatcacccaaaaaaaacgcccggaaatcaaaagaggaaagcccggggacaaaaatggcgggccccccccaccaaaaatatcgcccccccacccccaaaggccaaaaacaaaaaaacacgcccccagcttaataaaaaaaccagcaccaccgcgaagaaaggggttttcttcatccccccccccg

SEQ ID NO: 95120 - DNA, 1026 bp, Zea mays
  Clone ID: MRT4577_186742C.1
ccttgtttagtctagtggagaaaagagttctttaaaaaaaaaaaaaaaaaggggaaaggccgtccgtcgccgtcgtcaacacgacgtttaacggcggcgcagagcgctaatccagcccaaacacgatatataacggtccgcgccttccgaagacgggaagaacagcctcaggttactcgcagaaaagatttattagctcgccgcgggggtcgaaccgagactcctagctgatcgcgcgcgcacaaggcgagcggacaagaaagcttgctttgtgctcaccggcggcacggaccccctgcgatggaagccgtcggcgtcactcctgcccccgtggcggcgccggagaagaagaagctgcttgacctcaaggaccccttccccgccgccgcgaacggcggcgccaaggcgtccccggcggcgaagtgggcgatgaagaagaagctggtgggcggcgacgccggctacgtgctcgaggacgtgccgcacctcacggattacatgccccagctcccgacatacccgaatcctctccaagacaacccggcgtattcagtcgtcaagcagtatttcgtcaacccagacgacaccgtcacgcagaagattgttgttcataagaccagtgccaggggcacccacttccggcgtgccgggccacggcagcgggtgtacttccagtccgatgaggtgaacgccgccattgtcacctgtggaggcctctgcccgggattgaacacggtcatccgcgagcttgtttgcggcttgtatgatatgtatggcgtctccagcgtcgtcggcatagagggtggatacaagggtttctattctaaaaacactgttgcgttgacaccaaagtcggtgaacgacatccataagagaggcgggactgtcctcggaacctcaagaggagggcatgacactgccaaaatcgttgattgtcttcaggaccgtggcattaaccaggtctatattatcggaggcgacgggactcagaaaggcgcttctgaaatttatgaggaagtccggaga

SEQ ID NO: 95121 - DNA, 568 bp, Zea mays
  Clone ID: MRT4577_186743C.1
ctgcttgacctcaaggaccccttccccgccgccgccaacagcggcgccaaggcgtcctcggcgagtaagtgggcgacgaagaagaagctggtgggcggcgacgccggctacgtgctcgaggacgtgccgcacctcacggattacatgccccagctcccggtgcgttcgagagtcccccatcctcttggtgtgtcacgttgggttcctgacgacatacccgaatcctctccaagacaacccggcgtattcagtcgtcaagcagtatttcgtcaacccagacgacaccgtcacgcagaagattgttgttcataagaccagtgccaggggcacccacttccggcgtgccgggccacggcagcgggtgtacttccagtccgatgaggtgaacgccgccattgtcacctgtggaggcctctgcccgggattgaacacggtcatccgcgagcttgtttgcggcttgtatgatatgtatggcgtctccagcgtcgtcggcatagagggtggatacaagggtttctattctaaaaacactggttgcgtgacaccaaagtcggtgaacgacatccat

SEQ ID NO: 95122 - DNA, 190 bp, Zea mays
  Clone ID: MRT4577_186744C.1
gcatgactttcatgcacacgccgcaggctcgatcctcagagcggcgcgcgccctctgccgccttgcgtattttctcggcttgcacactaaaacaaaaccagggagagtattatgatatcaaaaggggatccgaatgcttaacaaactaggaattcaactacaggactacagtacagttcctttaacaaaa

SEQ ID NO: 95123 - DNA, 427 bp, Zea mays
  Clone ID: MRT4577_186745C.1
atgaaaacatatcaacaccagggtcttactacaggttacaagagtccattacgaggattggtgatcgtgacaatcaagcatggggggttgcgctctaccatttgacactgagcatgactttaatatgacccgatttatggctcccggcctgtccaacctgtgattctacatcctgaacatacctgtcaacgaggggcaagactgagaagtccgtcagaggcctgaatcactatgcttgcctgcacactatgtacgtggccatactgactccatttgctatagctaaagatagcctttaatatagtgctggtggttggcaaaaggcttttgcagagggaggaacccaatgtttgcttggaggatttgtgaacagagcgtgttctaccactttattataacccggtttcctaccttgtttttcgattaa

SEQ ID NO: 95124 - DNA, 315 bp, Zea mays
  unsure (1)..(315): unsure at all n locations
  Clone ID: MRT4577_186746C.1
tttcttttgacacatcacgacgagattcgtaggccttcttgcgcttgctctgatgtctctgtcctcttcggtgatgccatcaccatcatccattcccagtgcccccatgaagcaattggatacaccatgacagattcactctgtcggcacaagctatacgccaatatttcttcctcgtgcgggggggggcatctctgatctggtcataacccatacctttcgtaagagtgcgaaagcacgaagccctttttttgatgttagtgtcntcgcgggcgggacggtggtggcgtgggccccgcggtcgccttgagcggg

SEQ ID NO: 95125 - DNA, 300 bp, Zea mays
  Clone ID: MRT4577_186747C.1
cggtccggtattaattcccggctcgacgagctcatttgtttttggccgcccttattcttctcacggggttgggtttattaaaaatttcatcagcacccgccctgattggtagatcatatataccagggtccaactctatagacacagatccctaactaagtacagaagttcagaggttcaccaacctagtagtacttgttctaccaacatagcttcaggtaaaaggcactattggtaactttacatatatgctccgattacttttgcccagcctcaaagccgagggacttgttatggaac

SEQ ID NO: 95126 - DNA, 266 bp, Zea mays
  Clone ID: MRT4577_186748C.1
cagccaacagtgtggaggctctacaaggcaggctcagcgttctggtttgtgagcaccagtggtgaccctaatgatatcactagcaagttcaagattgagaggcttgaaggggatcatgcttatgagatctacagcttcaagttctgccccagtgtgcctggtgcgctgtgtgctcctgtggggacttttgaagatgctgatggaaccaaagtcatggctgtgggggatgatattgagccttactatgtgaggtttcaaaaagtctc

SEQ ID NO: 95127 - DNA, 478 bp, Zea mays
  unsure (1)..(478): unsure at all n locations
  Clone ID: MRT4577_186749C.1
ggaatctgcgatgtgggccttacgggncaagcccagacccttcccccagntncacttcggtgttgagcctactcagtgactgtcacccactccctcctcgagcacactgtgtggcctactgctggcantgaggcctctactttttttgccgcgtcccttgcattgagcgcccaacctacccatcctcacaggcttgtgtcccangttatctcatcccttactgcctccctgaggttccctggtgctctgttcgtggttgttaacgagctccagaccaacctgctnccctaccccaggatccacttcatgctttcttcgntcgctcctttcntctctgctgccatggcctacctcctgccgctctctgtggctctnnntccccncngcgcccttcnagccatcttccatgctggccacgctcnaccccctccttttcttggtccctgcccgggcggtcgctctttcgggccgcttccag

SEQ ID NO: 95128 - DNA, 297 bp, Zea mays
  Clone ID: MRT4577_18674C.1
cggctcgagcaagcacccacatcggcgggaggagccatagtttttttggtgcccacaagaaacacaccccacgctccactcttcgaccccggccgaaacaaatgtgatggcgcagcatgaatccatggcatctacgaacgacttgccacaggaccactggaaaatgaacggggagttaatagggtacgactttgtcagacgcagaacgcaccgccgatatgtgtgcgacaaggaggaactcctcgcaaacttccctactgaacatgtcattgcaggccagccatttgaacgcctata

SEQ ID NO: 95129 - DNA, 441 bp, Zea mays
  unsure (1)..(441): unsure at all n locations
  Clone ID: MRT4577_186750C.1
aggaacgagtttaaaaccagganagtacgaatcaatttttatcgtgtcattacacntaaaaaaaaaaaaaaaaaaaaaaaaaaaaaaaaaaaaaaaaaaaaaaaaaaaaaaaaaaaaaaaaaaaaaaaaaaaaaaaaaaaaaaaaaaaaaaaaaaaaaaaaaaaaaaagggggggcctagccccaaccacccttaagggggaaattttgcagaattccaaaaaaccgggggggggttgggcatgcctttaaagggccaaattggccctatagggaggggtttaaaaaaaaaatggccggggttttaaaaagccgtgacgggaaaaaacctgggtttcccaaattaaaaagctttgtgccaaaaaccctttttcccagttggggttttaccaaaaaaggccccccccgttcgcctttttcaaattttgcccccccttttttg

SEQ ID NO: 95130 - DNA, 328 bp, Zea mays
  Clone ID: MRT4577_186751C.1
ggggttgggttttttttttttttttttttcggaaaacccaaaaaaccagccatggcccaaaattaagaaccagcaaaggggttggctgatcagcccccgggctggaggtccttggcaagggctaaataaaccttcggaaaaagaatctaaaaaatcctggggggggaaccggaaaatcttccccccatcaggggggcattatcgggacattctagttttcccccgtccaggcccaaagcatataaaggggggggacaagggcccaaaaccctgggcataggccatttttcaaccccagaaccggctaaaaagaccctttttttttttt

SEQ ID NO: 95131 - DNA, 587 bp, Zea mays
  Clone ID: MRT4577_186752C.1
aaaaaaaaaaaaaaaaaaaaaaaaaaaaaaaaaaaaaaaaaaaaaaaaaaaaaaaaaaaaaaaaaaaaaaaaaaaaaaaaaaaaaaaaaaaaaaaaaaaaaaaaaaaaaaaaaaaaaaaaaaaggggggggcggttttaaaggatcaaattttaattccgggggttgggaaggtaaaattttttttttgggggacctaaatttaatttaaggggcggggttttaaaaaggggggaatgggaaaaacctgggggtaaccaaattaaatggcttggaaaaaaatccctttttcccaagtggggaaaaaaaaaaaagggcccgaacgaatggcttttccaaaaatttgccaaccttaatgggaaaagggaaccccccttttaggggccattaaagggggggggggggggggtttaccccaaggggaacctttaattttgcaggggcctaaggcccggtttttttggtttttttcctttttttttgggcaagtttggggggttttcccggaaagttttaaattggggggttccttttagggttccaattaagggttttagggaccttgaacccaaaaaaatttgtttgggg

SEQ ID NO: 95132 - DNA, 241 bp, Zea mays
  unsure (1)..(241): unsure at all n locations
  Clone ID: MRT4577_186753C.1
cacttttcctccgggcaatataggccagctagctctatataccacccgggctccntttaacagggaggagagacccaatgatcctagcaaaacgcacacagcatcaagccaaccagccagctaaaccgaacaatatctacatatatactatcaaccaacaataaagaaaccaaaaaaaaaggcaagcccaccagcgcctgcaaacacaggatctaataaggaatgaaagaaggaagtaacg

SEQ ID NO: 95133 - DNA, 534 bp, Zea mays
  Clone ID: MRT4577_186754C.1
aaactgacgactgagttgaaagaaaaaaaagggaaaaggcgatgaagagaagaaccctaacgcagacagatccatcatgaacatgaccatatcccgccgctaaaaccccggtgcgctcatccggcagcacatgcacctcgctccttcccatctccccgcattcgcctctggccccacgccatgttccatgacctctttccctccgccgcctccaggatgctcagccgcgtatacgacaaacctcaaagacgataactcaaatccacacacaacgatgctcttgacactaacgattcctcacctacagctcctgatgagcaaagattccttcacaaagaacttaacatgaatgttcatgatcataagaaacaagcgcctgacatagaggattctgtatccaacacggacgatacctccacagcaaacatcaaagacacgacatctatgatgatcctgtacaacgacagctgagaatcctcagatataaaaaacatatacatcgtggaaaatcccaataactgactgtcagatctt

SEQ ID NO: 95134 - DNA, 617 bp, Zea mays
  Clone ID: MRT4577_186755C.1
cccccgcacgagcatccatcagcttcacacctaattaaacccacgtctcaatacaatggctgcttctcgtgctgccagcgcaactgctgccttcgtcctcctgcttgccctgctgctgtgcacggggacctcacctgtgactgccgccgttgactgtaccgccgcctgtgttgagccatgcaagagctttgctcaggggatctgctcgacgggcgcctctagcggcacttgtccacctgacgcggtggcgacatgccaacgtgcggctatattggcctgtgggctcagctgcttcactggctgcagtgccgggactttcgtgccttgcgcctgagaatgcatgcatgctggatttcatattgttcttgtcatatttttgcagaaaataaagcaacccctctctccatatctagccgtgggagaggaagcatgcatgcatcacaatccatgttttatttccctttttttcagttattacataccctctcgttggacctccctccaagtatgccctctgaggctcttgagtgtattcatgatactattataatctatttatgatatattttctctgttccaatatattgtttgttttagctcgaaaaaaaaaaaaaaaa

SEQ ID NO: 95135 - DNA, 196 bp, Zea mays
  Clone ID: MRT4577_186756C.1
aattcggcacgaaggtatgcatgttgacaattgatgacgatcttgtgtccatcgacactctaattgaggaccaccttacggaagagcgcgtcagggagtgcggagcggagtcgacacgttcagcatatgcgccgggatctagagggcgggtgatggggcccgggcgggggggggggggggggggggggagagtggg

SEQ ID NO: 95136 - DNA, 279 bp, Zea mays
  Clone ID: MRT4577_186757C.1
cccgaccccaaatcagggcccccctaacgaagccatgaacacaggtttttgagccccaagcccaaacgcagcaacaaagtgttccatgagctggagcgagctaaaatatttacagttgatgccatggcaaaaacggaaattatcattgttccacccccaactacaaagcccatttggtccagtccacaggcacactagccgcagggggcttaagccaacacaagaagctcccctcccgagcctttagatggttaaaaaagagcagcaacatgcattggc

SEQ ID NO: 95137 - DNA, 304 bp, Zea mays
  Clone ID: MRT4577_186758C.1
tcggcttgaggtcggaaggaggcttatttcccaggacaggatgggtcttcttgggcggcctttgatgggggttgaggaagcaccagcggccggcagctgatatatgctctggcgctgtcacttttgccccgagagggcacacgtcagctgcactcatgattgcccgacacaccagccgaattgtcattgctgcgatcgcgagggctactgaacttgctctgttcctttccctacacccgtcgctcatccgaatacggaataatggttcctttggcgccactcccaatgcatccgcactctgcaa

SEQ ID NO: 95138 - DNA, 241 bp, Zea mays
  Clone ID: MRT4577_186759C.1
aactacaaacaattatttttattgactgagaaccacaaattttgttcgggacatttgtttcacggtacactgacaacacaattaaaggggcttggaaggaacacgggttgcaaaatttaacaatgcaacaaaaattccaaattcttttagagcctttttggggcgggttccacggtggcagagcattaaaaatttaagatgtgtttgctcaacggtggcggcggagggacagggtcttttt

SEQ ID NO: 95139 - DNA, 375 bp, Zea mays
  Clone ID: MRT4577_18675C.1
aatttaaattggcccttccccaatcattaatagctctcatactactaacatatttcaaggttcgatcatcctatatagcactcatctggcttgtttctcctgcttttgcatatggctttttccaagctactctctcccctcttcgcctacctaaacaccttaacgttctcaccttcgttgtccatttctttgcaccacttctctcttctgctcctttggctattcgcatctcctatgtaatttttccaactatattacctatttacaacaatcctaccctactaccacactctctttaaaatctaatacctcccctttccatttcttttttcatttgttccacctttgtctatctgcttttataccttcatatct

SEQ ID NO: 95140 - DNA, 254 bp, Zea mays
  Clone ID: MRT4577_186760C.1
cttcccgtctttttttttttttataaaactattttccacctctcgatactgtatcttattatttcgggggtcaactgaccaatattacgccttttctttatatacaattattattatattaaaacatatacttagtctatttctccatttgtaacgttagcatacaactttctctcattaccacctcttcactttccatttttacaattacaacgtctattaactcatccattacaacactttttcacttatat

SEQ ID NO: 95141 - DNA, 329 bp, Zea mays
  Clone ID: MRT4577_186761C.1
gggctcaaacccagcatccaattctttcatttcgaagcttaaataaaagactgcatgaataggccatagttgtacagatccagcgggaataaatccttggctaatccaattttcaatgaataaactatttaagaaggacatgggagtgattgcacagagaggcatcatagacatttgaggcacagacagagggcaaaactccttcaacacggtcacgtatgcttgcctttgagcaacgtcatccccatctgggtatccttttgatgttttttggccaggcttagccaacgtgctctatatcttgaaagagaacccctattcattttctg

SEQ ID NO: 95142 - DNA, 521 bp, Zea mays
  Clone ID: MRT4577_186762C.1
ccggccgggcccggtactcccgacgacagagcgtcccgtagtggatgcatgagatactacaacaacacagcatgttcacctgcctgtcggcgtgacgacagctcgcggatcgcttggccacgagatgtgtagaagcgttgcgggacagacgtccacggctacaaccgaatgataccacaaagaatgctcgcggtggcactaatgagaggatgccatacaacctgccgctttaccactgctgctgatgaatgctctactgaacgcgctcccttctactcggtgaacaagatgtaggtatggttgtgcgatatattccccagtactcccctcgctgactggccactagatagacgacttatgatgattatcgtgtactagatgttactgcgacactgctgagtacgatatatagagcgttgaatggatcaagacagtctatccaactgacacgatggctcgttaacgatcctatgtacgataacatctgcgtcgagtgctggcatgcatggcgcacccttggc

SEQ ID NO: 95143 - DNA, 435 bp, Zea mays
  Clone ID: MRT4577_186763C.1
gtacaggggggaatttaaggggggaaaacctctaaaaaaaacacggggcagaaccgggggggcaaaaattccaccaagccgggaagaaaaaaaccgacaaggccggcggcccccccccccccaagggccaaaaaacagggaccatcccggatttggcccccaaaccgcacagccaagccggaaaaagcaccaaggcccaaggggaaaaagaaaaaaaaccacgggccggaaaaaaagggatgcccccaagggggcccccaatttggccccggccccggcccccaccgtcggcaccaccttgggcaccaacaccacccccgcccgggggaccacacccgggaactccaaaaaaagggccccccggcgaacgaccccggggttatacccggcgaaaaccggacccggacctgaagagggaccaagttgtcccaaagg

SEQ ID NO: 95144 - DNA, 457 bp, Zea mays
  Clone ID: MRT4577_186764C.1
ccggccgggaatcaacaagcgaatctgtagccatctcctgcctcgccaccacactgaacaacagagcctctgcgccaccatgatgatctatgccgcatcatggatagtcatcgagacgcgatcttgaggctatccctcgcgctagtggcggccaccgccccacatgcaacgtcagcaaagaagaagacagcggcgaagagcggacagacggcggaggcgatagacatccaggacgacttctgctctacgctgtgccagggaaagaaagaaacgtacctgcccgtgtgcaatgagttgtgcgagctctcccattagcccaacctggcgctgtacaccaggatctactgcagggtgaagagctcgctagcaaaaaggcatcacggcgccgaccatgaacgtgtgccatgagagagagcatactacgcgtacgatgaagcataggcgtcagaggtcacca

SEQ ID NO: 95145 - DNA, 362 bp, Zea mays
  unsure (1)..(362): unsure at all n locations
  Clone ID: MRT4577_186765C.1
ggtagcgattcggaattcgagcgacgcgtcacgcgtgaacaggaacttcctgatggggtttgaggttatcgaccacattaaggcttctctgtaggctgcctgcccaggcacaggctcctgtccccacattgctacgcttgcggctcgtgattccaccgccctgtttgagtgaccatactgggacgtgccactcggcccgagagacttgctcggtgcaagcatccagagctccaacaatgacatnagagactgcaacaacacactacctactataatctcaaagtttaagcgccacggcctcaatgttagacgatgatgcatccctctcatgtggccacaccattggtatgtctcgttgcact

SEQ ID NO: 95146 - DNA, 290 bp, Zea mays
  Clone ID: MRT4577_186766C.1
ctagacattgcaaggtctttgcaaaatgaagccacaaaacaaaagaccgatttattaaaggaagttgaaagtattagaatggagcttcaacgtgcaagggaggaccgtgacactaaatctgctcaagtagattctttgctggttgatattggaacatacaaagaaatgactggaaaatccgtcattgagttagatagcgccatggcaaaaacctctgccctagaggaaacatgttcgtctcaaaggaagatgatagagacattggaaattaagcttgcagctgccaatga

SEQ ID NO: 95147 - DNA, 167 bp, Zea mays
  Clone ID: MRT4577_186767C.1
cgagcgcacagagacacacacacacacagcgaaaagagcacactactgcgagaaaaaatagttgaggagaggactggatctcaagggaacaagctaagaggagagggaccaaaaaagggcagcgcgaaacgaagagggagaaactctgatatggaactcctacgctt

SEQ ID NO: 95148 - DNA, 226 bp, Zea mays
  Clone ID: MRT4577_186768C.1
taatcgtcggtcgctgagcaaacgcaggcgagggggccgttttaagggaaggaccaccacccatggtgcacgtcaactactaccgctactatggaaagacgtgcaagaaaccaaggcgcacttatgagaaggagcgtcttgatgctgaactgaagctgggcggtgagtctaggctgaggtgcaagcgccagctttggagggaccattatgcactgagcaggatccg

SEQ ID NO: 95149 - DNA, 300 bp, Zea mays
  Clone ID: MRT4577_186769C.1
aagcttctttctttctttctttttcagtttttttagctttactgtctcaaaatgagagcggctataaacacacacagacaggcaaaaacaaagtgtgggcttaagctcaaggacgactattgacaaattatggaacattacgggaggggggggggcgacagacatctttgaaaccatgcttaatttgctcgtacttgcactaccaccaacacctttctttacctgttcgggagacaataaccgctcttatgttgggcccgtaaaactgagaaaactgtacctgcccgggcggacgctcga

SEQ ID NO: 95150 - DNA, 229 bp, Zea mays
  Clone ID: MRT4577_18676C.1
gccgatcctttgattccaagatctatccacacctcttgtttcggtagcagataaccgtaaccagacatatcgggatccgaaaacgctggggccacccatcaacaaattctacaatggcatacacggacactggtccccaaattcgaacaaaccctccacgccaatgctcaatgaccatctcaacattaagatccctaccatacgcaaccttaactttctaaaaatgtgg

SEQ ID NO: 95151 - DNA, 723 bp, Zea mays
  unsure (1)..(723): unsure at all n locations
  Clone ID: MRT4577_186770C.1
gggaccctcgaggccggccgggaagtgcaaccgccgtgccctctccctctctatctgcgacgtctctctaccgccgccgccgccctacgccacgcaaaaaacgtcacaagattcgcccctgctgaaaacgcactcgatggcgtccgcgacgggggtttcctcctcggagatggcggtggaccacgcgacggggccgggcgccgtggacaagccgcggttcgatgctctgacgccgaatgagatgagcggcgggaggccccagttccggaaagtgcccgtcccgcagcaccggttcgcgccgctcaagcgatgctggatggaaatcaaggacgtgaagaccctgcgaggggagcatctgtcgcgtgctatcggccgcctatcagggaaaggaggcaagaccaagtacgctattgagaactctaccaggacccgcatcgttatcgctgatacaaagatccatatacttggatcctttgttaacatcaaggtcgcgcgggattcgctttgcagtctcatcttgggttcacctgctggcaaagtgtattctaagctaagggctgtatcagctaggttggcggaaaggtattaaattagattggttttgcttgtaccgtgtaacggttgcagttttgatcacagtatgttttactagcggatttgtgtgctcggngatgctgngagatttanattggtgtgtacaaaaaaaaaaaaaaaaaagcggcc

SEQ ID NO: 95152 - DNA, 1240 bp, Zea mays
  Clone ID: MRT4577_186771C.1
gggatcatcagggccggccgggaagcctccgcctcttctcccgtttgcgacgactgggtgggctacgccgccgccgccgccgctgccgctgctctacggtgctgagtcctttgccgatttcttcccggcgaagagcgccaccagccttttgcataaatcatcgggtatacatccatcttcatttagtagatccgcccctgctgaaaacgcactcgatggcgtccgcgacggggggttcctcctcggagatggcggtggaccacgcgacggggctgggcaccgtggagaagccgcggtttgatgctctgatgccgagtgagatgagcggcgggaggacccagttccggaaagtgaccgtgccgcagcaccggttcgcgccgctcaagcgatgctggatggaaatctacacacccgtttacgagcacatgaagatcgacatacgcatgaatctcaaggcgaggagggtggagctaaagacaaggcaagacacaccagatgtcagcaaccttcagaaatgtgctgactttgtgcatgcttttatgctcgggttcgacattgctgatgccgtcgccttgctgcgtcttgatgatctgtatgtggattcctttgagatcaaggacgtgaagaccttgcgaggggagcatctgtcgcgcgctattggccgcttatcagggaaaggaggcaagaccaagtacgccattgagaactcaaccaggacccgcattgtcatcgctgatacaaagatccacatacttggatccttcgttaacatcaaggtcgcacgggattcactttgcagtctcatcttgggttctcctgctggcaaagtgtattctaaactaagggctgtatcagctaggttggcggaaaggtattaaattaaatggggtttgcccgcaccgtataagggcatgttcggttcccgctcaattcatatggattggaggggtttgagtgggattaattccatatcaagtcaaaatccttcataatttttttcaatgctttccaatcccatgaggtataggaataactgaacaaggcctaattgttgcagttttggtcacattcacacagtgtgttatagtagcagtttgtgtgctcgggacactggggaagtttaatgtatccttaccttatgaatagcggactatgatgaagggagatttaaattgatatgtattctgtgtttaaaaaaaacccgggggcaaaaaaatatcattaaacatatcaaaaacaa

SEQ ID NO: 95153 - DNA, 1397 bp, Zea mays
  Clone ID: MRT4577_186772C.1
taagctttctttcccctttttatatgcatgaggatttacgcattaattcatataggggggatctcataatttttccaatctttccaatcccacccgggagctaaaggcttgatatatctgcgaagaaaaaccctacgtgatttctccgggcccgtccggaagcctccgcctattctcccgtttgcgacgactgggtgggctacgccgccgccgctgccgctgccgctgctctacggtgctgagtcctttgccgatttcttccccggcgaagagcgccaccagtagatccgcccctgctgaaaacgcactcgatggcgtccgcgacggggggctcctcctcggagatggcggtggaccacgcgacggggctgggcaccgtggagaagccgcggtttgatgctctgatgccgagtgagatgagcggcgggaggacccagttccggaaagtgaccgtgccgcagcaccggttcgcgccgctcaagcgatgctggatggaaatctacacacccgtttacgagcatatgaagatcgacatacgcatgaatctcaaggcgaggagggtggagctaaagacaaggcaagacacaccagatgtcagcaaccttcagaaatgtgctgactttgtgcatgcttttatgctcgggttcgacattgctgatgccgtcgccttgctgcgtcttgatgatctgtatgtggattcctttgagatcaaggacgtgaagaccttgcgaggggagcatctgtcgcgcgctattggccgcttatcagggaaaggaggcaagaccaagtacgccattgagaactcaaccaggacccgcatcgtcatcgctgatacaaagatccacatacttggatccttcgttaacatcaaggtcgcgcgggattcactttgcagtctcatcttgggttctcctgctggcaaagtgtattctaagctaagggctgtatcagctaggttggcggaaaggtattaaattaaataggttttgcccgcaccatatggattggaggggtttgagtgagattaattccatatcaagtcaaaatccttcataattttttccaatcctttccaattccatgaggtataggaataactgaacaaggcctaattgttgcagttttggtcacattcacacagtgtgttatagtagcagtttgtgtgctcgggacactggggaagtttattgtatccttaccttatgaatagcggactatgatgaagggagatttaaattgatatgtatattgataaaaaaaaaaaaaaaaaggcggccgcccttttttattttttttcttttttcaactctttcataaatctttaattctttttcacatcccctttatttctttaaattttctcttcttttttattatttccttttaatttaaattta

SEQ ID NO: 95154 - DNA, 582 bp, Zea mays
  unsure (1)..(582): unsure at all n locations
  Clone ID: MRT4577_186773C.1
ccggccgggagaaagtgtgaaaagcaaccaagaagggtaccannatcttcggatgggtcgtgcctttccccaagacaagatctgagcgaagcattgaccaatgggtatttgcaaagtcaaaatctgaggaaagcatggatcagtggtctgaaataccttcagatgtggaatccttcagagaaggtcctcggtgcgccgggattcagtcagacgaaaacctgcttcgtccgccgattacagccgccgacctccgcagccaactccacctgcatcgctgtcaaagaaggaatcgtgggatgtcattgaagattcggagttcgatatacttgacagttagtaattgagatctttgcgatctcaaggctgtttatccttctattttcttccatgtttccccacacttcacctcgtttgtaaatgtggacgtgcaggtggcgtcagtgatagtgggaaaggactaatgttctttttaccaatatattataacagtgtgtgcatataaatcttctgagctcgcaagctgtgagcctcccaggttaaaagtgtttatatgttgggaaaaaaaaaaaaaaaaaagcggcc

SEQ ID NO: 95155 - DNA, 1207 bp, Zea mays
  Clone ID: MRT4577_186774C.1
cattgggtccctcgaggccggccgggaagcctccgcctcgtctcgacgccttacacccagtgccaaccgccgtgccctcaccctctctatctgcgccgtctctcactctctaccgccgccgccgccgccctacgccacgcaaaaagcgccacaagattcgcccctgctgaaaacgcactcgatggcgtccgcgacgggggtttcctcctcggagatggcggtggaccacgcgacggggccgggcgccgtggacaagccgcggttcgatgctctgacgccgaatgagatgagcggcgggaggccccagttccggaaagtgcccgtcccgcagcaccggttcgcgccgctcaagcgatgctggatggaaatctacacacccgtatacgagcatatgaagatcgatatacgcatgaatctcaaggcaaggagggtggagctaaagacaaggcaagacacaccggacgtgagcaaccttcagaaatgtgcggactttgtgcatgcttttatgcttgggttcgacattgctgatgccgtcgccttgctgcgtcttgatgacctgtatgtggactccttcgaaatcaaggacgtgaagaccctgcgaggggagcatctgtcgcgtgctattggccgcctatcagggaaaggaggcaagaccaagtacgccattgagaactctaccaggacccgcatcgttatcgctgatacaaagatccatatacttggatcctttgttaacatcaaggtcgcgcgggattcgctttgcagtctcatcttgggttcacctgctggcaaagtgtattctaagctaagggctgtatcagctaggttggcggaaaggtattaaattagattggttttgcttgtaccatgtaacggttgcagttttgctgacagtatgttttactagcggatttgtgtgctcggggatgctgggagatttaaattggtgtgtacatgtgctcttgtgccaccacaatctatgtggtggggttgattttgatgaaaattagttattttcttatcctaacccactataaatcgataatatatgtattgaggtgggtatgagtgtagccaaacaaggcttgagatgtgtttctacttgtttcatagagtgcaagatcctttgcgagtagatgcttttccttataaatatgatgtttttcacaccttttatatatctgggcggccgcttttaaggatccaa

SEQ ID NO: 95156 - DNA, 827 bp, Zea mays
  Clone ID: MRT4577_186775C.1
ggccgcggttttttttttttttttttcactttgacggtaaattttgattcattttatggattcatgtacctcgtagacattcaaccgtcaagaagagtcctcaaggtctattcaacacctcatatggcagcgattcattgttttttttttttggtatccttcggtcgggacaacacgtccgtccgatccgcgttgtatattgacgctacaatcacggggcaaagtagagatctgatcttgttttaagaaacttcatattgagcccataaaaaccggggttccttaatgccatcgatgctctttacatcccgccaactccctaaccgtgatggagaaacgattccttttttaaaacttgagaggggtgaagaaccatcggttcttgccgctggtgtatcgctcctcgagcaccttcttgacagtcttcttggcatcctcgcgctgggaaacctccttgaaggtgtcgttggagacggcacccttgaggccctcgagctcgagagtgtagcgagtgggcatcaagtggttgtagttgatgaccttgatgaagggcttgatcttgtttcgcttctcctggcgggtcttggacatgcggcgggtgatcttggaggggtatcgctcaatgccggcaaccagggcgtggccgaaagggtgaggcttgttgccgttgtcaacgggctggatgatgacaaccttctttccggcgtatctgccgcgggtgatgatggcgactcggccgaccttgaggaacttcatcttgtccggcggtgtgttgtctgctggttagtgaagttgcgaggagttgccggccgggtcgtcccggccgg

SEQ ID NO: 95157 - DNA, 1730 bp, Zea mays
  Clone ID: MRT4577_186776C.1
caagtcccaatattgcctccccaccaagcccacgtcaccccacccacaccacgccaaggcaaggccctccagcgaaagcaaagggggaagcaaacccccccgcaccgcgaggccgcaaaagcaatcgcgaaagcgagcgcgaggcgagtcggccggcgaagggggcggatggcgcgcgggctgcgcggcgtccgcgacgacctatccgagctggggcgccacctgctcgacatcgcttgcttcctgcacccgctcctcaacccggcccacaccgactccccgccacccacccccacgggccgccgccgcccgcgccgctccccgtccccgcaccccgccgcgccgccgtcaccgtcgctcctcgcgggcatcctctccgacctcgccgagatcggcggctccttccgcggcggcttctcccgctcctcgccggcgcccgaccaccccgcccccgacgcgctcgagtcacagcaggccgcctcgtccccgtccccgcgtccgcctcctcctgctgctgccgaccagatcgcagatgatgtcgtgggagcagcgcgtgccctcgccgcgcggcccgaggcgtggatcgacttccccgtgctcgccctagatgagggttctgtaatttctggtatccaaagggatcatatggaatccattgaaaaacttgtcccagatttagcatctctacggggtaggctctgtccttcttacatggatgaagacatattctggaagatttactttaggttgcttgagtcaaacataaatgagcatagttctgaggaagatatccggagcgtgccaaattctgtacatcacaacaatgagatagagtctgattctccacctcacgtctgtgagatagaaagtgtgaaaagcaaccaagaagggtaccaatcttcggatggtcgtgctttccccaagacaagatctgagcgaagcattgaccaatgggtatttgcaaagtcaaaatctgaagaaagcatggatcagtggtctgaaataccttcagatgtggaatccttcagagaaggtaaaaggtacctcagtagcgaggagctgagtgacgttgatagtgccaacgttgttgtcatggacaaatacatggattcactcctctctgaccggaggaaccttccctacgctagctcctcggtgcgccgggattcagtcagacgaaaacctgcttcgtccgccgattacagccgccgacctccgcagccaactccacctgcatcgctgtcaaagaaggaatcgtgggatgtcattgaagattcggagttcgatatacttgacagttagtaattgagatctttgcgatctcaaggctgtttatccttctattttcttccatgtttccccacacttcacctcgtttgtaaatgtggacgtgcaggtggcgtcagtgatagtgggaaaggactaatgttctttttaccaatatattataacagtgtgtgcatataaatcttctgagctcgcaagctgtgagcctcccaggttaaaagtgtttatatgttggcatcattgtttgtttcagatattttattgcagaacagaaaattgccacctatcattgcgaaaaaaaaaaaaaaaaaaaaaaaaaaaaaaaccttttttttttttttttttttttttcttcaaccaaagtttctattacgagttacaagttacaagcttcagtggcatactgaacagcatacaacgaccacaaaacaaaacactgttag

SEQ ID NO: 95158 - DNA, 867 bp, Zea mays
  unsure (1)..(867): unsure at all n locations
  Clone ID: MRT4577_186777C.1
attgggtacctcgaggccggccgggctccgcctcgtctcgacgccttacacccagtgccaaccgccgtgccctcaccctctctatctgcgccgtctctcactctctaccgccgccgccgccgccctacgccacgcaaaaagcgccacaaggtattaccacaatttttcttccctgtatgatgtgcgataccgagttcccaaactctaacctcaaatttgatgcctgtatcatgtccggatgtccctttactagattcgcccctgctgaaaacgcactcgatggcgtccgcgacgggggtttcctcctcggagatggcggtggaccacgcgacggggccgggcgccgtggacaagccgcggttcgatgctctgacgccgaatgagatgagcggcgggaggccccagttccggaaagtgcccgtcccgcagcaccggttcgcgccgctcaagcgatgctggatggaaatctacacacccgtatacgagcatatgaagatcgatatacgcatgaatctcaaggcaaggagggtggagctaaagacaaggcaagacacaccggacgtgagcaaccttcagaaatgtgcggactttgtgcatgcttttatgcttgggttcgacattgctgatgccgtcgccttgctgcgtcttgatgacctgtatgtggactccttcgaaatcaaggacgtgaagaccctgcgaggggagcatctgtcgcgtgctattggccgcctatcacggaaaaggaggcaagaccaagtacgccattgagaactctaccaggacccgcatcgttatcgctgatancaagatccatatacttggatcctntggtaacatcaaggtcgcgcgggattcgctttgcagtct

SEQ ID NO: 95159 - DNA, 857 bp, Zea mays
  unsure (1)..(857): unsure at all n locations
  Clone ID: MRT4577_186778C.1
attggtacctcgagccggccgggacaagcctcaccctcttctcccgtttgcgacgactgggtgggctacgccgccgccgccgccgctgccgctgctctacggtgctgagtcctttgccgatttcttcccggcgaagagcgccaccaggtattcccaattccttctcatccctgtttgctccaatttctaacccgattacccaagctctaacctcaaactattgcctgtattgtaacttgtagccttttgcataaatcatcgggtatacatccatcttcatttagtagatccgcccctgctgaaaacgcactcgatggcgtccgcgacggggggttcctcctcggagatggcggtggaccacgcgacggggctgggcaccgtggagaagccgcggtttgatgctctgatgccgagtgagatgagcggcgggaggacccagttccggaaagtgaccgtgccgcagcaccggttcgcgccgctcaagcgatgctggatggaaatctacacacccgtttacgagcacatgaagatcgacatacgcatgaatctcaaggtaaggagatagcccagtgtcaatttattctcgtgaacgcggcgcgctcgttctgtatgagcttggttggcgttgcttcggcgttctcgtttctgaatcgtatagatggtttcagattcagcacagttatgtttagacattatatgtattcgtattccattctcatggctacatttgaatctcacaatcttcgatgtctgcattagactgacagcacgtaatccaggcagagttatcctattgggtttgttggttggatgaagttttatgaatattttgntgaagactgacagctaggattcta

SEQ ID NO: 95160 - DNA, 385 bp, Zea mays
  Clone ID: MRT4577_186779C.1
ttttgcgctggccgcctgcccccccctctccgtccgtaagctttggccggggcagataacaaaatctgatatccctggggcttcgctgcgccgggtcccctaccttctcacctcacgcaaagcagaagggggaggagttttaggaggtggcacgaggagccatcatcgtgtccgtgcgtgctgcccattattgtttgttgttccagcgggaatttgtggccacagtggcgggcgctatattactcacaggttcggggccggtcccggaccgggcgagcaagcagagcggggtgtccatcatggcggaggagtgcccgcccactggcggcggcgtggagctctggctttcggacgagttcctggacgacgattttttcttcgagga

SEQ ID NO: 95161 - DNA, 456 bp, Zea mays
  Clone ID: MRT4577_18677C.1
ggttgggcacaggcaccacccaaaaaccggtggccccgaacatcacccaaaaagccttataaatgaggtcccccccaagggcacgctaaaggggggccccacccacgatctgtcaggggggcggaggccccggggcccgtccaagcaaggcggccaaggggcaccaattgctcccactgccagagggccgcgggggtcgccgcgcaccgggggagcaagggccggcgccagcctccgggcgaaccccccccacggcgccgcccccggcgcgccggcccccccccccggccccccccggggcggcgccgccccccggcgcggcgccgcgggccccccgggccccccccgcggccgcgcccgccggccccccccccgcccccgccggcccccccgcgctccgccccgcccccccccccccccccccccccccgcactccgcccctcccacccccgccc

SEQ ID NO: 95162 - DNA, 1841 bp, Zea mays
  unsure (1)..(1841): unsure at all n locations
  Clone ID: MRT4577_186780C.1
cggncgcgtgggggcgtgtcaccacttatggtgcactgcatgacattagccagagcaaggcttttgagggatctcacaagtaacttaacatttcaagaggcttatgacatgaccggccgtgttcttgggatcaccgtttgctctcctagaaaaaatagccaccccgctgcctcaactacctgacggcaccacatgttgttatttggagtgcagtaaccgcctcttgtgcatttcctgggctctttgaagctcaggaactgatggcaaaggataggttcggcaacatcgttcccttccatgcaccctttgccacagatcctgaacaaggtcctggagcatcgaagcgcaggtggagagacgggagcttggagatggatttacccatgatgagacttaaggagttgtttaatgtaaaccatttcattgtgagccaaactaaccctcacatttctccactcctccggatgaaagagcttgttagagcctatggagggcgctttgctggaaagcttgctcgtcttgctgaaatggaggttaagtatcgatgcaaccaaatcctagagatcggtcttccaatgggaggacttgcaaaattgtttgcccaggattgggagggtgatgtgaccatggttatgccagcaacacttgctcagtacttgaagatcattcagaatccaacatacgcggagctccaaatggctgccaaccaaggccgcaggtgcacatgggagaagctctccgcaatcagagcgaactgcgccattgaacttgcactggacgaatccatagcggttgtaaaccacaaacggaggctaaaacgaagcatggagaggacggcggcggcttcacagggtcactctaactatgtccgacccaagactccgaggaggataccgtcatggagccgcatcagtcgagagaactcttcggagtctctcgcggaagagatctctgcggttgctgcttcgtccatgcagcaaggcgctgctcttgttgtcggcgcaccaccaacgactctttctcagcatgttcggcgcagttctcatgacggaagtgagagtgagtcagaaaccattgaccttaattcctggaccaggagtggagggcctctaatgaggacagcgtccgccgacaggttcatcagtttcatccataacattgagattgacacagaattaagtaggccctgtgctgtggaaggtgatgctgcaggtattttgtcagaatctaccttcccaaacggttcacgaccgaacaatagctcaagtgttagtatgccaggtagatgcacagaaaattctgggaccgagtcgtgcaacactgtcaacaccagagcttctactctcacaagcatggctgttcgtgaaggagatttgctgccgcctgaaagcactactgatggtgtcctacttaacattgtgaaaagagacgccctgcaggatggtgtaattgaattggtggaaagctcctgcgctgaaggatatgcggcaaactgtgacaccgtctcagggctagactgctgaaggtaacaagacgctcgctgctgacttgagcaatcaacatttagctgatgattagattcttcttgattttgatgatgaaaggtcatttatatgtagctcactacagcaacgcagtgtaggaaaattgtacttgctcgatttaaactttaaagagcatgccatgagtagctttgttaatgttaatattcacatccattgtggaattgttggttgatgcatttcttagcacgtcgagcaaccatatgcgtgagttcggcactgatacttggaatgtctaaatcatctgttcgctacaaaaaaaaaaaaaaaaggccccta

SEQ ID NO: 95163 - DNA, 242 bp, Zea mays
  Clone ID: MRT4577_186781C.1
tttctgctgtgatggttgccttggacaagtcatttttaccccactacggaaatccagcgacgagttttacgcggcgatgcggcacaacctgagcagcgtgaaggacacttttgaggaggtgaagcagctggaggagaaggccaatgctgtcatggcggttgcttgagcggcgattgcagcggcgctgaacaccattaataacgagacgcatgctgagctggagcatcagattgcttgaggga

SEQ ID NO: 95164 - DNA, 872 bp, Zea mays
  Clone ID: MRT4577_186782C.1
atgccggccgtcgaggccggccgctaaacccaaggcggaccatggtcatggtcatgccttttactcctttctcgtctgccagcgcgcgggggaaggagggacgaaagtgatgcagccgccgccgcagctgccggcggctttgccggtagggttccgcttccgccctacggacgaggagctggtgctacactacctcaagcctaagatcgcgggtcgcgcgcacgcggatttgctcctcatccccgatgtcgacctctcggcgtgcgagccttgggagctgcccgctaaggccctcatcaggtccgacgatcccgagtggttcttcttcgcgcccctagaccgcaagtaccctggaggccaccgctccaaccgctccaccgcagccgggtactggaaggccacgggcaaggaccgcctcatccgctcgcgcccagcaggcaccctcatcggcgtcaagaagacgctcgtcttccacagaggcagggcaccccgaggacaccgcaccgcctggatcatgcacgagtaccgtacggccgagccccagctcccacaaggccaaaacggtagcttcgtgctctaccgcctattcaacaagaacgaggaggaatccgaagcctcagacgctgccgattcaccgtccacgtcgtctccgcccatcgcgccggaggtgaaaactgagaatttgagccaaccgacttctgccaaaatgtctccccatattgcaactgtcagtagcaatgagccaacgtctaatcagggagacgttaatcttctggatgtgttaacccagcttccagacctacatcctgagcaagcattcgatggattccctaccatcacctcttctatgcgcccttacactgatcatccat

SEQ ID NO: 95165 - DNA, 612 bp, Zea mays
  unsure (1)..(612): unsure at all n locations
  Clone ID: MRT4577_186783C.1
ccgggngttgcaactgaaataaacgtagtagccaaaaaagtgaaattaatatgggtgtagtgttcgtttagttattcctttgagggactagatactaaaacagtttagtcttaacgtttgataatttagaaactaaatgagactaaaataaagagactaatttttagtcgctcaaaccaaacgaatccttagctgggaaagatatgtgtgtggccctaaataggaaccattgtcatccgtcaccggtacagagtatcggtgtcaacgacgacgttatgcaaggaagaagaagcgctcggcggcggcgacatcacgagtagcgcttggggaaggccaggaacgtatagtgtgtttggtttgagggatagagtgatccatcttcttcttactcctcatttttttatttggtttgtggaatagaatgagttgatccatcaccacctcattcctcataagctaataattagtatatagatgaggagtgagttgattttaccaaaattgatggaatgaacttatgatgcatcatcttataaagtataaagtgacttcacaaaccaaacacacttgtagaatagactgtgattggtgggtgacaaccaaacaacaagt

SEQ ID NO: 95166 - DNA, 309 bp, Zea mays
  Clone ID: MRT4577_186784C.1
gctgtcattctctgaagcaccctgtgcaccaagatgatcatacatatttttcggtaataaattacttaccatccaccataaaatcaatatacaactgcacttaaagcttactcgtactaaaactgaaactcatactcttcattacaacataacatcacaaaacatacatactatgcaatttattctaacacaatatacaaggattgagtcttaaaacattttatgccctctaaaacatattttcattctattatatcacccttataaacaatttttccaacatattacatcacttcaaaatacaccatc

SEQ ID NO: 95167 - DNA, 341 bp, Zea mays
  Clone ID: MRT4577_186785C.1
agagcaaacataatggccaccaacatatacgcatggattttgccgaccatgaaaccatcacagttcacaattacggttagcaaggtacctgttccagatctaatggtcagcaacgagcctgatacataggaccaatcatctggacatggaggtgttggactactccatcgttaaaaagatgacatgtacatgggagacgaaaaactgaactgaattccacacttcccacgatcatgctcaaactgctccagtatacaacagtagcctatctgcgcacgaagatgcttattgggaacaatatgccaagaccagctgagctagtaaatgtgcgcccgaacttg

SEQ ID NO: 95168 - DNA, 196 bp, Zea mays
  Clone ID: MRT4577_186786C.1
acattcattcgtactcactcagatgacgtctcaatcactctggataccgttgtacaatcaactgcttcgtcaaacggaccattgacaatgggatcaacgaggttgcagttgaagtcgcttgagggaccatcttctgtcatcataccgattaagtcaactacgctcttgatgtacctgtgaggaagccgaagaactt

SEQ ID NO: 95169 - DNA, 165 bp, Zea mays
  Clone ID: MRT4577_186787C.1
cgggactaatttttagtccctatattttattctattttagttccaaaattgtaaaatatagaaactaaaactttttttttgtcacttagtgggtgtttggtttctagggactaatgtatagtaccatataaattcaagctatacacattatctctattacttatt

SEQ ID NO: 95170 - DNA, 845 bp, Zea mays
  Clone ID: MRT4577_186788C.1
gggaagttattttccattccagcccgtttctctactagggatagctttgaacatttttttcactatatatatggaggaggacaggggggtgaccgtgctttcaagccgcatagaacggtggcagctgaggcgcggcgatcacatctatgcctggcggacaggctactcccatcatggaatctacgaaagcgacgagaaggtgatccacttcactagcgcttcagcgcagtcctccggcttcttcagcagctcttcatctgcagccttctcttctcacagcaagtgccgtgaagctatgcgtggaggcggtgtcgtggtctgctgcctcgactgcttcctggaaggggacaatctctgcctcttcgcctactcagtgtccatggcattcgctgcactgagcaatatcggtgctcaagacacctgctccgtggtagacgaagacccacccgacacggtcttgcgccgcgccaacgacttcctcgactacggcggcttccgcagctacaacgttgcaggcaataactgcttccactttgcctactactgcaagacaggacgtgaatatctctcaccagtgcggatgattgctgacccctcgcaggaacaccaacgttccccggcatgtacaatcctttagagctcctttggatggttgggtagtacccactagagatgattttacccgatatcaatttaggagctctaaagttagaaaaatcacgaaaaaacagatgattgtgaaatgttgctgcaatccacaaaattagtggcaaaaataaactttattcagtataagtatatgctttggatgaaaaagaaaaaaaaacacaaaaaaaaagagaaaa

SEQ ID NO: 95171 - DNA, 176 bp, Zea mays
  Clone ID: MRT4577_186789C.1
agaaaaaaaaaaaaaaaaaaaaaaaaaaaaaaaaaaagggggcgcccccgataattgccctcccggcccgggatttttttccgggaccggcacgtgcaggagtacccctttcccctaaacgggtccgaataggcgtttggagagccctagctgatacctgtgcccgattgaaattc

SEQ ID NO: 95172 - DNA, 458 bp, Zea mays
  Clone ID: MRT4577_18678C.1
aagaaaaagcacttttggtcttgaaattgggcatattacaaacctctatgaatcaaagatataaaggtatgtttctagcccttagtcatttgttttaggtgctaacaatgttcatctaagtgctagggaacttctcaagtcgagccaaaatggagcgaagaagtttggctaagtttggccaaacttgggctagtctgggcctcactggacggtcgcccgagacgccctcggatgagtcagaaatgcgctactcatccgaggttggtctcgagcaaatcatgatcatcagagctttggtcagccgatccgcttcgcagagttggtcggcagagttagtcacctttcggagcatcgcccgagatgccctcgggcgagtcgaaaatgtgattctcgtctagacttggcctcaggtgagtcgtgattgcatcgggtggttggcctctggtgagtcgtgactg

SEQ ID NO: 95173 - DNA, 347 bp, Zea mays
  Clone ID: MRT4577_186790C.1
gctaacaaaaaccttgctcattcttctcttgtctcgttttatagcgggagcaaccaaagggaacaacaggggtaccaacacctaattcaaagggagaacggacactaactcggagacagaagcgaacgggaacacgatactatagatagataagataactcggccgaagccaggatgggcccacacatcaggtcctccagacgtcagcgatatcgtcataagcgacaccaccaccctagcgccgaccgtcgtagccgtcaccggctacgtagaagacgcaccaccctcgtgccaaccggcgtagtcgtcaccgtagtcataaccgtcgtcacggggcccggcaccat

SEQ ID NO: 95174 - DNA, 487 bp, Zea mays
  unsure (1)..(487): unsure at all n locations
  Clone ID: MRT4577_186791C.1
naaggcctagcccaacttccccgagccccccgccggcgcgccgccgcccgcccgcgccggggtgctcccgccggtcgggcacgctcgcgtgcgtgcgcctctctacggccaccagcagcagccggcgccggtgggcggcggaggacagcagcgtcaggcattccccgtcccacatttgccggcgcccccgggcgcgttctctcagcttttttaccgtccagctgcaggtccagcgttcgccgccgccgccgccgccggtggaagcaacggcgcaggcttctacggtatggctcccatgatcggccccgggcccgaggtgcccatgcccacctatgcagggagctcccaactcagcagctctgacaagaaaaacaaggcggctgtccatccctcggcggccaccgagcctaagctgatcatcttnatcgagtgtggtggtgagccccgggtcgaggataacttcaacggggacagcggggcgtctacc

SEQ ID NO: 95175 - DNA, 600 bp, Zea mays
  Clone ID: MRT4577_186792C.1
ggccgcttttttttttttttttttcttttttttttttttttttttttttttttttttttttttttttttttttttttttgggcaatactactagtagtatggggccacaatccaaaaccatccaaaccaacaaatacattggacgaggcccacagggggccctaagaaaaagaaaaaaaagagcccccagaaaaaaagcgaacaggccacgccaaaggaagacatccggccccggaacgaaacacaacaaagaccgggaccggaaaagcaaaaacccagggcaaccgagggggaacaccccggaagcagaagcactttccatgtacaggagggccagcccgccatgctatgggtcacagggggaccgggcccccaaccaactggggaaccggtcgccgaggcctcgccgaaacggtcaggggcggcgggacggccatttcgcacgaaagggggggcacctcccacaggaaagcgggggaggggagcaaagcgaaccggggcaggggggccgcgagccaaaaggccacgggggccagggccaggatccccccggggcagggggggcggcccgccccgaacggggggagcctgagggcccaa

SEQ ID NO: 95176 - DNA, 390 bp, Zea mays
  unsure (1)..(390): unsure at all n locations
  Clone ID: MRT4577_186793C.1
cattgggacctcgagccggccggatgatccttcggcagtaaagggaatgatgagcggatgatctcgcaatgctatgcgagaggggtgtctgccccaactacgcctgttacgacacaggcaccccaatgatttaccgtctgatcccgaacactgagaaccgcagagacagggggtcttcgtactcggcctatctccgcggacccaaagggatgcccccttctcccattcttctctcatttctcaccaccgccggcgctacccccctttcgacaacaccatgagggagggggatctctgatccacatcggnccagggccgggatccaggtccggaaacgcgtgctggggagctgtactgcctcgagcatggcattcagggtgatggtcagat

SEQ ID NO: 95177 - DNA, 377 bp, Zea mays
  unsure (1)..(377): unsure at all n locations
  Clone ID: MRT4577_186794C.1
ggggggaaacaaacaacaaaggcgccggggaccccgaccgggaaacccgggacagagccaagcaacaccgcaggacagaaaaaggggggagcccaaagggacaccccaaaaacaggggcccgggggccgccggccgaaccgggagcaagcaagggctgcacgaggccaacgcgccccccccccatnaggccaagaaggacccaaaaaagacagccacagagcacaagactagcgggcaagctcatgaaccacagcaggccattaacgaagccaatcagagaggccataccggacttttattctagcagcagaaaacaacaaggccttgaatcaccgccggtcaatgcgcaaagcccccgggctggctgaaagacccc

SEQ ID NO: 95178 - DNA, 349 bp, Zea mays
  unsure (1)..(349): unsure at all n locations
  Clone ID: MRT4577_186795C.1
ttttatagtatacttttatattgcattaacttacccccngggctatcggtacactactctagctatatctacctcatatacaaaccatcacatgatatatagatacacacacgcatgcatcatacatgcatctataatacttaattacacgcacgcgcgctatctctccatcgtgaagaatagagattgctagctttattcccgtccgatgatgatatggacgcacacatatatttatacatacattcttggttctacaataccttgacagtaatctgtatatatgcttcccgtattggttttggttggtttttattgtcttcaccgccttctttcatcctcttggatg

SEQ ID NO: 95179 - DNA, 477 bp, Zea mays
  unsure (1)..(477): unsure at all n locations
  Clone ID: MRT4577_186796C.1
cccggtcgacccacgcttctccagcgtcgccaccgtgcggtgtagatgtgggttgcatacgccagggggggggtggcttngtggttcgttgggctaggtctgctttggccctccccttggcagtgctgtcctgttggtgtttctttccctgtctcccctttgtggggggggggtgtctttttccttgccttttttcttttcctttctcgttctctccttttcctttccccttccttccttttcttttttcctttgtttctttcttcctttcctttcttttttctctttcttttcttttttttttttcttttttctctgttttttttcttttttcgtttttttctctttcctttcttttttttcttttttcttcgcttttttttttttttttttgtttttgcgcggttggttttttttttttttttgtgggccgctgtggtctttttttccttttttccgcttttctcctttttcgtg

SEQ ID NO: 95180 - DNA, 217 bp, Zea mays
  Clone ID: MRT4577_186797C.1
gcttattacttaatcaaaactcatcacattcttcaaacgcaaaatagcgccgacggcgcttcagactcctgcttttcgatcccttcacaaagcgcccgcctctccccattgaacattgctgcgaaaaaagataaggccccgcccccctcggcgaagccccccaaggccggcggggggaagcaaaaaaaaaaaaaatggagcaagggaaagctaaaag

SEQ ID NO: 95181 - DNA, 320 bp, Zea mays
  Clone ID: MRT4577_186798C.1
ttactgatcccatccaatcacatccgatcagatcacgtctcagtctgagggcgtgccgttaaccaatccatacaacccaccccaacgcacaccgacgacactagagttgctcaggtaccgctagccggcggcgcccaagattaattagcccacttcatacactcctcacttggcctaacgttctcctatccgtacgtctcactaaagctatttgcttgcaactaacagatccatcgtcttgaacaacacactttttgtattgagtaagaccttctaccagcccagcatctaatgtacctgcttatgggcgaagcctgcat

SEQ ID NO: 95182 - DNA, 527 bp, Zea mays
  Clone ID: MRT4577_186799C.1
accaaaaaatgctgaatgacatgcgggaagccaaactaacgaattcagcggcccggacaatgatgaagtgtcataagacgttctgtagccccatacttgtatgctagggcgcagctccagacgccaaaaaataccaaggcatgacctcagggtgggcacagcagcatactttgtaaccctaactgccactatctaagatcctaaaaggagaacaagccacccgactccgaatcattaactgggaaaacagccgccaaccgtgttgctcagactactaggacagcgagggggactgatgtcacgggcaagtacttgcgggccgcaacactgcttgcggaccatgtatccctatagggaggcctatgcaggagcatggtgcggtccacggcctagacggtttcctggggcgaaaccggtatgaagtaccaaatgtcacacaactgactacccatcagcttaaagcacaaaggccttggtgcctacagagtgcactaactcccatcacttgacgcgggcctacagcccgc

SEQ ID NO: 95183 - DNA, 2070 bp, Zea mays
  Clone ID: MRT4577_18679C.1
agccaaccaccacctctcgtcctctccccctgctagtgctcagtcctcgccctctcgctttccgagggagcctttgcctttcccctccccgcccgccagccattaatggcggcggcatctccatccactcccccctcgcccccctcccactgctgctacttctagaagcgctggtggcagggcaggcggtatcccggccgctggcgctggcgcgagagttggttggtggtggtcttcagcccccctcgctcttcaggtttagggtggagcgatccgtgcaggccaacgcggggtgcgtgacccagaaagggaaaccgccggctttttctcttctgccgccccgcttttccaatccctcctcaacctcatccgcccccgcccgcaccccgcaggcaccatcaccaaaaaggtccccgccttcttcttcttcttcttcttctcctctgcccctgcttgtcgtttgctcgtgctcccccaccccctttctgattcagcaagggttccttccgcggcgcggcgcgtcgccatgggcaactgctggggcgccaagatcagctccgacagcccgtcccgcggcgcctcatccccgtcagggacggcgtccaagttggcgagcaggaacggggcggcggcagccctgagcgggtgcagcagccacgcgtcgtccgcgtccatgctgccgacgccccgcagcgaggacgagatcctggagtcggccaacgtcagggccttcagcttcaacgagctgaggaccgccaccaggaacttcaggccggacagcgtgctgggcgagggcgggttcggatccgtcttcaagggctgggtcgacgagaagacgctcgccccggctaggcccggcacggggatggtcattgccgtcaagaagctcaaccaggatggataccagggccacaaggagtggctgactgaagtgaactaccttggaacgctgtcgcacccctaccttgtgaagctcgttggctactgcctcgaggacgaacagcgcctcctcgtctacgagttcatgccacgcgggagtctggagaaccatctgttcaggaggagctcctatttccagccgctgtcctggaacctacggatgaagattgcgctcggagcagctaaaggcctcgcgtatctccacagcgacgaggctaaagtcatctaccgtgacttcaagacatctaatgtccttctagatgcgaacttcaatgcaaagctctctgatttcgggctggcgaaggatggtccgaccggcgacaagagccatgtctccactagggtgatggggactcacgggtatgcagctccagaataccttgcgacaggtcatctgaccaccaagagcgacgtgtacagctttggggtggtgctcctagagatgctgtcagggcggcgggcgctggacaagaaccgcccgaacggggagcacaacctggtggagtgggctaggccatacctgagaagcaagcggcgcatatttcgcatcctggacccacggctgggcgggcagtactcccttgccagggcgcagaaggctgcggcgctcgccctgcaatgcctctcggtggagtccaggcacaggcccagcatggacgaggtggtcacagcgttagagcagctccaggacaccaaagaaggaggtaaccatcacctacagaagaggccaggcagccggagcttggataacaatggcggcaaagcggcagggaaggggaagcctgctcctcatgtaaaaccagtttgagtgattggattttatatgccagagtatctctctttttttttcccatccatttgtaggtgtaggtaatatagtagggttcttagagggatttgtaaagaggcaggcagagttctggatgttttctgtctattatgtagttttttttacatcttcaagtctctgtaaagtacgctatgtaaatacataatgacatccagttcggagtgcgatgaattttagtccaggcaaacagctcaaccgctgttaaaactcagcaagctgctgagcatagaacggatgcaattgatcaagtgttaacaggcaaaacaaaaaaaaaaaaaaaa

SEQ ID NO: 95184 - DNA, 603 bp, Zea mays
  unsure (1)..(603): unsure at all n locations
  Clone ID: MRT4577_1867C.1
ccgaggcggcggacagttcaaagggggcgagagaacccattaccaaaagggcagagggagaggagaggagaggagaggagaggagaggacgggtttggcccaccaaggctccgaagaagctgcacggggcggcgaaggcagggaacgagacgaggcgcgcaacggcgctggaggaggcaggacccgacgacaagaccgggcccaacagctgcggcaccgccgagaacaagagccccgagaagctcgcccgaaaccgggtggggcaggaaccagcgctgcaggatggggacaggaacctcgacgaatgacgcgcgacctgcaaggacgcagagcgcaaaattttttttaccaccccagcccacgaaaccgcgaggaggcagcaaagggggangcggggancgaggaggaggcaaaacagaacagcgctgcacngaangacagccacgaccagggacacagaagngcgaggcccgagggaaccaccgaccagaaagaggaggaggacaaacaggacaagcagaacaaggagccagaggagcacgaggaacgacaggacgaacgcaagcacccggacggagaccgcaggacactcgccgaccagaa

SEQ ID NO: 95185 - DNA, 317 bp, Zea mays
  unsure (1)..(317): unsure at all n locations
  Clone ID: MRT4577_186800C.1
ggccgacgccacgcgtccgcccacgcttacgcgatgagtttctctctgttgcggccgctctgatcgagggggtggccggggcctgcctcgccgcgccgcggggcgcggacnactacgccgaatgcgcggagacgaccatggacacggtggtgatgatgctggcgctcgacgcgctggaccaggacgacacctgctgcgcgccgagcgcgcttaatgccatgaggtgcacggcatccttaagcatattcctactcatggacatgtactggaacgtccaaacacccccaacaagccacgaataaaaggcttggacccca

SEQ ID NO: 95186 - DNA, 783 bp, Zea mays
  Clone ID: MRT4577_186801C.1
ttttttttttttttttgacacaagtttatcaagattttattatacctcatcggagtgattacaaaagaaagtgtttcaaaagaattacactttaaaatgttatagaatatttgtaaatttgaaatacatgctagcttaagtgacaatcctcgttaaagaaactataggagggatatacttatataagaaggccgagcccaccggcacttagcaccatccacaacagaacaaaattacaacctgagataacactatgttagtgttgttagatgatggccacttgacgatcaacttttattctgacacccgcttagtccatctagcttcaggatcatcggccgacatcgtcttgtgggttgttttgatccacacccctcgcttcgcacgattttcagctagcgtacctgcacggcgaacgtgtctggtgtgagcacacgagccgaaactggaagacgaaggcggggtaaatcagtggagcggttcgagctagaagatgttgtgctggcgatgcttcaccgacgaggagacttggagcagggcgcacggttctagtgtgtgcacggctggaggcgaggtcgaagtcgaggacgcacagcccgacgaggaacagggaggggcgatggcgagctggagcgcaggggcgagctcacatctggggaggtgaggagggcggctggagattgaggaagatagaggctgggcggctagtgctccatgggaaggaaaacagagaccgaggagatgacgcccagggcactggataaggctcggaacccggccggc

SEQ ID NO: 95187 - DNA, 224 bp, Zea mays
  Clone ID: MRT4577_186802C.1
atagcaaccggtccaacactttcacgctcaggcgctcagctctagcaatggctgcctgcaccatggcgatctcctccacggcgatggccggtactctcatcaaggtgggctccttcggcgagggccgtatcactatgcgcaagaccgcgtgcaagccacaagtggcggacccattgcactttctgacactgtcccaacctgaaaggctaatgggacactctctc

SEQ ID NO: 95188 - DNA, 345 bp, Zea mays
  unsure (1)..(345): unsure at all n locations
  Clone ID: MRT4577_186803C.1
ccaaaagaagcggaaanaacaacccagcccaccacgggccacacaanccccaaagcgaacccccccgacggcgacggggaacacgagcacgccggagccgcgggaaagcccgccggggcaccaggcgcacaacacggcgaccccgaccgcggcgccggcggggccggcgcgggcggcgccggagaaccaggacccgcaggccgcgcggccgcccggagacgacggcggggaccgaccggcggcgccggcgcccggcccggcggaagcggcccacaggcccccccggccggagccgcacgacgcgccggcggccacggccacgaccagcgacgcggacggaggcgg

SEQ ID NO: 95189 - DNA, 594 bp, Zea mays
  Clone ID: MRT4577_186804C.1
agactccctcaccttcatctgtaacccgagctgtctccgttcctctctgcctaccagaattaatccagcgcaagatctgcccagtttctagcttacttgtgttcctacttctttgcacatcacgatggtgtgcgagaacaaagcgcacgtcaccgccagcggtgatggcttgtgcgtgccgcagccgtccagggccgaccccctgaactgggggaaggccgcggaggagctgtctgggagccatctggacgcagtgaagcgaatggtcgaggagtaccgtaggccggtggtgaccatggagggtgccagcctgaccatcgccatggtcgccgcggtggccgccggcagcgacaccagggtggagctcgacgagtccgcccgcggtcgcgtcaaggagagcagcgactgggtcatgaacagcatggccaacggcaccgacagctacggcgtcaccacccggcttcggcgccactccccaccggaggaccaaggagggtggcgctctccagcgtgagctcatcagatttcttaacgcgggagccttcggcaccggtggccatgaccacgttctgccagctgctgcaacgagggcag

SEQ ID NO: 95190 - DNA, 336 bp, Zea mays
  Clone ID: MRT4577_186805C.1
ctatttatacccttccggaacaaaaagctcaaaatggcataaacatttctataatcgactcaaggggtacatattggctgctaacacaagtaccacaacatgtgactgcttaggccaacactcaaaaggtctgccctgtatgaaaatcctaatgatacaatcctccatggtgctcgaagaaggtatcttccctgcattggctactaaattccggagtgaaatgtgtccactaataatgactagccaactttatgtatgctcccccgcgcatattcttcgcccaccataaggctgtttacgccttggtttttttgcgcacggacaggctctcccaca

SEQ ID NO: 95191 - DNA, 406 bp, Zea mays
  Clone ID: MRT4577_186806C.1
attattgggggggggttttttttttttttttctttttttttttttttgcaaccccaccccccaagcgagcctggaacggtggggtcaaccgggaaattccgaccggggcccgggtggaaaccatctttccctttagggggggaatataaaacctggggcacaaaagggaaaaaatatattccgggggaaaatggaggcccgtgacaattccagaaaaaaaagcaacccgaaaaattaaataaaaaagccggggggcccaaacggcacccccaaccacattaattgcggggggcccaacggcccttttaaaaaggggaaaaccgggcctccacacggataaaaaaaaacggccacccccgggaaaagggagtttgatatggggccccaggaggttttttttttttcc

SEQ ID NO: 95192 - DNA, 629 bp, Zea mays
  Clone ID: MRT4577_186807C.1
ataaaaaaaaaaaaaaaaaaaaaaaaaaaaaaaaaaaaaaaaaaaaaaaaaaaaaaaaaaaaaaaaaaaaaaaaaaaaaaaaaaaaaaaaaaaaaaaaaaaaaaaaaaaaaaaaaaaaaaaaaaaaaaaaaattttccttgggccgcaacccccttagggggaatttttgaaaatttccttaaaattgggggccgtttgaccttccttttagggggcccatttccccttttagggagtctttttaaaattaattggccgtgtttttaaaacgtttgaattggaaaaaccttgggtttccccaatttattccctttgaaaaaaatccccttttccccagttgggttattaccaaaaaggccccccccgttcccctttccaaaaatttgcccaccctaattggaaattggaccccccttttacgggccctttaaccccggggggtggggggtttccccccaggggaacctttacttttgcaaggcccttagcccccgttcttttggtttttttcctttcttttttccccactttcgccggttttccccgtaaggttttaaatggggggctccttttggggttccaattaagggttttagggccccttgcccccaaaaaaatttgtttgggg

SEQ ID NO: 95193 - DNA, 402 bp, Zea mays
  Clone ID: MRT4577_186808C.1
gggtcgagccacgcgtccgaccacacgttcggcggacgcgtgggccggacgcctggaaaataaggaaaatttttgaaaaggtttgaaatatatcttcatcagttgacaccaaatgccattgtcaggctgagtgtctacatatgggctctccgaagctagggcaaagatgctaatgcccaaggtttctgttgagtgcatgaattgcactaccagacgaaggctagagctgatggccttcacaagaactttggatgttataattttgcataccgaaaggacaccagggcttcggtgatcggctaccgcactaagtggccgaccgggtggacaaacgaatggttctacgtgaaagccgatgagaagaagagggaaaaactcatcactatggttatgagtcccctg

SEQ ID NO: 95194 - DNA, 686 bp, Zea mays
  Clone ID: MRT4577_186809C.1
tttttgttatttggattgaagactttcctctatactgacagaagcagagaggctggtaaaaaagaaggaagcaggctgggtacacatggtaatagaacccactggagatcattcaatcggacgtcttccacaaagtaaagctagagtaagtggcgtaagataagatagatgttcactttcatcgaccaatgtaccttaaattcctatacgtaaagtcgagagctagagagagtaaatgagacgttcaaagggtgaagctaacgcttccctggccactagggagtcatcaaagtctgagtccatacacttactagctaatactggatcgtcaaagatctgattctatttaataataccttctgtctctcccctaagggacccaatcagaaggaattccctcacttcgctcatgatagtcgagttcccttttccattttagttgagtttcgcctctccttgtctccattctgattgattcgcttcttcgcgcaagcactaggttcgccccttactataaccataaccatcccactcaatcttttacaccgatgtttcgtactctctcgaccaggtcatcataagaaaatactgccaaatctttccgaaatgagagaaggagggaaggcgcgctacaactaactgctgaaaacgcaagattagcgctaagaagcaaccctagtttaagt

SEQ ID NO: 95195 - DNA, 355 bp, Zea mays
  Clone ID: MRT4577_18680C.1
ccccaaactttaaaaaaaccccgggaattggggtttggggccttaaagtttaccgggtttcaccaaaaatgggttttttaaaaaattcaaatggggaaaattttccggtttggggcaaaatttaaggggggccccaattgggaaaaaccttttttttccaaggggtttaaagggggggctttttgtttggcggggggaaaaattttgtttttgccaaaaccctggcagggaaaacgggttgggttttgggggggaaatttcgggcaaaacctttgggaaagagaattttcccaggggggtgggggatttttcccccccaacaaagggtttggagggtttaaaatactttgccctt

SEQ ID NO: 95196 - DNA, 162 bp, Zea mays
  Clone ID: MRT4577_186810C.1
cactctaaacgatgtagtgagggtatgggataccttatacctttgtgacaagggtgctttcatttaccaacaaaatgggtaattggcagttcatcaatattttcatagttcaaagttcatgccgtaccctagcctgcccacataacaagtttaatcttcttt

SEQ ID NO: 95197 - DNA, 141 bp, Zea mays
  Clone ID: MRT4577_186811C.1
cctgagccggcgggaaaattcacaaaggcgcccgcccttcgctcttcgccgccatgggtgaggggaaagttcaagaggaaagcccaccgagacgccgcaacgttctccacaccgagaggagatcgcctgctgagtacttca

SEQ ID NO: 95198 - DNA, 383 bp, Zea mays
  Clone ID: MRT4577_186812C.1
ccggccgggatgggactctttgattctccaagccagtgtgatgtaaaagttgctccttttgatcttgatcttcttcccattgatgttgatgatgtggaaaagcttgctccccagtctatactgggttcttttttaaaatctgagagatcacagctagcaaagcctttgctaagcaattctaccagtggaaatttgaacaaatctgaacaacattctctgagtgctgatgataagatggatttccaagattttctgggggggctatgatactattgacattgcaggaactagtaagttagaagtggaaaatgccaggctaaaagcagaacttgcttctgcaattgcaattctctgcggcgctggatatggatatgagtctatcg

SEQ ID NO: 95199 - DNA, 1041 bp, Zea mays
  Clone ID: MRT4577_186813C.1
ctcgaggccggccgggaaacgtcgaacgacgggaaacaccgaaaggcaattcggcagctcgagtccggccggcaaactttcctcctaaaaatcctccaaaaaaacaaaaaaggggagggaaaaaattctcgtcttcttccccgtgcttgccagcacccgaggtcggcgagctctccgaaagcggcggcgatgggttccagccaggccgataagccactgcgtcgtatcgcggcgtcgttcgaggagctcgccgccgtcgctaagcagcagcccgcggtgcccatggacgctggggccttctcgcgcgcctgctccaacgtctccgtcctcttcggctgcctcggcatcgctttcaagttcgcggagatggactacgtcgccaaggttgatgatttggtggaggcgtccaagtcaatttcaacattgccttctatggttgagcgagacattcagaccgacactgtcaggaaaccagggagccatacaaggaatctgcttagagtgaagcgcgggattgatatggttaaagtcctgtttgagcaaattcttgtcacagagggcaactcactaagggatgcagcatcggtggcttatgctcaggtctttgctcctcaccatggatgggcaataaggaaagcagtttctgctggaatgtacgcccttccctcaaagtcccagctgttgaagaaattgaatgaagatgaggaatcagcaaaggttcaaatgcagaactttgtcaggtcatcagctccagtaatctgctatgttgatgaccttttcacctcaaggaatttgggcatagattggtgaagaaaaatatggatacgtttgtttgatgtactaatccagtcagatggtgtgctgtgtgagctgggctcagaaaacctttttctggatccgtgtttccaagtcgtaaactaatataactacttagcgatcccgaaaaaaaaaaaaaaaaaacggccgcgcagtataaaaaagagtgctacttagcgatccctgataatactggagttaggcgatgagaaaatatacgtgtcg

SEQ ID NO: 95200 - DNA, 412 bp, Zea mays
  Clone ID: MRT4577_186814C.1
aatttccggggcaacccactcttcctcaatacctttaaatccatcgcattcggaaattattatcttatttctaaaattgggtcgtgactcattggcattataaatttattctttattcaaatacacctacttcacataagacatatccagtcttagcttctccatcataaatgcttactggtcttttggtaatggatacccttatcaagccttattccttatcctttcattttttaaagatgcttcattaaactctaacccattacgttcaatgagatctcttattaccattgctccaacctgttcttctagttctcctatttcacagaattataataattacataaactgtattttgctttgtttgggccataagtaaaatatattatatttattattcttcctataaaat

SEQ ID NO: 95201 - DNA, 252 bp, Zea mays
  unsure (1)..(252): unsure at all n locations
  Clone ID: MRT4577_186815C.1
cccacgcgtccgtttaagngtnngtggatgggtgggcggacgcgtgggtgagagcttattgttatgattatgataatgaaaggtgntagtttggttagaaatggttgttgnttgaaacgtacttatgctagatctttggaggaacggagtgatcgaagagcaagctgtatataaggaatactgtatttggtaaaatcgagctgttatggtttcaagattaaatatgagagacaccgtggaagattgaattgt

SEQ ID NO: 95202 - DNA, 402 bp, Zea mays
  Clone ID: MRT4577_186816C.1
gggggggggggggttttttttttttttttttttgggggttttttttttttttttttttttttttttttttttttttttttttttttttttggaacaaacaaataataggcggggttggggctaaaaagggggggtttatatgtccgggggggggggggggggggcaacaattttacataaaagggggggggcctcaaggggaataaagggggggggggtacccaggaacaacagggtttttcgggaagggattggggtattacagccctttggggggtatacaggcatctcattggaaaaactaccggtgggaaggggtcagcttcaacaaagcattgggggaaaccttcccaagaacattcaaagccttcattcgggggagctctttcccttcctccatta

SEQ ID NO: 95203 - DNA, 576 bp, Zea mays
  Clone ID: MRT4577_186817C.1
cgcgtgctgcgtcgtccaggtccagatccagtcccggttgtgctccgctgctggtctgactccagcaatgggtgtgttcgagatgcggatcaagcagcagggggagccgtcgctggtgacgccggcggaggagacgcccagcggcctctactacctctccaacctggaccagaacatcgccgtcatcgtgcagaccgtgtactgcttcagggcggcagacggcggcgccggcgacggagtcagcgcctgcgacgtgctgagggagtcgctggcgaaggtgctcgttcattactacccgctcgccgggcggctggcgacctcgggcgacgggaagctggtcgtggactgcacgggcgagggccccgtgtttgtggaggccgacgcggactgcgccatggcggacatcggcgacgtcaccgagcccgacccctccgtgctcggcaggctcgtgtacagcgtccccggcgccaagaacatactcgagatgccgctgcttgcagcccaggtgaccaagttcaagtgcggggggctttcgtgctgggggctggccatcaaccactgcatgttccgacggcg

SEQ ID NO: 95204 - DNA, 193 bp, Zea mays
  Clone ID: MRT4577_186818C.1
agggggaaatggcaattatgaggcattttctttaataccttctattaaattcatattctataacacaaggacatcctatttttgctgtagccataagagtgcagagcaacaaaaagttaataggaaattcaatttatacacaaccgtgctttattttttattacaataatttatggaacaactattataagtg

SEQ ID NO: 95205 - DNA, 300 bp, Zea mays
  Clone ID: MRT4577_186819C.1
agagaaggggttggggtccctttaagcccacgacataataccaacctttagtttgctgttccacagaggccgatgttaaaaaggaaacataattttgccgacttggcgggcccctacttgaaaactacaagttttttttggaggaactgtaaaaaacaaaacttgaacgacttcaaatagggggtattccggtcggataaacaggtccaatcagggggtttttttctttgggtttttcttggggaccggccagtcaagtttttttggaactgttttttttgaaaaattggaccccgggga

SEQ ID NO: 95206 - DNA, 2346 bp, Zea mays
  Clone ID: MRT4577_18681C.1
cattgggtacctcgaggccggccggggatattattcttcgtccctgatttttatccccaaactcaccgccggggcacaacaggccagttctcctttcgccggaatctgtccctcctccccgcctctgtgggtactggaccaccgtggagcgggcattcatccaggctaggtccattccttcctttgctcgtaagtgaccctgatttttgctctacgagtttgtttcgtgctccatcgaatctaaatcccactccgcatttgcggattcatgccctactactattacaacccctttcatccatccattcctcgactaggttctcttctccatcgcggaagctccacccgagttgacgccagaagagaatcggtgccctagggtgttctcgcagaattattttccagaagatttgcagatcgagtcgaaccctatgccccacgttaagcctgccgccggcctgcccccttaccaccaccgggcgctccctggccccgggcagggtccagttcccacgggacatgggatgatgcaccgggaggtccgtgatcagtacgggccgccggggccgaggatgcacctaccaccgctggggcacgggcccgctccgttcccctacgacatgctgcctccgctgcccccaccggaggtcctggagcagaagcttgtggcacagcacggggaaatgcagaagctggttatagagaacggccggcttgctgcaagccacgcctcgctgaggaaagagctagccgcggcgcagcaggagctgcagaggctgcaggcgcagggggaggccgcgaaagccgctgaggaggaggagatgaggggcctccttgacaaggttgggaagatggaggccgacctgaaggcccgtgagtccgtgaaggtggagctgcagcaggctcatgctgaggcgcagagccttgtggccatgaggcagaacatgggtggcagacgtgcagaagctgagcaaggacctgcagaggaacctcggtgaggcacaccagctccccgcgctcttggctgaacgggatgttgcaaggcaagaaaatcagcatctcaggagtacttatgattacgaaaggaaactcagggtggatcactccgaatctttgcagacgatgaagaggaattatgactccatggttacggagcttgaaaaacttcgtgctgagttgagggacacatctaatcttgacaaaagtggttttttctacaatagcaccacccaaaaggccgatggtatatctagccatctttctgttggacaaattgcttatgatactggctatggaagtacacaggcaagggcaactcctaccggtctggcagacttaagtggagtccctggaggcgctggccttcgttctggatttgacccatcaagaggcaatgcatatgatggttctcatgttgccaatctcagctcttcaaaaactgggacccatgatgcatcaaggggtgccactggctttgactctctgaagggttctgggtatgatgcttcaaaggcgcatgtaactggacaggcgtcagctacagcggctcatgggggcattgctggttactacgggtccaatcaggcagcacatgcgtggggacaatctgcatcgccctacggatctgtacaggtgccaccatcctacgcatctgggtcaaacacatcctatggcgcagcagcagcagcagcagtgcgtccctatggttcagctcaggcgcaaccatcatatggacaaacgcaggcaccatctgcgtatgggcacacacagctaccatcatcctacagtctagcacaggcgcagtctcccttcaccgctgcgcaggggtcctcgccctatgggttggctgcgcagcctccagcctatggatctgggcgagcaggctccaatgctggcagttacgaagctcctcagggacgtaaataagttcgcgccaaatttgcatacttggccacttgcgaaagagagctttgttacaccggaccggagtccaaatcctttctgttgctacttaaaccttgtttaactgtgatgacagaggaacctgttacagccgataaaacgattctctgtaaacgtatatcgtgatcgatgatgccgatgcattttttttttgttcagtagagtaggccatttgggaacgcagatttgagttgtgcgctattggttctgtatctggcttcactggttggttcataaccttaaattatgtttgtttaagtttaaccgtaatcagataccatactaaaaattgctaccagcgtattcaaaaaaaaaaaaaaaaaaacaaaaaaaaaaaaaaaaaaaaaaaaaaaaaagggcgagcggcggccgctctacaggatc

SEQ ID NO: 95207 - DNA, 168 bp, Zea mays
  Clone ID: MRT4577_186820C.1
gtgtcctccgcatcgtctttccactgactccacgtcccaccaccgcctcggcgttcttccgctgtggagaggcttacctcggctcagctaggctcgagccggcgaacatgcaacgggctctgcatgccgacaggacatagggtaatgtccttagatatgctgtgctac

SEQ ID NO: 95208 - DNA, 345 bp, Zea mays
  unsure (1)..(345): unsure at all n locations
  Clone ID: MRT4577_186821C.1
tgcaacttgcatccatcaaatttgatagaaggaactttattctcatgacaacaaataagctacacgcctacaccgcagaacacacatacagaacgcatggatacagtacaacatgcacctcatgaagagaaatttgctatgactggtgggaccgtctgtgtctatgatttgtgggtccgatggcatactggcgaagcccacaaatgataatgacaaaattgccaatggctccctcatcaatgannnnnnttgcaaaaggctcacactacttatgacggccacagagacagttctcaaagcctacgactctggcaatgcannnnnnttgacttatttccatcgtcg

SEQ ID NO: 95209 - DNA, 764 bp, Zea mays
  Clone ID: MRT4577_186822C.1
tcgaggccggccaggggagcacctcctcccacctccctcaccgtccccgagctgcgagcgcgaaaaaaaaagcgagagcaccacgtacctcgccgccgtcgtctccgcctctctcctcgccacgtcgctgccgagctgcccgaggggtacgccgccaggcgcagccggatccgcgcggtccgaacccgggagcgcgccgccgtgcgtttcggatccgcgtaaggcgcgccgccggatccgccgcgccgacagggagggcgctgccgacgtccagctcggcattggtttggctcgatccggaggcgcgtcgactgtgggtgggagtaatctgtatttgtggagctttgcttggtgctgaaaattgtgcaaacatgagatggcttcagcatatagcgtgctggaagcgggcaccgtgcaactgagcccatccttcttgtagccagattccttattccaatgatgcagtggttggtaggttgcagtagatgactaccggtgatcccttgctcctgtcatcatcgggaagtgcagattcaccttcaaagccagctcggccttcggtaggctcattaggctgcctctgcgcaactgattcattctcttcttcactgtacgaggattgtgaaacggcttctgtcacactcacggatgaaagggaggctcaaccaagacatttacgcgagttgtctgatgtgagcagggtggcagagcgcttccagtctgctgattcacaattcttccatcgtctctcagtggaatgctct

SEQ ID NO: 95210 - DNA, 341 bp, Zea mays
  Clone ID: MRT4577_186823C.1
gcgacgcgtacatcaacccgtacgttgtggcttgggaccattatttgatcgaggagcgcgatctgaatgatgtacccatgcatccgtgcctgggtgtgaaaacagattgctgtctctgacacgtgatgactaatgatacagagatatctgatgtataagaagagaaggataagacggttgaggaacgtatgggcgcagatgaagttggtgattaagtagtggcgctaatatatagcctacagggcgaacggtctagacgagccaaggtaacttacgcctgcaggcctgttcataggtcctatataagtacatggtggtgcccggcacttcttttttttttt

SEQ ID NO: 95211 - DNA, 387 bp, Zea mays
  Clone ID: MRT4577_186824C.1
gaaaagaagcccgcaaagtccttctccatgttctcccccaatggcaggtttattctggtcgtcatgctcgataactcactgaagctatacaatttttccgccgtgctagtttttgatggtattcagtggacatgtgtacagacaatactgtatacagtacacgttttctgttacgaatggataatacattgtaagtggatcagaagacaactgcatgtacatatggtacctccaagaggagaaatatccttcagaaattagaaagccattcagacactgtcatttcatagtcctgccatccatcatagaacaagactgcttctggtggcctttatattgataggactgttagattatgggttcaatatagctattcgactttcaggt

SEQ ID NO: 95212 - DNA, 295 bp, Zea mays
  Clone ID: MRT4577_186825C.1
gccctttttttttttttttttttttttttttttttggggcctgttttttacttgttttttaaggttttggttatttgaaacttgttgcttttgggaaaacaaacggctttaaagggggaaaaaggcgcagggccccagggaaaaagaaaggaaccccaaaaaagtgccgcggaccctgggaggccccaaatgtggaatggtgcccaaaaaatagtgcggaaagggagtttccatggtccggtttttaatgggccgaaccccagatcctggtgaaacccaggtatcaggcaacggg

SEQ ID NO: 95213 - DNA, 295 bp, Zea mays
  Clone ID: MRT4577_186826C.1
atgttaatgcctaaggaccgttgcaaagaacgtcaatccaagtgtagcctgtagcctttctggaaagtgcggtgttagcattccctatcccatgtgcatgagcactaactgcgacaccgtcaagtgaaatgggaactgatatatgcatggtgaggatgaacagtatggtctaacataaataaaagggtgtgtatgtacactgacctgagcgtgtgcatagtaaggtagattttattatagtggaagttggagatgttacttagaaatatttaggtttatatggggtgttaatggt

SEQ ID NO: 95214 - DNA, 379 bp, Zea mays
  Clone ID: MRT4577_186827C.1
aagcttgaaacctgtacagcggccgctcgccgtcgccgagtttgtccatgtacgcctccccgccgctgccttccaggcggccgtgtacgttttataccaccatgtcgcccggccacaggacgtctacgacaccgacgcgcatctcgtaataccggatcccgttgggaaacacgaccatctgctcctgctccacatacttggtgttggcctgctgctgcgcgacactccaagcgtgtcttgagctgctccgacacgacgacgacggtcaggaagtcggcccacgccaacccagtaccgattcctgaccgacgagtcaacgacgaggctatccattcagtggagtccccgacgcccgcctgcttttgctcttccgcctacg

SEQ ID NO: 95215 - DNA, 279 bp, Zea mays
  Clone ID: MRT4577_186828C.1
taacaaaaacaaagaacaaaacttaatttatataagcatataaaaaactctaaaaagaacacaaagacattttgtgcctgtttccctgctcccgccttgtgggggtcatcttcataggctccactcacagtgatgataccgggagccctcggcggaggcccccctactcttcgtatgcttcgggacatcaccaaagctctggtcggccgtcaccgcctaggggctcaggcgcccggggcttcgggggatgatttgggggtctgccccgatggatttact

SEQ ID NO: 95216 - DNA, 286 bp, Zea mays
  Clone ID: MRT4577_186829C.1
gctggccaaacagcaataggtgaaactcccccaaatatggatatatctcctggcgaaagggggcaaaactgtccaacaaaatccccccgaggggtctgtgccaaagtaaggagaaactgacggcacaacatccatatgctaactacttgcgccggaccaaatgtgcacacgcatatagcctcctgacccacaaaatcacgcgtgccttgatattgttccaacatatccataggaaaatcaaggttggagaggattcaatttcaaaaaaaaaaaaactggactgcat

SEQ ID NO: 95217 - DNA, 305 bp, Zea mays
  unsure (1)..(305): unsure at all n locations
  Clone ID: MRT4577_18682C.1
acctcccctcctccctctagcggcgactcccttcctccctgtcctctgtggcggctgaggggaaggaggatgctggctgggaagattaggttaagaagtgggctgggccaggaaacagcaggccggtggcccatatgtctttaatctcttttattttttttcttctctttttacttctctactanaccagtaaatcaattagttatgtattcattgtttcctaatcttctactactatgtattagttatgttagattttaagtgtattatgttggtttatgttgaagttgtcatcctatttggtg

SEQ ID NO: 95218 - DNA, 187 bp, Zea mays
  Clone ID: MRT4577_186830C.1
caacaacctagtaacaggggcgatgtttacattaaagccctacttgcgtaggatcgcgcaggttttcgcagatgggatgcgtcccttattccacaggtgcctccaacaatcaacagccctattacagcagttaccctaggtgcatttattggcacaaaacattaaggggcagcaactaccaaaactt

SEQ ID NO: 95219 - DNA, 541 bp, Zea mays
  unsure (1)..(541): unsure at all n locations
  Clone ID: MRT4577_186831C.1
cgggggnagaaaacagttttggataattgatcttgtttgcttatttcccagtctattacacggcatatatagcctctggttcaaccaatctctcctatgattaaggcatatngaaaagaaaactaatcttaacaaatctcttctatgattaaggcatatgaaaaggaaactaatcttaaccaatccctcctatgattaaggcatgcaaaagggaaactaatccttatctttctaaacttagccactgattgtggcgcctgccttggctgcgcgatctgcagctctcctggcgtcacgacggcgcctgtaagtgtggccgtacatggcagatcttcacttgtcattttcacaaacaataaactgtcaggttttgatggaatttgagctaaattgtggcccagcatactctgcgattcgcgagactggcattcttccttgagtaacaaagctaatgttttagaaacttgcttgtaaaccttgaatgttttgtcattctccttatacataaatgttntagttttaaagcattctcttagtttct

SEQ ID NO: 95220 - DNA, 218 bp, Zea mays
  unsure (1)..(218): unsure at all n locations
  Clone ID: MRT4577_186832C.1
cccttttctccccccaactacgacacaatcctcttttcctgacccagaccacacnatagaagagcatttcaaagggccttgagaccctcccctaaccaaggctagcctaaacctcagctccatctcttcttcagatgcttttcaacactacatcaacaactaaatcgacaaccttaccaacactaacaactacccactcaaccacgaaatcaactgtt

SEQ ID NO: 95221 - DNA, 785 bp, Zea mays
  unsure (1)..(785): unsure at all n locations
  Clone ID: MRT4577_186833C.1
accagcacaatggcgcaccatcttatgaccctggccgccattgtcgcagcggtcgtgctgctcctgccctgcgccacgggttatccatgggccttctgcggcgagaacaataacttcaaggccaacagctcctatcagtcccatctcagcctcgtcgccgccaccttgcccaagaacgcctccacgtccccggacctcttcgctaccgctgtcgtcggcaccatcccgcggcagctctgggctatggggctctgccgcggcgacgtcgacggcacggcctgcttcaactgcctcacccaggccttccgagacctaccgaaccactgctcgtacaacaaggacgccaccatgtactacgacccctgcatgctacactactccaacaaccagttaatccccgacgacgactcgggagatttttacaccatcaactccacagcagctgtcaactcggatccagtgcggttcaaccgtctcgtggccgcgctcgtgaacgccaccgccgactacgccgcgcacaagtccacgcggcggttcgccacgggcganacaaccgcgggctccgcctccgagttccccaagctgtacagcctagcgcagtgcacgcccgacatgaaggcggcgcggtgccgagactgccttgcggcgctcatatcgcagtcgctggacgcgttccagaaccttaccctaggccgggtgctttggatcaactgcacctaccgctacgaggccgcgcccttcttcatggaccggncatggtgcagatagcagtgccgagctcatct

SEQ ID NO: 95222 - DNA, 115 bp, Zea mays
  Clone ID: MRT4577_186834C.1
tagctcgatcgctcatcaatcgacagatgaattattgatctaactaagtgaagttgaaaagcacatcatcatcatgtacggcggatactacggttatcgcgatcaacgctacatc

SEQ ID NO: 95223 - DNA, 142 bp, Zea mays
  Clone ID: MRT4577_186835C.1
cacaccctatgaccaggtttggggacccatggccaccacctagtgggacaggttacgaggggttttggggatcaaggtctcggccaaaacgaaggttggaaaaattctcctacataaattattaatttcttcgatatgaagg

SEQ ID NO: 95224 - DNA, 894 bp, Zea mays
  Clone ID: MRT4577_186836C.1
gtacgtaagctcggaattcggctcgaggtgaccatgggagggaattggagctaattgacgatggcaagaatgaagaaacgcctctgtcagttcttcaggtaaatgctatgagaaagttggggtcggtggaagaggtgcctgtcccgctcttcccgtccaagggtcttcggttgaagcaaaagattaaggactggttggaagggttccagaggctcccttatgtatctccatatgagaatttcagccacatcaatccgggtagtgatgtttcagagaagcgggcagtcggggtgctccatgagctgcttagtctgtttgtgacatgctctgctgagaggcgacggttacgctgcctgcggcagcacctagggctgccacagaagtttcatcttgtgttcgagcggcaccctcatgtgttctacttattgttaaaggagaagacatgctttgttgtcctcaaagaggcctacatagctggagaagacactgcaattgaggcgcaccccatgttggaagtgttcaagaagtatgttgagttgatggagcagtcacgggaaatcataagatgtcgacggagcgggaagcctattgaactagagtccaaggcatgcggggatagctgagaagaaggatgggaatacatgtgcaaatatgacctctataacaagaatgtggatatgtactcttggtaggagctagtttatttctcattatttgcagagaaatacatcaagtgctgaaacagcttggtgactatatttaatctgcattcttaatttccagttgttcattacttgactgtgtactattgatgtcttaatcacacaatagtttcgtcagagatttctgatttccaggtcttcgacttaacttgttcgaaaaaaaaaaaaaaaa

SEQ ID NO: 95225 - DNA, 946 bp, Zea mays
  unsure (1)..(946): unsure at all n locations
  Clone ID: MRT4577_186837C.1
cctcgaggccggccgggatgtggacgtatgcggatgcggtgagcaggtagcatccactgcactctgcagaggaggaaggaagaggaccgacaaagatggggatggcattgccattgccgccggcgtcacaggggttgttgcgttccaggaggatgagcttcctcgcttcgccgccgctgtcgctcaaggcagccggtggaatcagcatcccatgcccgtggcgattggatggccgccgtccacgagcagccccagccagtgttcctcgactagcatcagtgcgaagcgtggtgctggacatcgagggcacgacgagccccatctcgttcgtgacggacgtgctcttcccctacgcccgcgacaacgtccgcacgcacctggacgccacctactccacccgcgagaccaaggacgacatcgccctgctgcgcgctcaggtcgagcaggacctacgaaancgaaggnctccccggggnnccgtcccggtccccgccccgacggcgccnggcaagggaccnggcgtcgtcgacgccctgggtcgccaacgtgggaggccatgggatcgcggcggataggaagacaacctcgctgaagcagttgcagggccacatctggaggactgggttcgagtgccaagaaatcaagggggtggtgttcgacgacgtgccgccggctctcgagaggtggcacgccagcggcattaagacgtacatttattcaagtggcagcagggaagcccagaggctcatcttcgggaacactacctacggcgaccttagaaggcacctgtgcggattttttgacgcaacaattgggaccaagagagacgctcgcagctactacgagatctggcagacggtcggggtggaccggccgtctcagatactgttcctgacggacgtgtgccaggaagccacggcagcacaggctgcaagccttgaggtgc

SEQ ID NO: 95226 - DNA, 114 bp, Zea mays
  Clone ID: MRT4577_186838C.1
gcaacgaagacttgtataagtcagttattgccatccatgaatttagacaacattcttattagagaatctatggcgaatgtcagaaactttgacaggcagatatatgaaacttga

SEQ ID NO: 95227 - DNA, 760 bp, Zea mays
  Clone ID: MRT4577_186839C.1
cctttgccgcacctgctccctcttcttccttttcttggcgctcggtcaccagtccctagctcgctcggcctctgctcttctgctggccggtgctccctcacccatcttctatagtcgccttgctctctgatgctttcctgctcgtccgtccgcagctcggatgtcgtggttctctggtcgccggtgcccagctcgccagccatcttcttgccttgtcgccgctgttcttctctagtgctcgcctcagcccaagccgcgtccatggctatcgagcacactagctgtcgtggggctcggcctcagcatggcgctggacgcccggacttcatctcggtcctctcgaggtcggactgcgccccatgccggcttcgattggatgtagcgcgtcgtcactcagctcgcccaaatcctggccatggttctcgtcgcgccctttcctacttccccatcctcgccatagaggctcagtcgctcgccgtcaccccaagcgccgcatcggactcgtcctgtgtgatgtccaccaagtgctcgacaaaaaactcgaacgagtcgtcatgccatcgtcttcgtcgaatggaaatcgtcgtgctaacacatcgatgtcgtcgatcgccatcctcatctacgccaacaagccgtgaagacgctcttgtgctggccacgcgccaccagctcgacaaaatgaatcctatgggtatctggtcatgaacgagcgccctgtgtatcgctcatcaagtgctcggtcgaagactttaattga

SEQ ID NO: 95228 - DNA, 476 bp, Zea mays
  Clone ID: MRT4577_18683C.1
acaatgaacatgcgactccagtgttataaattgaccatacgcacggacataagatcgtaaactgtggaggatcacgagataaatagaaactagtagtcaggcagtggagctcgtgcacggagcatcaatgcatcgtggacagacagactcgacggtgggcgcgtgaaccgagggaggaatcaacgaagagggtccaattcgttggtggggggggacggcatgacggataggaaaggggcccccaggaactgtggatggacggatcgaaattaacgctggagggtgacagacaaaagcgctcgcggcgagcctaaccaaacccctcgggttgcaaggtgacacggcaggtgggcaagataaccggcgcagggaatatgaacagtgttagcatgaggagacatgcgtgtgcttgtgatggacgacgaagatcttcatactaaaatttggctgctaaattattagctgaatgctgccga

SEQ ID NO: 95229 - DNA, 782 bp, Zea mays
  unsure (1)..(782): unsure at all n locations
  Clone ID: MRT4577_186840C.1
agnacaacctcgctgaacagttgcagggccacatctggaggactgggttcgagtgccaagaaatcaagggggtggtgttcgacgacgtgccgccggctctcgagaggtggcacgccagcggcattaagacgtacatttattcaagtggcagcagggaagcccagaggctcatcttcgggaacactacctacggcgaccttagaaggcacctgtgcggattttttgacgcaacaattgggtacgctgtacatctagtatcacacctttccgctcactgatgattcgtatgcgtcactgtgactatggctgttaatctatcctttttggcctggcgcgcgtctgcaacggaaggaccaagagagacgctcgcagctactacgagatctggcagacggtcggggtggaccggccgtctcagatactgttcctgacggacgtgtgccaggaagccacggcagcacaggctgcaggccttgaggtgctaatatctatcagacctggaaacgcgccactccctgctgaaacccatgggtttgggacagtcgagtcatttgctgaaatcttgacatgaagggaggatgcatcctcaacatgcatgcatgcatgctgtgctatttagagatggaaacggattgaactagtttcaaaaggcagatggaatggtttcatggccttgatttgcattttcatactagctttatttacattgcccatgttcagtttgttggagaccataaacccatgggctcaccaacggccgccgaccttgattggtttccttc

SEQ ID NO: 95230 - DNA, 304 bp, Zea mays
  Clone ID: MRT4577_186841C.1
ccactcgttcgcttgcatttcctttaaatccttccctatttaatttttcaggaaaaatcccaccttttatgttttttttcattttagttccttttaatgtctcttgtttttttacctggacgctacttttctttgtcagcataatgcatatacaagttttatcatgtaagtaatctttcaattttcctgctgcatatgttgttttccactttttcccatgatcattaatactatacattctatcctattttaaatccttcctttttaaattattgaaacttttgcctttaattaaaattctaat

SEQ ID NO: 95231 - DNA, 569 bp, Zea mays
  Clone ID: MRT4577_186842C.1
ctcttctgttgctactcgcggttccgatcgtcttcaacgccccgggaggccgtcgctcaataggctcatgctgacctcctacttgtcgatgtagttctcttgcttgttctaggtgcgcgtcagtcgcatcgtcgtggcggacccccacgaactcttcactcgtgtgtccccctaacgttgccttcggacacgtcaactccaccacgcatcacgcttacaggcgcttacatgaacatctctgcgtgagccactgacatggttgatatcgcaccgatgcatgcactacgcagtatgacctcttgggagaacagcacatggcctcctcactagtccttgtgcaaaacagtacagtctgccctccacgaccctatgctgtcgacgtgtgcctgacttcatctataggggcgctgacattgtggagaagatcgtcgaatggacaaacatgtctgatacttatggtatatcttacgatgaatgacttgctattccttcaggtgaatctctagatctctctccagcagatcttctcgaaaggcacattaccaattggcaccctgcacgcccgtttc

SEQ ID NO: 95232 - DNA, 854 bp, Zea mays
  unsure (1)..(854): unsure at all n locations
  Clone ID: MRT4577_186843C.1
aatcctagccagagccagagacagaaacacctaaagcgccggtcgccggatcgccccgtcgcgtgaccgaccggccaccaccagtgcagccatcgccatcgccgccgccctccctccctccctagaggctacagcaagcaagaaagcgagcaggcaaggaggggtgggggatggcggacagcggcggggtcagcgccaacaacgccgccgccggcaacgacgacgaggagggcaacaccgccccgttccccgagacggtccagataggaggatctcccgagtacagggtcgagaggaagctcggcaaaggcggctttggccacgtctttgtcggccgccgcctaaccggtggcaacggccgcggcgccggtgctcacgaggttgcaatcaaattcgagcacaacaccagcaagggctgcaactacggccctccatacgagtggcatgtctattctgctcttggaggtactcatggtgtgcccaaggtgcattataaaggccggcagggtgactactatgtcatgatcatggatatgctggggcctagcttgtgggattcctggaattcagcagggcagaccatgtcatcagaaatggtagcttgtattgctgcagaggccatttctatcctgcaaagcatgcattctaaaggatatgtacatggagacgtcaaacctgagaattttcttctcggtcagcctggaactcctcaaganaagaaactttttcttgtagatcttggattagcaacaaagtggaaagatcctgctactcaacagcatgttgattatgatncacgtncggatgccttcagaggaacagtcaggtatgctagtgcccatgcgcatttagga

SEQ ID NO: 95233 - DNA, 160 bp, Zea mays
  Clone ID: MRT4577_186844C.1
ggacgtgggtcttatttgtgaatcatcaacactttgttgttgatcaacaaacagccccccaaaaaaaaaagaaaaaaaaaaaaaaaaaaaggcaaacggtccaaagtgtccgaattaagcttagatgaccgtggcgggtcttggcccgtctagtgtttcc

SEQ ID NO: 95234 - DNA, 1295 bp, Zea mays
  unsure (1)..(1295): unsure at all n locations
  Clone ID: MRT4577_186845C.1
atggagctccgcgagctgggcggtacgggtctccgcgtcagcgccgtcggctttggtgcctctccgcttggcaacgttttcggggacgtgccccgcgacaccgcccgcgccgccgtccgccgcgcgctcgacctcggcatcaacttcttcgatacctcaccgtactacggtggcacgatatcggagtcagtcctcggcgattgcctccgccacgcggccgttccgcgggaccgagtcgtcgtcgccaccaagtgcggccgctacaaagacgagggtttcgacttctccgccaaccgtgtgacacgcagcatagacgagagcctcgcccgactggggctggactacgtcgacatcctccacgctcatgacatcgagttcacccatctcgaacagattgtgaatgagacaattcccgcactccagaagatcaaggagaatgggaaggcacggttcattggcatcaccgggttgcctctcagcatctacccttatgtcctcgaccgtgtagcaccaggctcggtggacgtgattctatcttattgtcactacgggatcaatgacacctcccttgttgatctgctcccctacttgaagagcaaaggtgttggggttatcagtgcttcgcccctctccatgggtcttttaacagataatgggccaccggagtggcaccctgcaccagaagaacttaagatgcctgaattctacttagaaaatgaaaagtcagcatgcaaggctgcagcagatcactgtagaaagaaggggaaaagcattacgaagctagctatgcagtacagcttaatgaacaatgaaatctcgacagttcttgttggaatgaactctttggaacaggtggaggagaatgtggcggctgcactggagttgtcaacatcaggcatcgatgatgaacttatgcgtgaagttgaagcaattcttgagcctgtgaagaatctgacatggcctagcggcatccaacaagcctgacggccagaagcagctttgcctaactggagaagctggcatgatgggcgtatcactgctgttcgatgcagtcaattgtacacaccagcatcattggctgctgattgcaaaatttgcaatgcccgtatggtcattgatggaaggggactgttgggctttgtggtaatttagacatgtcgaataaaacgcggcaacccgagccaatgaaagattcgatgctgaactgtaaanaaaaaaaaaaaaaaaaaaaaaaaaaaaaaaaaaaaaaaaaacaaaaagggcggcccggctncgcgattctagaactagcgaga

SEQ ID NO: 95235 - DNA, 1715 bp, Zea mays
  Clone ID: MRT4577_186846C.1
gcacagtcgcgcacgaggcgcacccagtcccctccaatccgtggcgcgcacccatcagaaagcctgagcctgactaccgacgagtgacgagccatggagctccgcgagctgggcggtacgggtctccgcgtcagcgccgtcggctttggtgcctctccgcttggcaacgttttcggggacgtgccccgcgacaccgcccgcgccgccgtccgccgcgcgctcgacctcggcatcaacttcttcgatacctcaccgtactacggtggcacgatatcggagtcagtcctcggcgattgcctccgccacgcggccgttccgcgggaccgagtcgtcgtcgccaccaagtgcggccgctacaaagacgagggtttcgacttctccgccaaccgtgtgacacgcagcatagacgagagcctcgcccgactggggctggactacgtcgacatcctccacgctcatgacatcgagttcacccatctcgaacagattgtgaatgagacaattcccgcactccagaagatcaaggagaatgggaaggcacggttcattggcatcaccgggttgcctctcagcatctacccttatgtcctcgaccgtgtagcaccaggctcggtggacgtgattctatcttattgtcactacgggatcaatgacacctcccttgttgatctgctcccctacttgaagagcaaaggtgttggggttatcagtgcttcgcccctctccatgggtcttttaacagataatgggccaccggagtggcaccctgcaccagaagaacttaagtcagcatgcaaggctgcagcagatcactgtagaaagaaggggaaaagcattacgaagctagctatgcagtacagcttaatgaacaatgaaatctcgacagttcttgttggaatgaactctttggaacaggtggaggagaatgtggcggctgcactggagttgtcaacatcaggcatcgatgaagaacttatgcgtgaagttgaagcaattcttgagcctgtgaagaatctgacatggcctagcggcatccaacaagcctgacggccagaagcagctttgcctaactggagaagctggcatgatgagcgtataactgctgttcgatgcagtcaattgtgcacaccagcatcattggctgctgattgcaaaatttgcaatgcccgtatggtcattgatggaaggggacgattgggactgttgggcttttatggttgggccctgtggtaatttagacatgtcgaataaacgcgatacgagcaatgaaagatcgatgctgatcattgaattcttgagcctgtgaagaatctgacatggcctagcggtatccaacaagcctgacggccagaagcagctttgcctaactggagaagctggcatgatgggcgtatcactgctgttcgatgcagtcaattgtacacaccagcatcattggctgctgattgcaaaatttgcaatgcccgtatggtcattgatggaaggggactgttgggctttgtggtaatttagacatgtcgaataaacgcgcaacgcgagcaatgaaagatcgatgctgaactgaataagcctttcccatacggccatacatctggggtggagtaaaacacttgttagttttgctgccagacaagcaattgcgcaccactcttacgtgcgttgtttggtttacataattgtaatgtgacgggtaatcgataacgttaaaaaacacc

SEQ ID NO: 95236 - DNA, 325 bp, Zea mays
  Clone ID: MRT4577_186847C.1
gctaaaaacaaattccatattgctcttgcatggaaggccccccacccccccatactttgcacaccgcccattggctgtaaacacacatggagcgggctaaaaaacacccggggcggtggatacgttggcccgtccaaggcaacctacctcaaaagaacaatttcgggggtaaaagagcgcaaatccttgcaattactttggggcggtaaaacgtaaccaacgaaggggcctcctttggagaaaaaaaactgccctttggggggggggagggggaccatactttttccccgggggatttggccggaaaaaagcttggcttttgagg

SEQ ID NO: 95237 - DNA, 329 bp, Zea mays
  Clone ID: MRT4577_186848C.1
ggccgacgggggcacatgttccagcgcttattacagaaggggaagagtttgcattgagactcatacaacctaatgatgcagttctccccaaccgacagttgacagatcagctcttacttccttaagataggatacagcgaaacccgtgcgtgtactagaagggggggggaacacatcccttttttgtgttgaaagcaacctcctgtaaaggaccctacatcttggcacgcgggaaccaacagacatctccacctttgtttcctgatgggcaatcagaatactctcgtgctaccttagcaaactgagcaggaggaactttgtccccccga

SEQ ID NO: 95238 - DNA, 259 bp, Zea mays
  Clone ID: MRT4577_186849C.1
gttctagatcgcgagcgccgcccttttttttttgttttagacaagaccaccatgtatgacaaaagtacagggagcctcgactcttacattattttgattccgggacttgtgactccgcagcattcaaattctggggttttaggaactttaacccgagaactcctacttatgcgctacaatttaacacgttacgaatagttcctggctctcccgggtgagctactgtccaaggtccccaagaaggcgttcaaccgcagca

SEQ ID NO: 95239 - DNA, 268 bp, Zea mays
  Clone ID: MRT4577_18684C.1
cctcgaattgtacgccagcaaccacaattctatcatttgcctttatgttcatagcacacctgttctgggtgacaattatggcttttttatcaactattgtacatttttggtccagttactttgcacgggtgtcttggcaaagtaaatttctgctcgctgacatgctaatgtttttcttcgtgtttggggttcttcacctccctcgcagcaaagaatgtattttttatcgagggatattttgttaattagctagatgaatattactacc

SEQ ID NO: 95240 - DNA, 280 bp, Zea mays
  Clone ID: MRT4577_186850C.1
cccacgcgtgcgcccacgcgttcgcgagagccagctctcctagtacacagagcgcatggggcgcaccaggtgctgagccttcttgctgggagggtgtggctacaccaggccgagaagatcaacagcactacgtgaccggcaagactggcggagcttgaagcgaatcctgcgaagcccggcgcctcttctggtggagcgggcatacatgcctggggcctgggtcatcatgcctcacgcgccggcgagcaacggagaggagctaggggagtggggtctgctc

SEQ ID NO: 95241 - DNA, 219 bp, Zea mays
  Clone ID: MRT4577_186851C.1
agaagggattgaggacccaagaagtacttaaacacaacaacaggatatgacctttgaaaacgctggccgccaccaaggaaagcaacgttggccgggggcagggcagtttcacaaaagaagaaagggcaacgttccacacggccgcacaaaaacggatcggtcaatacaaccaaaaatcaatcaccaagaacggtcgaagggacgcgaactggacataca

SEQ ID NO: 95242 - DNA, 298 bp, Zea mays
  Clone ID: MRT4577_186852C.1
ttcgatttcaagtcgaacaactctaaaatcaactattaaccttacaaactctgcatttttgtttaaacatgactaaattgcttgccgtatttgcagctttgctgttcggcccaagttgctttggccggatacgaccaatggatcgacttgcgcattgaaaacaagcgcaacgaaccaatccgtgttactggtagcttgtcctggggcaaatggtacgccaacggtgacaagagccacgaagtttctgctccaaatgtagtcttgcaaccaggtgaaaccgcccgtgtttctgcttgcg

SEQ ID NO: 95243 - DNA, 285 bp, Zea mays
  Clone ID: MRT4577_186853C.1
cctccaccttgtgctccgcctcaggggaggcatgcagatctttgtgaaaaccctgaccggcaagactatcaccctctaggcggagtcctgatgacaccatagacaccgtcaaggccaagatccaggacaaggagggcattcctccagaccagcagcgcctcatctttgctgggaatcagcttgaggacgggcgcgcggtggcggactacaacatccataaggagagcacactgtagttgtcgcatgcgcgtctgtgattgcctgtagatgttcgggcagaccctg

SEQ ID NO: 95244 - DNA, 501 bp, Zea mays
  Clone ID: MRT4577_186854C.1
caaaactctgacgatacatctgaatcaactacattctctcttattcttagcatacccaaacaaagccttacgtgacaagattactcctgaagcataaggtggcagataactgtgacacgttcttcaattgtatcatcatctttctcttttacgtaatccaagtgccagagataccaatgccgtggcattgcatttgagtataaaagtttttttgtacaaaaggatcaaagaaacagataagatgacagttatgaggaattcacagtattagatccctgatcatgaatttctagaccgaagatccatgttgatgtaataacgatgctgttccaacttcttttcctgataaaatgacaatgtaaatatagttttgaagtttatgttgattcttagacaggatggtcaatggtgatcctgtgcgattgatatgaatccctctaggtttgttcttgatgatatataagctcttatttcaagatcatggtcttgctaactcatact

SEQ ID NO: 95245 - DNA, 513 bp, Zea mays
  Clone ID: MRT4577_186855C.1
cttgttttgggttcttttttttttttttttttttcctttatattgctttgcacgtctctctgtttccccttttaaatactgaacccaaattttcatggcacgccactgggactcgccggcaccataagggacaggaaatgtccaaaccccgggggggggggggggggggcccctaaaataccggaccggcccctcccggggggccacccttgcctctacccgggcatttcggaccttggcctgctggtggtccaagttttcctctgggggggattgttataccctcgcctttccctcgacataccagcctcctgcgtaaaatgtaaatcctgggctgcctcctgagtgagccgactccccttcattgcgtggcactccctggccgccttctaggggggcaacctgtcatgcctggtgtgttcctgactgccccctttcccggggggaggcccctcgcgccctcgggcccctggggggggtccccctcccccggtggggcgggctccctttttt

SEQ ID NO: 95246 - DNA, 372 bp, Zea mays
  unsure (1)..(372): unsure at all n locations
  Clone ID: MRT4577_186856C.1
gtccagcgacggggccgccagcggcagggagcacgacgacgccgacgccgacgccgacgacgactcgtacaccacggcgctcccgctcccgctcgcctttggagcctccgccaacgcctccttgggggggggggggggtttttatttggtggcggcacctnacccacggagcttgagcgcggtggcnttntacgcccgctccgtctgctccggtgtgtagaaggtgcccaggcaaactcgcgcctttcgtaccgggtcgcggatctacgtcgtgtaccgggacataggggggtttcgcactgcgtgcagtcttggttgntacgtcgntggtgttggttaaaatggtttattgggggctatggagggattgag

SEQ ID NO: 95247 - DNA, 235 bp, Zea mays
  Clone ID: MRT4577_186857C.1
ccctcgcttgcggacgcgcgggtttgacggcgatggtgactgactaaaaggatatggtgtcactctcaaatagctctctagtaacggctatgaagttggaacggcaactctccaagggtgtgggactccaggatgacccaaggggctgtacaatctccatcaactgtacaatgatcacagtctcgtcgattggcgctcatccagcggttgagtgggtgcacagcagaccttggca

SEQ ID NO: 95248 - DNA, 381 bp, Zea mays
  Clone ID: MRT4577_186858C.1
ctatgagcgttgaactgcacgcgcacgcaggcgtgggttcggttgcgcgggcgcggtcgccctttttttttttttttttttttttttttttttttttttggttttttttaaaatcaaagggcaatgcgggaccggtgtatttatttatttaactcgcaaaagggtttttacaagcaggttaataacacacttatttggacctcaacctgaatggcatccatgggatcaaatttaccgggggctacacaaaagatgatgatgatgatgagttcttcgtttccaccagggtcttttgggcactatattttattcaaaatagggagaaagggaaggaaagaaaaagaccaatttggaacagggatccaacactttaattccccc

SEQ ID NO: 95249 - DNA, 123 bp, Zea mays
  Clone ID: MRT4577_186859C.1
atcttctcggctattgcacctctcttatcagggcctagtaagccttcgaaggcattatttaattgcacagaacgcctctggtcgcggaaggatgtggacattagggccggttgcacctaaaag

SEQ ID NO: 95250 - DNA, 402 bp, Zea mays
  Clone ID: MRT4577_18685C.1
acccatacaaatacaacaccctacaaatttagattctttactcataaactacattctatgtctgtgtcaaactttaaaggcgtaagggtcaaaaacaaacaaggcctaccaactcatcaactactctaagcgacctttcttaccactgatgtgatgcactttcatgtccttttaaatcactttactttccaagcactgccaatatctgtaaatgctacaaccttatttttacctcatttcaactgccccattctacttcccaatcttggaacacttttttacaaatacacttaattttcttcctatagccaacgcaccaacttaaaaccttatactgatctacttgacccattttttcaccttttttacatgatcccaatcatggtcacaacatccttagaa

SEQ ID NO: 95251 - DNA, 478 bp, Zea mays
  Clone ID: MRT4577_186860C.1
agaagccacaacactgcatacatagcgtgttattcatagagtacgggggacgttcataataaagagtggtcgcatctatacatctactaagcaaacgtgactggtaactcctaatattaagcgagatggaacttatataaaccttatcaggtatgatatcatgatagcatgcgtgcgcaccatcataagaccgatacaaaggggctatttgtataaggtatgtttttcctaaaaaaagcagatacagagatctctggttagacgctaacgaatgctcgggggtaacgatatatgaacccgaagcgcggcagagctggtaccacgtaggctgccgctccttccccaggaacgcgaaagaatattggtacaggacgcttgtctgcttcatgccctgcgtgcgggtgaacacaacgtgcgagaccatacggtagtgcgccatgtttttgcagtcctcctcgtacttcttgagcaagcgcac

SEQ ID NO: 95252 - DNA, 948 bp, Zea mays
  Clone ID: MRT4577_186861C.1
ccgggtcgcccaccgcacaactgaagtatgccattgtcgacaacttccatggctctaacaaacttgtgctcatgcccaagcagcagagctcatcagctgcagcttctatgcttctgcttggccctctcactgcatgtcccttatcatgccaattctctctccttcagctacagcttcttcaaccctgatgacttcaggccggaggacgacgcgcaggtcgtcgatggcaggatcgagctgctcggcgacgagttcagagggcgtgccagggggcgggtgtggcacaagcagccggtgcagctatgggacggcaccaccggcgaggctgccagcttcaccgcgaacttcagcttcagcatcgagtcagtggctggcaagggcgcggcaagcgctgggcacggcatgacgttcttcctcgcgccgtacacgccaaacttgccgcaggagtcctacgacggctgcctcggtctgttcgatgagagccaggcgcttaactactccaagttcaacgcgtccggcgactcgaggttcgtcgccgtggagttcgacatccgcaaggacatctgggacccgagcagccagcacatcggcatcgacatcaacagcatggactcccgcggcgactacacggtcttgccagacggcagcctcgtcgacgccggcgtgatttccgcgacagtcgtctacgacaaccgcacgcgcagtcttcgcgtcaccctgatggtcggaagcgtcacttacacgtccgtagccaccgtggacttgagaagcttgctgccggagaaagtcgcagttggtttctcggcggcgacaggcgacgagtacaacgcaaaccacacggtgctctcgttctctttcgcctcgacgttggcaaccaagaacggcacctccatgcctgtgactgtgacctcgtccaccaagaaggccaccctgcaactcggcgctgga

SEQ ID NO: 95253 - DNA, 711 bp, Zea mays
  Clone ID: MRT4577_186862C.1
gacaaggccaccaaggtctcccgagggtgctgcttcgtcatatgcccctcaagggaggaagctgacaaggcggtgaatgcctgccacctcaagcagacgcgctctggggcatcaagtcctttgcaagtaaaatatgctgatggggagttggagaggcttgaacataagcttttcattggaatgcttccgaaaaatgttacagacactgagttgactgatttgttttccaaatatgggaatgtcacggatttgcaaattttgagaggttcacaacaaacaaacaaagctggctgtgccttcattaaatatcaaacaaaagatcaagcattggcagctattgaagctctaaacgggaagcacaaaatagagggttctagcgtgccattggttgtcaaatgggctgatacagaaaaggaaaggcaggctcggaaagcacaaaaagctcagtcacagctatctcatatacccaatgcaagtccaatgcagcagcactcttcagtatttggtgctttacagatgggatatatgcctcaatacaatggatttggttatcagccaccagggacatacggacttatgcagtaccctctatctcctatgcaaaatcaaggccccttccagaatatggttcaacctcttaaccaagggaactcgataagaggagtcaatcctgaagtgtctcccagttcagttcaaaggtcatttatggca

SEQ ID NO: 95254 - DNA, 1735 bp, Zea mays
  Clone ID: MRT4577_186863C.1
ccggcacgggctttcggctgctctctgtgcactagtcatttggcagttattcctactgcaatgctggtggtcttgatcgcttatgtaattgtttggggacgcctgtatctagctctcagtggtcttgaggctggtatccagggcagtgctaattcaaccaacaacaaagccttgggtactgttcttaatcagctgtccttcatacagcttgtcttcttcactgcattgccaatgattatagagaactctcttgaacagggtttcctaccttctatcttgcattctggcacaatgcaaatgaatttttcatctgtgttctacacattttccatgggaacaagagccattactatggccggacaatccttcatggtggtgcaaaataccgtgctactggccgtggttttgttgtgcagcacaagagttttgctgaaaattacaggctgtatgctaggagccacttcataaaggcaatagagcttggaataatattgactgtgtatgctgcacacagtgttattgccaagaatacacttgtttacataattatgaatatatctagctggtttctggtggtatcatggattatggctccatttgcttttaatccgtctggttttgattggttgaaaacagtgtacgattttgatgatttcatgaactggatatggtatcctggtggtctcttttctaagcctgagcagagctgggaagtgtggtggtatgaagagcaagatcatctacggaccactggtctttggggaaagattttggagatactgttagatctcaggtacttctttttccagtatggggttgtataccagctgaagatagcaaacaatagcagaagtattgctgtctatctgctttcctggatatgtgtggctgtgatttttggtctgttcgtgctaatgtcctatgctcgagacaagtatgccgcaaagcagcacctttactaccgggttgttcaaactgctgtcatcactcttgtagtgctagtgctggttttgtttctgaagttcacggaatttcaaatcattgacatcttcactagtcttttggcatttattcctactggttggggcttgatttcgatcgctcaagtaattcggccattcatcgaatccactgtggtctgggacagtattatttctgtggctcgtttgtatgagatactgcttggagtgttcattatggcaccagttgcattgctgtcctggttgccgggatttcaagaaatgcagacaagggtacttttcaatgaaggttttagcaggggcctccagatatcccgtattcttactgggaaaagaacaaatacagtttgaggttctgacccagattgtcgcggcggtgaagaagcagcggtgctctatctcctatgtacagcttagcaattcagtgtggaagggctttgtgcttactgatatagcttagatccatattgaactcttccagtagcttttatagctatctagtttaggagtccagatttgtgattttggcgatttaggtattcagttcttttgtacattggttgagctagttgtgtgtagctgattctattgcagcaccaccggtgagctctagtgacctatttgttgacctctgctggaagttgcatcttttgtgctagcaactgtgtcgtgactcgtgagtgctattgctctgctgaaggtataaaagttgctggaaaggatgttcctggaaaaaaaaaaaaaaaaaagcggcc

SEQ ID NO: 95255 - DNA, 389 bp, Zea mays
  unsure (1)..(389): unsure at all n locations
  Clone ID: MRT4577_186864C.1
caggacgacgngaagaccgggaccccgccgcangcaccggaggaggagaagaaaggccggcnggacangcncacggcgaagccccccgggggccccaacangaagccggaagccgccgccgccgccgcaccggccccgcccgnccacgcgcgggggccggcgccgttttttgtgaacgtgagccgccccgctggcncggcgaagcagggctcgctgggcntgatcntgcgcacgatacccgcgctcctctcgagctcagccgcggncgctgtccactcggcgggcgccgccggcgagccccgggccggctcctaaggtcgccgtcgcagcgcgtgtcctggccgtggccgtgccttgggcgctcagcaggtccctagcgccggcctgtg

SEQ ID NO: 95256 - DNA, 575 bp, Zea mays
  Clone ID: MRT4577_186865C.1
aaaaaaaaaaatgggggccccctttttcccaaggcccagaatttttttagggcccggggggggggcccatactttcccccttgttttggaaaccttaaaatttaaattggacaacacctccctaagaattacaaaaagggacaggagagccctttatttaaaaaccccctgggcccggaaaaacccctaccccagaaaacaccttttttttcccccgcccccgggaaaaaccccctttttttatccccccgaccttggggaaaaaaaccttttttatccctggccccaaaaattgcccccttaaaaaaatccccaggcaccacaggcccggggggctttttttttcccaaccccccaaccccaaaagggggggacaatcctccccccttttttttttttttgaaaaattcttttaacggacccttcggaaaaaacatcccaaattgtcccccccacagggttccccttcaaaacccagtcggttgggggaacctttttttttccggcaaaaggagggaagtttgacaaaaaaccttcctaaaaaacccctcaaaaaagcctttaaatcggggggg

SEQ ID NO: 95257 - DNA, 264 bp, Zea mays
  Clone ID: MRT4577_186866C.1
gcgacccatggaatggcagcactgacattctagccactcaacaaccaccaccacctgcgcccccggtcgatccaggcagtggcagcggctctggcggtcctggtgtcggagggggccggcacatgcatcacggccgcagtgctcaacacggaccgtctcgcgctgctggcgctcaagttcggcgtctaagacgacccgggcagcgcgctgtacacgtgacgtaacgcggacgccgacccctgcgcctggtgtcagcgtcacatg

SEQ ID NO: 95258 - DNA, 300 bp, Zea mays
  Clone ID: MRT4577_186867C.1
aatcaagccgcttgcactgtcatatctatccatctgaaccagagggatcagatggtgcttaatattcttgcttgattggccctagtagtatatacacgaacactacacacacatgtccacacaggccatgcacgcttggaagcgcaagcgcgttattgcttgcggtggtggttgttggctggttttagggccgtcgaggtcggcggcggtggtctttaaatggtgcgtgggcgattgcgtttgaatgagtgcgagcgcgcgctctaactgtgcccagcgcttttttagcgtgccgttgta

SEQ ID NO: 95259 - DNA, 471 bp, Zea mays
  Clone ID: MRT4577_186868C.1
cggacccgaacgcgggaagtaaaaaaacatctcggccaaaaatgatcccagaacaaatgggttatttggacacaaaaaggggaaacaaaaacccatggggcttgccccccagacgggcccagaaaggggccagttgccagtgaaaataaagttaaagcccaaaaaaataccaaaaacgagggataccccaaaaaaaaaattttaagggcataaaaataccaaacaggttaacttcctctagaaaggaaatgcttttaaaaatcctacctttttgcaaaaaccaacccatacatggggtatagcccccaatgggcttgcccaatccttaagagctccaaaattgattattgccctatagctttccaaaaatagggagaaaacactataccctcggcggcgctaaattttattaaacaggtaaaacacgtttatttcggggtgaattgctgctaggaaggcattaaaaagccc

SEQ ID NO: 95260 - DNA, 528 bp, Zea mays
  Clone ID: MRT4577_186869C.1
atgcatcgtcggcagatcttcttccctgtccagccgacttatctttgctggatcatatcctcgctggaccggtgcccggctcagaccttcgcggtctttactgggtcgattgcagagttcatggcaccgcttaagtggcctggactcgtgatggactattttgtgaatgagtgttccaagatgactactgtggcagtggttgatggggttcatggcgacctggctcttggcggtgttgccaatgagcctcttggagttggtgaaactacgacacgagaggagcgccctagaggatgtggtgacaaaattagaggcgatgctgcccatggagatgggaacgtcggttgccaggatggcgtgacgaaggtggcatgcggcgcagcctatgaagatggggacgccggttgccaggacggcgtgacgaaggtggcatgcagcgcagtccatggagatgaggacgtcggttgccaggacgatgccacgaaattggcagcagaagccatgggatcggatcaaaatccaagctag

SEQ ID NO: 95261 - DNA, 198 bp, Zea mays
  Clone ID: MRT4577_18686C.1
ttttgaaccctatcagcctacccaaacgcgggggctatttaaaattatggggggcttacaactcttgggactccatttgcattgcctacatccataacctatcttcccaggcactcactatctctatgcctacagggtcttctgccaccaagacttcaatcatcgaaattgtgactattatcagcatctatagcacca

SEQ ID NO: 95262 - DNA, 737 bp, Zea mays
  Clone ID: MRT4577_186870C.1
ggtacgcggatctcggaggtgtccgacccacgcgtacgcggacgcgtggggttggaactgctgaccgtcatcttgttgtcttcaatttgcagaatcctcagacggagttcaagcgaatgcaatcaccactaaaataccagacacggtgccttgctgcattccctgatcaacaagggtttttggttggttcaatagaaggaagagttggcgttcatcatatcgatgacgcacagcaaagcaaaaacttcacattcaaatgccacagggaaggaaatgatatattctctgtcaattcactcaacttccaccctgtccatcacacatttgcaactgctggatctgacgtgctttcaacttctgggataaggatagcaagcagaggctaaaggcttttagtagatgcccccttcccattccttgcagtaccttcaacagtgatggttccatatttgcttatgcggtttgctatgactggagccgtggggccgaaaatcacaaccctgcagctgcaaagacatccatctatctccacagtccacaggaaaccatgatgtcatccagcgggggggtgatgcctccctcctgtcttggaagtctggtagagtgtaaatttcagctaacttatgcgccgattatagggtttctgtagtacctggtgtttgcggtgtcttcaaaatagattctgtcgacgttctgcgatgacctccttactgcttatgttgggcactaaaatcact

SEQ ID NO: 95263 - DNA, 339 bp, Zea mays
  Clone ID: MRT4577_186871C.1
agtggaacaatattacattttggctagaaaatactcttgtcatgtgcacttatatgactccggataaccagaaacccttgcgggagataatttgttagacggactctgctagactctggggacgcatatcgagaaagtaactggttactttttgcgagttggccacgcgctggctaccaaaccaaataacgagttggagttgctgagaaaaaacacagctctacccttggctgaaacgaacatgccgtcgaaccgaaaaaatactatggatctgctgccgtcgtctctgcttcctgtgaatgctcacactgaccctaacgattagctgttagagtcccg

SEQ ID NO: 95264 - DNA, 1805 bp, Zea mays
  Clone ID: MRT4577_186872C.1
ggccgagccacgcgtccacccaagcgtccgcccacgcgtccgcccacgcgtccgcccacgcgtccgcccacgcgtccgcccacgcgtccgcccacgcgtccgcgcacgagatggattgaagcctgatcatggacatagttcagctgccggccgggctgccttctcttctgccgttcccccggcgagctctttctctctcgtgcggcaactgggctattggcgaccgccaacgccgacgattacatttacaccaagtgcccaagccgtcttcgactacaccaggtgccaagttttcttcgcgtccttcacccgcgacgagcacccaccaggcatagagagagatggcaagtctaaccggcctcaccgcgaaccctaatccgaacaagtcattcgagatactgccgaacccaggtgactctgtctccagcctcagctttagtcccaagagtaatctgcttgtggcaacctcctgggataaccaggtgaggtgctgggagattgttggtggtaacagtcagccaaaggcgtccatttctcatgatcagccggttctctgctcggcttggaaggatgatggaactactgtcttctctggaggctgtgacaagcaggtcaaaatgtggcctcttctgtcaggtgggcagcctcagacggttgctatgcatgatgcccctgtcaaggaggtcgcctggattcctcagatgaatcttcttgtatccggaagctgggataagactttaaggtactgggatacaaggcaatcaaatcctgtgcatattcagcaacttcctgaacgttgctatgctcttactgtgaattatccccttatgattgttggaactgctgaccgtcatcttgttgtcttcaatttgcagaatcctcagacggagttcaagcgaatccaatcaccactaaaataccagacacggtgccttgctgcattccctgatcaacaagggtttttggttggttcaatagaaggaagagttggcgttcatcatatcgatgacgcacagcaaagcaaaaacttcacattcaaatgccacagggaaggaaatgatatattctctgtcaattcactcaacttccaccctgtccatcacacatttgcaactgctggatctgacggtgctttcaacttctgggataaggatagcaagcagaggctaaaggcttttagtagatgcccccttcccattccttgcagtaccttcaacagtgatggttccatatttgcttatgcggtttgctatgactggagccgtggggccgaaaatcacaaccctgcagctgcaaagacatccatctatctccacagtccacaggaaaccgaggtcaaaggaaagccgcgcattgcaacaggcaggaagtgattgcattgaaggtgttgcaaggaaccatgatgtcatccagcagttttgtcatgcctccctcctgtcttggaagtctggtagagtgtaaatttcagctaacttatgcgccgattatagggtttctgtagtacctggtgtttgtggtgtcttcaaaatagattctgtcgacgttctgtgatgatctccttactgcttatttctggcagtaaaatcagtgtatcttaaaaaggttgtgatgtaaattttcgtgcatatggaccccgatactaatggagttttacttcacagataaaaaaaaaaaaaaaaaaaaacgaaaaaaaaaataaaaaacatagtaaaaaaaaaaaaaaaaaaaaaaaaaaaaaaaaaaaaacaaaaaaaaaaaaaaaaaaaaaaaaagggcctttgggttgttccccctgtttaagggca

SEQ ID NO: 95265 - DNA, 460 bp, Zea mays
  unsure (1)..(460): unsure at all n locations
  Clone ID: MRT4577_186873C.1
gactgacgactacaccaacctactcggcagccacaacccatctcacgcgcaacacacgtaccgtcgcattgtacgtgcagcnagctgcacgaacgcacacacacgctaggcaaccagcagttggcggcattccgcgcacccaacgtacgtacgacgcgggacaccccgtaccgtactcgcgctcgcggcacgtacgcgggccgggcgtatccggacgtgagggtaaagaacaaagaacatggggactgcaggaacacataacgaacgagagcgttgttgttgttgatacttaaagtttaattaacattcacgacgatcatctcgagactataacggctaagttgatgaaggagtatcacaacgatcttcattaagcagagaattatactcccacgatcctaataactatacctactgaaaatgtaaacgagttgttgctcctagacgtttagttttatat

SEQ ID NO: 95266 - DNA, 141 bp, Zea mays
  Clone ID: MRT4577_186874C.1
cagcagcggtgcgggatcagctggcagatgcagtcgctggaacgcaggctggcgcagatggaggagcgccagacgaacatcgtggcctccctgcgcgacatcctgctgccggtcggacacggggtcgtttcgtgggggtcg

SEQ ID NO: 95267 - DNA, 496 bp, Zea mays
  Clone ID: MRT4577_186875C.1
aactaaaaatgtattcccgtgagaaggacggacataccaccaaacaagcagtgagtacacacattgacaggcatggtcattcagtgccacctacacctcttttgaaggtcacacacaaaatgaattgagccgaacacatgcattacacctgctatgcctgcgttcattggtgcaacagcccgatctgacaaacaaatgcaagatgactgatgctattgttaacattgaaactggatgaacagactgctgcactgggaccagacgaggaggctagcgccccagctggtgcattaaggtgccaacaaagaagtcggccaatgtttgcactggggccttcaagtgccaccccagcatgttctgcagccagacccataatgatgggccaaggattaaatagctttccttcaagggccttcgcaaggctgcatgcggatgaacaaacttgatggacagacatcgtggcacacctggaactataacgggttgtaacacgctc

SEQ ID NO: 95268 - DNA, 532 bp, Zea mays
  Clone ID: MRT4577_186876C.1
gcgccgcggggcgcggtaggcgcgggcgattgcggggctacgccgccggtaacagtggcgctgaggctggcgccgtgcgcgtcggcggaggatgaccccggctccgcgccgtatcattactgatgcatcgcgatgcacttccataaagatagatatttctaagtgcctattctatcgcttgttaatcataaccgatagtaatatcgttataaagacaaatgtgattataactatacagaaaatttgaacatttatatcagatgtaaaatctacattaataagaatctaacgacttttagtatcataaatgttattattttaatgtacaacttagattaaacttaatatttctttgactactcaacaaattgggactgacttaccattctatatggagtataatttattattgccttataaaaacctgaatagatatacctctgaatatatgagaacctacatgataactatttcccaaaatatgtgaaggatctactgctctcgtgtacattgtcagatatgaaatggatat

SEQ ID NO: 95269 - DNA, 397 bp, Zea mays
  Clone ID: MRT4577_186877C.1
ttccttaggttgggttcctttgagccggccgccctttttttttttttttttttttttttgagatagggcgccctctccattaaccgcggtgggaaagggtaaattcgcagttacacccgtttaaaggggtttccaaaccaaacagagcggggtttaaagccccacaccccaaacacgggggggcaccccgggcccttcagggggaatttcttttagggggggccccaatttttcaggcgccactgttataacaggtccacacgtgtcaccccaaaaacccgggttccgataacacttggtattgtcattttccacgggggaaaactctcttttcttttttatgggcacataaaccggttttctctccctcactctagtacccctttggcgcccccct

SEQ ID NO: 95270 - DNA, 1404 bp, Zea mays
  unsure (1)..(1404): unsure at all n locations
  Clone ID: MRT4577_186878C.1
ttgggtacctcgaggccggccgggaccaaacggaacgccaaaccaaatccatgactgaacaactgaaccgggagtacgacatcggcgacgagatcggccgcgggcgtttcggcgtggtccggcgctgtgtctcccgcgccacgggtgacgccttcgccgtgaagtccgtggaccggtccctcctcggcgacgacctggaccgcgcgctggcggagctggagccgaagctggcgcggctcgcggggggcgagggcgacgggaacccgggcgtcttgcaggtgcgcgccgtctacgaggacgacgcctggacgcacacggtcatggacctctgcacggggcccgacctgctggactggatccgcctccggcgcggcgcgcccgtgcccgagcccgacgccgcgcgcgtcgtcgcgcagctggccgaggcgctcgcgggctgccaccgccgcggcgtcgtccaccgcgacgtcaagcccgacaacgtgctcctggacgtggaccccgccggcgaggcgcccccgcgggtccggctcgcggacttcggctccgccgcgtggctcggcgagggcgcgcggggccgcgccgaggggctcgtgggcaccccgcactacgtcgcgcccgaggtggtggccggcggcgagtacggcgagaaggtggacgtctggagcgccggggtggtgatgtacgcgctgctctccggcggcgcgctgcccttcggcggcgagacggccgcggacgtgttcgcggccgtgctacgcggcagcctcaggttcccgcccgctctgttcgccggggtctcgccggcggcgaaggatctgatgcggcggatgatgtgccgcgacgtctcgcgaaggttctccgccgagcaagtcctcaggcacccgtggatccagagcggaggcggaggccgagagctggtgcggccaacctgagcagccatatatcgaacgagacctgaaccgatcgagtatcatcgtagcagtccggtgggtgtgtactcccccgatgagtgttgtgcagacgtctctgtatatccagtaagcaggcggcggcggcggcggcgagtgtgagactggagatcgtcgtttcgccgcacctcgcccgtgtgtgtgtgtgtgtgatggtgacctgggccgttttcctcttttgccttgtgggccttttttcgggccgccctctttgcttgggagttaaacgtcgtgcgacgatgatctgttatgtccaaccgtccatgtacaaatgaagtttgagctttctcgatgatctgatcaaatcctgatgatactaattaaaaaaaaaggggggttggggtttgnttgtttgtttttgttttgttgttttttttttttggttttgntgggttttgtggttttgctttttggggggttggtgtttggggtttgg

SEQ ID NO: 95271 - DNA, 395 bp, Zea mays
  unsure (1)..(395): unsure at all n locations
  Clone ID: MRT4577_186879C.1
gtgggtggtgggtgaaagttttctttcttgtttggggtgtggtttggtttgttgttggtggttgggtgcgtcgcggcttgtcgccgtggtcgcttgccccgggggggggttgtgtccccgccgcgcgcggcggcgccggaggggggcgggcgccgcccgcgggggggggggcgcctccacggggggggccccgctcgcttccccaaggcgccaggagccggggcagccgcgactgacgttgggaagggagaggccctnggggccccccctcttcgggaggggcgcccctgcccacaaaggaaagcgaatggcgacctcccgggctgtgcaaggtatccagggataggcccagggacccaagatcaacccccttcttaggccctacactaggccaa

SEQ ID NO: 95272 - DNA, 296 bp, Zea mays
  Clone ID: MRT4577_18687C.1
cctctcttctctacggcgcgacaagggcggcgccggccgcggcgtcggctggaacgggcctcgctctccccatctctccgatcacttctgtcctgtgaaaatggcggatgaactacgctcaacgtctgctggtcagaagttccatgggcaggtcgagccgttgagcaggaactctccgagtccgccatgtacaaccctgtattcaacaatgcctattctgcttacaatgtgccccagaggtcatatcatgggatgaatgcaactgctggactctcatctgtcatggcagcatctcc

SEQ ID NO: 95273 - DNA, 226 bp, Zea mays
  Clone ID: MRT4577_186880C.1
atcccattgtacatatatcgatggtggcggagcaagagcactacataaagcaccaaaaaaacaaaaacaaataaaaaagcttgtgcaattttgggtggagctcatgcacactcttgaataacaaaatgaggtgttccttcttccccatgtgcagttgcagtttcttcttttcagtctctctttctctacaacctgaacatgcttccagcatatatgaccccagtta

SEQ ID NO: 95274 - DNA, 263 bp, Zea mays
  Clone ID: MRT4577_186881C.1
gaccaacctacccattcaacttttttctcacggcccaacccaagaacgggccggtcacgcagggatttgttgcgaacccaacaccaccctgccagtcacataaagagattgaatacgcacaatcctattgaagcacctcttccacattgcttgctacgcacgtgaaacctctgaagctgagccaccttctccccatgctgtatgaacacttaacgccgcgccaatactacaacacggaagggcagcccaatatagtgccggcc

SEQ ID NO: 95275 - DNA, 447 bp, Zea mays
  Clone ID: MRT4577_186882C.1
cctcgattattgcttgctctccacaaaaaacaaagaagagcaccaacaatgggagacgactcctcgcacgcagtgctcctgctgctcctggacgcacacgacgccttggctggaatgagagccaatgacggtaccttcagcataaacaacgactgtcgagtcaccgagggacacgcagatcccgctgtggtgggtggcacccatgtgaacccggacgatacgcgtaccggtaacgtgatcgtcggcaacatctccagccgtgtgtgccgccgcaccggatgctccttcaactagcaacagacggagctgccacaccccctaatgcggcttaaatatagatatgatgactgaccggggacatgccgataaaggtatgcgagttcaccatgtagttaagacaggaattctaagacgtctgcacaaaaaacggttacaaaggccccaagg

SEQ ID NO: 95276 - DNA, 621 bp, Zea mays
  Clone ID: MRT4577_186883C.1
cattgggtacctcgaggccggccgggaagaggactcgtacgatcaatgtacaattgcccgtccgccccaccacatacagcatggtcgccaagctcgacaccccggcgccgaactcctcctccggttccggccgcctcaatgtcaagctcaggctcagccggaacgaccgcgtcttcggcggcgccggcaacgtactgtatgcgggacggggggcacgtgaggagtcaaactcagagagatactagagaaagaaagggagggcatcacatctcagacgccggcgagaagaggtgaggatagagaggccagagaataggaggagaagaagaacaaaatgatgagctgcctctgccttccgaagaaaaaggaggggccagcgaaggagaacgcgttcacagataccgcccacctcgtcactccttcagaatgagaacgcctaccaacctgcagctcctctctctaagggttgcttcaagggtatggaccccaccgtagagcgcttgaagagcgcgctccagagagataagaccgatgtttatgatcataatccggagctggtcgagcctctcaagtacggtcagagccccatgtacatggtgttccgctgctccgaatgccgag

SEQ ID NO: 95277 - DNA, 1257 bp, Zea mays
  Clone ID: MRT4577_186884C.1
tcgctgacgcgtgggcggactcgtgggcggacgcttggggcgctgcccatgcgttgccgtgatttaattagaaacttgttgtgaaaagaagttatttgtttttgcttgtcgtgcgcactgggtaattcacttcatgttgtatgtttaactttcctttgctaaagcacagccacagttcattctaatccaatccctccaaatggaacctcccaagttccccgaaagattcccacaggtagaccaggaagagtggttggttcagtaataccatttgagaacgcaactgctgttgatccatacagccaacgcagggtggtgaggaatccagtgcttcctccagccacctcaaacctgtcagcatacacctatcaccgaaagtcagacaactcagatggagaactccaacaggagctggaaaaggaccgcatgaagtaccagccagcacagcgattcatggacagcaagctagtatcacacatgtcccctgacctgaggtcttcctactacataccaaaagctttcccaaaagccgacgcgggcagatagagctgctttgcattcaaacatgattcatggaatcgccccttttagtggcatcgctgctgcaggtggaggtggctacaacaaggttaatggggttcagtatggagtttctaggatttactagttctagttgcattgaccatctccagaacacctgatctgagttgaagtaataacatggcgaacagtgaaaagatttaggtgccaaagaactgccatgttgactccgagccgaagatacggagcatgaagagtatggtctccgatctcggatcaaggaggaagtgtgacgtcagattgaaaaacagataatattgggcaacagtcatggttctgttcattggacatagcttttcggaaagcaatgccatcaccccgcggcaacggtaaaataaaaggagagaaaaaaaggcagtgccgtcagttggttgctgcttataagagtcaaaggggagcagagacaattattacatggaaaattatgtactttgcaagaacggaaacattggggaataaaaaatagttagtctacgtttacctctctgtatataaaaaaagtgacttgattttatgtattacggctggtgagacccgcttctttaattcaaagctgtgaagttttggcctatattttgctctataataaagttcagattggtacattgagccaaaaaaaaaaaaaaaaaaaaaaaaaaaaaaaaaaaaaaacaaacc

SEQ ID NO: 95278 - DNA, 248 bp, Zea mays
  Clone ID: MRT4577_186885C.1
ggggcggaaaaagatatacagctaaactttcggttttacaaactgtcaaaccaggtgttacagcagcacggtccatcggtcacgctgcaggacagccagagcaatgatcctatgcagccggagcatcattggtgtaatttcattgcaccacacttcaatgcttgacctatttgagagcacatgctgttaaaagattactcttgaccttcatccccaacttggaacttatcgagctgcttgagttgctt

SEQ ID NO: 95279 - DNA, 375 bp, Zea mays
  Clone ID: MRT4577_186886C.1
gcctgcaggtaccgggtccggaattacttcccgggtcgacgagctcactagtcggcggccgcccttttttttttttttttttttttttttttttttttttttttttttttttttttttttttttggattaataaattgttggggaaaaaggaaacaaggcaaaagacgggcgaccaaaaaaggcctccgaataaaaaacgaagcccgtatcaaaaccagggccatttaaaaaacaaatcagcaggggaaaacgggctgggggggggacaccggtcggccgcccttaaaccttttttttgcacttttcccactggtggggaggacctccgaggggggacaggcactttgggcgtaaacggcttcaagatttttttt

SEQ ID NO: 95280 - DNA, 373 bp, Zea mays
  Clone ID: MRT4577_186887C.1
gacccacgcgtccgcggacgcgtggcgggcgcctgggtgcaaattcttggagttggcgggcacaaaaattggaatttggtggaatcttttcctattatttaaaataaggtagttttattttcagtttgagaccggattttttaacacttttggaaggtggaaagaccaaagaacaacagggggattttcttttaaaaaaaaaaaaaaaaaaaaaaaaaaaaaaaaaaaaaaaaaaaaaaaaaaaaaaaaaaaaaaaaaaaaaaaaataaaaaaaaaaaaaaagggggatagagatacaaagaaacaaaactattggccgcggtttttacaaacgtgcaaaacttgttaaaacccgtggagcataaataaatta

SEQ ID NO: 95281 - DNA, 228 bp, Zea mays
  Clone ID: MRT4577_186888C.1
cccattgtagttttctcgcttatacaaatactctttcagatgagagtgatttctgcggttcagtcccattgtacttttctcgcttatcgtgctattcagcacatctcattcactggcatttcctagatgacagcttgcaaatgactattcttggagagatcaaaaaaaaaaaaaaaaaaaaaaaaaaaaaaaaaaaaaaaataaaaaaaaaaaaaaaatttaaaaaaa

SEQ ID NO: 95282 - DNA, 615 bp, Zea mays
  unsure (1)..(615): unsure at all n locations
  Clone ID: MRT4577_186889C.1
agctcccacgctcaccgacgctccancttntncgcgcgcaatgggactcgtgggcgcctcctcatgctcaccaccgggggggcggggctccccaagaatgggcancancgggcgtgctcctcnttgttctcctcctcctcctcttcctccttcctcgtgngcaaaaccctgctgaggcangcccagggancccgggcgtggggccccctgcgcgcctcgggggattcccacaggccgatctgggtccccgggancacccctccgccgggggtcggcgggagccttcccggcgacttcggctttgatcgctggggcctcngatctgacccggagaggctgcggtgnaacgtgcgggcggagctgnggcactggcggggggcgatgctcnggcgcgggggtatcttcatcccgggggtcctgaccaagatcggggtcctcaacacgcgccttctggacaccggcggcgagcagcantacttcaccggcaccaccaccctcttcatcatggagctcatcctcatcggctgggccgagggccggccgtnngctnacatcatcaaggccgggagcgtgaacaccgatcccatcttccccaggaacaagctcaccgggacc

SEQ ID NO: 95283 - DNA, 294 bp, Zea mays
  Clone ID: MRT4577_18688C.1
ctatttcggttgctttttttttgtagaatctggaaatgtaacttcttatttatgcatggccacatacataatccaaataactttattattgaattacaactaataagcaatttaaaatacggcaccaccaatgatgcattgatgttagcaagcctacttgtttgtcaaagcaagttggacaaacggcatcaattgtcgtatttctaaataaccagcgcagagagccacacgtatcatgtcaccatttgtgcttaagcaatattttctaatagattatcatctgaatcttggaac

SEQ ID NO: 95284 - DNA, 887 bp, Zea mays
  Clone ID: MRT4577_186890C.1
ggccgcgggtttttttttttttttttttgcgcagaattgattgtgtgattaaatgaggctttgcgaccccgtcaaaacgctaatatgctgagaagtatctcactatgtctagatccaacatgatcgtaaaggtgtaacaataaatatatactagaagctatccatcacagccagaacttaagccttgggctggatggcagagtaagagcaggggatgggcttctcaaccttgacggccttgacggagaaaggaaggcagttcttgttgccgccggggttgttgatgctgttgtagacccagacagaccaagaggtcttctcgaggttgtcacccatggggcaggcgacgaaactggcaccgtcgcaggtgagcatgccgtccttgtcgaccttccagcccttgcgggaggcgttcttgggcgcaggctgagcaccagtggtgtaaccgaacttgccctggcccatgccagagaagtcaacgtaggcctgctggcgggggttgccgacggagtagagccagagctcgtcaccgtagagctggaaagtggcctcttggggcttgtccttgctgctgtagcaagaggccttctggtccttgagcttcagctcgaaagactcctgggaagcctggaggtagttgaagtgaatgggggaggcagagcggagggcaaggccttggaattcgaagttcttgggagtggtatccttaggggcagcggaggcaacgccagcggcgacgagaagagtcttgaactgcatattgatggttggtggtggtggtgtggtgttgggtgatagttgtttgtaatagtggagtgtttgatgaggttgatgagtgagataatatctcccggccggcctcgaggatcccaatcgcccataggagt

SEQ ID NO: 95285 - DNA, 1059 bp, Zea mays
  Clone ID: MRT4577_186891C.1
ggctgttgcggtagccgatgcgtcgagccgtcgatgcccctctagagggtttgtgcgggatcgcagggcagctacgacgacaaagacaacttgctatggcccagcttcttgacctgacgatgtgttgggagacatcttgggcgaaagtctcgacgacggtgatgtccgtggcgcttctcttgtcgagggtgtcacattccccagcatcgttttctttgggcgaaagctcaatccatctcggacaggcgatagaggtgtccctgacgtcattcccttcctgaaggcgtcactattgaagttcgtcttggccacgacgtcgcctttagttgatgctttcgcttctcgatgcctgatatgcgggtggaggaagggacttgcaacgtgaggccggagctgctacgttagggaatgtgacttgacaatgatgacatgaagcaaaaccctccctctttcgtggactggtttgctttggaggttgggcatatgtcgggagcggggcggcaaatcaagattggaagtcggagctgctccttggtttgagctcaacaatgatggcctgttgtgacctttcgcttcgggccgcctgcctgttttcgtttggatcatctaagatttgccatggtaagtcagagtcgctggctactttacaaccatgcttggcaatgataactcatggcagctttaggtgctcttctgcattgcgttggtgggtttgcccttcgtggtcttgttagttttggttgtaggagttggtttgtggtctggtgcatgaagtcggagctgctaagcctcggtgctaagctcgacaacgatgacttgagccaggctttagaactgctgacgaggtgagtggagtagagcaaaagtgttgtgtggtcatctgttgatgtcccaatccaaccagcccacttttgttgtttctagttggttcgagtgttgtgtggcacatgttgatgttccaatccaaccatacgctgttgtttggtcgttttgcctaaaaaaaaaagtctgggtctctttttctttttaatataaccggcatctctgcctagttcgttt

SEQ ID NO: 95286 - DNA, 367 bp, Zea mays
  unsure (1)..(367): unsure at all n locations
  Clone ID: MRT4577_186892C.1
tctcagctagtagctcgatcggtcagctctcccggctctcgctcctcttcagtcacgcgcggaagctgcgcccgtgtggcctagatccgatggctcgcgcgcgcacctgctcaagtcatcatctcggcgatagtggcgtgggaaacctccttgatgacccatatgtgaacaaagagttcagcaatcagtnacaagctacgatcggcgcgggattcctcacaaaagangtgcagttcgaggacaggctcttcactctgcanatatgggacactgctggccagganaggtntcagagtctcggcgttgcattctaccgnggagcagattgtcgtgtcctagtctatgatgttaattctatgagatcatt

SEQ ID NO: 95287 - DNA, 233 bp, Zea mays
  Clone ID: MRT4577_186893C.1
gcacgagggacgccaggggcgattctctgcatgactttgggcgtcgtcgccgatttgtcgcgggccgtgtgggggcgcgaccggacaaccagcgtgagtcgaccggcgacatgactcgcggcaaccatcgttacgtcgatcgtgagcgcgcggcggtgctgaagctcgacgccaagaagtcccaggactggctcaccccggagtagcgccgcgagatggacaagtaagctctg

SEQ ID NO: 95288 - DNA, 374 bp, Zea mays
  Clone ID: MRT4577_186894C.1
agacggcaacgtcttcgtcgcggctaccgcggtggtggcgtgcacgggcgccggcgcgctggcgcgcgggagggaggtgcaccggtgggtggagcagagcgggatccagatggacgagaagctggccaccgcggtggtggacatgtactgcaagtgcggctgcgtcgaggaggcgtggcgtgtgttcgaggccctcccgctcgctgccaaggggctcacgacgtggaactgcatgatcggcgggttcgcggtgcacgggcgggggcaggacgctctgaagctgttcggacggatggagagggagggcgtggcgccggacgacgtcacgctggtgaacgtgctcactgcttgcgcgcacgcggggatgctcagcg

SEQ ID NO: 95289 - DNA, 289 bp, Zea mays
  Clone ID: MRT4577_186895C.1
ttttggtttttttttatggttttttttggttttttcaaaacaataaagggcacccacaatttggacgatcaagagtgtgagccaaaataagcttaaaattcgcgcccccaaaaagggttagaacctaaaaattgtttccgaactctacttacttggaaaggaactaaaaaaaggttcccccaggctttcaaagggcccggggaatgttttgtcccaaccaccaatggaaacctggaaggagccaagggtgaacccttatgaggggggctcaaagggtgtccggaattgt

SEQ ID NO: 95290 - DNA, 497 bp, Zea mays
  Clone ID: MRT4577_186896C.1
cgcgggagaacccacccttgccgcctcaccgtctctctcctactgataccgcacatccgtctcccgctgagtggaaacgcgcacgaacccatggtcctccgacgcagctatgcctgcacctacgaccgatctcatcctgagagacaaaggcgcgagccttcacctgccgagaaaactggccacgattacctaggcgcggccaacctctcggacggactactactcggccgactcgtcttcggcaagctacctgaagaagcgcaacgtccaggacctcatcctctacggtgaatctggtggcgtagctgatccagttgctggtgcccgacctgctgaaggtgctgcgcctgctgctgccccggctgtccgggagagcaaggaagaggccactgatgactctgatgacgacatgggctttagcctgttcgactgaggagaccctctcacccaccccttagcaaattacacttgcgctgcccaagactatcttgccttat

SEQ ID NO: 95291 - DNA, 692 bp, Zea mays
  Clone ID: MRT4577_186897C.1
atcagcgtatacctaatgctatctctctctctctctctctgtctctctctgtatctccctccctctcgaaggaccgcgtctccacctccccggccttcgacacattcatgaacgactacatcctaccgtagctcacacatgacgcttcgtccactgcgtggaggaggcctacgagtactacctctacatgcaatacggttaccacaaatgcgacgttgacaggctcttcatcgactcctacgggtcctccgtgatcgtcggcaccatcgctgcatccctcccgcataagctggacacggaagatcgggagcgtcacgtactgcatcgacgtactgctcagctgaatcacatagaactctctgcatatgacagcacttatgaatgcgagagctcacgtgtggtgattgtcgctatcgctgctctttaccgcatatgagacgtggatcacgacttaacacaatccgatcttgtttgatccacgatggccagtcgatatagattccccttggatgtatatcatggggacgacctagcggctattgtatctggcctatcttgttcattttcttgctgagagcatgcgatttcttcctgaggcgccattggatggcgcatgcttgcttcctagcatgagagaatgatatatcatctgatcatctcgaggagacaactggttacattcatctgatatc

SEQ ID NO: 95292 - DNA, 830 bp, Zea mays
  Clone ID: MRT4577_186898C.1
ctttgggagctggttttgacccggccggccggtggcacgcgtctccccgtacgagcacgcaactacgcaaggccaccccgccggtctctccttccgccgccagatcctccgctccttcgcccacagccgccgcggccgcggccctcctccctggttgttgcactgtagtactggagtggaggtccggtcccacgtttgggcgtggactcgacaaacgccaaaccgagcaccccccaaagcctgattctgctcaacactgcgcctgaacaattttctctggtggggctgcaaagacaaattaggagtgcttccaagttccaatccctgtttgcttgtacagggtataattaaagaggcaacggagtcatgacccttttgagggagtatcagtaactgcatgatcttttcgagggaggcacgatggaaggaaataacctaccctctggaagcttgatgcaaggaacaccttacagtaatgtggacttgcagcatcataaacatatgcaaatgcctgcaccaagctctggaaaccaggctttcaaccactctcagatgcctggcaatttccccatttgtctgaaccaggttacagattccgaccagctacctgaattccaatttggagagcacggcaaggtcagtcaccaccatcatcctcaccatcacaagcagcatgcaacgaatagcatgagcgatgatgaggagcatggtgtgcatgaggatgccactgatagccagatcggctaggggaaagaagggttccgcatggcatcggatgaagtggactgattcgatggttaggcttttgattactgcagcatcctacaccg

SEQ ID NO: 95293 - DNA, 400 bp, Zea mays
  Clone ID: MRT4577_186899C.1
agattcgtgagttcaaccaaattcggtttcgtatgtaaacgcatcgacattgcaatcctccaagatcgagtacgcgattcttacgtcaacaaactcgcctacaccacacacaaccactcccttcacaacgccttcaccacctacaacgaaaaccacgcttccaataccaacctcgatcacaatacacataagaacctaggctatctatcagacacctattccactctatataccatacttaacaccatcgaattcataaactgcattatcacatactaacctatcaacaacgttaaccaggcccagatctatcacaagcaaagattccacgaccttgtgtaccctctagctcctcttatcgtgaaatacgtcaagaacccacgaagtgctgtatgcaaaa

SEQ ID NO: 95294 - DNA, 238 bp, Zea mays
  Clone ID: MRT4577_18689C.1
tgtatatgttccctttttattcctcagtttattcacttttatcttgtagttgcaggtttcttactcctgggtaggttccatttgtcttaaacagctttagagcaccacacattttgatggacgaaagtgaatagtcacgtacaagataaagtccaattgtatttaactttgtttatgtttcttgccgcacagtacaggtaatgattccttttttgtagagttgtctacattattgctt

SEQ ID NO: 95295 - DNA, 612 bp, Zea mays
  Clone ID: MRT4577_1868C.1
ggagcatatagaacatgtactcaacaaaagatggtgctaaagtttggcctttggtctaaaaaaaattcactcttgtctgacatgttacaaaaccgaaccgacataaagccaacaataaatgaagataacacgaaaggaatccagctgtcaaacacctaggtttgtgtacagccacaaagcttatttacctaatgagctggtgatctttctactcaaagaaatatgtttacatccatttcaatcagtcgtgatacttgttgacaatgaggttgcactttccttctagcctctgcttcaatccgtctagtatcgaatttgtcctctcacttgcatgcccgtcaactgttaagaccacatcttggagctttccaagttcatccacaccatgaaatccttccagctttttaaaacgcagttcaatcctttccagatgtggtgtagcattctttgagaaggtaagggatggaagaagaggaacaaatatccgaagcagcttgagcttactgaagcctccagctggcacaacgatttctcctcttgaagctgacttatttttctcaagaatggctgccaaagcagggtcttgcttttcgctgattgaaaagtgaggga

SEQ ID NO: 95296 - DNA, 491 bp, Zea mays
  Clone ID: MRT4577_186900C.1
tttttaatatctcttcatgtcgtcctaaatggttgtttattaaagattaacaaattgtttacgagcttagcagtgcaaatcctcccaaaatgttaagattgattgactctgtattaaacaacgtaaaattaacggaagaagaactagtagctatggatcatcgcccgaagactgagcatacaaattctcgtcctgcttctgtcagcgcgaagttaaaatccagacgacaaaggcctaagggttctcccaaagaaaaacaatctgctcgtaagtcagcgaaggatttgacaaatttcgtagaaatctgttgtcgcatttccactacaacagaagataaatacgacaatgtacagctagtatgctcaaaagagattaaagatgctgaaaataacacatctagtttccaaattttgagcaagtctgaaccatttttattggtatctgcaaatgaagaatattatcgaaagagtgccttcactttagatgaagat

SEQ ID NO: 95297 - DNA, 363 bp, Zea mays
  unsure (1)..(363): unsure at all n locations
  Clone ID: MRT4577_186901C.1
ggccgcttttttttttttttttttgggggtgttttttttttttttcttttattatctattagaggcgncgtatactttttacaggagatcgattgattctgtttcagctttgnaaacgcgacaaacctcaaacaatttattgattatttctaggaaacacatatgagcgataaaggccccattggcgaggacatctcatatggaatttaaaagatggcccctccaccgatgcgttgctacaaggcaaggttcaacaaaaaaaactggttgcatgcaaggcataccagttgccagctgcaggaaggaaccgaccaacgggtacaccactgccaaaggactaaagaactggtgtccctgctgaat

SEQ ID NO: 95298 - DNA, 553 bp, Zea mays
  Clone ID: MRT4577_186902C.1
tgaaaaaaaaaaaaaaaaaaaaaccaaaaaaaaaaaaaaaaaaaaaaaaaaaaaaaaaaaaaaaaaaaaaaaaaaaaaaaaaaaaaaagaaaaaatttaaaggaaaccaagtttacataacggttgcatgcatatttaataaatttttatttagggttttttttttttaaatataaagaaccactggttttacggggggaggggacgggggtaatacccttggggtttcccctagtttaatccgggtggtatgcgaatcctcctttttcttttgtttggcggtcctattcaaaaaggccccgggccgagtcggtttttcccaacagtttgggcaggcgtgaatggcggtttgggacgctgctttgtagcgggggcattaagcccggtgggcgggggggttacccgcagtgggaccgctacattggccagccccctaaagccggttcctttcggttttttccctttttttctccgcttgtggggccggttttcccggttgggttttatttttggggctccttttagggttcctttttagggctttacggcccct

SEQ ID NO: 95299 - DNA, 2584 bp, Zea mays
  Clone ID: MRT4577_186903C.1
attactttagatgacatgccgtctatccccacagccgccttgcctccattgtctctccactcccttctcttccctctcacctcctaaaacctccattgcccgcgcgcacgagcgcccgcgtcgaggactccagctcgtgtgtccgtgcgaacgcgcggttttcttgtcacgaactgtcgctccggtcaggggattgaggaggtggggcggcggcggcggatttgtcgggcccgagattcccggacaaggagaaatgaagtacgtccttgtcaccggcggggtagtgagcggcctgggcaagggcgttacagccagcagcatcggcgtcgtcctgaaggcgtgcggcctccgcattacgtccattaagattgatccttatcttaacactgatgctgggactatgtctccattcgaacatggtgaagtgttcgtactggatgatggtggcgaggtggacttggatcttggtaattacgagagatttttggacattaaacttactcgggacaataatataaccactggaaagatctatcagtctgtaattgacaaggagaggaaaggggaatatttgggaaagactgtccaggttgtgccacacatcacaaatgccatacaggagtggatcgagcgtgttgctaagataccagttgatggcaaggagggacctgctgatgtctgtgtgatagaattggggggcactataggtgatattgaatctatgccatttattgaagctttgggtcagttctcttatcgtgttggtcctggcaacttctgcctggtgcacgtcagtctagttccagttttgaatgttgttggtgaacagaaaacaaagccaacccagcatagtgtacgtggtttgaggggactcgggctcaccccaaatattttagcttgtcgcagtactaaggaattagaggaaaatgtgaaggagaaactctcccagttttgccatgttccggcagcaaatattatcactttgtatgatgtttccaatatctggcgcattcctttgttgctacatgaacaaaaggctcatgaggctattcttaaagttctgaatctggaaaggatggacagcatcgctcgagagccaaagttagacgaatggattgcaagagctactatatttgatacccttcatgacactgtgaggattgctatggttgggaagtacactggcttatcagattcatacctctctgtgttgaaagccctcttgcatgcatctgttgattgccacaggaagcttgttgttgattgggttgcttcaacggatcttgaggactccactgcaattgaggcacctgattcatataaaactgcgtggaatttactgaagggggcaggtggaattttggtacctggtggctttggtgacagaggtgttcaagggaaaattttggctgctaagtatgcccgtgaaaaaaatgtcccatatcttggtatatgtcttgggatgcagatcgctgtggtggagtatgctcgtcatgtcatgaatcttactgatgcgaacagcactgaatttgatccaaataccaagaccccttgtgttatttttatgcctgagggttccaaaacacacatgggtgcgacaatgcgcttaggatcaaggaggacatttttcaagattgctgattgcaagtcttctaaattgtatggcaatgtcacttatgttgatgaaaggcaccggcacagatatgaggtgaaccctgatatggttccagagttcgaaaaagctgggcttcagtttgttggcaaagatgatactggaaggaggatggagattattgaaatacacaaccaccgatattttgttggcgcacaattccatcctgagttcaagtcaagaccttcaaaaccttctcccctatttgtgggactaattgcagctgcatctgggcagttggatagggtgctgcaagaccgctgcaatggtcatgttggttcagagaaacatgttctgagcaatggctcatatacacccgcaatacaccaaaatgggcacccaaagaagctcccaaatggtctatcaaacggaacatactatggcaatggcaatggcaatggcgtgcatgcttaggagcatcagtggatggatcaaggattttgcaactttttgcttacagatttgcgattcctaatgcatcagttttgtcgtggctggcttgactgactaccatcatggtcgctcgagaaacaaaaagttcctgtgctcgatgtggactgtctggtagggatagtgctcgttcggtggtttctagcgaagcgcgagatagtggtttctgtgttcgccgatctctaccctcttctgtaagcaaatggagcagatttgggtcagaagagtttacatgctgtacatcctaaagaaaagctgaatgttttggttgctcaaattaggttttcagtgaggtctagagctgatgcttagaaatgcgcagcagtgcaagagagtatttcgaaattaagcaagtctgtattttgaatttggatacttttttttgtgcttgtgcgcaaataagttgatgccctgcgttagcttcaaaaaaaaaaaaaaaaaaaaaaaaaaaacaagcgccgc

SEQ ID NO: 95300 - DNA, 254 bp, Zea mays
  Clone ID: MRT4577_186904C.1
ggggaaaagaaaagaccctcgggaacctaaaagcgctttatccgcgttaggtccaagacccatccatagttctgtgggggggggatccattgggattataaagctacttggttctctaggtaccaatggacttaagacaaacacagggggcgttcttatgccaaagccaaacccggggtaagccacggggcctgattgggtcggggacaagggggggtgtcccaaaaaaaagccctccttgggcgcccacccat

SEQ ID NO: 95301 - DNA, 570 bp, Zea mays
  Clone ID: MRT4577_186905C.1
taaaaaaaaaaaaaaaaaaaaaaaaaaaaaaaaaaaaaaaaaaaaaaaaaaaaaaaaaaaaaaaaaaaaaaaaaaaaaaaaataaaaaaaaaaaaaaaaaaaaaaaaaaaaaaaaaaaaaaaaaaaaagggtgggggccttttttaaagggatccgggtttttttttcgggggtttccaaacttatttttttttttttggggtaccttaatttttttactgggccgtttttttaaaacgtggggtggggataacccttgggttcccctgcttaacctttttggcaacagtttttttttttgtgggggggttttttttttaaggggcctggccgtttcgcttttcccacaattttggactttttttttggaattgggcccccccttttggggggttttttacccccgtggggggttttttttcccccccgggtgacgttttttttggcggggtccttttggcctttttttttgtttttttcccttttttttttccccttttccttgttttttcccggggagtttttagtttggggtttccttttatggtccggttttagtcttttggggcc

SEQ ID NO: 95302 - DNA, 211 bp, Zea mays
  Clone ID: MRT4577_186906C.1
caagaaaaaagaagctacacagattcaacctccattcaaaccatggcttgccaccttagatccgcgagcgtgccttccagccctcgctctaacaaagccaacatcgatgaacagctgcagagcctgaaggcaaccatctcctcaccttcagtggccattcaaaccatggttgatggtctcaacaagatcgtgagcatctacagctgcattg

SEQ ID NO: 95303 - DNA, 379 bp, Zea mays
  Clone ID: MRT4577_186907C.1
cggacgcgtgggcgctccgtgacgctctggcctgcgtgtacgaggcgctgggcgtgcgcatgctcgaccgagtccgcttcttacggtcccagatgcataccatcattacccgcgcctgcagcaatcttggcgtgaaggccctgcccagctggcggttcataaccctgatagctgtggctatcaaagcgcgtcgagagtttctaaagagcacaatagtcaacaatagggacatatatagtgtctttgtttgacatgatgcctacaatgtcagaaggcatgggtgagtacaacatattaaggatttgtcctttagcggaagctctattgaccttgtttcgggtaaacatgacacttttattcatagctttcatggcaaagt

SEQ ID NO: 95304 - DNA, 154 bp, Zea mays
  unsure (1)..(154): unsure at all n locations
  Clone ID: MRT4577_186908C.1
ctttccgggacgaccgangcgagccacacgtccgcgatttgcgagctcggcttcgacctaccgctatctgtatgtcagtgcacgagctcgggactgctgggactgctctaccatggccgatgcccaacatcgtgcgctcgccggatcccctgct

SEQ ID NO: 95305 - DNA, 660 bp, Zea mays
  Clone ID: MRT4577_186909C.1
tttttttttttttttccgcccttttatgggatttctcacatttcaaaaccaagcacagcaatccacgtttcacaacaagcacaccaatcctcaaaccctagtgactacacggcaaaagcgcccagactactcgacgctccaagcccaagcttccttatgccccagaaatcgtaaggcgggccaccttaatgacatattaagagtaacacccctgataggagagcagaagtagcagaacgacctcggcgacgcgggcgcagatggcgtcggcgattcccccggcggcgagcgtggcgtgctggcccgcgatgatggtgagctcggtgatgaccggcttgcagttgaaggttagctcacggagcgcctccgcgtacacgtgcacgaccgcggcggcgcccggctcgccgccgcccgcttcctcgcgcagtcgcgaccggaaccgctccaccacgtggcccgccgctggggacgccgcggcccccgccatcggaacaggggaggaggatctagggtttcaggggctagggtttggggtgcctccacggcgagagggggcaggaggcatgggagcggagcgaagtggcggaaagggggagatagcaggagacagtcaccgatttgttcgcgaaacggcgaggatctcgtttcagcgatgctttc

SEQ ID NO: 95306 - DNA, 502 bp, Zea mays
  Clone ID: MRT4577_18690C.1
cctatacatgcttctagtacggtaacacaaacacctgttctaaaccaaacactaaacgagcactgttacactaaaacccggcatccactagagttttcgaacattactctgaacagcacacactacataaatagatcgaggcggggggacactaaatcctgcaggacgaatgcggctctccacgcaagcccctggttctttcattctatagagctaaaatggcttccatccaggttaccatgggactctcctagttctgcaactaaggacaccggtgccttattatctaaccatgagaatcctacatcttgcataacagacatctgaacatgcaactggtacaaacgaggttcgattgtcttagagcgccttatgtaccgattcggcctttccagctccattgaccaccattggaacatttgcagatgattcgattactggaaacgttaatgagattctctctggaagaccgattgggagattccttaatgcataccaccca

SEQ ID NO: 95307 - DNA, 236 bp, Zea mays
  Clone ID: MRT4577_186910C.1
gcagtttatgtcgagtgtttactggagagggcagtcaaacatggtagtggctgccaactccagtggcagcatcaaagtgcttaagcttgtgtgaatgatccaacgagagtgtccatattgaagagaaaaaggtccaaagggccccctgaaaccctgaacaactatagcactcggggagatgccccaatggccctagctatccggtatctgcatcctcaatggaagcactaagcgaa

SEQ ID NO: 95308 - DNA, 1652 bp, Zea mays
  Clone ID: MRT4577_186911C.1
cattgggtacctcgaggccggccgggctcccacctgaccctcccgtcccgcattcgggacgaagccaacgacgagctcagcagcgccgacgccgcaacgacaaccagagcaccccgcactgtggagaattcatgtaaattagattaaaggtagcaatgtggcgccgctgttgctgcaattgccaagtggatgaatccgacgcatggggaaaatgggcatgtcaaggccacaatcaacaacattgatggggcaataatggggttgaaagattctactactggaaaagtcgagccgcaggatgctgctccccgaattgatatccctgttctatccttggatgaactgatagaaaaaactgatgactttggttcaacggctttgataggtgaaggttcttatgggagagtgtactatgcgattcttgataatggaacaaaaatggcagtaaagaaacttgattctactgaaaatgaacccactgctgaattcttgacccaggtttcattggtttcaagattgaaacatgaaaactttgttgacatgttggggtactgtatggagcgtaatcttcgcatagtagcctatgaattcgccaccatgggttccctgcatgatgtactacatggaagaaaaggagttcaaggtgctcaacctggcctggcgcttgattggatgcagcgagtgcaaattgctgttgatgctgcaaaaggacttgaatatcttcatgagaaagttcagccttccattgtccatagggatattagatcaagtaatatcctcttgtttgaagatttcaaggcaaagatagcagactttaatctctcaaatcaggctccagatatggctgctcggttgcattcaactcgtgtcttgggaacctttggatatcatgctccagagtatgcaatgaccggtcaactaacccagaaaagtgatgtatatagcttcggagtagttcttttggagcttttgacaggtagaaagccagtagaccatacaatgcctagagggcagcagagcctagtaacttgggctaccccaaggttaactgaagacaaggtgaagcagtgtgtagatccacggttgatgggggaatatccggcgaaaggactcgctaagcttgctgctgtagcagctttgtgtgtgcaatatgaagctgaattccgcccaaatatgagcattgtggtcaaggctctgtctccactactcgtaacaaagcagactccaccacctgttgttgacagttgacgtacaaaattaacctaagttgcaaatatgagcgacaacagttgggatactacggacatttgatcggttcacctcagtcacagatttcaaacactaactgcatggagatggagggcatctttagtactgcattaacaactttgcatctgcggttctacagcatgcgcatgtcaacaatgttccttttcatctctcagtaaatgccagtatcaaggagactagtgaaatattcagtgaacagggcatctttagtactgcattaacaactttgcatctgcggttctacagcatgcgcatgtgaacaatgttccttttcatctctcagtaaatgccagtatcaaggagactagtgaaatatcagtgatcaacattgagactgttttttttgcaaagatgcggaatgg

SEQ ID NO: 95309 - DNA, 312 bp, Zea mays
  Clone ID: MRT4577_186912C.1
caacatattaatagtctggttgacgtttgcacaatttggatatgagaactgcgagaggaaattttcacacccctagcagcactgacccaatatgtggagtgacttacttcccacatgcatttcacaactactgccaggatataaatgagtatggttttatacatataacatacaagtactacggtagaaaggctgtgaattgttgaccgaaaaaaaggtaacttgtttgtgcagtccaagttattatctaaacagtcaattctgcatcactaggtctttaggtacattttcaggtcagcgatatatctattt

SEQ ID NO: 95310 - DNA, 367 bp, Zea mays
  unsure (1)..(367): unsure at all n locations
  Clone ID: MRT4577_186913C.1
tccaggatgccaaccatctaccagcgactctgccagcgagagcagcacacaccgcagctagctaggagcagcagcagcggcggcggcgatggcggcctccatgatctcttcgtcagctctggcggtggcgcntcagggcctgccgcccctcggncgccgcgcctcatccttcgccgtcgtctgatcncaaaagaacatcaagaacgacaagccccacgggattgggggtggcctgaccgacgacctcgacgccaacggcagaaaggacaaggcccaggacgtgcaccacctcccccaccagtacggcgagaacgtaccccgacacctgcccaatctacaccgaggatgactggacccccacccggcg

SEQ ID NO: 95311 - DNA, 399 bp, Zea mays
  Clone ID: MRT4577_186914C.1
ctgggcgcaatcctcccgcgcccactctttccgtctctacgggtttgcagctgcagctcttcatgctccttcgcgtggatctcctcatcgtgggcgtgctcgctccttctcggtcttttacacctgcttcttctgtctccctatgtcatctatggtctgcttcccatgaaccagactcgttcctattccttgtgctgcttgcaccgtctgctccagattatcactttgttcgccagctctagatcgttaacagatagctaaaatcattgaccatagacactataccattcacatggacttatataccatggacgatactctatatattaacataccatggtcgacaatcctcagtaccatcttccgtactaacctactccctactacatactatcacat

SEQ ID NO: 95312 - DNA, 252 bp, Zea mays
  Clone ID: MRT4577_186915C.1
ccgccccgctcccgcacgccaccgatccccaccgccgaacaaccgactgatgctggtgctcctgctcctgccgccacctgctacgtagcatacgcggacgtaccaccaaacctcgaccggccggtccatcgcgctacgacgctacctacgacgacacgctccgacgagatcgggcaagcgaacgcgcgatgtcgacgtggtcgtcctcttgcatcatctctatccgccgtccatccgtacaagccgctggag

SEQ ID NO: 95313 - DNA, 411 bp, Zea mays
  unsure (1)..(411): unsure at all n locations
  Clone ID: MRT4577_186917C.1
aaggaannccccggccgacccacacatccttcaaaaacacaccaacctactctctctattttcaaccaaacaacaatgcctaccaacgggcgtatttcctactttctcttcctccccttttacagatcacaacaaattcgttcattattccacagacctcactaactcctacttccattattccacaattcctcccaccaattactttaatgctcttttaacatacatccaagcaagcctacatgctacaactagcacttgcgtctaccttcttacaacaaccaattacccaatttcaacaacaatactaagcacatctaaacctacaaaccatcgcaactcaacatcaacaacagtttattccattactgaaccacctatcctattttaaccctttcttctactttcaac

SEQ ID NO: 95314 - DNA, 234 bp, Zea mays
  Clone ID: MRT4577_186919C.1
attcggttcgagaggaggatagcgaccattttgttctttgcggacaggacgaacaggagggggatgactacattaattacggggatggtgaccttcacgcaaacgagggggaagaaaaagaacaccgatttgacgaagatgtcccccaaccacctactaaaaaaaagaaatgatacatggctgacattgggaaggatacaagattacctacacgaaatgttccccgaaagaaaa

SEQ ID NO: 95315 - DNA, 751 bp, Zea mays
  unsure (1)..(751): unsure at all n locations
  Clone ID: MRT4577_18691C.1
cattgggtacctcgaggccggccgggacctgatcgccgtcgccttcctcctccctccacgccgcttcggccctcaccctcgttgaactcgcgcgcggaacggttccctccctcgtgttccgctccggctccagctccgtttccgcttcacctgctctttccctcggctcgagcaaggtccagaatctcattgaacgttgccttcagctatatatgaaccagaaagaagtggtggacaccctatctttccaggcaaaaatagaacctagtttcactgagcttgtctggcagaagctcgaggaagagaatcgtgattttttcaaggcatactatgtaaggctgatgcttatgaatcaaataacggccttcaataagctccttgagcagcagtatgagattatgactaaagatcatccttctgggatgccatctgtacctcctgctgctcctaatggctcaaactctaacacattgaaccaaaacatgccctttctgcctgacactatccccagtactgcactgcaagataactcgttgcgcaatggaggttctagtagtatagttaatggtgctccatccgatgaccaatttatgtatactggntaannagtgntcatgggccttcctggntggcatggatgcttcatcaagcctgctaacagcacacaatcctgctggtgggcagnttaatggacacaatgggagcacaataaagacagaatttggctactcaggcaactcagattttggat

SEQ ID NO: 95316 - DNA, 591 bp, Zea mays
  Clone ID: MRT4577_186920C.1
cgccagcccacagcagcgagagacgctccgctctcccgaggactcacgcatgtcgagaacggcgccgacctccagcgctctgagctcgccgagctagtgggacggtgccaggacgtctgccctccgggcacggcgaggtgctgaccctccgactcctgcaagcccttggcctcgcctgcggtggccggtgctacttctcggcaagagacgcagcgcgcaagatcccaggagggtcaccccgatcacagcgctcaggtcttccccgaactgacatgcacagcccgctgcgccgctgaaggcgccagccgtgtgcgggccgagcagtctgctccagaaaggcgtacatgctctcagaagaacaggcgccgggaggccacggtgaactctgcggcaggcgtgacgatcgacgggagcgcgcccaaagaagaacctggcgcggagatcagccaggtgcagctgggctacgagaaggcaagtgtgaacagctccctcctgaataggcgctacaatacagagatcaagatggagttcataggatctgaaaccgagcggacaatattgaaacaccggagaaggttaagcacgctgaaa

SEQ ID NO: 95317 - DNA, 171 bp, Zea mays
  Clone ID: MRT4577_186921C.1
gtgagtcgtattaaatttcgaggctaaggtcgcggatttcggacttgccaagctgacgacagacaccagacatgcacgtctcgacgcgtgtcatgggaagtttcgggtgggtggccccggagctcacgtcaagcggcagggtcacggaggagtcgtgggtgttctccttcg

SEQ ID NO: 95318 - DNA, 669 bp, Zea mays
  Clone ID: MRT4577_186922C.1
atgaggcaagagaggatggtacgacagcaacaagcaccaatgcctccaccaccaccagttccaccccgggacaagcaccggaatttcatgagtcacaagctgccgtcattcgcgagctctccagatcctctgcacgctgatgattggctgaagtcagtggagaagatgttgaatatcgcccaatgttttgatcaggagaagggcaacatgttagtcagtgagtatcgcgataagtttattcagctatcaagatatgctccatatgaagttgctgacgatgaaaggaagcaggaacacttcatggaaggacttaatggaccacttcagtattcattagttgctcacacctttccatcattccagaggctcctagacaaggctctagctattgaatacaagcgtgttcagctgggggagatgaagaggaaggctatcacccaggggcatgggaacagtagcattcgtcctcgcttctgccctaggaatcagagaaaagacaattggaaaagacttggctcgaacaaccaagattctgctcagtctggtgcatcggactgtccggtggtgcaccggacagtgtccagtggtgcaccagacagtgtccggtgtgccaggctggctctggtgaaaaaggccgctctcgggatttcgtcggcagcgtacgactaa

SEQ ID NO: 95319 - DNA, 540 bp, Zea mays
  Clone ID: MRT4577_186923C.1
ccggccgggccgggcacttcgctccagcccccacggccccacagctacccccagcccccctacacaactataccagaatgtccccgactcccaagccgtcgccttcctatccatcccttccctcagcactgactgcgtctgacaccacatcacctaggacagatgctagacagctgtcctaggccatgacccataacgttgagtccaccatacatgacacgcgaaccaaaaatgatgcaactccagcagagcatcaacgatctcgaacctgagacgggccttgagacgccgctcgagaagcctgacgaggcaaaccctgctgactctggctaacttggagcgcacccagacattgttgagagagaactggatgacggtgagacgaaaatcgccatgacgtggatcttccgatgagcgacatctgttatcatgagtcgctggcaacatgaatgacaccagaccgtcggatcccactgagtgccacaaactcaatctttgccagagctgcggatgttcacaccgtacccgacgaccttggaa

SEQ ID NO: 95320 - DNA, 401 bp, Zea mays
  Clone ID: MRT4577_186924C.1
gctgaatgctgatgagaaagcgcttcaggttgaggatcagcataaaaggcagaaacatactagatttaaagaatattacgatgtgtacacatcatttgtttgcagactaaactgttgcattaaaaacacctcacttgacagccacactaaaagctacggagcatatgctcaggtgaagaataatcatcgataaagaatacacataatgacctgagcttggcattgcacgacatgtataatgaacacgctatactcaactcacttaaccacactatcgttatgaaactaagcagacgcaacattgcactgcacgaggctcacacagagctagaacatggactgcttgatctttcatgcggcagacacatatatgatataagagaatgcggcagcttgatcta

SEQ ID NO: 95321 - DNA, 352 bp, Zea mays
  Clone ID: MRT4577_186925C.1
accgcacgtatgtatagagctagatgaaaacctactgctgctggggttttatcatgggacttacagtggttaaaagaagacatgacggattataatgcactacagggatcatgtgaggacgactattccacacggaggaacagtttttcagacatcatgtatcgtagctgcatcgtctgtaccacgttcataatcagctgaatatgcagcatgatcacaagcctgctccagttacacgtgctcctaaactgattgtcaacgtactggccaagccattagaaccgctgatagacatatctggcaaagaaaaagttcaaaacctcccttatgagagtatcattagtttaaatac

SEQ ID NO: 95322 - DNA, 587 bp, Zea mays
  Clone ID: MRT4577_186926C.1
ggggggggggggggtttttttttttttttttttttttttttttttttttttttttttttttttttttcttgggctttccctgcggaggcttacccggcacttgtgctgcgggggcgtacacctttccgccctccacttgcacttaattttcgggggggggggggggcgaaattccaaccctacccacaacaccatcaaccaccccgccccaaaccgcactgaaccaggaaaccaaagaccgcgacgccgcccgaaacgacggggcccaacccctaccgggaggaaggggcccaggcccccccccgccccaccggccccggacgcaagccggccccccacacgcgcccccaccgggggagccgcaacacccccccccccagccaggggccgacggcccaccgccgccccgccgccggcggcccagcggggcccccccagctgaagcccccccggggccagccccagcacggcccaaccagggaaacccctgccaggcggaaccccggccagccgtgcccgccgcagaggcccatatacacgacggccgacctgccccaggcccacgacgaccccccggggaggaggcg

SEQ ID NO: 95323 - DNA, 432 bp, Zea mays
  unsure (1)..(432): unsure at all n locations
  Clone ID: MRT4577_186927C.1
gaggtagcacgagcgcccccccagcctctttttcataccattnattagnagaaaaaaatcgagatacatggagaataggcctggaaaatgacaccccacgacacagcgggtataggggaaggactagggggaaccgccgcacagggtgaagatatagggggaagagaacgctgacgtgacatgtgagcggaatatagggggagaaatttaagggcaaccactgaacacagacttaaacacggatggcgcacgatcgtacgatgccaggcgttagcgtaatgccggccacgcggaaggtcgcacacaagcgctgaacgtcgcggttacaaaccaggctatgaactattccaactaagattagcgagataaacccataacacaatatagcatgttattgaggaccaccggggttatagccccgctagccccccc

SEQ ID NO: 95324 - DNA, 399 bp, Zea mays
  unsure (1)..(399): unsure at all n locations
  Clone ID: MRT4577_186928C.1
gcgtgctcanaatactatgaataaaatcccccgtttgactaaggtgagcgccatttgcggctgggggtncattcttgggagggggggagctaaaacatactttgccaggttggcgccagacaattttggggggtgggatggcccaataggcttgggaatcctggggggtcatcacttggaggtggttggtactggtggaggggagggaacaactactacactcttggtattcggccattctgggggggtctcataggaatggattggtgggggaaaaattggaagggtggaccacatggaatggatttacgccccctcctttaccctggattctggggcatgcgttttgtggtcataggaacagggcgactatgaaactggttgggtggattatatata

SEQ ID NO: 95325 - DNA, 131 bp, Zea mays
  Clone ID: MRT4577_186929C.1
gcaaagggctgggccagcgccgtttacaggtgttgacagggaggctacagggagaaaggacactacgtcggtgcacctgaaaaacgggaaattattcgtctttcccagaaagcacttcagacagaagccgg

SEQ ID NO: 95326 - DNA, 993 bp, Zea mays
  Clone ID: MRT4577_18692C.1
ggccggggcattacggatacggcattagcatcccatcccaccgcaccaacttggctgtccccacacacactgcttccttcgtcaggcccttgccacgctgcgcggcgccctcacctgatcgccgtcgccttcctcctccctccacgccgcttcggccctcaccctcgttgaactcgcgcgcggaacgcttccctccctcgtgttccgctccggctccagctccgtttccgcttcacctgctctttccctcggctcgagcaagggagatttggtttagggccgccgggctgggcacgagcgagagacgggcgtcaggcatgccgggaggggaggacgtccgtaaggtctcgcgccaggacatacagcttgtccagaatctcattgaacgttgccttcagctatatatgaaccagaaagaagtggtggacaccctatctttccaggcaaaaatagaacctagtttcactgagcttgtctggcagaagctcgaggaagagaatcgtgattttttcaaggcatactatgtaaggctgatgcttatgaatcaaataacggccttcaataagctccttgagcagcagtatgagattatgactaaagatcatccttctgggatgccatctgtacctcctgctgctcctaatggctcaaactctaacacattgaaccaaaacatgccctttctgcctgacactatccccagtactgcactgcaagataactcgttgcgcaatggaggttctagtagtatagttaatggtgctccatccgatgaccatttatgtatactggtaaagttgttcatggccttcctggtggcatggatgcttcatcaagcctgctaacagcacacaatcctgctgttgggcagtttaatggacacaatggagcaacaataaagacagaatttggctactcaagcaactcagattttggattcagcaatgaggccgtgttcctagagcagtcaattggagatgtatcaggtgcatc

SEQ ID NO: 95327 - DNA, 356 bp, Zea mays
  Clone ID: MRT4577_186930C.1
cgcgtcgtgcgccaccgccacgtttgagcggcggtccggccaaattccgccggcctcttccttggttgcgccagataaaaataacagtgcgggggtctcagatggggtgccccggggcggagacaccgcgcccccggctctggagctctgggcccgccctgctggtgccgccggtgcacacgcccagcgtctacttcttcctccgcgaggacgccgccggcaacgaccagccgggcgcggacggacagcttcttcctcgggccgcggatgcggcgcgcgctggccgaggggctcgcgcccttcttcccgatggccggccggctggcgcgcgaccaggactgtaccgtctagatcaa

SEQ ID NO: 95328 - DNA, 308 bp, Zea mays
  Clone ID: MRT4577_186931C.1
ctgcttctgctacctttttccgaacagaaaagaacattcttatgcgtttcatcattggaaaccccgcctttaactggcctttttttcctttacatccccgttgagaggcccctacaggggccattatgtatgttttcccccaaccccccttaaaaacaaaaaaaacttacattctccacatccctttttataaaaaaacaatacacccctggaaatttgtccatccttatcgaaacggcgggggcgcgggggtttcctatcatacctccctttctactttcagctccctcaatttttaccctttacca

SEQ ID NO: 95329 - DNA, 300 bp, Zea mays
  Clone ID: MRT4577_186932C.1
atcataatagtattttatttttaaggttcacattacagcgccagcgacctaggaccaaacccctgtgcgtaacctactacaccatgaaaaggaaccgtgccaaaagcaccccgtataggaaggttttgcaacaaataacaaacacgagcgacgatggacgctgccagcgaaccacttcatggatgtcgctcgtaagaagaggcggaaggcacagcaggggtgagactgctcgttcaacggttactgcgagaacagggccttgcgcaagtggaaccgatggtcttgagccacgaagttgga

SEQ ID NO: 95330 - DNA, 156 bp, Zea mays
  Clone ID: MRT4577_186933C.1
catcacctttggcaacatgatatatctgttcatgttttatggttagtgcactgggcgtaattaataattgcattatgaaatatctgcactttacagttatgcctcaataccatcagcttatagtactcattgtctttgatctgtcataatagtgtt

SEQ ID NO: 95331 - DNA, 545 bp, Zea mays
  unsure (1)..(545): unsure at all n locations
  Clone ID: MRT4577_186934C.1
caagttttctcttcccagcatgcatgtccttccctagaagataactatgttattcccattcctgctggacatggtgatagttttcgtactcttgatgaggccaatataccccagctacatcaggagcagaaaaactttatttcacaagatgctattgttggtgaaaacattccgctgaatgagtctttggaaaagagcaagcataaggatgaggacttactttttcctgacaaagatcttcctgagtgatctacaagacagaagatgaatttcatgacaatactaggaatacaaaataagcaacgaactgaagaaggatgcatcctggttaatccatcgaccatgtcttagtagagttttcttctgtgtttctgtgttgaagctttatgatttaccttatactttagtcaagatgaataagaaataagtatgtgtttccgtgtgaggcggtaatatgtagtaccttgtatttccatccatcttcgtatggacaataataataagacctctgtttgcttcatgatananaaaaaaaannaaaaann

SEQ ID NO: 95332 - DNA, 345 bp, Zea mays
  Clone ID: MRT4577_186935C.1
cattcttttgttgtttttttttttttctattgtttttttttatttttttttttgttgggggtttttttttttagactcagaacccttgcaaactcattaactttagacaaaaaaacatcagtcccggtgtttttaaaataaatgttttttgaaaaaaactgggcccactcaacaataaactcaaaccaagatgtttataatagactcagctccgaacaacatttttgtaataaactaaaaggggtaaactgggattcccctccaaacttggcgaggggagccgatgccgatgcccaatctagaaaactgaactctaaattttggtgaaagccacaatgtctcaag

SEQ ID NO: 95333 - DNA, 361 bp, Zea mays
  Clone ID: MRT4577_186936C.1
tgttttcatgaacgacaactaccacacggaggctaccgtcacccggtagggcccttgtgtcttcgacaccgtccaccaggtcatccagttccagctcaccgttaacgtcgacgctctcattatcaacttggtgttggcgatcacctctggcaaaacgccggtcacgaccgtgcagctgatgggggtgaacctgatcatggacaccatgatggccctggccctatccagggacaccactaccaaggctcttctgccccacgctcccatcgaccgtactgtaccgcttcatctcaatgccttgagttgcatacttgccgaatatgctgctatccaggacaccgacgcttgtggagctgcatta

SEQ ID NO: 95334 - DNA, 513 bp, Zea mays
  Clone ID: MRT4577_186937C.1
atgaccaatctgctccaacaacatttagctcgcaccaagcagcgaatgaaatcacaggctgataaatgccgctcagagcgtgtgtttcaggtcggagacatggttttcttgaagcttcagtcctatgtccagaccacagtggcaccccgccataaactgtcgttctgctactttggcccttatcacatcctggctcgagtgggcagcgtggcttacaaactggaactcccaacatctttggctgttcatccgactttccatgtctgccaactgaaaaaagcaatacccccagctacccaggagactactgatctacccgaccctgatgatcatttgcaggttcccattgagattctacagaagtgtgtgatcctgtgcggcgtgcgagctgtttcccaaggcttgattaagtggtcatcgctgctgtcatctcttgctacctgggaagacctagaacctctctgccagcgctttccttcagcatcagcctggggacatgctggtgctaaatag

SEQ ID NO: 95335 - DNA, 315 bp, Zea mays
  Clone ID: MRT4577_186938C.1
gaggaaaaacattcctaccattacatttacaatttacaatttcaaacaacaacacacatacctttaccatttatatacaactatttttctacaccattactaacaaaaatataaactttataacacaaatccatattccacttccttttccacatacaacattaataacctttaacaccctaacactaatacttatactatctacctctaaaacccctccacttcaatttattcccccaatcattattaaccactttcatcctcaaaaaaaaaacaaattcccctcccaacaaaaaactcaactttctttttaaa

SEQ ID NO: 95336 - DNA, 195 bp, Zea mays
  Clone ID: MRT4577_186939C.1
gggcacacgctgtagcttcttctttgtcgttccgtcctactactgattcatgatatggggggaatctcctctctccgtctgtctctatctgtctttgtcctgatgcacctgacgacgcacatgtgatgtgtggtgtgaccaggattatttgcttggtcataatcaagtggggggtttgctggctctttctgccgc

SEQ ID NO: 95337 - DNA, 196 bp, Zea mays
  Clone ID: MRT4577_18693C.1
ccggggcactcacactacagtctgcacataccccacaaggacactccaaagagctagaacctgcaggtagctctgccggtagtggaaccgaatatgtcaggaaacatcggaaagatccccatcattggcgacctgacgggcagcatcaagaatgcgcacctaaagggcaacgtggagctcgtgcgcacgaccgtgc

SEQ ID NO: 95338 - DNA, 1220 bp, Zea mays
  Clone ID: MRT4577_186940C.1
atgggtatgagaatccaatcttatgatgaccagttacttcatttagctgctgacatagctcaaaggttgttgcccgtatttgacactcctaccccggccgggatcggttcagaccagacccaatacacgtttctttaccctgaacttttcgctactccatcgagggcagagccgccgccgtttcttcaatctcgcagcgccggcgcttcatcttccctcccttttttactcgcgatcggcacgcaggcggcggctgcggcgctcaggctcgggctctgcgactgcgtcagcggcttcccctccggcctctcgccagtcaccgcgcgccctcggccccggtcctctgcacaccggccggtgaccctgcgtgcttgcctttctcctcccgcctccggtggatcgtcaacggcgcccggccccggcggcagcgctgcgcgcgtctcgagggcagcgggagccagcagccgctgctccaccaaggcggaagcattttggaaccctgaactctgggctttaagaagacactactgctgcaaccatgagcaccatgaagttttgtcgcgagtgcaacaacattctgtaccccaaggaggacagggacaggcgcaccctgttctttgcatgtcgcaactgcgagcatcaggaggtctctgacaataactgtgtctatcggaacgaggtgcaccatactgctggggagcgaacacaggtcttgcaggatgtagcttctgatccaactcttcccagaaccaagactgtccgctgcaatctctgtgggcatggagaggctgttttcttccaggccgcagcaagaggggaggaggggatgaccctgttctttgtgtgctgcagccctgattgtggtcatcggtggagggaatgatgcgatgaaatcttcgctctaatagttgtttcatcagagcatgaaacttaacttgttttgtagttttcttggactatgtatttcgaatctgacctaagattaatgagagaatgtctttccaataaaaaattaaaaaaaaaaaaaaaaaaaaaaaaaaaaaaaaaaaaaaaaaaaaaaaaaaaaaaaaaaaaaaaaaaaaaaaaaaaaaaaaaaaaaaaaaaaaaaaaaaaaaaaaaaaaaagggggggggtcgttttaaaaggaaccaaattttatttacccggttgctatggaaagataaataatttttttttttggggggtcccttaaaaattaa

SEQ ID NO: 95339 - DNA, 865 bp, Zea mays
  unsure (1)..(865): unsure at all n locations
  Clone ID: MRT4577_186941C.1
gggtacctcgaggccggccggacgttttttaccctaaacttttcactgcttcgtcgagggcagagccgccgccgtttctcaatctcctcgcagcgccggcgctccatcttcgctcccttccttactcgctctcggcacgcaggcggcggcgctgggctctcggcacgcaggcggcggcgctgggctctcggcacgcaggcggcgacgctgggctctcggcgaccgcgtcagcggcttcccctccggcctctcgccagtcaccgcgcgccctcgcccctggtcctctgcacaccggccggtggccctgcgtgcttgcccttctctctcccctcccgcctccggtggatcgtcaacggcgcccggccccggcggcagcgcggcgcgcgatctcgagggcagcgggagccagcagccgctgctccaccaaggcggaagcaaagcgttacccttcctcttagcgcttcagcgcgctgacgcgtgcgcttagttccgccttttggaaccctgaaccctgagctttaagaagacactactgctgcaaccatgagcaccatgaagttttgtcgcgagtgcaacaacatcctgtaccccaaggaggacagggacaggcacaccctgttctttgcatgtcgcaactgcgagcatcaggaggtctctgacaataactgtgtctatcggaacgaggtgcaccacactgctgnggagcgaacccaggtcttgcaggatgtagcttctgatccaactcttcccagaaccaagactgtccgctgcaatctctgtgngcatggagagggctgtttcttccaggccgcagcaagagggggaggaggggatgaccctgggtctntgtgtgctgcagccctga

SEQ ID NO: 95340 - DNA, 1275 bp, Zea mays
  Clone ID: MRT4577_186942C.1
ccctaacccacggtgtcgactgctccaccgtaagcgcctgtttcaccgccaccgccgacttcggttggtcctcacccgcgcgtggatggcgcacgcgcctctctcctccaagtgcgccgtcgacaccaagctcccctgcctcaccgcgcgatctccagccccgccgcgctcgcaagtcttgagatcgagcagatccaccatcctgcgccctcgccccatcacgcactcaccttggccccgcatccctgcgccgccataccctcggcctcgccctcgcctcatcctcccctgcccccgcaccgcatccaacgcgtagatccagcgtcgtcgccgcgatacctgcccatgccaccgcgtgcgcaccccccgtgccgtcggcaaaccctagcgtgatccccaccctgcccccgtcctcctcacatcatcggctcccccgtcatccatatcccagtggacatctctggcgacgagaggatgacgtcgtccggggtggtggccgcccggacaacccgttgctcgccaggccgagtctcctgagacccttgagcttgctcagtgacggagggatgcttccatggaaggaattgaaatacagatcaagaaactctaggctctagcactactccagctcttctggcatctgaccggagaatttgttctcggatagcgctagctgagcaaggctggtgaggctggagacgtcaggttggctacagtgtcggggatgaacccactcagcgcgttactactcagatcagctccactagctgggcgaggtcgccgatggaggatgggattggccccgtcaaccggttcccctgcaacgccaacttcgtgaggttcttcatgttcccaatccctgttgggatggtgccgttgaggaggttggattcgaggcccaacgtcgtgagcccgatgaggtcgtcgctggccggtggaatagacccggagatgctgttttcccctatgttcagtgcttgaatctccctcgggaggcgggcaatggagcctggcaactagccaccgagcttgttgttgtcaagggcgaggacctgcaggctgccgcagttggtaagatggtccaggaactcccagccttactcgtcgctcgccgtcagctggttgcccgacatgtacaacgactgtgggcagagcatgccgatgactcactgcgcctttgtatccttatgctattgttttcatccgacaacatcaactgcaataaacataagatggagagatttctgcaccaaaaaaaaaaaaaaaaaagcggcc

SEQ ID NO: 95341 - DNA, 282 bp, Zea mays
  Clone ID: MRT4577_186943C.1
tgctgcgtacctacaacagcgacaacagctacttaatccactaccggtggctaacggataggtcgatgccttcctacagcagcaacaattgctgccatacaaccagttctcttagatgaaccctgccttgctgcgacagcaacccatcgttggaggtgccatctttgatatcacatatgagatgtactcgatgatggcgccctaatagcgcgatgtgcctactacaaatactcaatatcttgagtgacatttatctcgatacaaccaacttgctttgacgga

SEQ ID NO: 95342 - DNA, 629 bp, Zea mays
  unsure (1)..(629): unsure at all n locations
  Clone ID: MRT4577_186944C.1
cccacaaccacacagggcgaaatccacgatccagtcaaacccccgccgcgcaccgagctccaaaccctatcgatgtcgacggcggcggccacgaagactccgaccaagcccctggccgcggctgccaggactccgaccaagccccagccccccgcggtggccaagacgccatgcccgtctcgcgcgcggccctcccacgcgtccgagaactccaaccccaacatcccgggcacgccgcctcccccgcagtcgacgccgtccaagcccgtcctcaagtccccgccgcccgcgggcgccagatccgccaccgcgaggaagaagccctccacgcccgcgccgccgccggagcgggagcgggcgattcctcgtggcgaagaagggcgcgcggcggaggcgcaacgtcgcgaccgtgggaggcggcgggggagagatcgacttcgacaagtgccgcgaggctgcccgcgaggcgctgcgcgcgtcgcagggggacttcttccgcaaggagctcgccgcgtctactgccaccggagaggagcaactgggacaggaggcggaggaggtgaaacaggtggctgaagagggtgtggaaggtgggagcactcgnaggagtggccagaggaggggaccga

SEQ ID NO: 95343 - DNA, 298 bp, Zea mays
  Clone ID: MRT4577_186945C.1
gcgctgacgcgtgggatctgatccttttattttaccagcagctacaccaccggcgacgttcagccccatcatcttaatcacgaaggatatttcaaaagcagcagtagcttagacaaattagatatgccttttaagattctagttgatatgcatgcattatttagttcacatcgaatgcagcagtgtgttaactatgtagttgcatacctatcatatctaagtatattagacgtctttctaataattatttaggatctgtcatcaataaaaatgttgcaacaattaataataaaattat

SEQ ID NO: 95344 - DNA, 463 bp, Zea mays
  Clone ID: MRT4577_186946C.1
ttcctgttagctcatgtggggtaagcctcaagcgccagggtctgtattaagatgaagctggaaggcaagggcatgttgcacatggaggaatgctccccagggctgttatatctcagcagcagagcggtgaccagcctcaaccacctggaacggagggacaacagcaagcaccatcaggatcatactacttcaacattccagcaccgccaggagcagagcggacactgtacccttcaatggatccccagaggatgggtgccttggtcaagtcacaggagggtgatggcaaacccggtccacagcaggctgcccaagctcaggcatcaagcagctcaggacagagctaccctatgccaccaccatattaccatggtcagtacccaccctactacccaccatatggcggttacatgcccccgccttcgatgccatacccaccaccaccacaggatccaccttatca

SEQ ID NO: 95345 - DNA, 287 bp, Zea mays
  Clone ID: MRT4577_186947C.1
gtcgcctcttcttctacaacctcccctcgcctcttgactaggccagcgttggatccgaccccttcgccatccgatccgatggagggcggctactcgtccggcgccagcctcggcgcctgctccggttgcgccgtggccgcatccgccaagtggcggagcgactcgtcgaggtcgttccagtactacctgcaccgttacacgcctaacgctactgggcggtggctcggcacgctcgacaccgctgcaatctactcgctgacattctacatggcgcaaggcattctaca

SEQ ID NO: 95346 - DNA, 579 bp, Zea mays
  Clone ID: MRT4577_186948C.1
gatatgatcacaaacaggttgagacctctgtgctgttcaaccctacgagcagggacgatgtaggagctgctgtagggggaggcgtcaccgggtgaggcgacatggcgggaggcggcgttgacgttggggttgaaggagacgagaagctcggcaggaagacgctgcagtgcgagcacgaggtgctctacttcgatgtgcatgataatgcgtgcggcaggtactgtctggatctcatgagaagacctcggccacatgctccaccatcatcgcttccgtacgcacggcgcgtcctgtctcctcgacctctttgattactatatccgtaccgacgatcgtgatggcttccgcaaggaggtgcgagtccataccatgcgatctatttcgatatcggggagaaccatatgtctcgattcgctgcgggcctccgaggtctcctgtctatgcgaaaccggcagataccatatattgttccagctggcagctcggatgataagggatgggaagcattcacgagcgtgctgctggacatatataacgatgctacctgatgcgtgtcctaccaaatcatccgcgtccctc

SEQ ID NO: 95347 - DNA, 1346 bp, Zea mays
  Clone ID: MRT4577_186949C.1
gtgtgtgtctagtcgtccccttctcccatcggcgggagggcggcgtcgtcagcccgcaaaaaagcaaagcgtcacgagaagctcgttccttgacaggcagccatgattccaaggacgtcctcggtctcttcgtcggcggcggcggcgcccaccgcgggcgcgccgccggcgtggccgagcggcagcgacgcggcggcgttccaggcctcgggcagctcgggacatcagcaggtggtcatcagcaacggggtgctcctcgccgcggtcatcttcctcttcatggtcgttgtgttcgtcttcctcctctacctctacgccaagcgctacctgggcgccgggaacccgctcgcggcgccgccgtcctcgcggttcctcttcgtggccgcgtccccgctcccgcagcgcggcctgcccgcctccgccctgcgctccctccccgtcgcggtctacggcggcggcggcggcggcccgggcaccaagagcagcaaggaggcgctggagtgcgcggtgtgcctgtccgaggtggccgacggcgagaaggtgcggacgctgcccaagtgcgggcacgcgttccacgtggagtgcatcgacatgtggttccactcccacgacacctgcccgctctgccgcgcccccgtcggcggcgacctcgacgcgctgccgcgggaggagcccttcggcgcgtcgctcgagttccccaccaacgtcctgttctggggcacccacgacgaggtcgccaacgccggcctcgccacgcccccgcccccgccgccgcccgtcgccagcgccgtctccgcgagctcctcggcctccgggcgtaggaaggagaacctggtcatcgacatcccgacgcggcccgtggccctgaccaccacgccgcccttcaactccccgctgccgacgagccgggtggctgggagcgccgacgagacgcggtccccggtctccgccaggctgcggtcgctgcgccggctgctgagcagaggcaagcaggccgtggtcggcacctcctacagcccgcgcggcgccggtgacgtcgagcaggggctcgcaggagccgaggccgcccgcccgcccaagacgcctccggcgtcggactgattcagatccccccgagctccgggtcgcatttggctcgactcgccgatcaccggagcgcgcgtagcgtatgcgttcatttttgttccccctttttcttttttttatttacatcttgattcgaaaaaggaactatcggtcaaaaggttcctgtgtaaacagaggaaaagaccgatgctggttggttgttgttgggggaaaaaatggtggatttgttcatatgtttaccaagaaacttttcttgaaaa

SEQ ID NO: 95348 - DNA, 305 bp, Zea mays
  Clone ID: MRT4577_18694C.1
ctcacgcgtccgcttcagcatgggctgggcgtacccgcgcacgatctacttcaacggcggcgagtgcaagacgccgccgtcggactcgtaccccgacctccccaacgccgcgcccgccgtcggctcgcaactggtcctgtccagccgacgtctcggcgaacatactgctgctgctcctggtggcatgacccggaccgaaccatggacaaggcctgcttgatgaccatgcgtatcgtaccctgtgcaccgtgcatactgtactaggcaaggcatacgatacgagtcctgagaccatgcctgaacac

SEQ ID NO: 95349 - DNA, 625 bp, Zea mays
  Clone ID: MRT4577_186950C.1
gtcaaaaggagaagagagagagagagagaggagcaaaccctagctccagcttgcctcctactccgccatcatccagatccggccggtgcgtgcgatggcgctgcgcgttctggcccgtaagctgaggttccctgccacgtccgttctccagcgggcgtcgacccccgtggtgtcgccgccggcgagctcccgacttctcacctcccactcctctcagagtggaggagccaagagagcagtgaatgagaccaggaatgctcgaccaaggtggaggaattacaaaaaactggagaagcgttttttgcgcgatatggagaaggacatgaagaatttcaaggagctttcattagctatggacaacttgccaaggaatgttgtactcacttcctctgttggtcttgcggttttgacaaccggctgggcgtatgccattggtgttttcgattggaacagaatgggggacaatgaaccttcggcttaacaaggtgttgcgtagatgcacctcatgaataatctatgagacttttatgtttatgtaagaggaatggaatggtgcggacaaggagaagactgtatgcttgttaagtaatttattagttggatgtttgactgtttggtttgtggt

SEQ ID NO: 95350 - DNA, 1379 bp, Zea mays
  Clone ID: MRT4577_186951C.1
gtcccttcccgtgtcccgtagtcgtctcctctcggcttccctcatcagctgccgcgtcgtcagccagcgccaagaaacaaaagcgccgcgataagtccgttcgttgaaggcaggcagccatgatccctaggacgtcctcggtctcggcggcggcggcgccctcgccgccggcgtggcaaagcgccagcagcagcgacggcatgttcccgggcccgggtagctcggggcagcagcagctggccatcagcaacggggtgctcctcgccgccgtcatcttcctcttcatggtcgtcgtcttcgtcttcctcctctacctctacgccaagcgctacctgggcgcgaacccgctgctggcgccgtcgtcgccgtcctcgcggttcctcttcgttgccgcgtccccgctcccgcagcgcggcctgcccgcctccgtcctgcaatccctccccgtcaccgtctacggctcccccggcggcaaggacaaggacgcgctggagtgcgcggtgtgcctgtccgaggtgggcgacggcgagaaggtgcggacgctgcccaagtgctcccacgggttccacgtggagtgcatcgacatgtggttccattcccacgacacgtgccccctctgccgcgcccccgtgggcgacctcgacgcgctgccgcgggaggagccctccggcgcgccgctggagttgcccgtgttccccaccaacgtcctgttctggggcacccacgacgaggtcaccaacgccgggctcgtcgcgccgccgcgcgccgccccgtcggccagctcctcggcctccgggcgcaggaaggagaacctggtcatcgacatcccgacgcgggccgtggccacgaccacgaccacgccgccgcccgccaactccccgctgccggccagccggatgcccgggagcgccgacgagatgcggtccccggtgtccgccaggctgcggtcgctgcgccggctgctgagcagaggaaagcaggccatggtcggcacctcctcctcctacagcccgcgcgacatcgaacaggggctcgcggggggcgaggccgccgccgccgccaccgcccgcccgccaaagactccgaagacgcctccgtcggcgcacgcgcactgatccatccagatcccccccatcccgagctctgctccgggacgcatttggcccgactcgccgatcgccggagcgcgcgcagcgcatgcgttcattctttcttcttcccccttttttttcttttacctttcatgattcgaaaaaggagttttttggttcgaaaattcctatgtaaacagaggaaaatattggtgttgattggttgccgttggtggtggggatgaatggtgaatttgttcatatgttgatcaggagtctcttttcttg

SEQ ID NO: 95351 - DNA, 2561 bp, Zea mays
  unsure (1)..(2561): unsure at all n locations
  Clone ID: MRT4577_186952C.1
gctacgcatcttgttttatttgttctaaaccatatatttgacgtggcagcacaaatgctacatagttgctacttgtgatagagatttgaaaaggaggataagaaaggtatgtttggtgtttagtgctcatagctcaggacatgcttctaatatcgcaaaagctttttcatgcatgcttgtaccatgggcatttccccaatcttgcaggttcctggtgttccaatcatgtacatcacaagacataggtattcgatagaacggctccctgaggccacaattggtggaggtatgtgatatcttcatctgacaaactttgttactgtgttctctctgtccctagcttatatcctacaatcacataagattgcagtactctgatgcttttttggcattcttgcagcgcttcacggcttgcctttatgcaaaatgtaagcatttaacactgtaaacctgggccgccggcccaacatctaaaccctaatcactgccgctccgagcgaccgcgcctccgcccgccgtccgccgccctaacactgccgacctgtcgactgccgtctgctcagccggccagccactatccgccgagcgcccgacggcccgagcaggcgagcagctccgcatcgcgcgacgtcccaagcaggtgagcaaccaggggcagtaaaggcgttcgcgcgacgtccaacagtgcacctgcgcgcgcgacgtctcgctgctttctccaactcctgttcggtatcgccgtttctcgcttggaggttgtcctgtagcggggacgaccgcccattccggcgcccgctcttctgctcctcctcgccttcctgtttctgctgcggggagttcttccgccgcgagccgggacaccgtcgccgccggccgcccgctgtccgacgcgcagagcctcgtgtccaagcgtggcaagttcaagctcggattcttccgtccagggtttggctcgagatggggaaggcaaagagcaagggccctaaattcgcggcggtgaagaagattatcaccaagaaaaccatcaataagtacaaggaggatgtgctgaaccacaagaagaaggacgtggacaaggagaaactcggccggaatgtgccgcaggtttcgtcggcgttgttcttcagctacaacacagcattggggccgccgtatcgggtgattgtggataccaacttcatcaatttctcgatacagaataagctggatttggagaagggaatgatggattgcctttatgcaaaatgtaccccatgtatcacggactgtgttatggctgagcttgaaaagctggggcagaagtatcgtgtggccttgagaattgccaaggaccctaggttccaaagattagcatgcacacacaagggaacctatgctgatgactgcattgtggagagggtcactcagcacaaatgctacatagttgctacttgtgatagagatttgaaaaggaggataagaaaggttcctggtgttccaatcatgtacatcacaagacataggtattcgatagaacggctccctgaggccacaattggtggagcaccaagaatctgatcggtgcagacatgagatgttctgggatgtaatactatggcggtacttgtccatctgaccaagtcactatttcatgtttgagtccacgacaaggactaggataagaacgctgctttctaggttgagcttactgtaactactaagaaatttttattatgtaccaaccttatcatttctacaatgttgcgggatgtctgaagtaattctttgttaaaagatcgggtatcctgctcccttttgcttctcaatcttgtgcgctacaagccataatcccaatagagtggctcttcctgaatctcttatagaggatgaacataggagtccctcataatgtgaaacagaggcgacaacaatctgcaacagtcgttggatatttaggccttgtatttctacagtgctacaacactttactaaagtttagcacatgaaatcaaacaagcatattgaaagagcagtgctaaagtttagcacctattgaggcgatggatttctcttagtgtcgcgttcattggggttctggcgttcgtgcttggtgtcatcgccgaaaacaaaaagttactgatttgacatataatctacaaggaattcttcatctaaggtcgtgctccgccactggggagggaggtggtggggaatggcggcggcgacgctncggtgggtgctgcagctgcaccgggacgtaccgcgggcagcacggttctactcggagggtctcgacttcagtgtaaacgtctgcacgctccgctgggccgagctgcagtcggggccgctcaagctcgcactcatgcacaccaacgacaggtgcggctactgctgtttgtttataccgcgctctcctcgtagtattatcctcttcgtataacttcggccttcagatggatgcggattcggatttgtgtgaggttcatgtgttcgatgaaatgtgtgtgtgcagcacttggttttatttaagttctgaaaacttgggtgatgggctgcgagattagtgaagaatcaagtcagtt

SEQ ID NO: 95352 - DNA, 675 bp, Zea mays
  unsure (1)..(675): unsure at all n locations
  Clone ID: MRT4577_186953C.1
gcgcctcgcttaacgaaggcggcggcgtgcttccagcgctggagctggaccagagcttccacttcggccaggttaagctggatggtggagaaagcttctttggcatgggtggtcagagcggcatgaggtggtggagtgaggcgagcccattggtttgccctagtagcacggtggccgcggcgtcctcgagctcccatgggatgcaacagtactgcgttgttgttgatgagccgggaaagcttgggatgaattagtagccactgctggcccctttatgtttccatcttcatgcatgattgcggtgtaaatttgtgctagcattgattgggaatggtgaaacatgagagtttctttgaattaaaatcaataaggtttctcaccattttcatagatgagagactatgaggagatgcatggtttcgaggtagttctctttctacgagtttctttaaatgaaaatttcatctactcagcctactgctatagaaaatactactctatttgcaattttggcttgtacgaactgtattgttcgatctgttactttatctgatgtgaatatagtatttgtaccgagtgctaaccttgaactctgagtccnnaaaaaaaaaaaaaaataaaaaaaaaaaaaaaaaaaaaaaaaaaaaaattaaataaaaaaaaaataatatatat

SEQ ID NO: 95353 - DNA, 808 bp, Zea mays
  Clone ID: MRT4577_186954C.1
gatacactcacaagtcagagtaaacatcacaaagcagcaaccaccaatgtctgctgcacctgcacgcatcattttctccttcttctcctccatggagcctcttcgccttgcagcttcggcgccggtggcagctggaaacagtcggcaacaaggccgccaccgcggcgattccgtccgcccttcggcggtgtccaatgattttggcctccaggagggcctgacgcacgtccagaagcttctacatcgacgtcgtcagaagggcgacgaccgggagatgatggtcaccatcgacagcctcaagcgcctctgcgtcgaccactacttcgaggaagagatcgagagcggcaccagtgcttgcatgggtctcatccacagcgacgatctcttcgacgcaacccttgcgttcaggctcctccgagaggccggccatggcgtttcagcaaatgatgttttaggtaggttcactgacgacagcggcgagttcaagcttcctcctagcaacgacgaagacacaatcaggggtctcctgagcctgcacgacatgtctcacctggacatgggaggagaggcactactctgcaaggcgaaggagttctcaagcaagaaccttgcatctgccattggccacctggagccaagccttgcggagtacgtgaagcagtccctggaccacccctaccacctgagcctgatgcggtacaaggctaggcatcacctcacgtacctgcagagcctgcccatcagagacagagacactgcagtggagaaactagcagctgcagagtttcagctcaacaactgctgcatc

SEQ ID NO: 95354 - DNA, 219 bp, Zea mays
  Clone ID: MRT4577_186955C.1
tttggtttgttttactgagaaacaccgggaagcaaatatgcagcatccaagggtagatggcactaggatttctccaaagagtggatatacatacctcaacgagaaaaaagaagctccgtaaaacgaagtcgcttgacaatagcaacaactatgctaacaaaaaccggacctcaaatgggagaattcctgatacagtataaacaccaacagctactctta

SEQ ID NO: 95355 - DNA, 1078 bp, Zea mays
  Clone ID: MRT4577_186956C.1
ggcttctcctccccctcttaccaagtcctcctcgggttagggttacttagggttttgagggggggcgatggctgcggctgatgaggagtaccgttgatatagtcagacggcttgcctgggccaacagcaacgagatagctcgagaatgccttcgcctcctactgggagatccttgactacaaagtcatcacctatccgctagacgaggaggtactagagggtgctatgatcgcatgcccgtaccgtaagcctcccaatcgtccgcgcgagcgtgggcgcgtaaaatgccttttttttttttttttattcgtagaggggtcgatcgagctcgcccttttattgctgcaaatatataatacacattattactgctgcaaacataagattacgttacattacattaaatgaaaagctatattacctcccgttctcgttatcccgctagttcatttttaacgaaacagtgacaaatatgaactaaacagcaacaaataaaaagaaacggaggggtactacgcttttttttttatttcagtgcgcgcgtgtctgctccagacggtgctgctgcgcccagtccttgacgatgtgcggctgctgacccgacgacgaggtcgtggtctgaaggtagcggtacacccacgccagcacagccaccgcagccacgccgaaccctcccgacgaaacgatgcctaccgtgagcagcgccaccgtgatggccgccggcaccagcacggggctgaagatcaccatcaatggcgtcgccacgatgagcgccagcaccgtgcccgtcaccgccagccccgacaacaacaacatggagaaggctgccgtggctgtggctaacgccttggccaccgccatgggcgcgggcggcggccgctgctgctgctggtgaccgtagtgggtggcgttgtagtcatcgtcgccgtagaggcccctcatgtagttctctccgacggcctcgcttcttctccctgcacgatggtcatccgcatgatgagcagtggccatacaagctctggctagctagctagctgattcaaaagaaatagagagtcccagccccgccggcctcgag

SEQ ID NO: 95356 - DNA, 243 bp, Zea mays
  Clone ID: MRT4577_186957C.1
tgaccttgccgtctagttccttcgatgatgatcttttgtcttcctgtgtgatggtggttgcggttgcattgcattgcactgcactgcaccgcaccgtgtgttgtgcagttgtccagtggggtatgcgacggagagaggctagtagtaccaactccacttgtaaaaatcctggtacgagcactcgtggaaggtatgtgcacgacctgctctttcatggctaacaaaaaaaaaaaaaaaaaaaaa

SEQ ID NO: 95357 - DNA, 213 bp, Zea mays
  Clone ID: MRT4577_186958C.1
ggaagcgagggcaagtttccatttctattttgtacataaacatactttatatacaccatgccaatggggttcataccaaatacactcggacagtgcatttcgctcttaagaatattgtacacggacacggctctttcaatttttacaagcttaactggttatgatcaacctggctcttttgtagtccatgaacgctggcgtacaatctttcgt

SEQ ID NO: 95358 - DNA, 1584 bp, Zea mays
  Clone ID: MRT4577_186959C.1
gagcgagagcgcagttcacctacgatctcaatgactacgaaggagctgaagagaaagactcggcaccagaacgcgagcttccatcctctcacagaccagccgccgacgaccgccgcgaaatgccctaattcagtacccttcgaggccgggggggagaaccccacgcctctgctttatatactgccgaaggtaatcccgtcggcagtcgcagttcacctacgcggaaaatcactagtgattcgctgaacaaaaaaaaattacaagaaggaatcgagagcaaatgctatcttcaaccacactccgaccgccggcgccggcgccggcgccggcacacctcaccatctgctcctcgcccgcagcgtggcggcgtgcgccggcggtgcgcgcggtgcggaactacgactccatcccgaagcgggagcccttcagctccagccgcagcatcctccacgagttcctcaggcaggacaagcccctcatccagcgcaccaaggaccagatcacagattattgcacggccatcgaaggcgatgagtgctgcagctgttgggacgcttactttgaactgaataaacttgagcaagagctgcccaaagacgaaatcgcaaggatggtgaaggactcggagggtgacgtgaggtacctgatagagagcatccaccatcgctcggatctgcggaagaaggtggcagagaagtctcgcaattcagtaccgtcaagctcccagggtagtagagccgcaaagccaaggccgttccccgtgcctgatgggataccgaaaacgcaagaagagctcgctgaagaagaagaggcgttgatgccggagtctccatacacgaggctgctgagaaggatgggaaggtaccctgattggtacaccccacgccctgatcatgagaccgactgaatcgagttgcccaccatcctagtgtcccttgtgggagtttttggagcatggtaatctgaggctccttttatggcctgtggtatgtggtaagattagatttgtatctatgcagaattgcagattagggtgttcttactcttttccaattgtactaatgaaaaccggtgtgtgctttatgctgtaaatatgtggtaaatagctgaacgttttattcgaggttctgtgtactgttgcatctccgtataccttattatattatacggagtatataacttattttcgtataccacttctactgcaaaacaaaaaaaaaaggtatttgttcggccggccgccccgttgtcgcctcggggaataatttatttttttgaatattttttttatgcgggtcatgggtcgacgggttgtcctgccccgatttttgtagtttaaatttgtttacagtttttttgccttcctgactaaactggattacttttggatggtaggacatgtcattttggcataggattaagtaaattcgttatcccccttctgttgtagttcaaacattcttttcatgtttttttttgaagtcggagggccatgtaactagcatgttttaatcctgaatcggaaccccctttgctggttaaaatgttttggtgaccgagcccaaaaagaaaatattctggtcc

SEQ ID NO: 95359 - DNA, 388 bp, Zea mays
  Clone ID: MRT4577_18695C.1
tttttattttttttttttaatcagaaaaaatcgccttgttttgattgcgcgctacattgccactcttgctcattgctcttgaagaaggcgagtgagctaaacacacttgttccccgattcactgtaatgtgtcacatcttgcacttgctgaatgatgacaaaccgtatggggaaaataggactccaacctgtctggactacgccactccgttagcgggaaatatcatactgaccgttctaatcactaaaaggcaaacaattaaaagaacctctattcaaggattatttctcatatccattctcaaaaacttaaatatcgaaaattccagaccaggacctggacgcttaccaccttttcctattaataattgtattaaacctatagaac

SEQ ID NO: 95360 - DNA, 712 bp, Zea mays
  unsure (1)..(712): unsure at all n locations
  Clone ID: MRT4577_186960C.1
agttctctacgcggaaaatcactagtgattcgctgtaacaaaaaaaaaaaaaaaatacaagaaggaatcgagagcaaatgctatcttcaaccacactccgaccaccggcgtcgccggcgccggcacacctcaccatctgctcctcgcccgcagcgtggcggcgtgcgccgacggcggcggcggtgcgcgcggtgcggaactacgactccatcccgaagcgggagcccttcagctccagccgcagcatccaccatcgctcggatctgcggaagaaggtggcagagaagtctcgcaattcagtaccgtcaagctcccagggtagtagagccgcgaagccaaggccgttccccgtgcctgatgggataccgaaaacgcaagaagagctcgctgaagaagaagaggcgttgatgccggagtctccgtacacgaggctgctgagaaggatgggaaggtaccctgattggtacaccccacgccctgatcatgaggccgactgaatcgagttgcccaccatcctagtgtcccttttgggagtttttggagcatggtaatctgaggctccttttatggcctgtggtacgtgataagattagctctgtatctatgcagtatgcangattagggtgttcttactcttttccaattgtactaatgaaaaccggtgtgtgctttatgctgtaaatatgtggtaaatagctgaacgttttattcg

SEQ ID NO: 95361 - DNA, 728 bp, Zea mays
  unsure (1)..(728): unsure at all n locations
  Clone ID: MRT4577_186961C.1
tcgaggggccggccgggagttcaccttatcgcggaaaatcactangtggattcgctgaacaaaaaaaattacaagaaggaatcgagagcaaatgctatcatcaaccacactccgaccaccggcgtcgccggcgccggcacacctcaccatctgctcctcgcccgcagcgtggcggcgtgcgccggcggtgcgcgcggtgcggaactacgactccatcccgaagcgggagcccttcagctccagccgcagcatcctccacgagttcctcaggcaggacaagcccctcatccagcgcaccaaggatcagatcacaggtacgctgctcggcggccccactgccctcgcctcgttgctccgtgatctattctgtttttttctgattgttcttgtatgcgtgtcatgcggtgtccttgccacggtttggtgtagtttagatttgtttatagttctgtctccatcatgattattgcagatttgtttatatgcttcttcttgttgggaacagattattgcacggccatcgaaggcgatgagtgctgcagctgttgggacgcttactttgaactgaataaacttgaggtacagtacgcgctaatctcgtcagcagatatttgaaaccacgggtctcgctttggactcatccagctctatcttcacagcaagagctgcccaaagacgaaatcgcaaggatggtgaaggactcggagggtgacgtgaggtacctgata

SEQ ID NO: 95362 - DNA, 213 bp, Zea mays
  unsure (1)..(213): unsure at all n locations
  Clone ID: MRT4577_186962C.1
atatttcccnctttatttccccccaaccccccagcagggagctcatgggaagaaccacgggggaaaatcggggctttaaaaacaatacaaaaacgggccatattgagactacccccaagtgggggaagcacactaacaaccccgagaaaattttatcgggcctatggaaacacaagggaaggctacagggacaaacaaaaaaaggcaggcccc

SEQ ID NO: 95363 - DNA, 398 bp, Zea mays
  Clone ID: MRT4577_186963C.1
ctcccggcacctgtaaattttgtatgccttcacgccgtgaagccacatttgcggccattggcaatggctgtatccactgtttcgatccatatatttggtgatgtcccttcttcacctcttgttgggctgcttcaggacaaaatcaataactggagggagacaactcttatattgacatccatccttttcgctgcagttgtgttctggttcattggtgtgtctgaggctgcacaagatgctcttgatcatcttttcaaccaaggccacaatctcgtaacagaaaatgagatttctgatacctttactaggctggttgaaaggctaccacaagtggtacttggaagcgaggagacaaccgcactttcacatgctaggatgttgttggctctgacctttta

SEQ ID NO: 95364 - DNA, 200 bp, Zea mays
  Clone ID: MRT4577_186964C.1
tcccacacatactaatacttatcacctgggattaccactgctactctccctacctaggctagtcacctacctcatgcgctcactgctcttcatgcaatttccttctactaccctacctatttttacaagcttctccttcacaacttatgctacaacagcttcaatccaattacatttttcgcaaactatcttgaccccac

SEQ ID NO: 95365 - DNA, 103 bp, Zea mays
  Clone ID: MRT4577_186965C.1
tttatgcgtacgcttatgcagtgtgacctcactgggtgccagacacttagccatgtgccggacaggagactaggatacttactgttctaattcacaggtctat

SEQ ID NO: 95366 - DNA, 261 bp, Zea mays
  Clone ID: MRT4577_186966C.1
cgttcttatcttaattactcagccgggggcacattaaatcaaacggcagtgcatacaaaatgttcacagtcccaacttacgcggcaactcactgggcaactagcacgtgaccccgaattgcgggcttacctaaacccgtttgcaacttcaacccgttgtcagagaaacaccctgattaaagcttcccgccgtctgaaaacagcagagaggcggggaacaacctaggggaacccgcctgaatcgcataagagccggatcctg

SEQ ID NO: 95367 - DNA, 455 bp, Zea mays
  Clone ID: MRT4577_186967C.1
tttttttttttttttttttttttttttttttttttttttttttttttaaaaccaaccatgaaataattttggatttggcaaaatttaggccagaacaaaaaatttgtttaaagatgggagggcctacacatccgccaaacttaaaaaccttattttgacaaactgggggactgtttggcttggggttaactgggtaaaattttgcctaagggtagttgccccaattgaaaaactaacctttagcaaaaaagtttggcaaagtttgacaagtttgggggcaaaccaaaaaaaccctgggtccgtttgggttttttacaaaaccccattaggggctgccccttccgggaacaataataaaccatgtgctcctcgggctggggaggcaggttactaactttgcctttatgttcaacccgaaaaattaacccaggggccttgggccctcccttttcttc

SEQ ID NO: 95368 - DNA, 332 bp, Zea mays
  Clone ID: MRT4577_186968C.1
gcaccgtccaggaaaccacacaaccaaccggggggttaggtctttgcttgtcttacactcccggaaaaaaatgatgctaatgctccagaagtccatactattatgcaccagatgtgctactaaaatgctaatgtacataagcctatgagtggatctcaggaaaaatactgtacattgtgactcgcgctctcaacacgtttagcgcataaacttaggctggaatctgcaggcagattctgcaagtcaaactaagattatgaatctaaaccctggcctattataaatgatagagctaaggatctgctctcgattatgctcacacgggatcctaa

SEQ ID NO: 95369 - DNA, 347 bp, Zea mays
  Clone ID: MRT4577_186969C.1
gtgaaatacgatgtccataccaaaatgggtgcggaaaaccaaaagggaccaaaaacggtggcccctacaaaaaggggaaacaattctataaggggaagcatttcggacgcgggggtcaaagggggaaaagcggacccaaaccggcatgtggggcaacaaggcccataggggggggcattaaagggagaaaaaaccaagggcaaagacgattcccgagaaaaaaaaaaaaccccaaacgttttcacacatcttaaaaaacggaagcatgtttcgtcaggccgggggggccgaaaaagccaacaaaccaacagtaactgcggtgaagtcacaaaacaacccgggggcgg

SEQ ID NO: 95370 - DNA, 410 bp, Zea mays
  Clone ID: MRT4577_18696C.1
ccggccgggcttttttcttttagcaaacatgtcaaatacagaaaaagctgaaaagaaggtagatcaagctgaatcccaagcccatgaaggtgtctctaaaacagcagatgctgttaatagaggaataaatcaagcctctgaaaaatatgacaaggcttctaatcgtactgaagaagagatccacagattgaaagcagagttggctgaacttcgacaaaaggcgggtcccaggattcaagaagcagaaaactttttaacttcacctgccgctattaacttttataaaggcctggtcaccggtgtcgctctcgtcatggcctatcaaaaatacaatcaatctagattttaataataaatactttatcctttgtgtacacgaccaaaaaaaaaaaaaaaaaaaacccgcggcc

SEQ ID NO: 95371 - DNA, 595 bp, Zea mays
  Clone ID: MRT4577_186970C.1
gtgcagagggtaatgccaaccggttggtttctgcttttgcgtttctgggtatgttctactaccttactattttaattttttacttgatgcctcattagtatgaaagcaatttctgagtgtgatatatatattgtcggcttgtcacatataggatggaacctgttacaattatagtgataatactgattcagattgttgccctcagtgttcctattaatccaagatttttcagggaaacttgtgaagagctggtctataagtaaataacttcactcctcttgtaattgattttatgcttatccctttgaaataaaacaactaagcctttaagttccaaacaagtcggggtaggctaaactgatcctatggaataagaaatgataaaacttttgaaagggtgtatattaattattgaggcctaagcttgaactgaagatcctccaaacatagtcatatgtttgagtaatataagcaggtaacagtgttccccacatataagttgcaagtttttgacatatgtaggattttcaagattctttttttcatatatgaccagcttgtccttacttatgattgcctgttgacctaacagttt

SEQ ID NO: 95372 - DNA, 392 bp, Zea mays
  Clone ID: MRT4577_186971C.1
gggccccccctaaaaaaacccccgggtttgggggggaaaatttttacaagccaaaaccccttccaaaaacaaaaagatcccgcaatcctcgggacaaaactaaagggggggccccttttttttggctagccgggggtttaaaaaaccaaatcgccacagccggtgctttacacgagttttttaattggaacaggggggaagtttcccccggccccctggttaaagggggagtaccccccccacaaaacatcccgggcccagcggggtttgaaagggcacccccccttttataattttcccccacttggtaaggggaaaggaccccagtttaaacggggccggaacccaaaaggaaagttttgaagatcccggcacaaacataaaggacccgg

SEQ ID NO: 95373 - DNA, 221 bp, Zea mays
  Clone ID: MRT4577_186972C.1
gaagcatccatcgagagcatgcattgatcaaagcgatattcatccaggcttccgttctactacttcacaaggtaggcgactagcaaggctaaggctacaggccgactacatcaggagctactcattaacacaggatgtcgtatgagcggccatggaaaagactgctggccatacccccgcatcatctgcaccaagacaaccaactgccgtgacgacactag

SEQ ID NO: 95374 - DNA, 450 bp, Zea mays
  unsure (1)..(450): unsure at all n locations
  Clone ID: MRT4577_186973C.1
tttttaagcagtggtaacaacgcagagtacgcgggcaaactgtccagcgattgttaaaaaaaaaaaaaaaaaaaaaaaaaaaaaaaaaaaaaaaagnactcttgggttgntacaaatgtttaagggcgaattatggagaaaagaaggacgataaaaagacggtcgaagctagatcaattggggggggggggaaataaaatttttttttataanaagaaatttnncaacttaataatgaacaagccnaaataaaangataatggtaaaaaaaaaatttgntaagtncatgatgagataatnaacaagagaaaaatgcaaaaatatgaagaaaaagtnaactnatacctttnggtagtgattagaaaagaaagaggagttagatcaaataatggaaattaaaaatttgtttaagcaaaaagaatgcaaaatttagaaagattgcttttggac

SEQ ID NO: 95375 - DNA, 2156 bp, Zea mays
  Clone ID: MRT4577_186974C.1
attctggaagccccccactccaatcattctggaagcaccccactccaatcccactctacatgtcccactctcagacccgggtccctcaccgccgtctctcgcgctccggtaaccgcctccacctccgcacctgacccctccgcctccgcctccttgaaaattccttttgctgctccaacctgcgaagctagttcactgtactcttgcttgcttataacgtagcgtgcggtggacggggtttgccagcgacttcaagaaaggtagatataatttgatgggaagatgaatggtgcagaggaggaggagccgcctcacgtcagcagcatgcccaagacgcaagacggtgttaccaagcccagtctagggaaagagcccatcccagggagcgagctctggacggatgggctcatctgtgcttttgagctggtcaagagtcacaggaagcctgttcagcacaaatcatggctggcaactgagcagatacaggagaagggccccactatgtgcacgaggaagcactcaagaaggaatgggcaccagatcactgagccgaaagtggatgagagcattgtgttggaaaacccccagcagactgatttcagtaacgatccttcagtgctcaaagataggccattgtatgctggggagattttggatcataaatgggtgcctattggatggaataggatcgccgagctggtcctgagggttcagtcagactccagctgggagaatgagttgatggagatgagtgatagcgaggatgattacaccgtggctgatcttgcagctccatactggcagcgccctgtgggacctacttggtggtgtcatgtcaccgcaggccatccttcaatagatgcatggttgaatagcgctcactggatgcatcctgccatcagaattgcactgagagatgagagcaaactgataagcgaccggatgaagtacctgctctacgaggtcccagttagagttgcaggagggctgttatttgagcttcttggccagtcaataggagacccaaatcatgaagaggaagatatacctattgtgcttaggtcttggcaagcacaaaattttcttgttacaacaatgcatgtcaaaggcccttcatccaatataaatgtgttaggagtgactgaagtgcaggagttgcttcttgctggtggaagccaaacacctagatcagtgcatgaagtaattgcacatttggtcagccgtctttcacgttgggatgacagattattccggaaatatgtatttggggaagcagatgaaattgaattgaaatttgtgaataggagaaatcatgaagatcttaatcttgttagcatcatactgaatcaggaaatcagaaggttagcaacacaggtaatcagggttaaatggtcacttcatgcaagggaagagatattaattgagcttctcagacatttgaggggtaatgccacaagagctattctagagagtattagaaagtgtacgagggacatgttggaagagcaggaagctgtgcgcgggcgcttgttcactattcaggatgttatgcagagcactgtccgtgcatggctacaagatagaagcctcagagttacacataatctggcaatttttggcggcggtggcatggttttatccataatcactggccttttcggaatcaacgtcgatggcatacctggagcgcagaacaccccctacgcttttggtttgttcgcgggacttctcttctttgtagggatcgtcctaatcggcatggggatgctgtatcttgggttacagaatccagttaacagtgagaaggtgaaggtgaggaagctggagctccagcacctggtttcgatgttccagcacgaagcggagcagcatggcaaggtcagggaaggtgttagccggcatggcgcctcgccgagttcatccacggcctctgatgaagggtacattcttatctcctgagatgggagatttatttgctgacgtgcaaggtcttgttttgaaaggctggaactgaagagaagtcgggtaaatggtatacttacacgtgtcttaagaattgtaattgggggatttgacatcgaaacgttggatatgataattgtagcagcagattggctttcctctgttgcttgagatcgcggctgtgatcgtttctt

SEQ ID NO: 95376 - DNA, 221 bp, Zea mays
  Clone ID: MRT4577_186975C.1
actatagaggtattatcaaatgtaaagggcatgaatggaattttggaagggctgtgtcccgtgtctataaataggggaacagtatccccttactggtcaagctgacttgggattcgctttttggggcacgcttggactggcatttccttctgattgaaggtacacttgtagttcaataatatttttggttatgttcaataataaaaaaaaaaaaaaaaaaa

SEQ ID NO: 95377 - DNA, 1609 bp, Zea mays
  Clone ID: MRT4577_186976C.1
cggtaccgtgggcggacgcgtgggccgggccacgcgtccgactacaaattgcctactaagtaatcagtcaaaccttccagatccgtactttgggatttatgcaccagctataaaaaatgtatcgcgatcaaaaagtttctttgcaaaattgttcttctgtgtttggtggggtcttcaaaatcttagttctcttggccaaaacctgaaaacaagcacttacacatgggagaacttattcgcagtttttgtctcgatatcaggcttagttctgtttgcattgctgatcggtaatgtgcagacctatttgcagtcagcctctttgagagtagaagaaatgagagtgaaaagccgtgacactgatcagtggatgtcatatcgacatcttcctgagaacctcaaggaaagaatacggcgttatgaacaatatagatggcaagaaacaagcggggttgatgaagagcaactccttatgaacctccccaaagatcttaggagggatataaaacgacatctttgtttgaaacttctcatgagggttccactgtttgaaaatatggacgaacagcttttggatgccatgtgtgactgcctaaagcccattctgtacacagaaggtagctgcgttattcgcgaaggagatccggtgaacgagatgctctttgtcatgaggggaaacctaatgagcatgacgacgaatggtggaagaaccggcttctttaactccgatgttctgaaggccggagatttctgcggcgaagagctcctcacctgggctcttgaccccacgtcaacatccagcctccccagctcaacaaggacggtgaagacgatgtctgaagtggaagcctttgccttgagggctgaagacttgaggtttgtggccacccagttccgacgactccacagcaaacagctccagcacactttcaggttctactcgcagcagtggaggacctgggccgcctgcttcatccaagctgcctggcaccggtactgcaggaagaagatcgaggattctttgcgtgagaaggagaagaggctgcagttcgcgattgccaacgacagctccacttcgctcagcttcatggcagcgctgtatgcttcgcggttcgctgggaatatgatacggatcctgaggagaaacgccacgcgcaaggccaggctgcaggaaagagtgcccgcgagactgctgcagaaaccggctgaacccaacttttccgcagaagagcagtagtatttcgcttctctgacttctcgttttgcagatacagatatgggaaattgtttgcgtgacttgcaagcccgaggatggcatgcccagattaaaaagaagaagaagaaaaaggggaatgaaatctcgatagaatgaccactgagtgatagtaatgtagtgattgatatacagtacattactgttcgtttaagaacgtccaagtggcgtttgtatgtgcttgtgtaatagcatagttagataggagtgatagtaatgtagtgatatacattcatccaccgaagctatgtgtgtatagggatcgaccatttccgtgcttacactcacgcactgtaaacgcagctggtgactgctaagtggcatccataagtgcgcgcc

SEQ ID NO: 95378 - DNA, 127 bp, Zea mays
  Clone ID: MRT4577_186977C.1
cagccagggagctcgtggccgatgagcacgccggcgcacggtctcaggccgccttccttggggaagttgatcctagccatcacccggaaggagccccaagagagcacgctgctggacgctgtctgac

SEQ ID NO: 95379 - DNA, 596 bp, Zea mays
  unsure (1)..(596): unsure at all n locations
  Clone ID: MRT4577_186978C.1
ccgggcacgacgcagcgggacgcgccgctcgaggcggccgccgcggggggcggggacgcgacccggggcgcggacggcgcgggcgaggacagngccacaccgcccgacacagnggcagccaaccccgaggcccagcgcgccggccgccgaggacaccaccgccgaccccngcgncccccacaccaaccacanccagggggggggagacccaanccccaagncccccnccccaancccacaaggcagcancgacgccaacgcccgcagagggcgcaagngccacaagaaccccaagcacaaggncaccgcngnccccgccgacgaagaagagancngcggngccacnnncaaggnggnggaaggcncaacngncccaaccgcgcngcaccgancggacaacagcnggcggaggcgaagccangaagaagcagaaccnngnacaagccnaggaggaaggaggngaaacaaagnggcngccaacaagacaagcccacgcaaaccgangaaacanccaagaaacaacaaacacggnagcccgcaaaaccaaaccacaaacaagacaaaaaaaaaaagcaggaacaaaaaaaaaaaccaaa

SEQ ID NO: 95380 - DNA, 1029 bp, Zea mays
  Clone ID: MRT4577_186979C.1
ctggccgggtgcctggctccctgtatgcccagctcgggactcgtgagcggcagctcccaaccatacgtccatatccccctcccaacaaaaaaaaaactcccatcaatggcgatctgaatcaaccaaggcatctggaagcttggacatggagcggatcctcaagtccgccagggagtcgggctccctgaacctctccaatcgctccctcagggagatacccaaggaggttacaacatcttgtacactggctcacaataatcttgaggtgttaagagaagaccttaggaacttgtcttcgcttgttgttctaaatataagtcacaacaagatatcttcccttccagcagctatcggagatctcccgttgctaaaatcactggacatgtctttcaatcaaataaacactctgcccgaagagattggcctggctactgctttagtcaaggttgacttctcaaacaattgccttactgagcttccacctaacctcgccacatgcccggacttgtccgaactcaaggcatcaaacaacaacatatccagagtaccagatgtacttgctggctgttccaagttaagtaaattggatctagagggtaacaagcttgtggcactttctgaaaacatgtttgtgtcatggacaatgctcacagaattgaatctcgcaaagaatctacttacagccatcccaggtagcattggagcacttccaaaactaatccgcttggacatgcatcagaatagtgagcttgtctatccatgttgtcacatctaaaggagtatccagttggagcctgcaacctcaaattatctttccttgatctatcaaataactcattatctggtctaccagctgaactaggtaaaatgactaccctaagaaagcttctgcttactggaaatcctatgaggacacttaagagttcattggtttctggaccaacaacaacattgctgaagtatctgcgcagccggctttcatccgatgaggaagcatcaggatccagaagcaccccaactaaagatgac

SEQ ID NO: 95381 - DNA, 310 bp, Zea mays
  Clone ID: MRT4577_18697C.1
cgacacgcctcagacaattcggacccgctggcccgtccgccactctctcggcctcacgtcactaaagcgcatcagttctcaagtgccagtcgcagagaagtctcaagaagccactgtccttcacatgcacggtcgccagttccacatgcactggatcatcggtgaaggtgtacaggccagtaacatacgcgcatccgtctcagcatacgaggaagagaatctgccacgagaactacatggacacagacctgtggggcccttcaatgtcagttagcagtagcatgtatatcacagtgatgcagaccccgct

SEQ ID NO: 95382 - DNA, 2152 bp, Zea mays
  unsure (1)..(2152): unsure at all n locations
  Clone ID: MRT4577_186980C.1
cttccttcccaggtccggtcagctcgggactcgggagcggcagctcccaaccatacgtccatatccccctcccaacaaaaaaaaaactcccatcaatggcgatctgaatcaaccaaggcatctggaagcttggacatggagcggatcctcaagtccgccagggagtcgggctccctgaacctctccaatcgctccctcagggagatacccaaggaggtttacaacaacttggacactggcagccaggatgagaaatggtgggagggagtggacctccaaaagctcattctggctcacaataatcttgaggtgttaagagaagaccttaggaacttgtcttcgcttgttgttctaaatataagtcacaacaagatatcttcccttccagcagctatcggagatctcccgttgctaaaatcactggacatgtctttcaatcaaataaacactctgcccgaagagattggcctggctactgctttagtcaaggttgacttctcaaacaattgccttactgagcttccacctaacctcgccacatgcccggacttgtccgaactcaaggcatcaaacaacaacatatccagagtaccagatgtacttgctggctgttccaagttaagtaaattggatctagagggtaacaagcttgtgggcactttctgaaaacatgtttgtgtcatggacaatgctcacagaattgaatctcgcaaagaatctacttacagccatcccaggtagcattggagcacttccaaaactaatccgcttggacatgcatcagaataaaataacatcgattcccccttccataaaaggttgctcttcgctagccgagttgtatatgggaaataacttattgtcttcaataccagctgatattggcacgttatcaaagttaggcatacttgatctccattctaatcagctaaaggagtatccagttggagcctgcaacctcaaattatctttccttgatctatcaaataactcattatctggtctaccagctgaactaggtaaaatgactaccctaagaaagcttctgcttactggaaatcctatgaggacacttaggagttcattggtttctggaccaacaacaacattgctgaagtatctgcgcagccggctttcatccgatgaggaagcatcaggatccagaagcaccccaactaaagatgaccaaattgctgcagcaaggcgcttgtccttatcttcaaaggaactggacttgagtggccttggagtgaccagtgtaccagctgccgcgtgggagacaagtgatgtggtgaaactggatctttctaaaaattcaatagaagatctaccaaatgagttgtcattatgctcatcacttcaatccttagttttgtctaataacaagataaaaaggtggcctcacacagtggtttcctcccttccctgtctgtcttccttaaagctggacaataaccccttggtagagatatcatccactgatcttgtgcctctgtccaaacttgaagtacttgatctaagtggcaatgcttcagcacttcctgaaccttctgcagtttctgcattaccacagctgcaagagctttacctaagacgaatgaaactccatgaatttcctaatggtttgctgggcctaaaactgcttaggattcttgacctgagtcagaatcaccttacaactgtgccggagggcatcaagaatttcactgcactcattgagcttgatctgtctgacaacaatataacagcactcccagcggagctgggattgcttgaagctaacctgcaagtgctgaaactggatggaaatccgctaagaagcataagacgaactctgttggagcgaggaacgaaagcagttctcaagtacctcaaagaaaaattgccgtctgaataatatttatagaacaaactattgttggagtaatggaataaaatgtttttttgccactgtatctcagttttctggactgaattttgtgcaaaagtatctggaccttgtgtgagaagagagctttgtgagtgtgttgttggatatactggttatagtccacatgttttattggaacaaaaatattttctctgttcaatctttacatggacccaaaaaaaaaaaaaaaaaaaaactcgaggaagggcccggntaccccaa

SEQ ID NO: 95383 - DNA, 599 bp, Zea mays
  Clone ID: MRT4577_186981C.1
tcaaaatagtgcacagcagaaccatccaaaagaaaaatttgcgagcataccttaaagttcaacagcttcccaaccaaaacctcccaaagatgactccttgtggttcaaactgctcttgcggtgcttcgtgctcctgcagcggttgcactgcgcacaagaaatgagcgtatggcgcggggctagcttactgaagataagcccgattgtggtttaagcggcattgctccctaattggtttgctggcttactcggtcgaagtagtataccgccatctgcgctatcggttcatgtagtgatttccgccaacagttttttatttttctgttcaattcttgtattgtttccatcatccggctcagagagttcccgactctgatcatgtcatgacaagagaaaccatgccaggcctccggattcacctcatgaaagagcccccttagctcagtccagcctcatcgatacaccgtgacttccgctccctgcttgcacggagtagatagtgacccacacggcgctcgtcgcgggccgcctgtgttacataaaataagggcatcaagcaattcaggataattcgaaaccggtttttaaaaaaaaaaaaa

SEQ ID NO: 95384 - DNA, 274 bp, Zea mays
  Clone ID: MRT4577_186982C.1
gggcaaaaaagggaaggattcaatattcgacaaatccgttaatacaaaaatttggaaaacaaaactgggggagtcccattaacagggacgataccggcaaccaaaaccattaaactttgggtaaaaacacccgaaattggggaaaaaaccaaaatgggctgattcccgcaaactggctggggggggggggtccaactcaaacaacggtttggggggccccttcaaaagggccttttcgaagcccccccatttttaaacaaaacatggtcaggaa

SEQ ID NO: 95385 - DNA, 384 bp, Zea mays
  Clone ID: MRT4577_186983C.1
ccgtccccccctccatccgcgcccgcctgctcctcgtcctccctccacccgtctcctaatcccttcctcccgccgcagcagcgagagcagagagcagagcggaacgagcaaatcttggggggtgtcgcacccgctctccccgtgctgctggtggattcgttcaaggcgggggccgcctgcctgcacgcacgcttttccgtaccctggtcgccggttgggttgggttggatttggttgcgaggtgttgttgggggtgggcgctcgggtggcggagtgggtacttccccggttggcctcttgctgcgccccgctgggccgtgtcgtgccattaaagccggcgcctttggtttctctctccacctctctctattcgcccccgccccg

SEQ ID NO: 95386 - DNA, 2020 bp, Zea mays
  Clone ID: MRT4577_186984C.1
ggtcgtgcgttcctggcgaccccgaggccggcccccgcctgcccctgccaccccttcgattctctcccgagttgcttctctcccgagtctcgtccttccccgttcaacacctcctcccaaaaccctaacccctcgacctcccaagatggcatcgcctccacccccgcagtcgtagctgccgctgcattcgaatcgcagccgccacggatctagtggcccgacgtggaaggcagaactccctgaccttttctctccaccctaagcttctgcacgcgcgcaccgcccctcaccgtcggcctcttctcctcttcatccgccacaggatctcgcctcgccgaggccatgtaccgtgccgccggggaccacatccgctccctcaaggtgaatagacaaaaattcgggtgagacaaattttcctggtgttgtacgaggagagggcagccagcggccaccgggagttcgggtcctaggagccaccgacttcagtcgcctgctcaaggacggcgagggcggtgcctacctgacaagcccgcgcggcggcatggtagttgccatcaagaaactcaatcccaatgacataaggttcgaatgctccattccttagacaatgccaacgtcctgaaattttactcctggtggtccttttgtgctttcccttgcacacaaacacaaagtgaactttcttttgtgatcagggcactcttcttgttatggatcagataggatacaatgctggtcgcacaccattcacagacatctcaaacaccatcattacaggtaatcaaaatgaatcgaactcgcttggaccaattgtcgatgctaaggaacgtaagaggcaaagggatagggaacgatatgctgcgatgactgttgaagaaaagaatgagaaaaataggaagcgtcgtgaagcacgtcaacgaaataaaggactatcgatagagccactctcatccagagaaggcgttaatacggaccagacatgtgaggtggttagctttccagatgactgtagcaccattgatttcacaaatttgtcaacataagacattgcagatggagacgaacaagtaaatctggatccagatgatgacaacgattggttgcataggaacgagacattccaggcaaacaacattgtcacaagtaaagaccttctaacaccaggcacttcctattccaacaattgatgtcattgaaggagctgcccttggtggtgggctagaactgggagacaatctaacctcttcaaaatccaacaaaaaggttgcaaagtagacatcccctatttctatagttcatgcttcatggatatgatggtcacacttcatggtctccggtgctgagggaacagtgatagattgatatgaggtttgcaggtcagagccttgcttcctagctgtagctagaatgcatagcgttatgcttttatcagctttgcttggcctctacatcacacaagttgtctgccttgagggcattcattcatgtggccaagtgttggtttgtgatctcccttgctggtgaattcctggagaccctccgccacagaagaagaagtccctatctaaagcttatcgtatatacaaaattaaagtacttctgatttattaaagtataattatttgctcgtgcaaagacaatttggtcatttgttctctctcttaagcttagttcttgttaacaattacgccttatggatgaagcattgccaatctacccgtcaaatgagtcttctctttgttttcatgatacaagagttcagttagacatgtcaatctgcaagtactgaggcaatgatatggttcaataaattgaggacctgcgcaaaaaacactcaaaaaaaatattgtccttctataatgaacatatataaaaaatgaataatcttataaatatgaaataaaatataataaatcaacttggccttgttttactactatttaaggtcatagatatgttcagctaacattactagctcatcatttggaccttctaaataagttcaccttacatcaaatgg

SEQ ID NO: 95387 - DNA, 483 bp, Zea mays
  Clone ID: MRT4577_186985C.1
aaaaacatatttttttcttaaaagccaaacaacatttgggatgccaaaccgcattttgggagtaaaccccaggttttcaccaaaactggggcttgacacccaaaaggggcgtacaaaccccaaaagagggggccccaaagggaagaggcgggcccaaggggaatccgcggcccccggggggaggttttccccagggggggagggtaccaatatacgtggaaacaggcaacacctttggaggctggacaccccccggatggttgaacccccgccgccttaatgcatcctgtcggccgatccttaaaacgcagagacatgcctaaaaccaacaaacatgcaccagaaaacccgaagagggggaacaaacccgcatagagggcccccaccgagaacccagtttgtggacgaaaacccagtgtttgggaacgcccccccggtgggggagccccacacacaaggggctccaaaggaaaaaagggcccc

SEQ ID NO: 95388 - DNA, 449 bp, Zea mays
  unsure (1)..(449): unsure at all n locations
  Clone ID: MRT4577_186986C.1
agcaccattgatttcacaaatttgtcaacataagacattgcacatggagacgaacaagtgaatctggatccagatgatgacaacgattggttgcataggaacgagacattccaggcaaacaacattgtcacaagtaaagaccttctaacaccaggtgatgatgatgagggtgtcatattcgaagaggaggatgatgatgatgagaacgatggatacctattcgctgggcaatgcacttcctattccaacaattgatgtcattgaaggagctgcccttggtggtgggctagaactgggagacaatctaacctcttcaaaatccaacataaaggttgcaaagtagacatgccctatttctatagttcatgcttcatggatatgatggtcacacttcatggtctgcggtgctganggaacagtgatagattgatatgagggttgcaagtcag

SEQ ID NO: 95389 - DNA, 160 bp, Zea mays
  Clone ID: MRT4577_186987C.1
atattttttttttttttttttttttttttttttttcggtttaataagggaagcctaaggtacatgaactttttattggagacataacttcccgatacacacttggtttatagggccagtctaacctcacatgtcacctcttattgggaggatctcctttc

SEQ ID NO: 95390 - DNA, 611 bp, Zea mays
  Clone ID: MRT4577_186988C.1
tgcggaaggaggcgcacggaggcagctatataaagggagtggcctgacgagataagtaaatcctttcctttccctgcctctcttttttttttttttttgagagagagttttgaccacccaccacaccaccggagtaccggaccggggcggcgcgtgcgcagacaccgagatcgccagcagtgtgcgttgcgagcacagcgtggtatggtcctgcaactggcacggtagtgggttctgttcgccggcgccgcggtctcggtgggcgcgcgcaattggtgcgtgcatgagtacagcatgaggcgctgcgggccgcggctttcgtccactccgttcgcctgcctggctgcctgcacgtaattggacggcagtgtggcgcggccctgccccctgcacgttgggtgagtaaactcggggtacatgtgcgtgctggtttccaagaaccgagatgggcgtcgcctagctagcatagcacctgccctggattcgcttgtcccggttaagcttagcagggcctggatgaaaggacacgcacgcacgccactgttttattgggattgcttgtctaagttattggacaaattgagagcatctgttatggagattgtttaatc

SEQ ID NO: 95391 - DNA, 397 bp, Zea mays
  Clone ID: MRT4577_186989C.1
ctgcagagaagacaattgagctatcgtaaattcagactgcggtgtccaaactgcgggtaggttgtgtttcagggtgctttttaaagtgtgaatcacagttgagaggtgagactgactgaatatcagtggcagcatcaatggaagtcatggtatcagcagccgctgtgtagattacccaaaagtactggtacgtggtgactttttgtacagtgaattcttgaagaaaaaaaacggggttctagcatggcgacgtttgggcgctggacacaggattccaggaatagttcgagcctttcaggccaccgtttctgagcaagaagcgtttttggttctgcaatctgcatgttggaggcatcaaaccagcaaatggatcacaggggcacaaatcgggaacaac

SEQ ID NO: 95392 - DNA, 311 bp, Zea mays
  Clone ID: MRT4577_18698C.1
ttttggtttttttttagcacatgaaatctttgtccatattcaatgccgaaacaggccctctctactatttatgaatacacttgtatttgggcatatatctatgtacctgtcaagaacacaagacttttaatgtgaaacttacaccatgtattgaggttgatcataaaggagaagaaacaggtattactaatgtggttggggccctcagaacactgccagtggctatggaggcatgaaattccagcaaggccgatgattttgcgcagtatcccatatagctagaagtcgagggactattcaaatattacccc

SEQ ID NO: 95393 - DNA, 1426 bp, Zea mays
  Clone ID: MRT4577_186990C.1
cggcgtccttcttcctcaacgcgggggcttcggtggggccggactttggggacgacgtgggcaatggcccgcactcgttcctgcagggcaacaagcctttccatggactcatgcagctgcccgacctccaaggcaacggtgctggggggcccggcggctcaggccccagcctcttcaacctgggtttctttgctaacaatggcaacagctcggggtccagtcacgagcatgcaagccaggggctcatgaacaataatgaccacttcaacggcggagcaggtggaggcggcgggggttcggaggcttcggaggctgggattttcggcggaaacttcgttggtggtggagatcaagttccaccgcccgggctctacagcgatcaagcctccatgctgccgcagatgtcggcgacagctctgctccagaaggcggcgcagatgggcgcgacctcgagcgcgaacggcggcgctgcatccatgttccgaggcttcgtgggctcatcccctcacgtgcggccggcgacgccgcacatggaacagagcgacgcgaacctaaacgacctgatgaactcgctcgctggaggtggtgtcggcgccggaggaatgttcggcagcagcaacggcgccggaggcccggggatgtttgatccgaggcagctgtgtgacatggagcacgaggtgaagttcggccatggtggcggagacatgacgcgggacttccttggcgtcggcggaggaggcatcgtgcgcgggatatcgacacctagaggagaccaccaaagcagcagcgatatgagctccctggaggccgagatgaagtcggcctcgtccttcaacggaggcaggatgccatgaccgacccatcggtcgagcttataaacaagacataagctcgcgcacagtaagcaagagacttgatcaagcagatgcagtgagaagagtaaggtcatcgttatatagcgtagtagcaatcaatgcaagttatcaactgagtcgcatgagtgagttcatgcatggataaagctggctagcttagctagctttcatcatccgaagggaccttgggtgagagagaggcgtctttctctgactaatggagtaagctagagtgcgagttggacgcatgtgatgacccctttggtcgtggtgggggttggtgttcctgttggttttcccttgctttgtagttggataatctttgttggattaagtatagtttctggtgatagaaccaataaggatgtttgtagctagcttataatgagggcgtgaattgcagcttaatttgcttcactcccctcctattttttattaccttttctctttttgcaaagcaatattctccttacaatgtcattaatcgtgcaagctgaaattcatgctattttctaaaaaaaaaaaaaaaaaaaaaaaaaaaaaaaaaaaaa

SEQ ID NO: 95394 - DNA, 290 bp, Zea mays
  Clone ID: MRT4577_186991C.1
cggggccgaccacgcgtacgaaatctcccacctagggtttcggttttttgtattctacctccgcgaaaatcccaaggagcaggtttttgtaatttaggacccgccaccgagaaaagaacgaggttgacgacaacaagttctagtttgtctataaggaatacttactgtatttcttttaggtaaccatcattttttttttttttctttcaaattcatcttcctagatgggaccctccacttcttcctattttgcttttttttgtttataatgtttctcttttttctttttt

SEQ ID NO: 95395 - DNA, 235 bp, Zea mays
  Clone ID: MRT4577_186992C.1
agccatggcgggcaccttctgctttcttcttcaccagtcaaccgcccgcctcggcgcgtcgacgcgcctggccgccgccccgtcgcgcagtgcccagctgctcgtctgcaaggctcgtaagcaggaagccgcctgtggaccattagacgacgtttttgcgccgtgccgtgctcgtgcttctcgccggcgttactgtcgccgtcggcgccaaggtgggttccgtcgccgcggcata

SEQ ID NO: 95396 - DNA, 400 bp, Zea mays
  Clone ID: MRT4577_186993C.1
aaccattaaactgactgaaaaagtaggtgagatcgaagcaactcgcactgcacgccacacatacataatatagagttctacagtgcagtgtatatgtagatcgatgactgcctgctgctcctggcaatacaggggcgctgattcataaacttgcctggcttcatcactcgtgcagggcgcgggacgtacgtgtacgtccggtaggcttattagccagggcgccccaacttaactaaacttgctgcaggcggcggacatgctgatggggaatccgacggagacgccggacttgcccgggatggtggcgactgtgcccatgcagacgctattgacactgtagaagaggctctctgagaagcggcacaccggctggacggtccgcgctggtcctcgccgcgct

SEQ ID NO: 95397 - DNA, 165 bp, Zea mays
  unsure (1)..(165): unsure at all n locations
  Clone ID: MRT4577_186994C.1
acatatcatggggggggtgaccattttttttgtattgactatactagagagagagggggatatattgcanacatcgtacaaggtgtggtgctcttgggtggagtcctccgctcagttctgtgagaggttcatcgtctcgctgcaccttgaacccaaaaccgtgct

SEQ ID NO: 95398 - DNA, 468 bp, Zea mays
  Clone ID: MRT4577_186995C.1
accttatgtgcaaacaaactttattatagcctcaaattatcttgggaataatggcatatgccaaaacttctccctgctctcattgcctgctcctttcttacaagagcactcagttggcactagtttacacatatattagcttgtagccatgcaccactaccatcctaggtatctcaaccaagaacacttctcttgcaagaccagcatctctcatgtaaacagattatggttatccataagctcgtttgtttcagatcatcttgtggctggtcgcattatgggtttaatttgcatcacctgtcgaaaccttgttgtaatgccatcctcaattgattgacatagccctactggcaaggcatcctcaccagcatcatcgattgcagccttcaccagcttgtatgtatgttccctaggcacatgtccgctttcagccatatcaatcaagaattgcctcgcctcagaaacacg

SEQ ID NO: 95399 - DNA, 482 bp, Zea mays
  Clone ID: MRT4577_186996C.1
ttaaaaaaaaaaaaaaaaaaaaaaaaaaaaaaaaaaaaaaaaaaaaaaaaaaaaaaaaaaaaaaaaaaaaaaaaaaaaaaaaaaaaaaaaaaaaaaaaaaaaaaaaaaaggggggggcggtctgttttatcgaacctaactttccctcccctgccttgcaatgtttttttttttttttcgcctcacttaatttcattggcctgcccttttatttcccaccggtctggattaggcaaagccttggccctacctaattttatttggctttgcatccctttctcttttgcctggttggtgtaataagaggacgggcccgatccgtttttcctttccaaatatttgcccaattggaatggggaacgccccttcccctgtacctttaatttaggcggggggggtgtgttgtttccgcgcaacgtttccttttcctttgcccttaccctccgcccctttcctttggttcctttcctttctttccccgc

SEQ ID NO: 95400 - DNA, 339 bp, Zea mays
  unsure (1)..(339): unsure at all n locations
  Clone ID: MRT4577_186997C.1
cgcgagcgccgcccggnanannggggggggttttataaggaaaccggccggtactcaaccagaccacagttgaggaaggccaacgggaaacaccaacaggaacaggaacaggggggcacaaaagcaggagaacaacaaaacgaaaggacgacgagtgaaggaaaggacacacaaaaaagggccctggacaagcaaggcatgggatggcatgaacgagggagaagtttggctacaacagcaccccggcaggcaagggtgcatcccgcagaggaacgccaccaaccgccagcaagggagaagcccacaaggggagggcgacacaaaaaagccgcaagagga

SEQ ID NO: 95401 - DNA, 653 bp, Zea mays
  unsure (1)..(653): unsure at all n locations
  Clone ID: MRT4577_186998C.1
tgttcatctatttataggcaagggacgcagcccgtgtagaatacatttgtgccctttacatttatcaataactctatagtaattctccggggtctaatttgccttttcatctttaagtcggttccccttctctgctatcatgccgaagcttttctgcgcacagcttcgtgatcatcttatccttcatcataatcgctttccgtctcgctcaagcttcgtcctcaccatactcttgtatactcatgacccgattccgaagatacctgttcacatatttcacttagaaaacattgttaaatcatgtttttgaggaccttcggaagccgaaggcccccaacagttgcccctcgcaatattaatttgctagaatgataaattcatattgcgacatggacgaaggccttaagccgaaggtccgaaaaaacaccttccctttgctagaatagcaacagtcattgacaagcgggaccctccagttttcaacgcactaggtgtataaataagagcttaccacgagtttatttggcacgctttcttgccatctgctcttgctcactcaacttttagcctgtgcgcaacaacacttgcttggctntttaaatttttaagcttcggatttgagagcactntctcagcgtttgcgaagatgtctg

SEQ ID NO: 95402 - DNA, 471 bp, Zea mays
  Clone ID: MRT4577_186999C.1
tgtctcggctgataactggcacctgcgtaatgtgtaagagcaaaaataactcattgttttaaaaagtcatgaggtcggtgcatgccatggttggtaagaatcttgacagggtcggacagagtagtcactcgaaagcgctgcctgaccacatatatgggatcacgaacaccgtgcgatcatgtacgatcctgcctctgacacgggggacagctgtatagtggctcatcaaggaaggttcacctagcgtgcttaagagcttcatgttcttcatctgccgagaggacacgatttacatgcatctcataggccgtaagaaggtgatctgaatatacttactgacaggtttaaagggcgatggtcggcctctctatggcactggaagctactgcttgccgttgcgatctagatcaactagggttacgcacgcatgcgagtaacgtcttagggcttctatttggttacctgcactca

SEQ ID NO: 95403 - DNA, 378 bp, Zea mays
  Clone ID: MRT4577_18699C.1
gggagcaaagacaaaaaaaaaaacctcccctccgcggagggggggcgactcagttccaaattccgaaacggcacccccgaccccccggaggggaggggggaaaacctttctttctacaaaagaacaaggcaaacccgggggcccaacccccaggggggaggggggacgctaaaaccctcaccccaccccggggccccaaggcagggaacacacgggcgccctgagctgggagggcctgcttggcaggggcaaccgggcctggggttattgggggcaaggccgggagggccgccctccgggtttaagatttccaagaaaccaccgccgcaccgccgacgggcaaaagggggtcacattgtccgcccccccacccatttt

SEQ ID NO: 95404 - DNA, 629 bp, Zea mays
  Clone ID: MRT4577_1869C.1
atgaattctagcttttaaatttcataagttatggctgatttcttgttacagacttcatcttgtcactgtagtgttatcctgattattaagcttattattcgtccgaacaacatccatgctttggctattatgacttgttgataaaatggccattcagaaaagaaatagtcaatcatttattcatttaggtcaaatataatcaaatgctttttagaactgttggtcatcattcttatatcatcagtgttgtactgctgttcaatatcttgttaaggacactatttttgcttttagtagcttgttgctagctgtaaggatggactcttgatgtcagcactctcatgtctttactgattaggttatgaccagtaatattatttcttgtgcaagacttttgactttcggtaatgtgagagatcatttgacggcatgagtgctgaatcattacaaccacacaattggccagtattctcatccagggcatgagaaaaaggtaaatacactagaggaatctgtttagaatctattttttgtgttgattgttgctacatatgcagtgtattagtttcctgcatcattctgccatctttgggttttgacgtctcaattctagaagaagcagattatta

SEQ ID NO: 95405 - DNA, 1572 bp, Zea mays
  Clone ID: MRT4577_186C.1
cttgggaccctccggcctccggaggcatttttccaattcgttctctctcttatttcagaattactgcgggagtctctgctccctgctcgctcctagtccctcccgggctcccggcagcggcggcgcaccttatggcgacttgagctctctgggcgacgtcctcgggacgggcagactgtaattgaaatgaaaaggataggtagatctagctaattcgataacaaggcaaggtgcgctcctatggaagtggaagaagcaggaggcgaagtggagatcgccggcaaggacgaggcggaggcggagtaccattcgcgcgatttcgaatgggaggacctcaaggaagaggtggaatctggacctgtcttctcctaccacctctccccctttctcgaccccgccgccagtaccacctcgccgccgcagccctcgtcggaggcctggagaagcttccaccgtcgccatgcgtccggaaaattctttaaggaaaggagatatttgcttaaggaatttcctgaactttgtagcagcaaagatcatgccaaggttttagaagtggggtgtgggaatggaagcactgctgtttccattctacggtctagtgaaaggatcactgtctttgcttgtgactgtagtaaagacactcttgagaaggcatatgaaattatatccaatacaaaagggattaatatcaaggataggttccacccctttttaatggatgtttctaaagaaactttcccagattggttattttgcaaagcctgtcaaacttcgctgggaaaagctgctgcatctttacttgatccaagtcaccatggaattagagaagagcacccagtcttccttggagagaaccaatgttgtgctggtggcatggattttattaccatgatattcacactgtcagccatacccttcgacataatgccaactaccatagaacaatgtgtttctgttctgaaaccaggcggccttcttctttttagggattacggtctttatgacatgacaatgcttcggtttttacctcatcaaagagtagggtttcgggaatatatgcgatcagatggtaccttttcatacttcttctcattggatactgtgagagaactctttcgtgctgctgggctagtagagttggagctggaatattgctgtgtcaagtccgtgaaccgaaagaatgggaagacgatgcggcgggtatgggtccatggcaaattcaaaaaaccacctaggtgacatcagttagggcttgttcgtgttcagctcaatccatatgaattggatagaattgtgtggatttaaatccatagcaagtcaaaatctctactaattttttccaatctcatcccaatccatatggtgtagaaataaccaaagggcttagctgttagttttgctcggccactttgttgttgcaacaaagcgttgtaacagttttgtagccacaaacttaaatggcattgaaattatgccctcccccacccccaatagccattctccaaccattctccttaaaatttcaccctttatcagtactttcgattatatttaaaaaaaaaaaaaaaaaaa

SEQ ID NO: 95406 - DNA, 419 bp, Zea mays
  Clone ID: MRT4577_187000C.1
gtcagctgacgcaaactgggagtgcaggtatcacgacatggcagggcatggaaagatccatcaaccgattaacacctacctaaaccgtctcctaagaaacctctctgtagacttacagcactttagtccccccatcttttggaggcggggagtccccggaacattctacattcacggtctgcattcacttccgttcctagcaagacaccagtcaggactacggtggtgatttgactgttggcagacctgatttgcacaacctcgctaccgtcgaggcgtggaaaacgatgactttggttacatacccggccacaagactagacgagaccagtgctgaggttatccatactggacagttttgttgttcggtagacagaataccattggctcttggcgaggacgttctagtcattcatcac

SEQ ID NO: 95407 - DNA, 367 bp, Zea mays
  Clone ID: MRT4577_187001C.1
ttccacgcgtccggttaattttgtaaatgggagagcagttgattgccttattacccttaatatcttatcttcttcccctgcttccaatgtaactgttgactttctggcaagctttagctattatgcatttcgcttgcaaaatggtgctgtcttcctgaagttttagcaaaatgagtgccattgtttttcagagtattagacatttgactggactaataaatgttatcattcttgtgagagaactccccctgttaaaagtaattttattatattgctgctaatgtgtttaggagctctaaccctatttcaactccattagaaaagttgaaaatttcaaactaattttatggtttttgggttatcaata

SEQ ID NO: 95408 - DNA, 229 bp, Zea mays
  Clone ID: MRT4577_187002C.1
acgcaccgacacggaccgggaccgtggactgtcgagacgcgtgggcggacgcgtgggcgcttacaccatcgccatgagagcagagagagatcaggtcgtcgagagagaagaagggggggatcaggatccgccgccatggatcctggctgggtctcgagcattggtggctggtgctgcgcagatttctcgccggttatgatgaagtgctgcccagccgtgttgtatcgta

SEQ ID NO: 95409 - DNA, 449 bp, Zea mays
  Clone ID: MRT4577_187003C.1
ttttgttggttacttatccctccaaatttttttaggggcaagtttgtcataccacatctcaaattacacctaactggagggggatgccaaaacaaacgagtctagataagggcatgcttaattgaggatgccatttaggtgcagccacaaaggccgctagggggaacaccactataaatctatccaacatttgcagggataccttctttggtagaaaacataaacctgcatcctgaggccccaggttgtcgtttttcaaaagtctagggtacatttttcaagggcccaaaagcaccttttcagggtgaaaccactgccttaacagagggtattatgaccatttgtattagggcccgcagttgggacaagaccttcctattatgtaggagattccactgtcttcggggtggtcctaatatagtaggagaggggtctgactttttttttct

SEQ ID NO: 95410 - DNA, 899 bp, Zea mays
  unsure (1)..(899): unsure at all n locations
  Clone ID: MRT4577_187004C.1
tcgaggccggccggggatgcaaatacaaggtcggttgcatggtgtgtggacatgcttgaacatgaaagcttgcaagttagtccaaggtttaagagtttgtttgatcatgttttcatcgatgagaagtggtttttccttactagaaaatctgagaggtattatttgcttcccgatgaggacgaacctttacgtacttgtagaagtaagaacaacattcctaaactcatgttcttgtgcgtgactgctcgaccaagatttgagaatggagtttgcactttcgatgggaagattggatgctttcctcttgttacttatgaacgtgctaaaagaagtagtattaatcggcaagctggaacattagaagtgaagcccatcacttccgtcactagaggtgtcattcgggagttcatgatagataaggtgttgccagctattcgagcaaagtggccacgcgaggatgtcaacaatccaatctacatacaacaagacaatgcaccatcccatttggaacttgacgatccactattttgtcaagctgcgaagcaaggaggttttgacatccgacttatttatcaaccacccaactcacctgatttcaacatactagatttgggtttctttcgtgccatacagtctatccaatataagaaggtcgcaaagactgttgaacatctgattccagtcgttcaagaggcattcaacgaatattccccaaaaaaaaacaaacagaatttatgtgacacttcaactagttttgaaggaatccatgaaggttgcaggttcaaacaaatacaaaattccgcatatgaaaaaaggacactagagagacaggncgacttccattgcagatcatttgtgaggcatcattggtagtcgatgctatgataaagctagctgca

SEQ ID NO: 95411 - DNA, 217 bp, Zea mays
  Clone ID: MRT4577_187005C.1
ggacggtggtttttttcttttatttttttttttttcagtcactaacatgcatagcaagaaccgtagcgaaagtaataaaaaaagaagaacaaaaatggcgacatcgacgtctctctctctctcgctctctctttggtacacacagcacacaggaggttacttacaacatagagtaccagactagctcgtatcatcactctccaagaactcggcaaat

SEQ ID NO: 95412 - DNA, 300 bp, Zea mays
  Clone ID: MRT4577_187006C.1
cctgtcaagggcctcgacacacacacacactctctcgcttgacctacccccctccgccccccgccgggcctgcagggtgttcgacgcttcgcccgcccgcccgagcgccgccacggcatggcttcctccatctccgccgccgctaaggcctccgcgggctttgcccaaaagaaggagctggccgtgccggcgccgaaccgcgcgggctggagccgtaggaccaagccgtgccgcgtgcgcggcgttgtgttgcccgcgcgcacctactgcgcgccgtggtccaccggcgtcgcgaagacc

SEQ ID NO: 95413 - DNA, 656 bp, Zea mays
  Clone ID: MRT4577_187007C.1
agcttcataaaacttaaatatcaatggcacccttaaacagcgagccactatttgaatcagctagtcagcatccataatgatatgttggcatctcataatgcgactcacgattaacaatcttctatcatatcgtcatcctcttcagaattatttccatcagcgactcccatgggcgagcaacctacgccgtggggcaagcagctgcttctatgcccaccattacgaggaccaatccatctctccaatggtctgaattctgtgaccaagtcagcgaagttgcaaaaaccacacgtccttgaacaatcaaatctttccttcagaatgtggtccttattggatcgagatgattgatcagtttgccagagcctcgggctccggattgtatgccaccttgatggtgtgacatgagcatttccaaaaagaactccccgtgccgcaacagaggcagcaatgagctgtgctatgttttctgagttgtatgatgcgactggaccaccagtaagaagacaatccgcctcacccaaatatgataccacagcccatgcatcatcaacagcttcactgtcaatgaaatcaataacattttcatacagaaaatccacaactgttcgtacttttccgtgtgcttgtgaaagaatcttttctggcacatccgc

SEQ ID NO: 95414 - DNA, 1931 bp, Zea mays
  Clone ID: MRT4577_187008C.1
cccaccttctctgccgcctttatacgtgctgccgtggcaacacgagtgagtgcagagtagtagaactgagcaagaccccggcccggtcgactgagctgatcagcctgcccaggccatgtgcagccccaacatggcacgttctccctcgctcctctgcgtacacacagaaacctctcctccctcccctctcgcagctagcgtgccggcctgccggtgcccttctgcccatctggcttataaataggcccacacggcaccacggccaccaccaccacccaccagtccaccaccactgctcgcactcactccaccgctgcccacttcttgtttgtattgtatccagactccagaggaagccgagagggccaatgaggcaaggcatgagctccccttccgccgccgcggcgctcgtgctcctcctggccctgctcgccggaggccagtgccgagaggcccagctcgacgccgcggacgccggcaccggcacggagaactacaccgccagcgacgccgccgtgtactggggcccctggcagagggcccgggccacctggtacggccagcccaacggcgccggccccgacgacaacggtggcgcgtgcggattcaagcacaccaaccagtaccccttcatgtccatgggctcctgcggcaaccagccattgttcaaggacggcaagggctgcggctcctgctacaagattcggtgcaggaaggacccgtcctgctccgggcggacggagacggtgatcatcaccgacatgaactactacccggtgtccaagtaccacttcgacctcagcggcactgcgttcggcaggctggccaagcccggcctcaacgacaagctccgccactccggcatcatcgacatcgagttcaccagggtgccgtgcgagttcccgggcctgaagatcgggttccacgtggaggagtactcgaaccccgtctacttcgcggtgctggtggagtacgaggacggcgacggcgacgtggtgcaggtggacctgatggagtccaagacggcgcgcggcccgccgacggggcggtggacgccgatgcgcgagtcctggggctccgtctggcgcatggacaccaaccaccgcatgcagccgcccttctccatccgcatccgcaacgagtccggcaagacgctcgtcgccaacaacgtcatcccggccaactggcgccccaacaccttctaccgctccttcgtccagtacagctaaccgatcgggatccctgccctgccctgcccgcaattggagctggctggctggggcgctactcggctcggtcaccatcgtctacagtactatactatgctctctactaccactagactgctgctgttactactagtctactaccaccaagtacggcggaacggaacagctagtcgtcgtcggcggccttgggaggggaggtgtctccggtcaccgtgccgttgcagttgtatcgtgatcatggtcctgggagttgttgcatgcatccggggcgcgctttttaggtcaggcgtcgtgtgcgatgtttgtggggtcaggctggcatgtcatgccgtgcgtgaccctgattgcgagccggcaagcaagcaagaaaaaaaaactaaagccgtgtgggaaaatggaggaggcaggcgtacaagctacgctctcccgcccactgttgcttttataatttatcatcatcatcatcttcattccgatcggtgattaatcgaaaagtatattgtaatgtataaacgccatgtttcctttcgtcagtgcctttttttcctggttgtggatgttttgtttgagcattcagccttgctgtgctgaagccaaacgcaagtaatgtgctgaagccaaacgcaagtacccaagtaatgtacataatgagaatgtgaaagaaaaaaaaacgatagaaatataaactcccgtttgacgatg

SEQ ID NO: 95415 - DNA, 345 bp, Zea mays
  Clone ID: MRT4577_187009C.1
atgctccacgacatgatctgctgaggagaggttgatgaccacggcaccatcgattaccccgagccgtctcataccttagtgggcgcaggataaactgcaccggctctcacgaacactgaaggagggcttgctacgagtgtgaataacaccacaacgtgtctcatgttggtcgcctcactccgacatgacataacacatgttcggccagaagctaactgatgaacatgcgtgcaagataatcccacatcttgatgccgactgagatgaacaaatcatcttatcggagcttgtcaagcgcctgacatgcatgtgatccacacaaccataatctcaacgataagaaga

SEQ ID NO: 95416 - DNA, 1090 bp, Zea mays
  Clone ID: MRT4577_18700C.1
cgtctggtacccggtacttttttttgtctagacttggcgtcgcggaccgcgagggcgggccggggtcggatacgtctcatccgttgtgtcgtcttttttttcggtgtcgcgagctcttcctccttccgcttctcttcgacagaaaactagggttttgctcttggaatctctctccccgctgccgccgccgccggacagtgcaccgacgatacgacctcctccttcctccgatctggcctttttaatccgcggatcccgtacaagatgcttcccctctcgctcctcaagaccgcccaggggcacccaatgctcgtggagctgaagaatggtgagacgtacaacgggcatctggtcaattgcgacacgtggatgaacatccaccttagggaggttatttgcacctcaaaggatggtgacaagttttggaggatgccagagtgttacattcgtgggaacaccattaagtatcttcgagttcctgatgaggtgattgacaaggttcaggaggaaacttccaaaagccggtcagataggaagccaccaggtgttggccgcggaagaggaaggggggacgttggtgctaaacctggaggcagaggcatcggacgtggccaagatgatggaggtagaggcagtggtggccgaggaaggggtggagttggtgccaaaggtggtaacaaaggtgggggccgtggccgtggctaaatctggtggacacatgggagaatgccgctttttaaggcctgtaattgtgttgcatagattgcttaggacatgatgaatgaaccgagttggctggtcggtttgggggcaaaaaccagaatggttcctgtcttctggacattgaggaagcggcggcagtcaggcttgtcgctgttctcaaaaacggtttggttgatatcttatccaatctgttcagactgttcgttgttcgtagttgttccccctaaattttccactctatatgctattatacaccctctctttcttcctgcaaaaaaaaaaaaaaagtggcctctactatgtctcacactacacagaatattcatataaattcaacttccatcaactaccttcttacggtaggttc

SEQ ID NO: 95417 - DNA, 1149 bp, Zea mays
  Clone ID: MRT4577_187010C.1
attgggaccctcgaggccggccgggaccacccaccagtccaccaccactgctcgcactcactccaccgctgcccacttcttgtttgtattgtatccaccagaggaagctgagagggccaatgaggcaaggcatgggctccccttccgccaccgccgcggcgctcgtgctcctcctggccctgctcgccggaggccactgccgcgaggcccagctcgacgccgccgccggcacggagaactacaccgccagcgacgccgccgtgtactggggcccctggcagagggcccgggccacctggtacggccagcccaacggcgccggccccgacgacaacggtggcgcgtgcggattcaagcacaccaaccagtaccccttcatgtccatgggctcctgcggcaaccagccattgttcaaggacggcaagggctgcggctcctgctacaagattcggtgcaggaaggacccgtcctgctccgggcggacggagacggtgatcatcaccgacatgaactactacccggtgtccaagtaccacttcgacctcagcggcacggcgttcggcaggctggccaagcccggcctcaacgacaagctccgccactccggcatcatcgacatcgagttcaccagggtgccgtgcgagttcccgggcctgaagatcgggttccacgtggaggagtactcgaaccccgtctacttcgcggtgctggtggagtacgaggacggcgacggcgacgtggtgcaggtggacctgatggagtccaagacggcgcgcggcccgccgacggggcggtggacgccgatgcgcgagtcctggggctccgtctggcgcatggacaccaaccaccgcatgcagccgcccttctccatccgcatccgcaacgagtccggcaagacgctcgtcgccaacaacgtcatcccggccaactggcgacccaacaccttctaccgctccttcgtccagtacagctagctgatcgggatccctgccctccccgcaattggagctggctggggcaaactactcggctccgtcaccatcgtctacagtactatactatgctctactaccacaagactgctgctgttactactagtctactaccaccaagtacggcggaacggaacgtctagtcgtcgtcgtcggc

SEQ ID NO: 95418 - DNA, 456 bp, Zea mays
  Clone ID: MRT4577_187011C.1
ctagcttttggtgatcaggagtacctgcctgtctagaatatatactgcctttgataatgaaagcttaatgttttatatatttggatttacaggaactgatggtcctctaggaaagagactaaactacacacatgcctgctaagtcatagggtggaagcctaagttctctacctttggtgattttctagagagcaggatgtgacaaactgcagactctatcttttgatgatcaatccaattaattcggaaaccacaatagagaccatgcataggtgccttacggaattattggtgtacatggacagttcatactcacctgatctgagcagagtgaacattcggctatctcttcatatctgacattgacaatagagatgatcatttattgaagtgtcttaacacactgttctgatacactgtcatatacacacttacgagagaccttagttcttttta

SEQ ID NO: 95419 - DNA, 141 bp, Zea mays
  Clone ID: MRT4577_187012C.1
gtcacttgtatcatgctccatgatccaagttgtagcaagataccgctcactttctacaatgtgagaaggcgccgctcgaggaagcaagaggtatggcctagggcaggacctagcgcaactgaagggccctgagcaataata

SEQ ID NO: 95420 - DNA, 364 bp, Zea mays
  Clone ID: MRT4577_187013C.1
cggacgcgtgggcggccaagagggccgccgccgccaaaggcgacaagaagaagggtgaggaggctcatccgagctgatcgccacacatcagatcgatactcctgtgagctgtgaactttgtgatggtgtggatactactgatgacaagtactacatggaaacagactcctctccatgcactgttgtactcagaaattgagaggaatgtttgatctcttataacttctgctcgtcgtgtgtagcccctgtcactgttgtgaactttgtttgtaggttttgtcttgtcggtgcaaatggaggcgcccttgagcctcttatatgtacacagtttatcaataataatgaataatatagtcccttcgtt

SEQ ID NO: 95421 - DNA, 323 bp, Zea mays
  unsure (1)..(323): unsure at all n locations
  Clone ID: MRT4577_187014C.1
acgcagncaggcaccgngnangaaancnaacaangcgcncancgncanccccggcaccgncacccnnggagcngnaggcanaggcnnggnnangccggnacggccgggccncnngcggganancgnccagggcgacagcagcgccaggcaccanggcgngcngcnagcgcnanangcgnngangcaannncnangcgcacccgnncncggagcacngnccgaccgcnnnggccgccgcccagnccggcncgcnncgcnacnnggagccacnancgacnacgcgancanggcgaccacacccgnccggggganccccgacgccg

SEQ ID NO: 95422 - DNA, 1254 bp, Zea mays
  Clone ID: MRT4577_187015C.1
caggtctcaagtctcaactcttgagcaggggaaacgagagatccttggagtcagcaatggagtctaccgcgctaatgaccgcgagactaccactgctgacctctggctcccgttccaaacccctcccctttgcttccttcaccacggcggcttgccgtctcgcctccgccccctgctccggcagcggcagcgtcgtcctgctgtcgcgccggagccgcgattatgctggcgttggttccttggtctccgccgcggcggctcctggggatacggcggacgccggatccgagtccatcctgctcagcgtccaggggatgatgtgcgacgggtgcgccgcgagcgtgaagcggatcctggagagccaacccgaggttacttctgctaccgttgattttaaggaagcaagcgcagtcgtgtggacaacagatgaggccaaggggacacaaggttggcagaagcagtatggagagaagcttgctaaacaccttggcacttgcggatttgagtctcgcctacaagctatgtgcaaacgatgatacagttattaaagttgactataaagtggaaactgccatgagaaaacgtctagctccggatccagatgttttttttttcacgagaagagataaagatgtgtgtttttttgctggatttggtttagtgtacaaaatggatctaaatggaatcagcatttggtcataaaatgatgagtaacgcttacttaaatcaacaatgcaaattgctcttgaaaatacgcaaaactgatttttattctgtatatgatgttgaggatgtctgaggcatagttgtaaacaacgaatagttgaggcaggttttgtccggatattgactgtaccacttcctcagtattttgaaatcatagttcaactcttgagcctgccgtgagccagtgagctaactatacctgtttctctttcacagagtaaggtgaagccgaaccgatattgaagttcagatgttcaccttaatgatcaatttgtaccagcatatatgttaaatattttgtctctgtggattgcagttaggagtagtctcggtgctagtctggtggcataatactacatacctacctttcacatgatctttagctaggttgtttcgaataggatgatgtttgtcctaaaattgtaggagtaggccactgttgcgagtgaggagtttgcggctgggctattgttaaatccggtcttcccgttgcttcgaagatataaagtgatactacctctataactc

SEQ ID NO: 95423 - DNA, 715 bp, Zea mays
  Clone ID: MRT4577_187016C.1
cccacgcgtccgcccacgcgttcgctcttgagcagggaaaacgagagatccttggagtcagcaatggagtctaccgcgctaatgaccgcgagactaccactgctgacctctggctcccgttccaaacccctcccctttgcttccttcaccagggcggcttgccgtctcgcctccgcccccttctccggcagcggcagcgtcgtcctgctgtcgcgccggagccgcgactatgctggcgttggttccttggtctccgagtccatcctgctcagcgtccaggggatgatgtgcgacgggtgcgccgcgagcgtgaagcggatcctggagagccaacccgaggttacttctgctaccgttgattttaaggaagcaagcgcagtcgtgtggacaacagatgaggccaaggggacacaaggttggcagaagcagtatggagagaagcttgctaagcaccttggcacttgcggatttgagtctcgcctacaagatgatcaacgaacgatcacgtgaagttacatgctagaagccaaagctatgtgcaaacgatgatacagttattaaagttgactataaagtggaaactgccatgagaaaacgtctagctccggatccagatgttttttttttcacgagaagagataaagatgtgtgtgtttttttgctggatttggtttagtgtacaagatggatctaaatggaatcagcatttggtcat

SEQ ID NO: 95424 - DNA, 488 bp, Zea mays
  unsure (1)..(488): unsure at all n locations
  Clone ID: MRT4577_187017C.1
cgggtcgacccagcgncctgaaaaaaaaaaaaaaaaaaaaaaaaaaaaaaaaaaaaaaaaaaaaaaaaaaaaaaaaaaaaaaaaaaaaaaaaaaaaaaaaaaaaaaaaaaaaaaaaaaaaaaaaaataaaaaaaaaaaaaaaaaaaaaaaaaaaaaaaaaaaaaaggggcggtctttttgttttttttcagagcaaaactaacccaatttttgtggggggggtgtttttttttttttggcaccttataaaaaattgaagtgccggggtttttaaaactttgtggtttgtgaaaaaacttgggtttttccatttttatggcttttggaaaaaatccttttttttcctgttggttttttgggaagagggcccaatggaatatcctttttcaaggtttccctaactctatggggtaagtggtcccccccttttggggcgtttttatgggttgggtgtgtttgtttttcctcttttgctccctttttttttt

SEQ ID NO: 95425 - DNA, 721 bp, Zea mays
  Clone ID: MRT4577_187018C.1
cattgggtacctcgaggccggccgggctaaactagagtctcaggtctcaagtctcaactcttgagcaggggaaacgagagatccttggagtcagcaatggagtctaccgcgctaatgaccgcgagactaccactgctgacctctggctcccgttccaaacccctcccctttgcttccttcaccagggcggcttgccgtctcgcctccgccccctgctccggcagcggcagcgtcgtcctgctgtcgcgccggagccgcgattatgctggcgttggttccttggtctccgccgcggcggctcctggggatacggcggacgccggatccgagtccatcctgctcagcgtccaggggatgatgtgcgacgggtgcgccgcgggcgtgaagcggatcctggagagccaacccgaggttacttctgctaccgttgattttaaggaagcaagcgcagtcgtgtggacaacagatgaggccaaggggacacaaggttggcagaagcagtatggagagaagcttgctaaacaccttggcacttgcggatttgagtctcgcctacaaggtaagaccgactagcaggtaatgtaaaataggggacacgaaactatagatgacactgtttgacattgtttatagaatgaagtttgaaatagagaatgagatagagaatggaataggagatctactggagataacctaatggatgcatttatttttctcaaaa

SEQ ID NO: 95426 - DNA, 284 bp, Zea mays
  Clone ID: MRT4577_187019C.1
ctcctatttattttttttattttttttacccgcccacccaaaacggggaggggggccatttctttcataaaacaaaacaaacccaaagtcggaccggggaaacaactaccatcgacccccaaacctagctgatggaagcatgggaacgctggaaccccggaggaaacacagcctaaccactgccacagagcgaccctgcaaacaaaaggacagttgggacccaaccaccaccacacgaaagaatataaacccttgggacaagggaaagcaccagcgaagataaa

SEQ ID NO: 95427 - DNA, 1005 bp, Zea mays
  Clone ID: MRT4577_18701C.1
ccggccgggagaatattattattttatatggtgttctaggatttactgcaaaaaaaaaaaaaaaaaaaacgtctggtacccggtacttttttttctctagatttggcgtcgcgactcgcgagactcctcgcgcttctcgccgagagaaaactagggttttgctcctggaatctcctcccccgcagccgccgcccgaccgtgcgccaacgatacatccttctccctcctccgatccggcctttttgatccccggatcccgtacaatatgcttcccctctcgctcctcaagaccgcccaggggcaccccatgctcgtggagctgaagaatggtgagacatacaacgggcatctggtcaattgcgacacgtggatgaacatccatcttagggaggttatttgcacctcaaaggacggtgacaagttttggaggatgccagagtgttacattcgcgggaacaccattaagtatcttcgagttcctgatgaggtgattgacaaggttcaggaggaaacttctaaaagccgatcagataggaagccaccaggtgttggccgtggaagaggaaggggggacgtcggtgctaaacctggaggcagaggcattggacgtggccaagatgatggaggtagaggcagtggtggccgtggaaggggtggagttggtgccaaaggtggtaacaaaggtgggggccgtggtcgtggctgaagctggtcgacacaagggagaatgccgctttttgaggcctgtaattgtgttgcatagattgcttaggacatgatgaatgaaccgagttggctggttgtattggggcacaaaccagaatggttcctgtgatctagacaccgaggatgcggcggcaaccaggcttgttgctgttccccaaaactgtttggttgatatcttgagtatgatccaatctgttcatttgcttagagttatcccggttagatgactaattgattgatgttgcccattattttgctagtggcgcacgttgtgctgag

SEQ ID NO: 95428 - DNA, 730 bp, Zea mays
  Clone ID: MRT4577_187020C.1
cggggttttaggctaatactccctcagttccaaattaataagttgctttgactttttgggtacatatagtttgctgtatatctaaaagatacgttataaaagtaaaaaatggcggaagggtctctagtgtaatggttaatgtttccaagcagcacttccaggccctgaattcgattcccctcggggatgaatttcgggcttggttaaaaaaattcactcattgtgtcccgtccgctcttggggatcgatatcctgcccgctgcgcgccaccctccggttgagccattgcagagtgggcagttgactcggctcgttagtgaggcatttgcagctgcatttatattcgtcatatatcttgtgggttctacttttggagcacatgatttattgtatttctgacattttcaaactaaaatgcagattgctggtaagctggtaaatatcaagttgcagattcggcgttctcaacgtttggtcaaagagtcaaggagcatatgtacatgtgaatgtagagttgggaacaccacgagaatgctttgaccaatatttttcatttgtgcctttaaacttttgtagcatagccgttttttgttaccaatgaggcgagctttgagtttggcaaaatttgccgatgtatttgtaaatgcaaccgagctggaaagagttgtgatactgtaaaacagagaaatgtaaaaaaaatcaagagcttgaagtagatatttatctccaa

SEQ ID NO: 95429 - DNA, 702 bp, Zea mays
  Clone ID: MRT4577_187021C.1
aattcggcacgaattcggagtggtggtggtgctcgtgggcacgcagcggagcaccctgtacagcagcagcgctgcggcagtagagagtgccattggtggagctggtaactagccctcccccctccgttcccgtcccgcgcgcagccgtctgccgagcctgctcagtgcccatcatggtgaggaagaagagaactggccctggtagctctggagaaacttctggagagtcttcaggagcctctggacaaggttcctcacagcagcctgagcgaactcaacaacctgggggaggacgtggctgggtgcctcaacagggtggccgtagtggtgggcaacaccagggccgtgatcgacattatcagggacgtggaggaccagggccacatcaccttggtagtggggcacctgagtatcgcccgcgtgaataccagggacgtggtggtgaatatcagggacgtggtggtggccgctccagaggtggaatgccacagccatactatggtgggcataggggaggtaatgttggacacaatgttcctccaggtccatccaggacagttcccgagctgcaccaagccccatatgtccagtatccagccccggtggtttcaccctccccatcgggacctggctcatcctcacagcctatggcagaggtgagctctggacaagtccagcaacagtttcagcaacttgccgatc

SEQ ID NO: 95430 - DNA, 968 bp, Zea mays
  Clone ID: MRT4577_187022C.1
ccggccgggaagcccttcttccctccagagaggcagagagagactcgagtactagactagagtctcaactcttgagcagggaaaacgagagatccttggagtcagcaatggagtctaccgcgctaatgaccgcgagactaccactgctgacctctggctcccgttccaaacccctcccctttgcttccttcaccagggcggcttgccgtctcgcctccgcccccttctccggcagcggcagcgtcgtcctgctgtcgcgccggagccgcgactatgctggcgttggttccttggtctccgccgcggcggatcctggggatacggcggacgccggatccgagtccatcctgctcagcgtccaggggatgatgtgcgacgggtgcgccgcgagcgtgaagcggatcctggagagccaacccgaggttacttctgctaccgttgattttaaggaagcaagcgcagtcgtgtggacaacagatgaggccaaggggacacaaggttggcagaagcagtatggagagaagcttgctaagcaccttggcacttgcggatttgagtctcgcctacaagatgatcaacgaacgatcacgtgaagttacatgctagaagccaaaggtaacgctacaagaaagtgatcattacagccgtagaaagagaaaatgtgataaagttttttttctctcgaacgtacaagaaaactactgactcattatattaagataggaaaatgtgacaaagttcatgtgctcttcaatctttcagctatgtgcaaacgatgatacagttattaaagttgactataaagtggaaactgccatgagaaaacgtctagctccggatccagatgttttttttttcacgagaagagataaagatgtgtgtgtttttttgctggatttggtttagtgtacaagatggatctaaatggaatcagcatttggtcataaaatgatgagccccgcccactt

SEQ ID NO: 95431 - DNA, 3894 bp, Zea mays
  unsure (1)..(3894): unsure at all n locations
  Clone ID: MRT4577_187023C.1
ctgctttctccagtgagccgcacccgcactaccgctgacgctaattaaccacaagcgaccgtcgccttcccccacctcctcccttcctcaaaaaaaggcggaggcgggagtggtggtggtgctcgtgggcacgcagcggagcaccctgtacagcagcagcgctgcggcagtagagagtgccattggtggagctggtaactagccctcccccctccgttcccgtcccgcgcgcagccgtctgccgagcctgctcagtgcccatcatggtgaggaagaagagaactggccctggtggctctggagaaacttctggagagtcttcaggagcctctggacaaggttcctcacagcagcctgagcgaactcaacaacctgggggaggacgtggctgggtgcctcaacagggtggccatggtggtgggcaacaccagggtcgtgatcgacattatcagggacgtggaggaccagggccacatcaccttggtagtggggcacctgagtatcacccgcgtgaataccagggacgtggtggtgaatatcagggacatggtggtgagtaccagggacggggtggtgactaccagggacgtggtggtggccgctccagaggtggaatgccacagccatactatggtgggcataggggaggtaatgttggacgcaatgttcctccaggtccgtccaggacagttcccgagctgcaccaagccccatatgtccagtatccagccccggtggtttcgccctccccatcgggacctggctcatcctcacagcctatggcagaggtgagctctggacaagtccagcaacagtttcagcaacttgccgatcgtggtcagagttccacgagccaagaaattcaagtggcaccagcatcaagcaaatcggttcgattcccgttacggcccggcaagggcacttatggggacaggtgcattgtgaaggcaaatcannnnnnngctgagcttcctgacaaagaccttcaccaatatgatgtatctataacacctgaggttacttcacgtggcgtcaatcgtgctgtcatgggtgagcttgtaacaatatatagacaatcccatttgggtgggcgtctacctgcatacgatggaagaaagagcctgtatactgctggaccattgccatttacttctatggcatttgaaattaccttgcaagatgaggaagatagtcttggcggtcgccaaggtggacataggcgtgagagagtatttagggtggtgatcaaatttgcagcccgtgctgatctccaccatctggctatgtttctagctggaaggcaagcagatgcccctcaggaagctcttcaagtgcttgacattgtactacgtgaattgcctaccgcgaggtattctcctgtcggtaggtcattttactctcccaacttagggagacgtcnnnnncttggtgagggattggaaagttggcgtggnnnnnaccaaagcataaggccgacacagatgggcctttcactgaatattgatatgtcctctactgcatttatcgagcctctccctgtgatcgattttgttgctcagcttcttaacagagatatctcagttaggccattgtctgattctgatcgcgtgaagattnnnnnngccctaagaggtgtgaaggttgaggtgactcacaggggaaacatgcgcagaaaatatcgcatttctggcctcacctcacaagcaacaagagagctatcattccctgttgatgatcgtggtactgtgaagactgtggtgcaatacttcatggagacttatggttttagtatccagcacaccactttaccatgcttgcaagtgggtaatcaacaaagaccaaattatctgcctatggaggtttgcaagatagttgaaggacagcgttactcaaagcgactcaatgagaaacaaatcactgctctactgaaagtgacctgccagcgccctcaagagcgcgagctggacatcttacagactgtgcatcacaatgcatactatgaagacccctatgcactggaatttggtataagaattgatgaacgtcttgctgcagttgaagctcgtgttctgccaccaccaagacttaaataccatgatagtggccgagagaaggatgttttgcccagagttggccaatggaacatgatgaataagaaaatggttaatggtggcagagtgagcaactgggcatgtattaacttctctcggaatgtgcaagatagtgccgctaggggtttctctcatgagttggcagtcatgtgccaaatatcaggaatggattttgctcttgagcctgtgctgcctccagtgactgcaaggccagaacatgttgagagagcgttaaaggcacgttatcaagatgcaatgaacatactgaggccacagggaagggaacttgatctgctgatcgtaatactgcctgacaacaatggttctctttatggggatctcaaaaggatctgtgagactgaactcggattggtctcccagtgttgtctgactaaacatgtttttaagatgagcaagcagtaccttgcaaatgttgcactcaaaataaatgttaaggttgggggaaggaatactgtacttttagatgctttgtcaagggagaatcccccttgtcagtgacagaccgaccataatatttggtgctgacgttacccatccacatcctgggagaagattccagtccttccattgcaggcgtgggggcgtcgcaagactggcccgaggtcacgaaatacgctggactagtgagtgcgcaagcccatcgccaggagctgatacaggatcttttcaaagtatggcaggacccgcagagaaggacagtaactggcggcatgataaaggaacttctcatttctttcaagagggcaactggacagaagccccagaggatcatattctacagggacggtgtcagcgagggacagttctaccaagtattgctgtacgaacttgacgccattagaaaggcctgtgcgtccctggagcccaactaccagcctccagttacttttgtggtggtccagaagcgccatcacactaggctgtttgctaacaaccacaatgatcagcgcacagtcgatagaagcggaaacatactgcctggcaccgtggtcgattcgaagatttgccatcctactgagtttgacttctacctgtgtagccatgctggcattcagggaacgagccgccctgctcactaccatgtcctgtgggacgagaacaagttcacagctgacgagctgcagaccctgacgaataacctgtgctacacgtacgctaggtgcacccgctccgtgtccatcgtgcccccggcgtactacgctcatctggcagccttccgagctcgcttctacatggagccagacacctctgacagcgggtcactggccagcggtgcccgtggccccccacccggtgcggcacgcagcagcacgagaggggccgggagtgtcgaggtcaggcccctacctgctctcaaggagaacgtgaagcgtgtcatgttttactgctgagacgctggtgggctgccttcgccaaggaaaatgccctggagcattcccatgtacccgcactgtttcggtgatacagtactatctaacgccgattttgcgcgttaagacttccagtgatctgggaaatttcttgtacgactgttgtagtgttgtgtattcgtaatgtgatgacgcggcagttcttctaggagcttagtgccgtgtaaagtatctgttgtaagttgtaactaaccagtcaccctctagtgttatgtcatgatgaaccaaattgtatgtgtgaggcattgactgtccgatggttatgacagctagttccttgagtagttaaataaaaaaaaaaaaaaaaaaaaaaaaaaaaactcgagaggggg

SEQ ID NO: 95432 - DNA, 955 bp, Zea mays
  Clone ID: MRT4577_187024C.1
agcactaaacaagagtctcaggtctcaagtctcaactcttgagcaggggaaacgagagatccttggagtcagcaatggagtctaccgcgctaatgaccgcgagactaccactgctgacctctggctcccgttccaaacccctcccctttgcttccttcaccacggcggcttgccgtctcgcctccgccccctgctccggcagcggcagcgtcgtcctgctgtcgcgccggagccgcgattatgctggcgttggttccttggtctccgccgcggcggctcctggggatacggcggacgccggatccgagtccatcctgctcagcgtccaggggatgatgtgcgacgggtgcgccgcgagcgtgaagcggatcctggagagccaacccgaggttacttctgctaccgttgattttaaggaagcaagcgcagtcgtgtggacaacagatgaggccaaggggacacaaggttggcagaagcagtatggagagaagcttgctaaacaccttggcacttgcggatttgagtctcgcctacaagatagtaaggtgaagccgaaccgatattgaagttcagatgttcaccttaatgatcaatttgtaccagcatatatgttaaatattttgtctctgtggattgcagttaggagtagtctcggtgctagtctggtggcataatactacatacctacctttcacatgatctttagctaggttgtttcgaataggatgatgtcctaaaattgtaggagtaggccactgttgcgagggaggagtttgcggctgggctattgttaaatccggtcttcccgttgcttcgaagatataaagtgatactacctctataactcaaaataaatcgattttttaaactcaaaaaaaaaaaaaaaaccgactagcaggtaatgtaaaataggggacgcgaaactatagatgacactgtttgatattgtttatag

SEQ ID NO: 95433 - DNA, 393 bp, Zea mays
  unsure (1)..(393): unsure at all n locations
  Clone ID: MRT4577_187025C.1
aaggattttatgatggctatcggggcgnatacacaagcagtatgatatggtccaaaccgctcattctctattctcaacctaagcctccgcaagttgggactaggataagatgagcatgccttatctgatgctaaagcctgcagagaacatgaacccagattgtcctaaaggataccaaatagaaggcgctgttctgtgttgcttacatgtggtttgacgagggagaccatgctttctacgacggagtgttgcttattcctgaaagccaagagctccttgatgctttcagagaaactgtacataccggaaggaagtttcacggctatgggggacgttataggcctaatcataagatctttgagagatggattatgattaataagtatgaaggta

SEQ ID NO: 95434 - DNA, 159 bp, Zea mays
  Clone ID: MRT4577_187026C.1
aaaataaacccgccgactagcttttattggggacaaaggttcaccaggggggaaaatgaaaaccatctgggtggggaaccaccaacgtacaaggtcattattatatacagaacccggctggaaaaggggggttttaaaccccttttccatcatcagggg

SEQ ID NO: 95435 - DNA, 298 bp, Zea mays
  unsure (1)..(298): unsure at all n locations
  Clone ID: MRT4577_187027C.1
tttttttttttttttttttttgtttnntaggggggatgccggcgttttttttcaannatcctataaaatcaatacatcctgaaatcatatctaatatgtacacagtacacccaccaggtacattatgaacgggccaaaaaaagggctttgggctcattccggggttttttcttaccacttctgggactgggggccccagcccaaaaaatggggttcttttggccttttccgaacttaatacataccacggaaacccaggtttaaccaaaaatttttatatttggcgatttgggttttg

SEQ ID NO: 95436 - DNA, 1376 bp, Zea mays
  Clone ID: MRT4577_187028C.1
acttgccctttcactttttcttcggctgtcaccaactttgttcaatgctagtccctaacccatgaataagggctccgctggctaccgggttcagagaagtttgtaagctctttctctttttttgtttttcgccacctcctccgtttaaggtctttagctcgattcggctttagcttcgttaggaagccatgcgtgactacaaagcacgggatccgaacacacgaaagaaagcgtatacttttcaataaggtccgacttacttttcagagaggagagacatgaacttgttttaggcgtagaaaaggtatgaaagatttctaaaagaggtagggatctcgctgctaagggagaaggagacctcgtcggagcaagctaaagaacccactttagatcgtcgatttcaggcatcgatcaagcccaaaccaaagacgacttgctttgctgcattttttttttttttttttttttttttgcgaaagaaaggccatatgatctactttctggtgccggtcccttcacaaagatagccccttcttgctcttattcttattcggtggaatacaatagttctgaagctcctttctttcaagtgaaagttgcctatctttgctttggaatccaatccagttgaaaacaaacaattgcccgatggaaaagtcagatgaaaggcaaggagtgtaaaccacgtacgagcgagcgcagaaagcgaaatgttttgcagcgagtcaagcgtaatacgatcaaaaggaaatggggtcaatgctaaaactcaaacagttccgcagagggttgaaagagcgagctacattctttcatagaagacagaaaaaaagaggactgatgctttcttacttcatcttaatatagggatgctttatgtagcttccaataaataggaaacaagatgacccatggggcactcagtgacgtatctaaattgtctatcagtactgacttttcacactcgggtatagaaactgtcggcacttgaagatgaacaaagcgaaattaccctcaaaaaagcccctagaaaccaaacacccctaagacaactatcgattagctaggatcacgaggtgatgaatggtagaacggctcgatttatcgtgttgacgaggtggcttaccagctaggtaaacgagcagacgacccgggcggcctgttggccttatctggcttgtcatcgcgacaacgctgactttgttgttgaacgagagcggcgtgacacagacaatgctcgtgcgtgaggaggggtgagtagatgtgttggccggctgttaggtttttgtatgcggttattgggctttataagcgagcggcccaaatagtgggttttaaacaaaaaaaaaaaagggcggacgacgactagtgagctc

SEQ ID NO: 95437 - DNA, 223 bp, Zea mays
  Clone ID: MRT4577_187029C.1
tcccctggcaaccacatcctaccagaggagagggcgaggcagcgctcatccaagcactgccatagcgatccttcgagatggtccaggaggccgagagcccagcagaaggtagctcctaggactgaaagctttgcccctcggaccagctgctgacgctaagtgagagagacatagtccctatggcgtatgccctggcgataattgcagcctagccaagtccttg

SEQ ID NO: 95438 - DNA, 596 bp, Zea mays
  Clone ID: MRT4577_18702C.1
attgcatattattgttttccatactcagatgcataatgattgtcatgcatgtattatttagcttctttctagtgtccttaccattttacatagggatgaaaatgggtacctattcggataccagtttttggtcttttttctttgataatgcataaatatgatatagaatctactatgcaaattaatattcttgtttttaacaccgagcttgtaaatctatactactatattaaggctataagggtagcctgcctcctcctggttctgcctcccgtaaatccccaccgtccgtctccctctcccgcggttggctcctgaaatgggttaggacaactcggtgtagaactctagatcgttggctgggcttgggagacaatactcatgccaagctgctagttctgctctttttggttgtgtcgttgtgcagccaggataaatccgtgcagaggcgcagtgtaagagttgtaggggattgatttgtaatgtggagagagctgttagagtggtagcctttattttcgttgggactcctcagtttctctccaagtaaaatatgaaatcatgtctctgtcctacttctgttgcatatctatctc

SEQ ID NO: 95439 - DNA, 510 bp, Zea mays
  unsure (1)..(510): unsure at all n locations
  Clone ID: MRT4577_187030C.1
tggaagnnnnncacagctacagattatagtgctgcatcaagcgcaattcacagcttcgtgttaaatgctcacatctacagaaaattaatagaggggtactagtgtagaccggatttgcattttccgaatgctatcgttagcagacaaacaaattaacaaaggccaaaaccacaaaaaaaaatcaccaaatccgatcccttgctacacgggggtccatgggcttcagtgtgacgggttagcttgctgatttgggctcgtttcaacgcgcaggctgttttcacgacggtacatagattttgcgccttggaatatcgttccaactgttagtcaagtactaaacccactggccagagacaaggtgacatataagttatcaacggaaagttcatgactctcgaactccttttggatcgcagtaagaatagatggagcaacagaacatacgaacaaaaacttacttggaatatcgttccgagctttttcaacgctttcgctcgcagcttcaggaca

SEQ ID NO: 95440 - DNA, 865 bp, Zea mays
  Clone ID: MRT4577_187031C.1
agaagcacaagttcttagctttagatctgcacaaaacatatggattttcgatagcctagctgcatgccactttgacacctaggcgaaagccaccaacaaaatgcaccaaaagaaccccaaaaaaaaaagttcgcagaagactagaaatgaagccatcgaccgatcgacagaaccagaacaacgcagcgaggagcggcggcctgcctgcatctgcatgcatggcagatgcggcaactgggatgtcccgatcagaagaggacccacttggccgcggcggccctctcctcgagcgtcttgctgccaggcgcggccagcgagcaccctcgatccttcttccctcctcctgcccgcgccgcgcgcagcagcttggcccagaagctcgtggccgccgtcctcctccgctccctcctcgccagcaggaacgccgccacggcgtcggcgtccccgacgacccgctcgtgccgcatcagcaacgacacccgcgccgcgcgcctcacctcgtcgtggaacctcggctcaccgggcgccgggctggcgcactccgacgccgacgccacgctggagccctccgaggagtaggccgtggacacctcggagcatgaggacgatgcctcctcctcgtggtatctgctgtgcctgtatccctcctcctcgccgcagccgcgcacgacggacggcggcagcgacaggtgggacaggcgctcccgcaggcagcacgcgcagacgcccgccccctgctgccggtgccgccggcaccgcgcgccctccgccttgcccatcaccatgcggaaaccgaaccgcaactagctcgccgacgacgggaccagaaacgctaccgccacttctcgtgtaacccacgcgtccg

SEQ ID NO: 95441 - DNA, 370 bp, Zea mays
  Clone ID: MRT4577_187032C.1
gagacggacgcccacgcgtaccgggtatctcgcccatgtcaaggaaagcaggctcaaggaccatatgcagggagagccaactcaggtgagtcgcaaacctgtcctgcacatgcttccccacatcaaactgcctaatgatacgtatcgccagcttccgatattcttctggaattgagcatccattccatgaccgccctcttgaagctcttgcgatgccaccacgctaactacgggagattccacccattacaaggcacgcaatgttaaggccccacatagaacatcattcaaacaacgccaacgaggaataacatgctaacaatgccacagctgacgtcactgcataggctcctcatgtcaatatcatgat

SEQ ID NO: 95442 - DNA, 348 bp, Zea mays
  unsure (1)..(348): unsure at all n locations
  Clone ID: MRT4577_187033C.1
gggccgaactcccggtcgccccgcgtccgggncgcgtgggccatcgcatcgctccccaaaacctggggacgcctccccgcccgaccagcgccgacgccgacgacgagcatcccatccgccagtgaccgaaatttcacaccgggcgctgcaagcgactgcaatggctatgcaccagcgctccaagcgggcagccgggaactagctgatgagtcatcaccgacggggtaatcttcatccgagtggtcagtggcgtctacagtcgcagcagcttgtgcgcgcatggttagcaacatgtacgggaccacggtggcctgtaggatgtgctacaaaaaccagtacagggccgcg

SEQ ID NO: 95443 - DNA, 387 bp, Zea mays
  Clone ID: MRT4577_187034C.1
aaagtcattcagattaacgtggtcacagctatcaatcaacgcggataacacgaccgaccaataccaatagtgcaattggaactggagcttaactgtagatataccgtacgtcatcggcctcgatccggatcgatctcagccggctacctaacaaaacgtgtacgtagtactctgtaatcacatgaagtgtgcagctaatatctaaccggcacgttcagtcaacagataagtcatcactctgctgtggaaacacatgtagctaggcaatcctgtgctacgaagaagcaggatacctatttgtgtcgatgatacatgtactgattagactgcagactgagtcaaaactacagtgtgcataagaatcatagttacctgtgtgaaagggaa

SEQ ID NO: 95444 - DNA, 244 bp, Zea mays
  unsure (1)..(244): unsure at all n locations
  Clone ID: MRT4577_187035C.1
tnaaaagactggagtgtttaaaggcttaagaaactcttttaccccgggacttgttacaatgggaaaaattttttttttttttcagcaaaaagggaccagggaaaaaggaaaaaaaacctttattggggaccctttttttttttttcaaccggggaaccaccaaaattgaaccttcctttgggatttttttttttcccacaccattttttcgagctttggcctttaccaatttaaattttctctt

SEQ ID NO: 95445 - DNA, 389 bp, Zea mays
  Clone ID: MRT4577_187036C.1
gatgtcataggttgcttcctgtaaaattttaaacgttcaaatatcatatgcctcactaataaaacaaattcttcaagccagctctcttcttcactcgcagacatccatctttctactttatcaatgatgtcttatctactcaatgctccttcctttgcttttgctatccgggcatccatatccacaattagttccgaaggttctatgttacctagtctgctttgattgcacttttcagtatccacaagtttttacagatgataaagcccagcaccacaagatagcctgaattgttacaagatcagctcccaaagtcttcaacggaaggaacttggatgacttcttcatgacatcaagcgtacttcaaggcaccctgagcgctgaacaca

SEQ ID NO: 95446 - DNA, 274 bp, Zea mays
  Clone ID: MRT4577_187037C.1
catgtgtctgctggggttctcctactcattgctggcctgtgcattgtggccaatggtggcattcatagttcccgaacaccagctgggaacagcttatggattcatgcagtctattcagaaccttgggctggccgtcattgccatcctcgctggcatgatactggacacgcggggatacttgcttttggaggtgttcttcatcgcctgtgtttctttgtcactgttagctgtggtctttctgtacttggtgaaccgtgcccgaggtgggaatcta

SEQ ID NO: 95447 - DNA, 436 bp, Zea mays
  unsure (1)..(436): unsure at all n locations
  Clone ID: MRT4577_187038C.1
gcttcagcgacgaagggtacgggcctgtaccgtcacggtggaaaggcgtgtgccaagggggagagggctggggcagcaacaactgcagccgcaagatcatcggcgcgcgcttctacagcgcgggcgtggccgaggaagatcttgagatcgactacctgtcgcctcggggcgccagcggccacggcacacacacggcgtccaccgcggcagggtccgtcgtggaggcggtcagcttctacggccttgccncgggcaccccactcnntggcgcgcccagggcccgcatcgcggtgtacaaggccttatggggccgtggggctggcacgggcaataccgccactttgctcgcggccatcgacgacgccatccacgacggggtagacgtcctgtcactctccctcgtcggcgttgagaacacgttcggcaccctgcacgc

SEQ ID NO: 95448 - DNA, 128 bp, Zea mays
  unsure (1)..(128): unsure at all n locations
  Clone ID: MRT4577_187039C.1
nttttggaacccaaggcaggatgtttttgatgcgggagattaaggccaaaaactccagggcaaaacgcccaaaattgccatcaacagacgtgcccaaaaaggccgttaatacaggccgcaggaacagg

SEQ ID NO: 95449 - DNA, 371 bp, Zea mays
  Clone ID: MRT4577_18703C.1
cacaggttgtccttaccaccaagtcgacatcaattgtcgttcatagcaacatccagtaacaagttactaaaagggttgcacagatcaaaagtctcattaatgcagcacaccaagaatattaaaaggaaaagctcactgatacgatagagattcttgctgacgatgttgctgtcattcatgtatcgtggttaatcatacttcatgtatcgcgtagcttgactcgtgcgagcaatgacacaaactgatctataatacatgaacttgagatttgtggataccctatatgcaactaaggatgccgttcaagaacgtattatagtacgcgtaggatgcactcttttgctgcttgcatctatagtcaactccatcaa

SEQ ID NO: 95450 - DNA, 445 bp, Zea mays
  Clone ID: MRT4577_187040C.1
cgtaggcatcactatctctataagtctacgctcatgcatactctgccacatccagggccgctttcttttcgcagttcttcctgcatctgttccaaggtctgctcaaagcacgacaccgaacgggaaagataatggcaacgatgatcgccgcgatgcgcgtgctgttccgcgcgctgaacgacccggtgatggacacgctcatggccacccgcacgtgcccgcgctcctgccgggccttcgtcgccgtcgacgtggacagcgagctccacttcctgcgcctgtcgctgtgcctgcagatcaagctcaagtactagtgcacgcactgcctcagccggttcctcaccctgtacagctgacagctcaagaacgagctacactacgctacacatgcacctatacatctattcttgccaatctccttgccaagcgcccgtcggccatgaca

SEQ ID NO: 95451 - DNA, 269 bp, Zea mays
  Clone ID: MRT4577_187041C.1
aattcggcacgaggcagaccgcagagcatgtgagagctgcggcggctgggatgggggtgggaggaggcggagggcaggccgcggtgtcggcgccggcggaggaggcggggaaggacgcggaggagagcggcgggtggaccgtgaaggcgaagctgatcgccgcggcggtgctggtgtgggtgctgggctccgcgttgttttgggtgtggctgcgctgctacttgcggcgcgcgtgtctgtttatggcttttgacgcccttctttttttt

SEQ ID NO: 95452 - DNA, 486 bp, Zea mays
  unsure (1)..(486): unsure at all n locations
  Clone ID: MRT4577_187042C.1
gacaaaaaatatactatttgacaggcgcgaaggggacgccngacagggggccgcgggagaaaaagccgaaaacgccaccaccgcacaacangagggccacgncacagngcaggaggggacngacgccggggaagaagccaacaaccaaaacgagacaaaagacgccacaacaaacagagcaaggaccccaacggangagaagacacgcaaaaccaaagcaaggggagggaagaggcgcanacccggcgaagggccacaagaaaaaacggggggcnagccccaagcncacaaggcaccaaacaagaaagaangccaggaggaaacaggncggaagaaaaaagcacaacanccgcaggacggcacgagagccaacaaagcaactncagcctggggcggagaggcgggcgacccaatccatgacaaaagatgcaacagtggaacaacggacatggacccagaacggaacatgagaaaacgcggccgcgg

SEQ ID NO: 95453 - DNA, 455 bp, Zea mays
  unsure (1)..(455): unsure at all n locations
  Clone ID: MRT4577_187043C.1
cacgcatccgatgattaccaccaccagtagcagggctctgatctctcgaggtggcgggctcttcagggacgggtttcataatagtctggtgctggcgtccgactgctttccatgcacgtcgaggtcggacgaggacgcagagacatgctggccagtggctgcggccacaggccccatcgttgtggcaccagcgacgaggaggttgtagtcgagcagcgtggcgcgggtgtcgttccgcgtatggaggcactatccgctctacattcgccccatcgttccatggtagctaaggtacccgtaccaccaactctctgactctaacgatcaatcgatctgctttggctagggaggtctcgattggtagatgcatgttgagtgcttgcggtactgatgcggacngagcttgagagtcggattgatgcatattgtggttagcgattgactacttgtttgcc

SEQ ID NO: 95454 - DNA, 278 bp, Zea mays
  Clone ID: MRT4577_187044C.1
tcttcctatcactccctcttgccatccctaccttcatcccaattcttgttcgtccatcttctcaagggattcttataccaggcacgaagatatctttcccttttcacctacttacgttgttttacattccatctcattcttttcttcatcacatatacctgactccttcttccaatacataatcttactatctccttatacacttccttgatactcatcttcatccattccattccttccatcttttccacttcgttcatttcttctattaccactct

SEQ ID NO: 95455 - DNA, 300 bp, Zea mays
  unsure (1)..(300): unsure at all n locations
  Clone ID: MRT4577_187045C.1
gatatcctgttatttgccttgattttttttttttcctattatcttngangaagagcctcactgacaaaataccattgcctctataattataaactaaacttttcccccagttttatcctagttttaagggggtgctcctatttttttgggccgatgatatcctatcaagtatttctatacatgtgaaagtggggctttccgcggtcacaaaccatggatctatcttatgggtctcatttcgagctgccgagctttcttcggttgagtttggtggcggtcaaccttgttgctaagggcagg

SEQ ID NO: 95456 - DNA, 692 bp, Zea mays
  Clone ID: MRT4577_187046C.1
ttttttttttttttttttttttttttttgctcaatcgttctggattatgagtacatcaatatatccaatcgaccgagcagcagcgaaactagtagtttcagggattcagtctataacagaaacggtctaacgaccaactgcaactaaaattacccgactaactgatgaacgatctcaacagccaattaacctagcttgcttatttttctttttaaaaaaactattcatgtccctgcatgcagctggctctggcttgcataaacagatacacgtacgtacgtacccatggagcatggacagggacgactgggccgatcggtgagtagctaggatagctagcacttggcggggttcttggggcggaagaggcggttgccgacggagtacatcccctgcaagccgttgtcgcgcttgacgaactcctggaacttgagcggcatccccctgcgccccgccgggtaggcgggcaccccgcaggcgcgcacgggcgagcgcggcacgtacacccggcactgctggctcgtgaacgccgacacctgctgcgacgtctggatcaggaagtagccgcccgggccgcactgccccgccaccgtcagcgcgcgtagcccgtgtttgcaccgcaggtacacctgggagcggggacgcgtccatgggcgcgaagtagccggggtacctgcacgtgttgcaccaca

SEQ ID NO: 95457 - DNA, 370 bp, Zea mays
  Clone ID: MRT4577_187047C.1
ggttgaacatatggtatcgattattacacaatgcacattgacacattggatagggcgaaccggcatatatatatgtatgacgctgcatgctgaggcctaacatgcattatggggagcttatctatagatagacgaaggttgtggattggcccacgtgaggaacatcactgacacgaacacctaatgggcgacgaccagctatgagcaggcatgttggccagctccttcgctgaataaggggtcggtcatagggttatggcaagacaggtgaacgggctaattgcgtagaataaaccactggctattggacggcaccgatgcgtgccaaattattaccttaagctgggcaggggagccgatccaaaacgag

SEQ ID NO: 95458 - DNA, 372 bp, Zea mays
  Clone ID: MRT4577_187048C.1
tccacgcgtccgcggacgcgtgggcgacgggcagtcttccattccgcatctcgccctcccgtcctgtcccgtccgtgcgttctccgattggccgccgcccgcctcgccctcgtcaacaaaagcccaccgcaagcgagcgagcgagccaccctccccgccgccgccaccgaccgcgttcggtccccacccggactactcctgaccgccggcgtggggtgcccgggctccacctccggcgacgacaccctccccgccgcgcgcgcccccaccgcctggttcgattgcgggggtagccggggctacggcctaggcggctttcaaaggccccttcattacaacaggatccaaaatcccgccctagacttcgtatac

SEQ ID NO: 95459 - DNA, 722 bp, Zea mays
  Clone ID: MRT4577_187049C.1
cacaaacaaacatccacattcattggtggtccatcaaattggtagtgattggtctgatcgtttgtttcccaatttctagatatttagcataaacatttgctcgacacaagttttttttgccaactggtccttttttttttgccatgtagggacccatattctaaaggagttacattaagatccctcaaaatttctgatttgccggatccaccaactatggtcaaggccagcagccgtgaggatgcccaaccaatgactgaatcatctaatgctgaggtgaacacatcaagtgctgtggctgctggagagtctgaggcccatgaaattggatcgccaaagagtctaaaagatgctatcaaaccaaaacataaaagaaagaagaagaaaagtgacaagagttagtttagttgcaagcctgtaattttgtatgccccagataaatcaacgacagtctacaacacctcaaactcctgattgattaggtttcatccggggtgccatacatggttttttttttgtgtgttttcaatcgtgactggtgttagtagtgacaggcaaattttgtacaagctgtagaattgtattttaggaatggttaagttaagctttcagtcaactttgcagctagttctgtgatgcgtgatgtcccagcactcttacatttcattgtactgctcaccgttaatcttccattgtccaaaaaaaaaaaaaaaaaagcggcc

SEQ ID NO: 95460 - DNA, 390 bp, Zea mays
  Clone ID: MRT4577_18704C.1
gcacagggagctcagctccacctctccccatggctgcgagctcccttctccagctgcgcgacgccctccctgctcctccttgtggcgagcggctgcagcagggactcccatggccggacctctgctcctctcttcacggcgccccttcttcctcctgcttcacggcagcaagcaccttccatggacgcgagctcccaaccatggcgccccaatcccttctccccctacttggagcttcccatggcgcccccttctctccccttggtcgtggcttcctctgctccttgctccacgacgcctagatttttcagcagagagctttttccccatggcgccaccccctgcttgcattcctccctggcgcccagaaaaattgcagatcagcgcccc

SEQ ID NO: 95461 - DNA, 1174 bp, Zea mays
  Clone ID: MRT4577_187050C.1
tccacattcattggtggcccatcaaattggtagtgattggtctgatgttttgtttcccaatttctagatatttagcataaacatttgctcgacacaagttttttttgccaactggtccttttttttttgccatgtagggacccatattctaaaggagttacattaagatccctcaaaatttctgatttgccgggtactgttaacattgtttacatgttatgggttttcttcttgcatgctaactctcagtaacacctctgtgatgtacttgcagtcatttttttggttggcatttttggtgctcattgatgattaaaatatggcatgccattctccactgtttctgctttatagccatgtttttaggagggcagacctagtgccggagaggctcccacatgaagtgggtctggagaagggataaaccatggcaagccttcgtccacaaatgtggagaggctgtttcgaacaagctctcgccactgcactatgcctgcccttcaaattctgttgtctataaattgtgattcccttttatacttatttttttagggctggtagaaatactacataaatctgtgttcctttaaattttgatgtctataattctgcctcctgccagtctagagtaatccttcagatttcagtcattttgatttgacatgtgtaacctgatgtaatcgttcttgaggaatactttgccaagatttgttctctcttgagtctggaatcacttatttgcttcgcatgatgtagatccaccaactatggtcaaggccagcagccgtgaggatgcccaaccaatgactgaatcatctaatgctgaggtgaacacatcaagtgctgtggctgctggagagtctgagtcccatgaaattggatcgccgaagagtctaaaagatgctatcaaaccaaaacataaaagaaagaagaagaaaagtgacaggagttagtttagttgcaagcctgtaattttgtatgccccagataaatcaacgacagtctacaacacctcaaactcctgattgattaggtttcatccggggtgccatacatgggttttttgtgtgttttcaatcgtgactggtgctagtagtgacaggcaaattttgtacaagctgtagaattgtattttaggaatggttcagttaagctttcagtcaactttgcagct

SEQ ID NO: 95462 - DNA, 168 bp, Zea mays
  unsure (1)..(168): unsure at all n locations
  Clone ID: MRT4577_187051C.1
tcnnctacatagcagagctctagggttcgtcatgatccccgtcgccgcccgccggattcgaccgtcgccaggccaagccccgccggattcccgcccgacgccggtgctgatgccactactcctacatcacacacggactccgactctcctcctctgtctcctcctccg

SEQ ID NO: 95463 - DNA, 327 bp, Zea mays
  Clone ID: MRT4577_187052C.1
aaaaaaaaaaaaaaaaaaaaaaaaaaaaatttaaaattaaaaaaaaaaaaaaaaaaaaaaaagaaaagggaaaaattaaaaaaaataaaaaaaaaaaaaaaacataaatgcccatccattctaaatgatccttctttacctccccttcctttccacgccttacttttcctattttgtcacctaaattccttttattgtccccctttttacaactccttttctggtaaaacctttgctttccccagtttaatccctttgcatcccatccccctttccccaccttccctattacctaattacccccctcctttcccccttttaaacctt

SEQ ID NO: 95464 - DNA, 280 bp, Zea mays
  Clone ID: MRT4577_187053C.1
atgggaaattgcttgctattggtcattccatgggaggaatcttattgtatgcaatggtttcaaagtgtggatccaaaggggctgagccagagctggcagcaattgttacattggcttcatcagtagactacacaacatccaattcctcactcaagttgctattgccgtttgctgatccagctacaatgttgcgtgttcctgctatcccactaggagcattactgtctactacctatcctatatcctctcgagcaccatatattctgtctctgcttcggtc

SEQ ID NO: 95465 - DNA, 520 bp, Zea mays
  Clone ID: MRT4577_187054C.1
gggggggggtttttttttttttttttttttttttttttttttttttttttttttttttttttttttttttttttttttttttccagaaaaaaaacttttttttggacctttaccccaaaaaaaatcaaaaggggggcccccccaagggggggggggggggggaaccccggggggtttgccaaaccagggggggggaagggcaccaattgtggcagttgaaagagggggcccccgttaggcccaccgggctggaaaaacggcaacaacggggggtgggtcaaaaagggagcagggcccaccccacctacctggctgaagggaagaagttgtggctgctgaaaaaaaccaggaaagtccaatgctgctagtgggtaaaagggaaaaaattgcgggggggaggcaacaggaacctggctaaaggggaattgttgttgttgcaaaaaaaaagcagagtccaaggaccctagtgggtggaagggaaaaaactgctgttgctaaaagaaggcaacaaggtttgcta

SEQ ID NO: 95466 - DNA, 512 bp, Zea mays
  Clone ID: MRT4577_187055C.1
aacaacatctgttatcgaaataaattaaaacaaactgaccacaccatacaacactgacatcaaggaagtccatatggttaatatcctccaggcccattgtggaacatagaacaaatctcctgaaagcccatcatccggcatggtctgaagaccaccgccaaacttatagtgcacggaaacgacgttacatttagtgcgactagacatactgctgctctatgtaaaggacatcatgattgttgaccgccgtccttgacagcgacacatgaccggcctacaacctttcttgcatagccctcagagccaatcttgcgaagacgagtccactaatcaagagacttatcttaaccaacagctacaaggtgaacattgcgctgagcacataccgccttcaccagctagacataaactgggtgggcacagttcttagcacaaacacatagctgagcatcatgcttatgcaatgaacttggtagcacacctgaagactcttcacagacacatcatgaaca

SEQ ID NO: 95467 - DNA, 291 bp, Zea mays
  Clone ID: MRT4577_187056C.1
ggggggaaaataatggggaacacccaagggtagtttgttacatgggggggcccgcccaaaatgtttttccccccctatgccaaactgggaaaaattcaaaggtcccctcctttgttgttcccagtttcccccccttgacattaggccttatcagccaatttttttaattggcccccctccccggccagggcatcaactttgttgggccagttttttctttccggccccctgggggtttttttttccccccaccccctgtggggtctcgggggggggggcgaccttttcctt

SEQ ID NO: 95468 - DNA, 1798 bp, Zea mays
  Clone ID: MRT4577_187057C.1
ctggccggggaccagcagagcaaagagagagagtcgcggagccaccgcgttccctagagagacgcggagagccagggcaaggcagctgtcgccgcagcgacgatgtggagctcgggctctgaccgcgacgaggccgtagacacggcgaacgcctcgtcagtcgacgcttcgtcgcccgcgcggcagccgtccacgccgcccccgccgcctcggcgccggcgccagcgcgcgcgacgccgcgctcaccgcctccgtgccaggaacacgggcgcaggagcggaggaggagggactcgtggaggcggacgcggacgcggacgacgtctggcgcgggctgcagcagcagcgggagcgggaggcgtggctgcggcgggcgtcgaggcccgtggtggtggtcgccggcgaggaggggtcccctccggacgcctccgccggctcgggggagagcggcggggtggggagggcgcggagcctgaccgacgacgacctggaggagctcaaggggtgcgtggatctggggttcggcttcagctaccgcgagatccccgagctgtgcggcacgctgccggccctcgacctctgctactccatgagccagcgcttcctggacgagcaccaccaccagcagctgggcaaggcggaggaggcgccgccgctcgctccggcctcgccggcgcagccggccgccaccaccaactggaagatctccagccctggcgacagcccggacgaggtgaaggcgaggctcaagtactgggcgcaggcggtggcgtgcaccgtcaggctctgcagctagctgatcaacggcgtggcagtggcggtggcggtggcggtggcgccaccatcaatcaatcttggcacaagagatgagagttgagacgagcacgcaagaagggaaatccattccgtctccgcccagccagcacagggcatctggtggtcggcatacaggcaggaaccgtggcaccaccgccggaccaaccagccagccagccgtcaaagttcaacgtaaacgaacacagacaggagcatcgtcccattcccatacatgcgctccatccagatcaagatggcctggactagcatcgtagcgtcaccatggccagcattcatccgtcaggagcacacaggagtcgtgaattcgaatttcgctccaagattttgcttgagatatgtggtagggacggaaggaggagggagaatcgcgtagttaattccatgccgtcctttatgtttttttttttttttttgtctctgttcaagctttgacatgatacaatctgccggctagctgccaccaccttgcctttgccttcaccggggaggcttaatggaccgaatcaacggagaatgcgtctaaagaacatgtccatcatcactttggtcctgatcatgagccagctgtatcatacaggtgttcttgcttttggcgaaagttttattttttttagtccaggtgtgtgtgaatgggccaggcgtctccggactctccggctagacattcttttaatctgagatctgcaggcttggctactacagctcgccagtgcaggagcttgcctgactggcctgctctgttcgggaaagttgtgtggccagaatcagaatagatagaccgccgcactgcgataactgctcctccatgtgcacatttaactctgcaacctgattatcaataaaaaaaaatccatagttaactgtggctatactttggacagatggcatcacatgtcatgtgtaaaatgtccaaatgtaatagtatgcttatatatgatcttatatatgatctggccatttgc

SEQ ID NO: 95469 - DNA, 1613 bp, Zea mays
  unsure (1)..(1613): unsure at all n locations
  Clone ID: MRT4577_187058C.1
cctcgagccggcccgagattcggcccatcgccggtgttctggtggatcacgcgtcctcctctccaaccgcaccgaccgatatcttcctctccgctagggcgagggcggtgccggtgaggcgatccgtcggtggtgtcggagcggtggaggaggatggccgacgtgcagggagacaacgaggcagctctggaggacgacgctttccccgacgacgggcccttagatacggaggagggaggtggaggagaacccatcagcggaggcgacgaggaagaggaggaggacgtcgacggcctcgccagcttccttgagtcggagatcctctccggatccagcgacgaggatcctattgaccgagcagcggcagcagaaggaggaaggtgatgctgcgaagaataagcggaagcagggttcaggatcggacggggatggctgcagcggcagcgagggggagcagacgaagagggcgaggagggaggagaagaggaggcaggcgaaagggaaagccgtggcgcctcagatcgacacgggcttgttcagcaacgtcccccctgagctgttcctgcagatcttcaagttcctctcctccgaggacctcatctcctgcgctctagtctgccgcttcatgaatgctgccgcgtccgacgagaccctctggcgccgcctgtactgcatgaggtggggactggcctccaatgccaaattcagggagtgcgcttggaagaacctctacatacagagagatagagaggatatggttgaatttgtgaggaatactcctacagagttcaaggagtactatattcagatgcaggctgcaaaaaggagtcaagctccccgtccgtcagaagtcaacgacgacaaggttatgcttgataagacagtagctgaccaggtatctagttggaaaaacagccgggggcttactgatgaagctgtcaaggggcactcttgttctggaatacatgctcgtacacccagattggtgatgcttacatttgtgagaagactggtcgtgtccacgtttgtgatgacgcttgtcgtgaatttgtcttggaccaatctagtgggctgcttctttgtacgatatctggccactgctttgagaggtggctgtgtcctgatgatgaatgggatgctgatgataccgatctgcaacaggctggtgtagtggatgaagcagagccattcatgggatctggacgttacgcacgggcgattatgttgggctacaactgcactgatgagaaggagcttgaggatgccttgcgtttctgttgacgtgtttctgtcgatatgcccttcactcttgatcaagtgaagacgaagccagcggggatatgccggatgtatagctctgtgctatgttttcactgtatttcaccctcgagcatgtacctaagaatagaaggatgtacctaagaatagaacttgtttttgaggtagatcgctgatatgttttgatcagcagagggagccgttatgttgtcgtatgatttcataaattatgcctgtaataaaatataatttacataatgagttttttgtttgtataaaaaaaaaacagtataaattgaaaaataaaaantnccaaaataaacctannnnnnaag

SEQ ID NO: 95470 - DNA, 461 bp, Zea mays
  unsure (1)..(461): unsure at all n locations
  Clone ID: MRT4577_187059C.1
gaagctagcgcattttgcgcgatggattaaatgagggggggggcttagtccaacatgaactcagttcagtcttctggatcccaaaagagtcgaagtcgattgaattttagcttattcctgcactgcactccggcgcttgcgttgctctccacttaaaccactactgacagcaacgcatatgcgctcaaatgggggagggatacgtaatgtataatctatctactctcatcaatcaatcagctatctaccccattcactgtggccgtgtcatcactggcgtcagcaacggcttcccagagaagaaggcttcgaggttcccaatcatgagctcgcggaggtcggagctagactcctcggtgaacgccgcctggtgcgccgtcaggacgacattgagcatgcctaccagncctgnaggcaggtgcggcttcgtctgtaagacgttgagacccgggccggggatg

SEQ ID NO: 95471 - DNA, 1135 bp, Zea mays
  Clone ID: MRT4577_18705C.1
aaagagttttttgtgattggtattcagtgggcttcaatatatcatcctgcactgtggtgtgccttttctctaatcttttcgttgcttcttgtaccacaagttttagcagtggtattcaaagatcggttcacatataaatctctatgcgcatatggtgggcagaggacactgttgaagtctctagttggtggtttcatctgttgttttgttgaactcgccaggctggttcttgtatggttattgctactgttatatgctatctatttagtttttataccttggttattcggtcaccctattactgaagatggtagcctgacttacatgacacataaaggctggattctgaaaggacccagtagtagcaacgaagtagtccatgctgggattccagatgtcatggtcattgttctacctcacctttgctttgtgttagtacccaccattgtgattttagctgccatggctgctgagagaacagcatatcgagagcattatctttctcgatcaggaaagaagaaagatgactaccgtaagagcaggagacagatagaacatgaaaacttttggaacggtcgctggattagcaaatttctgtgtcttctctgcgtggtggttctatgcaaacattggaagctttgcagagcgctcgtgaaggcttatgctatgaaccccttgctccatgcgccagtacttttcttcttcgttcctttactcatggtgtttggcatctacaagacacggtccatttagctgttctggagttctgaagatgtgctgcactggactgtccaataaatggtgcttcaactgtgaagactgaagactaacccacaactgaaggtgtgctacttcgatttctcactttctctctctttcagagagcagatttgttagattgtttaacaggcatatatagctttcgcattgcgctccgtataaatgagggactgcacggcatttcattagaatggaatggttaggatttggaccaaggaggaagggaaagttcttttttccctcctctgtttttgacctgccggctttgtttttgtacatttatccttcttgtgagactttgaccatctacagtataatagcactgtcgcttgcggaatgcgtatttacactgctc

SEQ ID NO: 95472 - DNA, 314 bp, Zea mays
  Clone ID: MRT4577_187060C.1
tcctgttactagatcgcgagcggccaccctttggggatttttttaattatttttctttttttttacctattcttttttttttatttcttatttatctctttttttctactagttctttcttatggggacaaaaaccatatcccccgaaaaaaaccaaatggccggttgaattgtaacaccaaccacaaccgggggaccccttaaacacacccaagaatgttcctaaaaacccaagtatcccattccccggcggggggggtgattcttcacatcttggggggcttttattaaaaacctgccggcaaaggggtatc

SEQ ID NO: 95473 - DNA, 745 bp, Zea mays
  Clone ID: MRT4577_187061C.1
ggccgcttttttttttttttttttcgtaaattatattttattacaggcataatttatgaaatcatacgacaacataacggctccctctgctgatcaaaacataccagcgatctacctcaaaaacaagttctattcttaggtacatccttctattcttaggtacatgctcgagggtgaaatacagtgaaaaacatagcagagagctatacatccggcatacccgctggcttcgtcttcacttgatcatgtagcgagagtgaagggcatatcgacagaaacacgtcaaaagaaacgcaaggcatcctccagctccttctcatcagtgcagttgtagcccaacataatcgcccgtgctgttcgttgtgtcaaaggcgtgatcgcggtcagtaactccgtgtaatggaacactgcaatacataacgtccagatcccatgaatggctctgcttcatccactacaccagcctgttgcagatcggtatcatcagcatcccattcatcatcaggacacagccacctctcaaagcagtggccagatatcgtacaaagaagcagcccactagattggtccaagacaaattcacgacaagcgtcatcacaaacgtggacacgaccagtcttctcacaaatgtaagcatcacccaatctgggtgtacgagcatgtatttccagaacaagagtgccccttgacagcttcatcagtaagcccccggctgtttttccaactagatacccggtcagctact

SEQ ID NO: 95474 - DNA, 791 bp, Zea mays
  Clone ID: MRT4577_187062C.1
ccggggccggtgaggcgatccgtcggtggtgtcggagcggtggaggaggatggccgacgtgcagggagacaacgaggcagctctggaggacgacgctttccccgacgacgggcccttagatacggaggagggaggtggaggagaacccatcagcggaggcgacgaggaagaggaggaggacgtcgacggcctcgccagcttccttgagtcggagatcctctccggatccagcgacgaggatcctattgaccaatcgaattggttgccgcggcaggagcagcggcagcagaaggaggaaggtgatgctgcgaagaataagcggaagcagggttcaggatcggacggggatggctgcagcggcagcgagggggagcagacgaagagagcgaggagggaggagaagaggaggcaggcgaaagggaaggccgtggcgcctcagatcgacacgggcttgttcagcaacgtcccccctgagctgttcctgcggatcttcaagttcctctcctccgaggacctcatctcctgcgctctagtctgccgcttcatgaatgctgccgcgtccgacgagaccctctggcgccgcctgtactgcatgaggtggggactggcctccatgccaaattcagggagtgcgcttggaagaacctctacatacagagagatagagaggatatggttgaatttgtgaggaatactcctacagagttcaagggagtctatattcagatgcaggctgcaaaaaggagtcaagctccccgttcgtcatgagtcaacgaccacaaggttatgct

SEQ ID NO: 95475 - DNA, 270 bp, Zea mays
  unsure (1)..(270): unsure at all n locations
  Clone ID: MRT4577_187063C.1
aaagcagaagaacagggnagcngaaagcaagcacaggaaagagcgggcaacgcggaagggaacagcnagggactgcacggnnatacaggcaagcnggngggaaccctnnnagcaggagntttccatcattggcaacaatacctgcaaggattgggcggggagccaggcacttgcagaagaagcaaaagaggggctagcgacagaaggaaaaaactggattccatcacagggagagactacaacaattgcagctcggcaaagtggtgctgg

SEQ ID NO: 95476 - DNA, 506 bp, Zea mays
  unsure (1)..(506): unsure at all n locations
  Clone ID: MRT4577_187064C.1
gttttttttttttttttttttttttttttttttttttttttttttttttttttttttttttttttttttttttttttttttttggntttaaccaaaaaactccccacaaaaaggggaaaaccacacccaaggcaatccatttaagggggggggccttaaacaccctaaaccaaaacaaaattggtccaaccctttattctcaaaacttgttcaccctttaaaaaccaacctaacaaaaaattaaaaaccagggaaaacctcactaaaaaactatttattaatccatattattgggcctccaaaaaaggtttccaaaaaaataagggggcttcttcactcccaaaaaaaaaggcatttttcaactaaaaaccccaactggggggctctttgtaatttcctggggccaaccaaaattttccgccaaaccaaaaaattttgtttttaaaacaaaaaactgtggggttttaaattgaatgggggcttttttaaccttaacaggggtgcct

SEQ ID NO: 95477 - DNA, 279 bp, Zea mays
  Clone ID: MRT4577_187065C.1
tttcacccagcccttcattgagtcaggcctggttattttgcctccaataaaaaagcatataacaaattcttgggcattcttgcagccatttacattggggatgtggtgtgttacagggttgtcttttcttgttgtgggtgtggttatttggattcttgagcatcgaataaatgatgatttccgcggctcgccgcgacaacaaataataactattgtttggtaaggatctgaatcgcatcttttgcactcactatacacacatttattttcactttcaaa

SEQ ID NO: 95478 - DNA, 377 bp, Zea mays
  Clone ID: MRT4577_187066C.1
tttagaaagagttgcacttattggagataaaaattgggaatcagtgttttgttctatctcaaaaccattttttccatcttgcgaaattgaattcttcaaagaaaatattgacgaagaaaagaaggtaccttcagcacctctccagtggattttcgcaaacactcacctctcaccttacaacactttccgtatttctgcaaaggacgtagccagtaacaacgaaaacattgaacgagccatcccctttataagtaaaacaaactatgtagtttgtatggacgaatctgaagaagcacaatatgctttaaaagaagctctctctttgatgaaaaacccccgacatgaagtattgcacatagtttcaatttacggaaata

SEQ ID NO: 95479 - DNA, 227 bp, Zea mays
  Clone ID: MRT4577_187067C.1
cgcaagcctgcgctgcgattttatgtctttctgctaccttgactctaaaaatatgcataggagtcgtaaaggagcagcgaagggcaccataaaggatctgcagtgaccaggctggcactacactgagcacagaacaacactcttcgctgactggctagtggcagcacggtggtgtggcacaggtcatggcactcggaccagcgccacggatcactgttctaccgtgc

SEQ ID NO: 95480 - DNA, 400 bp, Zea mays
  Clone ID: MRT4577_187068C.1
cccacgcgtccgcggacgcgtgggttgggatctctatctttgtcaacattggctctacgggattgacaatattcatgattgtcaagctcagacactgttggctcgacatcgagttccttgacaccacactgctgctagtgtacattatgtgtgctctctcattaatgtccaaggtaattaagcaaatactcctataacacacacacttagagctattggataaattaagccatatgtatctatggatctagctagcagtatgtaactgcggaacgatgatgaagaggcggccacgttgcatgcatgcttcggagcttggatggtgcatgcaagcatgtatatatgtgggtttagtgctggcggtatgttcttaccaagaccgccatcatgggcggacttt

SEQ ID NO: 95481 - DNA, 274 bp, Zea mays
  Clone ID: MRT4577_187069C.1
gtggccacacgggccggatcaggtgctaaaggacggtttcaaggaccgcacagacaaagacaaaggcagtctggaaaacccatgccggttagcacaggaagtaacttaagccgcgggcgacaaacttggcactgacgaggacaggataagggtgcaaccattcgctagctactacgaggcaccggactcaaacccggatgatatgggcttggacagtggcaaatcctaagagacgaggaaggcatgctctactgtcacatgagagaggcctatg

SEQ ID NO: 95482 - DNA, 2601 bp, Zea mays
  Clone ID: MRT4577_18706C.1
ttgggtacctcgaggccggccgggatcgccgctgcggcggctccgtctgccatgccccgtgacgagagagaggtggtggtagtttccggtgcgccggacggggttgtgtgggtggcccagctctcggatctccacttcagcgtgcaccacccggagcgcgcctacgacttccggcggtatgtcggcccggcgctggccatggtcaaccccgacctcgtgctgatcactggagaccttactgatggtaaaagcaaagatctgttaacaatgaagcaaaacgaggtcgaatgggtagaatatgaaagtacaatgaaggaaataattgaaaatagcaagcttccaagaagaattttctatgatatgagaggaaaccatgatagctttggtgtaccagcatctggtgaggattatgacttttatagtaagtatagcatcaacgccaaactaagacgacaggggcgtgtccaaagcattactttggagaatagtggtcggaagcatctgtttgttggctttgatagcacaatggagattggtcttagaggtccaaccaatctatttggacatccaactgacaagcagatgattgaattggatcaagcattatcacagtggaatactgactttgacaaggttccagtgacaaaaatcgcatttgggcacttcccgttgtctttctcagcattaacagagtcaggaaaaagtatcaaggatgtttttctaaagcaatcattggcagcatatttgtgtggtcatcttcatacaaggttcgggaagaacttgaaacgatactaccatcgggcagtccaggaatcatcattatcagagcattactaccaacataacatgcaccaaggagatgcattccagggtaataaggaaaactgttctgaagaagcttctcatattgaagagttctgggaatgggagatgggtgattggagaaagagcagaagcatgaggatactagcaattgatgatggttatgtttcctataccgatatagatttcagattaggttcaaagagcataatcatactacctacctttccccttgattcaagattcatgcagagagcctctgcttttcgtgattttaaatgtcatgtcatgggggcatcatcttttgataccgtgagagctcttgtattctctaaacatgagataatatctgtttctgtaaaaatatacgactcaaggccaggaactcttgaaatagtctttgactctgaaatgaaaagagtggattccaatgaaactcgaggaaatatgtatttgataccatggaactggagggcatttgaagattcctctcccagccgatattggctccaaattgaagtgatggatataacaggtgacacaagtgtcagccagttgaggccattctctgttaacggcttgctggcaagagtgaactggacatggaaagagttttttgtgattggtattcagtgggcttcaatatatcatcctgcactgtggtgtgccttttctctaatcttttcgttgcttcttgtaccacaagttttagcagtggtattcaaagatcggttcacatataaatctctatgcgcatatggtgggcagaggacactgttgaagtctctagttggtggtttcatctgttgttttgttgaactcgccaggctggttcttgtatggttattgctactgttatatgctatctatttagtttttataccttggttattcggtcaccctattactgaagatggtagcctgacttacatgacacataaaggctggattctaaaaggacccagtagtagcaacgaagtagtccatgctgggattccagatgtcatggtcattgttctacctcacctttgctttgtgttagtacccaccattgtgattttagctgccatggctgctgagagaacagcatatcgagagcattatctttctcgatcaggaaagaagaaagatgactaccgtaagagcaggagacagatagaacatgaaaacttttggaacggtcgctggattagcaaatttctgtgtcttctctgcgtggtggttctatgcaaacattggaagctttgcagagcgctcgtgaaggcttatgctatgaaccccttgctccatgcgccagtacttttcttcttcgttcctttactcatggtgtttgccatctacaagacacggtccatttagctgttcgggagttctgaagatgtgctgcactggactgtccaataaatggtgcttcaactgtgaagactgaagactaacccacaactgaaggtgtgctacttcgatttgtcactttctctctttcagagagcagatttgttagattgtttaacaggcatatatagctttcagcattgcgctccgtataaatgagggactgcacggcatttcattagaatggaatagttaggatttggaccaaggaggaagagactaaactgctcaatatagtttttcctctttcttttgagaaagttctttttcccagctctgtttttgacctgccggctttgtttttctacatttatccttcttgtgagactttgaccatctacagtataatagcactgtcgcttgcggaatgcgtgtttacactgctcc

SEQ ID NO: 95483 - DNA, 552 bp, Zea mays
  Clone ID: MRT4577_187070C.1
gggcaaaaacaactcctggaggggggtcggggggcatggattactgaccatatccacatcccttgttttatttgctcaaccctgaatcatttttgcagagattcccgggggtgggaaggggcccactcctaaacgggggggccccccccattttttttataaaaacaaaaaaaaaagttgctttttttgtccccccccaaaaaaaaattttctccgtttttttttctttttccaaaaaaaaaaatagggtgtttttccctttaaaaaaaaaatatatttttttttttttttttagggggggggattaatatataacaccccccctccggggggaaaaaaaaaaaaaaaaaaaaacgtttggcctccctcccgggtgtaattacaccatctaaacctcccaccctttttttttttttttcttccctccgtggggggcgcactaaaaaaaaatatgttttttttacataaaattcttctgtgggcaattaaggggcgcccaccaaacacttttttgttctgggggggggggaaacaaaaaaaaaccccccccct

SEQ ID NO: 95484 - DNA, 2046 bp, Zea mays
  Clone ID: MRT4577_187071C.1
cccacgcgtccgcccacgcgtccgggagagcaccttcatcatgatcaagcctgacggcgtccagaggggcctcgtaagcatcatgtgttcctagttcgtttctgttcattcgattcgatttggtgatgtccacgcgctttgtgatccgattttgtactagtttgtgttcactccatcctgcttggtttttttcagattggtgagatcatcagccgttttgagaagaagggcttctacctcaagggtaatctagcgtccatgttttgattcaaacttccattatgttcccaaacagccttaaatttctccatttaaaggctaaagatgtggctttagacggaaattcaacagtttgtgctcaaatgagttgtcgcttttcctaaatctgttgataaaattcagattttggtgcacacctgccaagtttttttgtaatctcattacggtttgtaaacaagccgtgcttgataacctgccaactcgaaatgcagccttgaagcttgtcaacgtggagaggtcgtttgccgagaagcactacgccgatctcgcctccaagcccttcttccagggcctcgttgactacatcatctctggccctgtggtggccatggtctgggagggcaagagcgtcgtcacaactggccgcaagatcattggcgccactaaccccctggcttctgagcccggcaccatccgtggcgactttgctgtcgacattggcaggttagatctcagtccgatttttgtatcttatggttttcagtcaccgttattcatccattggttatgcttagttgcttaatttgttaaagctgcccaatccaattgggactgccatacatccaatgtaaaaaaatgttcacactcctgagttcggcgtagttatatatcctaaaatttgcgcttttccatagtgatgctaaaattcttgactgactagcattggatttgtgtagagccacggttatttattttgtgtagtcaaattagatgttaagagacaatgcttgtagatgattatgaccaaatgttggctctcagttcattagtttgtttgtatcttggggtaatgaacatttgtggtcatctcatgattgcagccatgctgcagatcaactgttttaatgttggcattatgacctgttacatccaactcgtgggtccagtaggtacatcctctggcatgtgtttaccagatctgagcttatacttgttctgaatctgatgtggagtccacaaaacatttagacatcagtggatgtaagtgatgtactttcctggtgttgtggggactggttgctctggttgctgtttaatcatccatttaactcgtctttagccatgaatagttggggtgtactgtatcttattctgggtagttgtccatgagggttttgccgtattgtacttctgatttaatatagaaaacccattttttaaatgtagtgttaaagcctctcggattatgtctgttgtatcagattctactatgatgccaagttctcatgaccttgttttgtgctataggaatgtcattcatggaagtgacagcattgagagtgctaataaggagattgccctgtggttccccgagggccctgctgattggcagagcagccagcacccctggatctacgagaagtaaacatggaaagtttcacatcaaaccttgagagccagaggaaacatgtcaccatttgtgctttagcaatgttttcgaaaagattatgatctgtatcttggaaccttatttcaatggaccaaatttctttctttgccatgttattgcttgtcattttgcggtatttgattccactcgcctatagaactagcatatagtttgtgataactctatgatggaagaggagggaaccgggagggaggggtagtagggggcacgagtaaggaggggtttatacaatgatctaatctagtgtgttaagtctgggtgcaatttatttggtggatttagtggagcttgagtgagatgatttggtttagtgagttttgtaaagtttaaactagtgacatagtatagttgtatag

SEQ ID NO: 95485 - DNA, 430 bp, Zea mays
  Clone ID: MRT4577_187072C.1
gccggccgggttccggctcttttattaacatcacaatggttgctgcaaagtctggaatcgctgttggtatcaacaagggtcacatcaccgctcgtcgtgaactcaaggccaagccctctaacaaaattggtgcttccaagcgtaccactttcgtaaagtccattgttcgtgaagttgctggttatgctccttatgaacgtcgtcttatggaattgatcaagaactccaaggataagcgtgccaagaagctttgcaagtccaagcttggtacttttgttcgtgccaagaagaagattgaagaacttcaaggtgttattgctgcttctcgtcgtcactaaattcttgatttttaacatgtggaataaatcaagaatgctctttcgagcaagttgggcatatacgcgaaaaaaaaaaaaaaaaaaggccccta

SEQ ID NO: 95486 - DNA, 186 bp, Zea mays
  Clone ID: MRT4577_187073C.1
acgtcgcaccactcgctgatcgaagcacacgcattcggcttgtcacagcaaccagcacacatttcccagtggcggatcgaaggaaggacagagtctatgggtggcggcagtgtgaacggcgtggaacgccggccgggagaacctcgatcgtcaacttccgctggacccgccggagcgtcgccgtcg

SEQ ID NO: 95487 - DNA, 259 bp, Zea mays
  Clone ID: MRT4577_187074C.1
acgtacctgtagatgttagtgactaaaaaataattaaaacaattaaacattgatcgctaaattgtagtaaagaaaaaaagaattgtagaaaagaaaaaaagaattatggtaaagaaaacgaattgtaaaaaaaggatttttaaggttttgaaccttgaatctgtttgactcaatttttaaggttaatcattttgtatataattatttgcaaaaatctcacttttattgttttattgtgacacacgtttgatttaagtgg

SEQ ID NO: 95488 - DNA, 407 bp, Zea mays
  Clone ID: MRT4577_187075C.1
ttccgcgggccgcgcgcgaccgcgcgcggggcatggccagtgactggaaggaggccgccgagaagaaggggggcgtcgatggtgccaagcctccctactctcactccttcctgcagctcgtctccacgtttgccgcaccccagagggaggacagtcctctgtaccgcacgattgttcgttagcttctcctgtctccgtcagattccacttctcgcgctcacccttctactcgattaacaaatggccgctattatttgaggaactaattgctattaggcagtattttgttgctgtaaatctcccttatgacgctgggctttaggaaaagtttcttaccgtttttcttttgaagttctacctttaatgacttttagaagacatttatacctttgttttatcatttttca

SEQ ID NO: 95489 - DNA, 818 bp, Zea mays
  Clone ID: MRT4577_187076C.1
cattgggtacctcgaggccggccggactgagtgatcactgatcagacatcagaggggccaatttgctattggagccttggagtggagggacggggtgggagaataatggtcgtaaagctcaacaagccggccaaggcgaagagcctgtggatcctcgtgcggcgcctcctccgcaggagtcgcaacccgccgccgtcggcctcggccgcgctggaggacggcgagggggagaagagcggcctctcagccgaagctccttggagcagctgctggtgatgacggacgactgcgcccctggcgacgatggcgacggcgacgtctgttggtgcgccaagaagccgcacggccagccggtggccgtgctgctgccggcgctggcccggccagaggcgtccgcggctgcggtgccgtcggcaggtgccgctcaccggaggttcgtgttcggcgggtcccggcggcggctgctcattcgcaggccgtggcggcctatgctggtcgccatcccggagtgaccgatcgattaatcgcgtgtccggtgagtcggtggcgtgaattagagacgctgggggtatatgattcggcattcgagtgcgtgagtcagtccgatcaacttcgaagtaattgagggtatgattcggcatttttctggggtgcacttgtgccctctctgtaactttgcgtgctcgccgggtcttccctgttccttcctaagtcctaatcctaactagaaggttccgttctttttctttctcaccatggaacatacaaagttattttgatccgaaaaggaatctatagcggaggatcggagtatgtct

SEQ ID NO: 95490 - DNA, 779 bp, Zea mays
  Clone ID: MRT4577_187077C.1
ggggtaatgaaagtattaaacaagcaaaacatttccagatggttctaatgagtgtatggataattgcttacaattcattccactaacaaaaaaaggtgcatcgtatgctcacttcggtaaggtgtaaacatatatcaaattaacaaactcgtgatcttactgtatatataagttaaaaggtggggtgactgttagctaaccatctacctttagcaagaacatagactcatagagtgaagatagttgattgcttacttgaagacccttcagttgcatctgctgcaacagttccgtaaaaacacctgaatatacaagatatgaaagctcatgagctatttctcctttgccaaaaaaaaggggcaagcagttacaaggcgagaaaaaagataacagtgtgggccagttcaaagtgtatagtacatggagaaagggaggtctaggttctagaattttgttttcctcccactccattgcaaatgccagagacaagagtttctgtgacagctcaatatgaaaaggcagaaatacatggaattctaaattgaaaatgactattgtgttactccgagatgtcacaaaaaaatgcagaaattctatgaattcgagtttgagaattatatcattgtattaacttcgctgtcccaaaagacatgggcgctcttcctaaggtgcaacagggtgaatgcaagcaggcatatacattcccaattttctaaccttactaaaacaggttgcaacttgcatgtagtactgttatgaaaagcttatttttgtaatgc

SEQ ID NO: 95491 - DNA, 912 bp, Zea mays
  Clone ID: MRT4577_187078C.1
cttcgctcactcgtcagctccctgtcgcgcacacaacggacgcagaggccagagccagagcagctgcccccctccgatcggagcaagcaacggcgccaccgtctgtccgtctccaatggcgcggccacagcaacggtaccgcggcgtgcggcagcgccactggggctcctgggtctcggagatccgccaccccctcctgaagacgaggatctggctgggcaccttcgagacggccgaggacgcggcgcgcgcctacgacgaggcggcgcgcatcatgtgcggctcccgcgtgcgcaccaacttccccgaggacgcaggcggcggcggcggcggcgacgggcagcagcagcagcaggccgcgccgtcgctcctctcccccgcgctcgtcgccaagcttcaccgctccaacctcgcgtccgctcaggcggcgcagggcaaggccgacgcctcggcagccgccgccgccgcgctcccgcgcgtcgcggcggcagtgcctgccggcatgggggtctccgcctcgccgtcggcgtcggcgtcggcggcgggggactggagcggcgggctgcttgaggagcagtacgtggaccagatgatcgaggagcttctggactccaacttctccatggagatctcctactagctgcgcgcctgcgcgcacgacgcgtcatcccgcgccccccgcctcctctgctccgtcacatctcaattctcatctcatctctctgtttggtttcgtcggtcaggtagggaagtgcagtgcagtgagttacttagtattagcagtatcattagccatgccaggagtgactcgaggttactttggcctgttggccagacgagttggttcttgagcaacctgatgtgtagtatacggtagtgtcgccagagcataaaagagttggattggactcc

SEQ ID NO: 95492 - DNA, 626 bp, Zea mays
  Clone ID: MRT4577_187079C.1
ctttcccacacactgcgtcctacgctgaagtcctgtcaaagccaatggagggtggcggcgcgaaccgagaaaacggcgacggcttcggcaaaaggcaggaacaaggtcctcatgatggacgtctaggtgcttagccgcagcagggcaagcgaacttcgtcaatcgtggagggttccgtagaccaaacttcggcaacagcttccaccaaaatgggtcgtacgatcaacctggtcgaggtaggcaggacttcaatcaaggcagctctggtcgccatactggtcgtggtcgctttggttattcagtgggtgatcagttcagttacaggacggtggagagcaatccagtcttggcaacaccaggtttggcacctgctgatgcagtggcacaagcggtagcgctgctgacacaagttatatccattccacagcctgtggtggatcatggcaaggctgagagctccggtcaagcagaaaaggggcctgttgggtagtgtggtgataagttggccatgcagcaatagatggtcctctgtagccggtgataaaggaaggaaaaaaatccttattgttatagatgtctcaccaagggtcattctatgcaagcatgcacgacacgactcttctgtg

SEQ ID NO: 95493 - DNA, 265 bp, Zea mays
  Clone ID: MRT4577_18707C.1
actacccatacgcttacctcaactcccataacaaagcccgtataactctccagggtggtgtccatcctctgcttcgtgccgacataaacataccatcacttcaagcccagccgcgtctaccacatacagctcgtcactagcgagaaaaccctattaaaggacgaagacttattgaagaggtttaactcattcaataactgtattaaacatttctacaagattgtgaatgtacttactatcatctataatattaggtacaaactac

SEQ ID NO: 95494 - DNA, 373 bp, Zea mays
  Clone ID: MRT4577_187080C.1
ttccatttttccggcgacgcgggcgcaccggggcggtttttattaaggtgaccaggaccttcaccaccgaggtgcccctggaccgggaggacgacgcgacccacgactaggccgccgagtcgtccgacccgatcgccattgccaagggcatcaataccatgccgcccggcatgccggacgtgctcatactgaccggcctcaccttgctcttctgggttccattcatgctctttgacaccgacaggatggggctagagatttaccacggcacgctcaacgacagtcagaaggatgtagctcaggcccaagacggccttcgccagggcgccttgagcctgctccttaacgtgcgggccctcggagccaggtcctt

SEQ ID NO: 95495 - DNA, 845 bp, Zea mays
  Clone ID: MRT4577_187081C.1
ttgggtacctcgagccggccgggaggcgcttcgtgctcctgccggccgcactgagcgtggcgagctctgggccagactcgagcgatcttatcaggtagttcattgtatttcgccattcgtttttccattctttttgacgtccctgtgtgagacgatgctgtttgttcggccccggcgagcggagcggtgggagaggtatacgagatttgtgttgattcccccctcccccacagttttctcgatccatctcgctgaaacttggccgcgggtagatatcgtgtcgtcttgttcagatcgctggtttcccctcgacctcgacgtatattgggatgcttctattccacgcaaccgtgcgatcttgttgctcttggctctgtggccgtggattccatttctgcgtttggggaaagttcttttggctgctcactttgcgctgcacggcagcagtgtgaaggacttggttcttcagctactctagcgctttgatttgcttggggttactaacgattaagtgaatgaatcaagctgcggcatctgggaaagaattgatggcatctgggaaaaaattgatggcactaatcgaatctttctgttcgtgttcatcattaacccagtagattcgtttgtatctaccttctgtcagtctactaggactacttagatagtttgatctgtataaaactcgtactatcttttatttaacacggaaataaacaatttgcttcttttctattaagaataaaaaaacttctaccctattatcttcctgtttatcgctggctgatacgcgatgcactgtggcctttaattctgcttaatctggggaaactgacaacgatttgtac

SEQ ID NO: 95496 - DNA, 537 bp, Zea mays
  unsure (1)..(537): unsure at all n locations
  Clone ID: MRT4577_187082C.1
atatgtcccgaacgaggccttagcatgatcacggcctaggtcctacttatggtactgtctaacattagcagtagttgcttcactttaacttatatcggctgctacaagactcagatcaatgtatgttaacgctaaagcccactcttttttttttctattgcgaaatggggggggggggtgantctcattatcaagaggcatgcttgaagtggggggcgtgagggttcacccctctggcaggtggcctatggagagaacacccacatttgttgcacccgagttagaatcaccagcttcaacgagttctaaaagcttagatggaactacggctggcgacgtcctgctggtgggggcaccatttgtcatgatcagtacagaggaaaatgatgaaccgttggtttttggaacatgtgccnngactcagtttgttgatggtgtcgctgttgccgttaacgtttgggccgccctcctggtttgcgtccggttcgaagttttccatgtcttgatggttcccttcgggtttgtctttttctcttt

SEQ ID NO: 95497 - DNA, 197 bp, Zea mays
  Clone ID: MRT4577_187083C.1
ggaccgggcgcctggtaataaaaaaaaaaaggggcggttaagacaagctggtacctcatgcatatattttatggataacaatatgccggtacaaccgactggaaccgcgtccaataatgctgacaatcctttgcgctggcgtaacaaaggccgacacgcttcaacatgcacctgagcaaggacccccgacggcataa

SEQ ID NO: 95498 - DNA, 390 bp, Zea mays
  Clone ID: MRT4577_187084C.1
tttacttgtgtgtctttttttcttcttttgatccaatttttttttctctttcttgctttgttttttttgaccgggcaatgattctcaaaacaggccatacaattttttttcgaaatggtggaataattaactttagcatttcgcagggggttattcacctgttcaaaaactggttgtgggaggcttgcaaaaacatgaacttcatcctttggttccaaaaatgggcttggttttttcacaaacaaggtcaaacctttagaaaacatgcttgccccacatttttactcccatttcataaaaaggcctccctccggttttttttatttggcacgttttatttcaaaaatgaactagcgggcgataaattttcgagaacggatggggaatttt

SEQ ID NO: 95499 - DNA, 431 bp, Zea mays
  Clone ID: MRT4577_187085C.1
aaaccaggggcaaaacagtttccggtctaaaaaaaaacaatactattttgttgttacaggcagaaggctggccttgcttgaattatgaccgatgcccccttttaggtttttttacaacacgcttgcttttaattttccacagaaaacaattggggggggggggggcagcaacaggttttcttatccccccctttttaggggaacttgaggctggggaaccctttttttttaacggggtccgcgagggggtcaaacaggttttggaacgggcccaccccggggaccaccccctggataaaataaccgaggatggggagcttggggagcctgccgtttttgatctccttgagcttgagcttattcattttcttttggggcttgccaaaacccaacgggttaaaaaggggcccccccgggtaagacgggtcccc

SEQ ID NO: 95500 - DNA, 426 bp, Zea mays
  unsure (1)..(426): unsure at all n locations
  Clone ID: MRT4577_187086C.1
ggcacgaggccgtcggcgtggcgctcctgctgggtctcctctggtggaagtcccagaccgggaacgaggcccagctgcgggaccaggtcggtctcatcttctacatctgcatcttctggacgtcgtcgtcgctcttcggctccgtctacgtgttccccttcgagaagctgtacctggtcaaggagcgcaaggcggacatgtaccggctgagcgcctactacgccagcagcacgctgtgcgacgccgtgccgcacgtcgtgtaaccggtgctcttcatggncatcctctacttcatggccggcctccgccgcaccgtgccgtgcttcttcctcacggtccttcgccangctgctcatcgtgttaacaagcaagggcaccggggaactncttggggccgcatcctaagcgtcaanaaggcgggggtaa

SEQ ID NO: 95501 - DNA, 392 bp, Zea mays
  Clone ID: MRT4577_187087C.1
tactttgttttttatttcttttttttttggttgtttattcacttgttgtttgaagttgtttttttttttttgccgggcaaaaaatacaatttttagggggggaaaaaacccctggggggtgaagtgggataattcccttttttgcctgtttttgactgaaaaaaggtgtagactctaaaaaaaatgttttttatagggttgttcataaaaaatcttgtacaaaaatggggccttacttatctttaaaaagggcgaaccaaaaaaaggttgttcctttgtttttgaaaaaaacaggcgcctttaaataaataggccagctggcaaaaatatgtttcttacttcagagccccaaaacaaaaagggacatttctttttgcaagggggggttgccc

SEQ ID NO: 95502 - DNA, 1001 bp, Zea mays
  Clone ID: MRT4577_187088C.1
cccacgcgtccgcacgcctagcttctctttccaaaagcatggcgttcactgccctctcattgctataccacctctcgatcactgtatcgcttgtcctagctcgtggcattatcatagccggtgttgttgacatagctccacgtcccactcctctacctcttcctccgcagccacttcttgcaccctctccgactcctcgtcctccaggtcttggggcccctactcgcactcctcctcttcctcttcctcttccttcccctaggccaccacgcactccgcctacaacgactcctcttccacgtccatggttgggggcaccttctcctgcccgtgttcctcgtcctccacggctcggagcaccccctcgtactcctgttcttccgtctcctcgagtaggtgctccatctcccgcacctcctcctgttcgtcctccacagttgggagctccccttcctacccctgttgctcctactcctcagttggaggatccctctagaggtcctattcttcctcgaccgcctctcaagggtgttccaccttctactcctccacttgtggcaccacggttaggggcacccctcccatcccctcctgttccttcagctcggaagggcactccacctcctccaccacagtttagggtacctattcgatctcctgttattcctcctcctcagaagggcattccaccttccgctcctctaattcccgcaccacgattaggggtacctcttccatctcctcctgttcagcagccccctcggactcctattctaccaccctctcgaaagggtgctccaccatctatccctccactttctccaccaaagttaggagcaccacttccgtctccacttcttcctccgcctcgactaggagctccccctcgcactcctattcttgctcctcctcctcaagttcgtgccgtatttcctagtcctcgtagccctcctccgcgtttgggtgcacctcttccaactcctcttctacctcctcagtat

SEQ ID NO: 95503 - DNA, 814 bp, Zea mays
  unsure (1)..(814): unsure at all n locations
  Clone ID: MRT4577_187089C.1
cattgggaccctcgnagccggccgggactccattcggtcatcttcttccctacataccactctctctatcttttcttctcttcagactctactggaagcgtgcttcctgacattcttttcttgaaatcccacatagaagcttgcttcttttccaaatctccatcaaccgaacacttttgaacccgaaccgaaccgtcccaatcgaaaagtagcaaccatgcatttccgcggatcctccatctacttcggcatcgttgccctctcctcgacttcagctgtccttggagccgtcgctccctacggacaatgcggtggtaacggcttccagggcgagaccgagtgcgcacaaggctggtcttgcgtcaagagcaacgactggtacagccagtgcatcaacggtggtggaaacgccccggctcctcctgctgctactggcgtcgcgccggcacccgtcattccttctgccgcccctgtaccgtcgatgaacgctagcgagcccgttgccgnccctgttgcggttgctcagcctgctgccaccggcggtgccaacggctctgctcctgatgttgccggaaccggtgccaatggtgccaagtgctcgctcgatgctgcattcaagtcgcacggcaagaggttacatcnggtgttgctaccgaccagggcgcactcagcaagggaaagaacaaggagatcatcgtcgcaaacttcggccaggttactcctgagaacagcatggaagtgggatgccaccgannggtaccgagggcaagttcacttctcgacggtgccaacgcgctcgtcagcttttgcacgg

SEQ ID NO: 95504 - DNA, 318 bp, Zea mays
  Clone ID: MRT4577_18708C.1
ccggcgcagctcgatcctcttagagcgcgcccttttttttttttttttttatgccattactggaatggtggtgggaatttgaaacgcctttcgggcatattacaaatttaaacccgtataaaaattggtaaccctccctggggaactcccggtgtagagaactagagattggtgtggcgccacataaccacacctcccaaattcatggctaggtgtgttaggggagggggcttttcattgaatcttgattattgattttaacctttcaacaagtttccattattcacttgtcaaatctccttgagttctgtttcaaaa

SEQ ID NO: 95505 - DNA, 462 bp, Zea mays
  Clone ID: MRT4577_187090C.1
ttaggacacaggaaagcatgcagcgacattaactgctacttggcctctgtgtatgtcccgcacctaattaatcacgcgcatgcagaaggtacctgcaacgacctcaagcaaattacagacgatggtggatagcgccatggacgcggcgaggatcataggctacttcaaggataagaccatcctcgtcaccggctcgactggctttcttggaaagatccttgtggagaagatactgcgggtgcagcctgctgtgcgcaggatctacctcctcgtgcgagcggccgacgagccctccgcacagcagcgcgtccagcaagaggttaccggcaccgagctgttcagcctcctgagagacaagtacggcgaagaaggcttcgacctgttcatccgagacaagatcgttcctttggccggagacatcacgaaccaggacctgggcctggagccaaccacactcgacgg

SEQ ID NO: 95506 - DNA, 2951 bp, Zea mays
  unsure (1)..(2951): unsure at all n locations
  Clone ID: MRT4577_187091C.1
cagnacagcaagccagcaagcattaacaaacgagnaaanaaaccaanaatagttcctatttttttactaaagaaccataaagaataccctgttgcgggtccaaacacggttcacgagtcctgattccccgcgataagccaaagcgtgagttttttcaagtgtccacacttatccaaaatgaaatacaaattcgcataggccgtgctactgtgctagcaagcaactgatcctagtcatacactgggcagcaggcagcgagcattccactccacgacgcaaccatccggcgccggtctccgttcgtcgtcccagtctccgcgccgtcccgtaacaatcacaacactgcaggtagtagctcagtttcagtggtcgccggcgagccactcgactcgagcgcacggccaaattgttggaccgaaatccggttcctccccaccgaacggctacgcatccgccatgctcgtcgccctcctctgcctcctcgcctgctgcgccggcgccggcgcagcaggcgccgccgcgccgaacgcgcgcccgtgcgcgtcgccctactcggccagcgcctacccgttctgcgacgcgtcgctctccatcccggcccgcgcgcgcgcgctcgtctcgctgctcaccctggacgagaagatcgcgcagctgtccaacacggcgggcggcgtcccgcgcctgggcatcccgccctaccagtggtggtccgagtcgctccacggcctcgccgacaacgggcccggggtcaacttctcctcgggccccgtccgcgccgccaccgacttcccgcaggtcatcctgtccaccgccgccttcaaccgctcgctgtggcgcgcggtcgccgaggccgtcgccacggaggccctcggcatgcacaacgccggccaggccggcctcacgtattgggcgcctaacatcaacatcttccgagacccaaggtggggccgcggccaggagacgtccggggaggaccccgctgtcgctgccgcgtactccctcgagtatgtcaagggtttccagggagaggaaggagaggaaggcagaatcaggctctctgcgtgctgcaagcactatacagcgtatgacatggagaaatgggaaggcttctcgcggtacaccttcaatgccaaggtaaatgcacaagatttggaagacacgtaccagccgcctttcaagacctgcatccaggaggctcgtgctagctgcttgatgtgtgcatataaccaggtcaatggtgtgcctatgtgtgctcacaaagatcttctgcagaagaccagggatgaatggggcttccaggggtacattacatctgattgtgatgctgtggcaattattcatgaaaaccagacatacactaaatcaggcgaagattcaatagcaattgttcttaaggcaggaatggatatcaactgtggttctttcctagttcggcatactaagtcagcaattgagaagggaaaaattcaagaagaagatatcgaccgtgccctttttaatctattctcggttcagttgcgtcttggaatatttgataagcccagcaacaaccaatggttctctcaactagggcccaacagtgtgtgcacgaaagagcatagagagcttgcagcagaagctgtaaggcagggtgctgtccttctgaagaatgaccataattttttgcctctgaagagaagcgaagttagacatgttgccatcattggaccatctgcaaatgacgcgtatgcgatgggcggagactatacaggtgttccctgcaatcctacgaccttccttaagggcattcaagcatatgctacacaaacaagctttgcccctggatgcaaggatgcttcctgtaactcaacagatttgtttggcgaagctgttgaagcagctaaaagagccgatattgttgtcgtaattgctggcttgaacctgacagaagagcgtgaggacttcgacagagtgagccttctccttccaggcaagcagatgggcctcatacatgccattgctagtgtagcgaagaagccccttgtgttggttctcctgggtggtggtcctgttgatgtttcgtttgcaaagcaagatccacgaatcgcaagcattctttggctcggatatcctggcgaggttggtggacaagtccttccagaaattcttttcggagagtacaacccaggaggaaagctgcctataacttggtatcctgaatcctttactgctattcccatgactgatatgaacatgagagctgatccttcacgaggctaccctgggagaacatatcgattttacactggagatgtagtgtatggctttggatatggtttaagttactccaaatattcatatagcatctcctcggctccgaagaagatcaccgtgtcgcgttcatccgatttgggcattatcagcagaaagcctgcatacacaaggagggatggactaggctctgtgaaaactgaagatatcgcttcatgtgaagctctggttttctctgttcacgtcgctgtttcgaatcatggtagcatggatgggagtcatgctgttcttctgttcgcgagatcgaaatcaagcgtcccgggctttcctataaaacagctggttggctttgagagtgtccacacggcggctggcagtgcatccaatgtggagattactgttgacccctgcaagcaaatgagcgcagccaatcctgaaggcaaaagggtacttctgttgggtgcccatgttctaacggtgggtgatgaagagttcgaattatccattgaactctgacagggatgtgccaagtcctaccattttatggagttcaaagttgggaataatctgatgaaacttgtaaagaaacacgttgtaaagattcattattgagctggatgcgtgtacggtaaacatgctgtgacctgtgaagattcatcatttgagttgggtgctagtacaaaaaaaaaaaaaaaaaaaaa

SEQ ID NO: 95507 - DNA, 568 bp, Zea mays
  Clone ID: MRT4577_187092C.1
actctaatatttttcttgtttgttttttttgttctcggttttcagcctgatagcccctaaaacgcctgtgtgcaaagcctagcccaccggggggggggaagaagccaacggagtctggacatggagcccacagaaaaaggccgaacttcccccacaaaaaacaggaaaaaaagggggcaaagacaacccccaaactgggacaaaaaaaagccaagcctgggggggcccaaccggggggagatggggggacgccaggggccgcccccaaaagggcaaggggccgcacttggtcccccccctgaccgggaggaacccgaggggggaccgggccccaaccagggggggggggggccccagggggggccccccccttaaaaggggacggggggccaccccacagaccaccgccctggcaaacaatgaaaagggggtacccaagggcaaaaaggggggaggcccccggcccccaagggccccccggggcctgcggggggaccatgggggcgggaccgaaaacaaagccccccaaaaaaaaagccccccgcccggggggggggggggggggaaa

SEQ ID NO: 95508 - DNA, 1032 bp, Zea mays
  Clone ID: MRT4577_187093C.1
ttcctctcccgataagagtgaggcctcggctcagcttgagcttcccctccctcccctcctgcgctccagctcccctccatcctcggccaaaaattctgcggcgagctccgatccggtgcgactactaacccacgccgcagaagccgcgcgtcctgatcgcgcgggggtcgaggagaggggaagcgcggcgccgcggttgcctgccaccgcaccgccgcaggagaaggaagaggagcccgtatccctccgccccgctgcccgccggaccgatggactccgagcactggatctcgcgcctggccgccgcgaagcgcttctacgcggcgcagctcggccacagcgatcgggccgggatggatgagctggagatggacgaggaggtcaggcccgagttcccctgcccctactgctacgaggaccacgacgtcggatccctctgcgcgcacctggaggaggagcacccgttcgaacccctctctttgctgagccgagatctacgggaagcccacttgcaggtgctcctcggaggaggcggacagagatccagcgacaacagcagcagcagcagcgccacgaacatttcggctgatcctcttctgtcgtcgttcggccttggcttccctacctcagacgcggagcaagcatccaagtcgactgtttccattcctgatgatgcaacgacggtgaaagaagcgcccgctcaggcacggaagctaagtatcgattcgtcgctcacaagtgaagaaagggagctgaagcggaagcaagcccgcgtcagagccacgttcgtgcaggacctgctgctctctactctattcggcgactgatgacgaaccagagcgagcctggtattatcactggaaggtgcagagttgatgtgggcgtgatgtatctttctaagttattgtaagccggtctctgtcttcacaactgacgatctgtgtgtggtacgcaccacgcacgcaagtcgcggttgtgcgtgtacgtctgaactctggagcattggtttgttgtaccaacataatgagtcac

SEQ ID NO: 95509 - DNA, 333 bp, Zea mays
  Clone ID: MRT4577_187094C.1
ttccgaatcgaccacgcgtcccgacctaccttttttttttttagagaggtcactgaacaggaagcggaggtggggcattacatgaaatgagagcagatcttgcccaagttcgcatggacattatacctgggtgcaagcggcagcactctgggccagttagggattaccacaagattggctcgtctgcgaaacttgcataagtaacgcattaaaactagatccagagataaacatgaaccaaacatctgacatcttgctatggcttgacaagacaggatatgcccagagttattagcagggacaggagacgcacaaaaatctgattccagccgg

SEQ ID NO: 95510 - DNA, 737 bp, Zea mays
  Clone ID: MRT4577_187095C.1
ctcgaggccggccgggaaaaaaaaaactccctcccctcctgcgctccagctcccctccatcctcggccaaaaattctgcggcgagctccgatccggtgcgactactaacccacgccgcagaagccgcgcgtcctgatcgcgcgggggtcgaggagaggggaagcgcggcgccgcggttgcctgccaccgcaccgccgcaggagaaggaagaggagcccgtatccctccgccccgctgcccgccggaccgatggactccgagcactggatctcgcgcctggccgccgcgaagcgcttctacgcggcgcagctcggccacagcgatcgggccgggatggatgagctggagatggacgaggaggtcaggcccgagttcccctgcccctactgctacgaggaccacgacgtcggatccctctgcgcgcacctggaggaggagcacccgttcgaaccccaagccgcgaatcgccgccggctgcgcagattcatcattccaggcagccaggccctctctttgctgagccgagatctacgggaagcccacttgcaggtgctcctcggaggaggcggacagagatccagcgacaacagcagcagcagcagcgccacgaacatttcggctgatcctcttctgtcgtcgttcggccttggcttccctacctcagacgcggagcaagcatccaagtcgactgttttcattcctgatgatgcaacgacggtgaaagaagcgcccgctca

SEQ ID NO: 95511 - DNA, 1022 bp, Zea mays
  Clone ID: MRT4577_187096C.1
aattcggcacgaggacgagccgaccgcctcagctctgcctgctcacctcgttctcccggcgcggcccggcggggacggcaaccaccgcacggcgaataaaaaaacagaaccagcggcgccacgtccctgtcctcctcctctctctctctccacatttcctctcccgataagagtgaggcctcggctcagcttgagcttcccctccctcccctcctgcgctccagctcccctccatcctcggccaaaaattctgcggcgagctccgatccggtccgactactaacccacgccgcagaagccgcgcgacctgatcgcgcgggggtcgaggagaggggaagcgcggcgccgcggttgcctgccaccgtaccgccgcaggagaaggaagaggagcccgtatccctccgccccgctgcccgccggaccgatggactccgagcactggatctcgcgcctggccgccgcgaagcgcttctacgcggcgcagctcggccacagcgatcgggccgggatggatgagctggagatggacgaggaggtcaggcccgagttcccctgcccctactgctacgaggaccacgacgtcggatccctctgcgcgcacctggaggaggagcacccgttcgaaccccaagccgcgtatcgattcgtcgctcacaagtgaagaaagggagctgaagcggaagcaagcccgcgtcagagccacgttcgtgcaggacctgctgctctctactctattcggcgactgatgacgaaccgtgcgagcctaagctattatccctggaagggtggaggtccacgaaactcctcggcggtccagaaccctctagtaaggtgcaaagttgatgtgggcgtgatgtatctttctaagttattgtaagccggtctcttgtcttcacaactgaccatctgtgtgtggtacgctacgcacgcaagtcccggttgtgcgtgtacgtctgaactctggagcgttggtttgttgtaccaacataatgagtcccaacggcggatggctggctatccgt

SEQ ID NO: 95512 - DNA, 1309 bp, Zea mays
  Clone ID: MRT4577_187097C.1
cattgggtacctcgaggccggccgggctctcccatttcctctcccgataagagtgaggcctcggctaagcttgagcttcccctccctcccctcctgcgctccagctcccctccatcctcggccaaaaattctgcggcgagctccgatccggtccgactactaacccacgccgcagaagccgcgcgacctgatcgcgcgggggtcgaggagaggggaagcgcggcgccgcggttgcctgccaccgtaccgccgcaggagaaggaagaggagcccgtatccctccgccccgctgcccgccggaccgatggactccgagcactggatctcgcgcctggccgccgcgaagcgcttctacgcggcgcagctcggccacagcgatcgggccgggatggatgagctggagatggacgaggaggtcaggcccgagttcccctgcccctactgctacgaggaccacgacgtcggatccctctgcgcgcacctggaggaggagcacccgttcgaaccccaagccgcggcctgccctgtctgctctgagatggttacgaaggatatggttaaccatattactacgcaacatggatatttattcaagaatcgccgccggctgcgcagattcatcattccaggcagccaggccctctctttgctgagccgagatctacgggaagcccacttgcaggtgctcctcggaggaggcggacagagatccagcgacaacagcagcagcagcagcgccacgaacatttcggctgatcctcttctgtcgtcgttcggccttggcttccctacctcagacgcggagcaagcatccaagtcgactgtttccattcctgatgatgcaacgacggtgaaagaagcgcccgctcaggcacggaagctaagtatcgactcgtcgctcacaagtgaagaaagggagctgaagcggaagcaagcccgcgtcagagccacgttcgtgcaggacctgctgctctctactctattcggcgactgatgacgaaccagagcgagcctaagctattatcactggaagggtggaggtccacgaagaccagcgcggcggtccagaacacctctagtaaggtgcagagttgatgtgggcgtgatgtatctttctaagttattgtaagccggtctctgtcttcacaactgacgatctgtgtgtggtacgcaccacgcacgcaagtcgcggttgtgcgtgtacgtctgaactctggagcattggtttgttgtaccaacataatgagtcacaaaaaaaaaaaaaaaaaaaaaaaaaaaaaaaaaaaaaaaaaaaaaaaaaaactcgagg

SEQ ID NO: 95513 - DNA, 924 bp, Zea mays
  Clone ID: MRT4577_187098C.1
tgggtacctcgaggccggccggggttttagttgcttcacttggtgtcttagcggttcgtgtttgtaagtctaagctcctcttccgagccaccaactcgatctgccctagtcttcccatctcctacttaagtcaaggtccagtaggccgtgcagtcctagagctcgagtgatctccttggctcttgtagcctatgtttccccggagttaatcccctcccaatatcttagtccatctgcccagagcttggtgtaccagtccctaggtggtgaccatcgttgacagttagtccacctcgccgtgaccagaattcccagaagaagaagatgaaattcaagaagtggtttctgaagaggagtctgcttcagtgcctgttcatcaagtgatgggagccatctaactggggtttaatagagggatttagacctctgtctctgcaacaaaggagaagttttattcccttatctttgggttagttacttcatgtggaggacttgaagcttagaatgtttttatatatctcttatggaaaggcttcacccttcccattattgtaataagttatgcacttcgagtactatcaggacttgtaataaatacatctctttctaccatgtaaaacttgagttctggaatgtaaagtgtactttgtaaaagtcttccgctctatcttcaatgtgtgtgtatcaaatgtgattactgtaatatacctgttatgtgggagatccttaggatgatgagttccagttgacaaactcgatagccttgttaagttacccggtacacgtgcacacccacctcaggtcattaaggcaaggattggtgcatgtgggcccgataattgggagggctgtcacaaatatgtaatttcccaagggtaattattaaaccctcaaaaataaggtcatttagtattagtttcaccc

SEQ ID NO: 95514 - DNA, 2834 bp, Zea mays
  Clone ID: MRT4577_187099C.1
gatctacgggaagcccacttgcaggtgctcctcggaggcggcggacagagatccagcgacaacaacagcagcagcgccacgaacatttcggctgatcctcttctgtcgtcgttcggccttggcttccctacctcggacgctgagcaagcatccaagtcgaccgtttccattcctgatgatgctacgacggtgaaagaagcgcccgctcaggcacggaagctaagtatcgattcgtcgctcacaagtgaagaaagggagctgaagcggaagcaagcccgcgtcagagccacgttcgtgcaggacctgctgctctctactctattcggcgactgatgacaaaccaatgctccagagttcagacgtacacgcacaaccgcgacatgcgtgcgtagcgtaccacacacagatcgtcagttgtgaagacaggagaccggcttacaataacttagaaagatacatcacgcccacatcaactctgcaccttactagagggttctggaccgccgaggagtttcagcaagtcgggtggagcacgcacggttcgtcatcagtcgccgaatagagtagagagcagcaggtcctgcacgaacgtggctctgacgcgggcttgcttccgcttcagctccctttcttcacttgtgagcgacgaatcgatacttagcttccgtgcctgagcgggcgcttctttcaccgtcgtagcatcatcaggaatggaaacagtcgacttggatgcttgctccgcgtctgaggtagggaagccaaggccgaacgacgacagaagaggatcagccgaaatgttcgtggcgctgctgctgctgctgttgtcgctggatctctgtccgcctcctccgaggagcacctgcaagtgggcttcccgtagatctcggctcagcaaagagagggcctggctgcctggaatgatgaatctgcgcagccggcggcgattcttgaataaatatccatgttgcgtagtaatatggttaaccatatccttcgtaaccatctctgagcagacagggcaggctgctgctgttgtcgctggatctctgtccgcctcctccgaggagcacctgcaagtgggcttcccgtagatctcggctcagcaaagagagggcctggctgcctggaatgatgaatctgcgcagccggcggcgattcttgaataaatatccatgttgcgtagtaatatggttaaccatatccttcgtaaccatctctgagcagacagggcaggccgcggcttggggttcgaacgggtgctcctcctccaggtgcgcgcagagggatccgacgtcgtggtcctcgtagcagtaggggcaggggaactcgggcctgacctcctcgtccatctccagctcatccatcccggcccgatcgctgtggccgagctgcgccgcgtagaagcgcttcgcggcggccaggcgcgagatccagtgctcggagtccatcggtccggcgggcagcggggcggagggatacgggctcctcttccttctcctgcggcggtgcggtggcaggcaaccgcggcgccgcgcttcccctctcctcgacccccgcgcgacctgatcgcgcggcttctgcggcgtgggttagtagtcgcaccggatcggagctcgccgcagaatttttggccgaggatggaggggagctggagcgcaggaggggagggaggggaagctcaagctgagccgaggcctcactcttatcgggagaggaaatgtggagagagagaggaggaggacagggacgtggcgccgctggttctgtttttttattcgccgtgcggtggttgccgtccccgccggcccacgcgtccgcccacgcgtccgcccacgcgtccgcccacgcgtccgctgcgctccagctcccctccatcctcggccaaaaattctgcggcgagctccgatccggtgcgactactaacccacgccgcagaagccgcgcgtcctgatcgcgcgggggtcgaggagaggggaagcgcggcgccgcggttgcctgccaccgcaccgccgcaggagaaggaagaggagcccgtatccctccgccccgctgcccgccggaccgatggactccgagcactggatctcgcgcctggccgccgcgaagcgcttctacgcggcgcagctcggccacagcgatcgggccgggatggatgagctggagatggacgaggaggtcaggcccgagttcccctgcccctactgctacgaggaccacgacgtcggatccctctgcgcgcacctggaggaggagcacccgttcgaaccccaagccgcgtatcgattcgtcgctcacaagtgaagaaagggagctgaagcggaagcaagcccgcgtcagagccacgttcgtgcaggacctgctgctctctactctattcggcgactgatgacgaaccagagcgagcctggtattatcactggaaggtgcagagttgatgtgggcgtgatgtatctttctaagttattgtaagccggtctctgtcttcacaactgacgatctgtgtgtggtacgcaccacgcacgcaagtcgcggttgtgcgtgtacgtctgaactctggagcattggtttgttgtaccaacataatgagtcccaacggcggatggctggctatacgtacactgcagtagtgcgtaggagcgattagaccagttccgaaactacagccatgaagcgcatggctgtacactgcactgtataggtcacgatcagtgagttccgaaactgtgcttagaccggggctcctctgccttttctctttttttccccctttgatctctgatctggccttatcccaaacagaaagaaaattccaccagctcgctgtggttggcggt

SEQ ID NO: 95515 - DNA, 167 bp, Zea mays
  unsure (1)..(167): unsure at all n locations
  Clone ID: MRT4577_18709C.1
ggccgggagtcagggtaggacgaaagaantcncctaattctttcnattcaattaccctctttcatccattcttcatcccanctaactaaacatgtcttaccttccatttatttctttacataagtacatcaactatcacctcatctccnacatctaataccaccacc

SEQ ID NO: 95516 - DNA, 363 bp, Zea mays
  Clone ID: MRT4577_1870C.1
cagaaatgatggagaatctacaatacaaaggttttaaattttgcgtataaaattatacaagtcagagataaagtcgtacttgctcgtactgaactaagtcgttggccttgagggccgaatctttggctttggtggtcgagtccatctggtgggtcaaatcttcattggtgatcctattctggtctaatatatttgaagatggctaggctctgctgcagatcggcaatttgctccttgatgttggcctgcataataaccacttggggccacataccgatggcctagcttaaaggctacagacaaggcaaaatagtcagagacataaatgtcgaagattttagggcggtttggagtgacacctac

SEQ ID NO: 95517 - DNA, 340 bp, Zea mays
  Clone ID: MRT4577_187100C.1
agcggagaggcctacacccggtacgagcctgtgggggaacgaggtgcctacgaggcctgggtggacgtgaaccgtgtggctctggagcgcttggacaccatggtcggggtacccactgacccacagatataggagaggtacaacaatggggcgggggagggggccaagcgcgtgaacgacgggggcatctatcagccgctgattccaagggaaggactcgcccgagggataagggaccaaggggctgacgctgttgtagaagaaagaggaggagacgattgcagccgagggacggatgaatggtgatgaaaactgcatagcccaatatgaagaaggatga

SEQ ID NO: 95518 - DNA, 366 bp, Zea mays
  unsure (1)..(366): unsure at all n locations
  Clone ID: MRT4577_187101C.1
ggcacccgccnggcggacccggcgccacagaacgggcgcancgnggcccggnncgggnncgggnagggcggcaaggcgaagccngcnccgaagaagggggcgaagacancgaccnccncngaccggccgcggaaagaggcccggcgccgnggcgcccgacgaccagaacggcncgcnggncggcgaccacgggnncgacccgnncggncncgggaagcccgnggagnaccngcagnncgagnnggacccgcnggaccagaaccnggccaagaangaggccggcggcancaacggcacccggnncgaggccnccgaagncaagnccacccngnngcagcccaacagcgaggngnncggcccccagcg

SEQ ID NO: 95519 - DNA, 280 bp, Zea mays
  unsure (1)..(280): unsure at all n locations
  Clone ID: MRT4577_187102C.1
tttttnnttnctttgagcaaaaaattggtttcagtttttaaaaagagttacttaacccaattttcgccctgaaaaaaacattggtggatcctcggccgggacctcaacttttaaaacatgactggttccgtccatggggggggcctaaaatacaaaagaaccccctctttttttttttacaccgcgcgaaaaaggggcgccccacccggggggggggggaccagaacccccccccgccacgccggaaaaaagacaaaacccggcccaaaagccccccccc

SEQ ID NO: 95520 - DNA, 145 bp, Zea mays
  Clone ID: MRT4577_187103C.1
gccactcgtccgaattcgcgtcagtctgcatgcagggggtaacaataactgagtagggggcaagcacgacctaatcactttcacccgttaccccctacgtactacaggatacacacctctgcttcaatcttacatagtgcagata

SEQ ID NO: 95521 - DNA, 282 bp, Zea mays
  Clone ID: MRT4577_187104C.1
aggtttatttgatcatttagcgaaaaaaggaggagaatcaattgaaaaagggtgaaggacttatatacagagaaacaaaggcacctaagggaaaaaaatacgccagcagtacggacactaactaatgaaggaaagacaaaagcagtagaggtgatgactgaaacatggtgaacaaaagggcaggattgttagagagtaggaagtattttaggtaaaggggagaggggttaatgcctaagtggtgagcgtccgggatcaatgaaaaggcttaggcctggagaa

SEQ ID NO: 95522 - DNA, 328 bp, Zea mays
  unsure (1)..(328): unsure at all n locations
  Clone ID: MRT4577_187105C.1
atatatcatcataatcaggcattgntntggctcctaatanccttacntggagttaagggncancctgattgttctancaagaaaagggggttgcaactttcttcngngggcaatcangcaaggcattgcaattcatctacaggatagtancaacggcaaagattgcgtactcggatagctctaagaaaaggtnaaagattgatgtcgttcttgcgaaacagcttgtgttgagggcaactctttcnnnnaattcngtcctttcatattacaggttcgagctagtnggagtttnctcttcaaacgcttgcatggcttnttccganggcag

SEQ ID NO: 95523 - DNA, 525 bp, Zea mays
  Clone ID: MRT4577_187106C.1
ggtaccggcgccctcctctcgagttttttttttttttttttttttttttttttttttttttttttttttttttttttttgtttttttgttttttttttttttttttttctcttgttttgttctctttttcttctttttgggaaaaaaaaattccagggggagcctggacctccccctaggcgccgcccatccccttttttaaagggcttcccgtaaagggggggccgtttctttttaggggccccaagaaaccagtttttttttacaccccctatggaacggccaggggttggtgagacggggcccttccctcccccggggtaaaaacccctctggtgccttggccccggggggggaaaacaagcccctccccccccccgttttccgggggccaaaggggccttgccccccgccgctaaaaaacttggttggaaaaaaaggcgcccccctcgcccctagataagggggggcaaccccccccgaaatttgggtgcaaacaccccaaaaaaactgttttttttgctc

SEQ ID NO: 95524 - DNA, 719 bp, Zea mays
  Clone ID: MRT4577_187107C.1
cagttccccaagcgttgggccatcgtcttcctctgcttctccgcatttctactctgcaacatggaccgcgtaaatatgagcattgctattctgcctatgtccgcagagtttggttggaacccacagactgttggtctcatccagtcatctttcttctggggctacctcctaactcagatagctggagggatatgggcagatactgttggaggaaagactgtccttggttttggtgtggtttggtggtccattgcaaccccctcaccaattcccatgaaagcccgcacaacaagaagaaatggcaagccaagatgtgctgcaacaggagtaagagctgtagctatggaccaccaaaccacaccaaaaccaaggacagtctttcctccaacagtatctgcccatatccctccagctatctgagttaggaggtagccccagaagaaagatgactggatgagaccaacagtctgtgggttccaaccaaactctgcggacataggcagaatagcaatgctcatatttacgcggtccatgttgcagagtagaaatgcggagaagcagaggaagacgatggcccaacgcttggggaactgtccctgctcctcctcactgtctccctccgccgccgcaggcgcctcggagagcagaagcctcctgaccgacgccagcagcgccccggtgtctccaccgcccccagccgcttgagggtcgtcgccatc

SEQ ID NO: 95525 - DNA, 343 bp, Zea mays
  unsure (1)..(343): unsure at all n locations
  Clone ID: MRT4577_187108C.1
cagtgaaaggttaaggatatattacaaggtatggacagggtacatggaaattttgtttacatttacaaaaagtatctcaaaaggttttcaaggtctggctggaggctactatttaaatctccaaagggcttcggcttcggcggtatttttgatcatcaactttagcttcgtcatctggatcaaaggggctacaaactttatctccaaacttttctcgaccaccttttgtgcatatcatttttacaaaatcgattcgagatgctttgggcgagatcagggatgtcatccacgattgatggtgacaaagtaaaatttggcctattgacaattnttccatgatcac

SEQ ID NO: 95526 - DNA, 400 bp, Zea mays
  Clone ID: MRT4577_187109C.1
cggccgggccgggaaatcctaacggctcagacattcgtttctcgtgagtcatcgcttctgtaattctcaggcatccggaagaaatgtgaagtccaagatcacacggcgcacaaccagtcgttcaaggggcacaagaacgcgattaacatacccaagcgtcaccgccagatctctaccaaggggatggaccccaagatcatgaggaacctgatgtattctaggaaggggaacaaaaagagtggtgaggctgaagctgatgtataagaaggagaggatggctttgtttcctctgactttagatcagttccacctttatgaactgcgtgtttgataaagatggaacttaaatgcagctactgtatgatgggaacgaccttttgctgacgaaggatatggtttg

SEQ ID NO: 95527 - DNA, 192 bp, Zea mays
  Clone ID: MRT4577_18710C.1
gtgactttggaggcggaggatctggtggcaggcgcccgcagcggtggaggcggcgcatctgctggctggtggaagcgctggcggcgaccaatctgaggctgtccgagaccggtcgttgccccgccgcacgcgctgaagctggacgtgtgctccaacttgatggacggcccgatcaacaccaccctgcgggac

SEQ ID NO: 95528 - DNA, 437 bp, Zea mays
  Clone ID: MRT4577_187110C.1
gggggggaaaacctcatccccggggggacaccgatcggtgataccgattgctgacacactagaggaccttcgccactcacaggatggggagcaaatcccagcagcctcctttttagttaggggaaccagcttagcgcatatacagggctagcacaatttaaggttgagccgccaaacgataagtaccattatctagcggctgctcacaaccaaaacacaatcagttttaaaactgacacaaggtagccaccgttcccccgcgatagtaaatatggcgtcaaagcaacaagcttgcgcggaggagacatatatcttgggcgggagggccttgcactcttgaaattctgaataagacctctgctgaatcgcccaccaacattgatagttagggtgaacaggtgactcccaaccattgctctggaacgctgcttgggctt

SEQ ID NO: 95529 - DNA, 232 bp, Zea mays
  Clone ID: MRT4577_187111C.1
tcgcggacgcgtgggcgacacccgaccccggcgttgtgatgaggccggcgctgctcaagtccacggccgagctcctacgccgtaaccgcggctacgcttcctcggccaacccggagcggaaggtggccatcctgggcactgcggtcggcatcgggcaccctctctccctcctcatgaagcgtaacccgctcggttcctccctctccctctatgatatcgccgggacccccgg

SEQ ID NO: 95530 - DNA, 222 bp, Zea mays
  unsure (1)..(222): unsure at all n locations
  Clone ID: MRT4577_187112C.1
gnnagnncccggagggagcatcaccacaaaggcttgccgggttgacatggggcactgaacatcccattcattcacaagggaaaagggaaaaaaaaaggcatttatctgttgaccacctataattctctataggacccgacctgaccaccgaagaaagaaagaaacccttggaaccccctacattattatccaacacagctgggctttagttaatccccaaac

SEQ ID NO: 95531 - DNA, 435 bp, Zea mays
  Clone ID: MRT4577_187113C.1
caaacccaaaaccttgaaaaaaacttccttggcccaaactttttaattaaattgtccaaacagggggattgacaaccccttccccaattaaagccttggttgatgagggttctggaacaatccttcctaagcggggacaaaatttacaagctagcttgcccagaggcctttttactaactagtagtaaatgaaaaaattccccgtttgtaaatttattttgaagaatgttttttgccccattattccaaaccaagcattccaaggttccaatttccaaaccccaacaaaaataacaagggttttttttggcccccgaaacaagctgaacctccctcctcctaatggtttgcccttggcctgggtgaaaatagagccaagggcccctttttgaaccacccgtttttgattgcaaccgttttccttttgttcttccc

SEQ ID NO: 95532 - DNA, 483 bp, Zea mays
  Clone ID: MRT4577_187114C.1
gtgggggggggttttttttttttttttttttttttttttttttttttttttttttttttttggaggaccgattctgtattttgaaaaaaaaaagtactttcacaaaacagctagatgcatgctactcctatcttccccccccaaaaaagggggggggggggcgcttttttttctacatggcactgcaaaggatccccatccgggggggcccacaaaaatgaatgggaaacgctgaaagcttccaaccatgccctttcgaattggcaacctactcagccactaacacaaaagggggcctgcctgccttggtggggcctccacgggatataactcaccccttttcccaaatccattcaaacgctggacatatatattttcgactaaaccattggggcaacgcaacaaacaataataacttgcatcaaacatggctggtcggactcaacaacgggccccacagggcgggaaaatattgggggtcaa

SEQ ID NO: 95533 - DNA, 310 bp, Zea mays
  Clone ID: MRT4577_187115C.1
agtggaaattcatattaaaagctgcaacaacccccggggaaggatgaatttttttggggttcaaactaaacacaccgccctattcacgtcgcttaactgctatctaaccacttgacacatctaacactaaaaatcctgcaagtctcttagtcttgctacaacaacaatactcattccattgattcgcatctaacccaacaaaaagcactagagtcctcacaattaatctgctggatccaacccatacaagcaaaaacaaccccaaaacttctagggggggggaacaccaaacaccaaccctaccccccta

SEQ ID NO: 95534 - DNA, 352 bp, Zea mays
  Clone ID: MRT4577_187116C.1
taaacagagagtgagcatggatgtaccctgtgcaacgtggcagatgtctgaggaatggtttgattgacgctgaggaggagctctgtgccttttcaaccctccccagccgctcactctactcccaagctctggggctcgcctgcatggggctcagacggtgggctgctcctggattttgtgttctcctctccttcccttcaaagaatttggaggccagaaacgagactgcaagtggggggatgcagtccttttacaaaaccgacaactgtcaccaaagcttataatacaggacagtactgtccctcttttcttgaacatcagatgacacagactgttagtgacacacggtgac

SEQ ID NO: 95535 - DNA, 1293 bp, Zea mays
  unsure (1)..(1293): unsure at all n locations
  Clone ID: MRT4577_187117C.1
tccttccccacagnagcagatgctgcngaccggaagacgtatcagagaaccattgccgaagtcggcgacgatacacgatattaagatagtgcaatttagaaatggcctggagggaagagcttctcagatgtcgtcagtccaagtattgttgaactctaaagacttgctggacactgagcctgaaggaatacgtgaactaataagcagttgcaaagtcgggaacgctacaaaatcaaagttaagaaaagtggcagaatggatcatacacactaaatgtgctcttggggaaagtcatcatcagatgcaggtggtatctaagaactggaaactagcaaaagaaaatgaatcagcacattttttgtctatatcagagctaatctctcagagaaagttatgtaatataaacatttttgcatgcatcggcaagatggttctagtgagttctccgacctcccctttaaaggtaaacttgtcggtcatcgacagacgttctttcaaagagcacagtgatattgtcagagatttggttactgctggatgtaagctgtgtggttcgcctctctatcacaaaaaccttcatgaggaaaacacgtttgcacttgattgtcctaataacccaaaatatctccatgttcctggtcagatatacaggccatttctgatatatatctatgaccaatctggacaagttcctttgcttgtgaggaatagagctgcggagaccttgtttgccaatatcactgcagatgatgtatctgaatgccacaacagccacatgctgtcagaaacctatgaatcgtgtaacctgagcacccctggtacggtagatgattgcggcaacaaagagatagcgaaaaggagaaaaaccgaacagaagcctaatttctatcttatttggcttactctggtcaagtgtctgctgagccaaggcagcaacagccccttctgcttccagatctcagtcaaccccgagaagaatgttgaggatggacgattcgaattggtttgtttgacaatgccaataccatgagatagattttttttcttatgcaacacatggtttaagctgaaccaactcgtttttttttcctagaaaaatagcaaagcctctctttttccccccacaagaatgttcattggtcattccattagttgaaatcttgctgacatactgtcctgcataggaacttggtttggatggcagaactatcggatgttggctgggcatggatatgattccacttgtacctaaccatttgaatactaaccttggagcccgctgaaagttaaaaa

SEQ ID NO: 95536 - DNA, 374 bp, Zea mays
  Clone ID: MRT4577_187118C.1
gctcgccgtggaatgcaccgacgacctgtcggtaccggcggcctcggatggccgaggtggtggctaggatcgaggtcatcgtccggagcgcggagctgaaggcgaaggccgacacgtgaggatgacgcacttccatagcatctctccctaacctgccagctcggtcgatctctgtggttattttaagatcttgatgtgcacattgcgcggcgatgtacatgttcgtaacattagtcactcttcattatttctctgcaagataaacgcgcagactcaagccgtctacctggagcaagtgctgcgggaggcatactcgcacccggccctcatcctaatcatgctgcggactgcactgcaccctatcgggtgctacc

SEQ ID NO: 95537 - DNA, 1095 bp, Zea mays
  unsure (1)..(1095): unsure at all n locations
  Clone ID: MRT4577_187119C.1
ggggacccccgggtctgcccggncatggctcgattttcccctctttgtgccgagcgctacgcggatgatttcgaactgtcagatgctcagtacgtgcatgctctgtctgtagagcaccttgtgccaggattatcagatttaaaggctcagatttgctctactgacatgactgaagcatgcttctggaagatctactttgtgcttttgcactcgaaactcaataagcaagatgctgaggttctttcgacgccacagatcctagaagcaagggagcagttgttgcaaagtttagggtctgagaaaaagcggggatccaagtttcccgacgagtcatccgccgagagctcgagcgcatcctccgctcctgctgaagagaaggtgattcaacctccagtcatccaagacaaagcaggcacttgggacaaatgatcgtccgaagaaccttctgaaaccgtgtccgagaaattcccagtctcaaccaccgaagtggaaatggtggacaagtcagtggttgaggaagagctgactgtggcaaatgagagcaagacctcaccggtgaagtccaagcttccctacgaggctgatgaagaggaggaagtcgacgagtggcccgatgacgaccccaccgatgaggctggccacaggactttgctagggcgggaggaggaggacgtgtcgttcagtgatctggaggacgacgaggacgatgataggaggtagaagcggatgatgggcagtagccaagttggctaggggaaagctcgtactatggtcccggcgcacaacagtcatggtgatccgtcaaccacatgctggcttcattggagtagggccgagaacacactcacacccaaggatcaatggtttgttagttattattattagagtccggaagtaatgagtcccaagcagtagcaataagcatgcatgtatctgccgcgcgtgttagtgctaatggcaagtcctgctgcttctgtattattggccccgtcctgtagcttgtacatagagcgctcgcggttgggttgggccttgtgtaataaacctaccgtccgggaacttgagcttgtgtttaaaaggaccgacctgttcatt

SEQ ID NO: 95538 - DNA, 2626 bp, Zea mays
  unsure (1)..(2626): unsure at all n locations
  Clone ID: MRT4577_18711C.1
gaacattcttgcatgttaaagcatccgcttacaggactaatttttggtctatttgcgtctgcaaacggaacaactgtctgatcatgtttgcgccctcttgaggttcggacgttcactaggttggaatctggggtgcgccccacggagcggaggttgctactagcagcacagattcagcactaggagctccccatgcggatctccctaggcgttactcatgaatttgttcccctttggattcttcaccaagcccgccatcctcaaggtgagagattggtatgtggagtcattccgtgacatccggtccttcccagaggtgaagaaccaggaagatgaactcgccttcacccagatgatcaaaatgatcaaggtgcggcacaccaatgtggtgcctgcggttgcattgggtgtgcagcagctgaagaaggacttgggcggtccaaaggcgttcccccctggaatccatgagatccatcagtttcttgatcgcttctacatgtcaaggattgggatccggatgctgataggttagtgagcttagcattcccgtctcttcatgtccagttctctgaaaggtgtttggtcagtcttggtaagattagcacttttggtattaacacactgttgataaaaaaagcaatatgtctacagccctaattcagttatctgttatctatggaagtttcccttgctgctactgctttctttcttgcccaaagaagacagggctcctgaggcttttgagcctagaacaaatctaaatttcagggcgcattttatataaacatgacaatactattacttaatatatatgtaaacaaatgttatcaataaaaaataactgcatgtaaaagtaatattcatatcaaataatccaaacaaacttaaaagtttcttctaccatttctcgacattgagtcattgatgatgccaatatcagcttcatccaacaatcgtttctcaatacataatgtttccaaaccatttaacctctcttgaaacattgtagatttcaaatagttcttcaataattttatttttcagaagcttctttcagctgattaaattaaattaattcctaattttcacaagacaatttacaaaatgacaagaataaataaattataattttctgtgggatccgctgtagtagactactagtagtatgcctgttagcctgtagccttgtgcagatgtaccttgtatgcctgtactgctggagaatcggagactcggagttcctagatggccgctggacgcttacatggaattgaggatttggtcgtgctcgtgtacatccgtacatgcctacgtccgccaaccggcccggacagcaactgcgtttgatactatggcgtctcacatctggcgtgcggcatcgcgctcggctgctcgcgtgatgctgtaatcgctgattcgagtccccgccaccactgctgttgtgttgtcgaagccagaagtcgaggcgacgggtgaccggtgtctagcctcttggggccagggaatggaagagatcattgatcaggccttggagtcaaattgtgtgggcgtggcctgctcctgctcgtattagagttctgctaatacgatataccgggggtgggacccttggtttggggggctaagatgtctattccattcgcctgcctctagggctggccctgaaagaacatctgaacctgtcattctgtccgatagatttttaaatgacttttccgccctcatttatttggaaacttcagttcaggtgcaaacatataggcatcatatttttttgacataattctattgttataatagtcaggaaataaaaaactgtaattcttggctggacaccagaagtaactgttgtaatgttcctcaagatctagtggtcaatgtataactaatcatattattccttcattttaaacaaaaaacattgccatactgttacttttatgacataaattccaggtgggaacgcctttggaccacccaagtccttcttcagctgctgcacacccaatgcaaccgcaggcaccacattggtgtgccgcaccttgatcattttgatcatctgggtgaaggcgagttcatcttcctggttcttcacctctgggaaggaccggatgtcacggaatgactccacataccaatctctcaccttgaggatggcgggcttggtggagaggccgaaggggagcgagtcgaggtcgagcgcccgtcgcgcgatgcggatggggagctccttgtgcaggaactgtgcggcgagcaggagggtccgctccgtggggcgcaccccgaactccatcatgtagcgcaagctgaccccggtctggcgcatcgcgccccagcgcgccacctcctccgccaccgcccgcgccaccggctccaacgccatccttccttttttttttgtttccctccgccgccgcgcgcgaggtttgtggaattgggatgacaaatgaagtgaaaaatgtcaggccatctacggcggcgcgacggcgatggagatgccggcggagcagcgcatcgacgtggtggtatatataagtgggccgcaggaggaggccaggagggaggaggtgtgacgcaagaggataaccaaaatggaatatggtcnccggccggcctcgagggtccc

SEQ ID NO: 95539 - DNA, 938 bp, Zea mays
  Clone ID: MRT4577_187120C.1
gtccggaattcccgggtcgacccacgcgtccgggaagatctactatgtgcttttgcactcgaaactcaataagcaagatgctgaggttctttcgacgccacagatcctagaagcaagggagcagttgttgcaaagtttagggtctgagaaaaagcggggatccaagtttcccgacgagtcatccgccgagagctcgaacgcatcctccgctcctgctgaagagaaggtgattcaacctccagtcatccaagacaaagcagacgcttgggagaaatcatcgtccgaagaaccttctgaaaccgtgtccgagaaattcccagtctcaaccaccgaagtggaaatggtggacaagtcagtggttgaggaagagctgactgtggcaaatgagagcaagacctcaccggtgaagtccaagcttccctacgaggctgatgaagaggaggaagtcgacgagtggcccgatgacgatgacgaccccaccgatgaggctggccaggcggcgggtgacaggactttgctagggcgggaggaggaggacgtatcgttcagtgatctggaggacgacgaggacgatgataggaggtagaaggggatgatgggcagtagccaagttggctaggggaagctcgtactatggtcccggcgcaaccacatgctggcttcattggagtagggccgagaacgcactcacacccaaggatcaatgtttcgttagttattattattattagagtccggaagtaatgagtcccaagcagtagcaataagcatgtatgtatctgccgcgcgtgttagtgctaatggcaagtcctgctgcttctgtattattggccccgtcctgtagcttgtacatagagcgctcacggctgggttgggcctttgtgtaataaacctaccgtccgggaacttgagcttgtgtttaaaaggacctgttcatt

SEQ ID NO: 95540 - DNA, 275 bp, Zea mays
  Clone ID: MRT4577_187121C.1
cccgcttctgattttgaatgctttgtatgtgtgaagttatacaagtgtgacggacatatcctcgtgtgtgaatgtatttgtatggtatcaaacgaaaaaaaaaaaaaaaaaaaaaaaaaaaaataaaaaaaaaaaaaaaaaataaaaaaaaaataaaaaaaaaaaaaaaatgatataaaaacaaatatacatgcgtaaaaggacaaaaaatgatggggggcgcctttaaaaaaaatacaatttaataccagtgtatcagactaaaaaattttttt

SEQ ID NO: 95541 - DNA, 191 bp, Zea mays
  Clone ID: MRT4577_187122C.1
ggtgcgacacctatgatgagaccctgcgggcggggcaccgcgagccatgggcggtacatcgtgcacaccctgcgcagccggcgcgcacttgagacggcggcgccccacagttgcctcgagcaagacaaccccccacagaccccaaaaagaacacgagaacagaaccaacgcacacacacagcgacccgggg

SEQ ID NO: 95542 - DNA, 280 bp, Zea mays
  Clone ID: MRT4577_187124C.1
ccaaaccgtgctctgaccattgcgcacacacacacactgtctctcccaccgaagacagcggagaggcgtcccttcgataagcgtctccagccttcatgaactaaaatatcgatcgtaattcctcctattgaaatacacggacaatggcagggcgatgtgcataatcacatcttcaagactcacattctgcgttgaccgtgcgagatgctagccagcccagaagcggttcggttcattcttttgacacaagcgcacctgttcaagctttctgaataaacgg

SEQ ID NO: 95543 - DNA, 438 bp, Zea mays
  Clone ID: MRT4577_187125C.1
aaacccccaaaagggggggtttgaaaaaaccaaaccgccaaaagggcaggaccttagctggggtcttttccccaggcttggggggatttggttccaagcaaactctccgttctccggacacaggggtttgcttttaaggggccgggtcaaaaaggtcatcggtaaacttaatttctagggcagtcgggggaggaacagccggggcattacaattttccggggctaaaacatccgggtcagcaaggtcatcggtaaacttaatttctagggcggtctgggcaggaacaggctggtcattaaaattttcctgggctaaaactttttaaccaggctccttaattagcacaaaaaaatcatgttgcaaatgtttggggggggaaaacgtcaaaaaaaaaacagttagggggtttcctggaaaacacaagcacttgcttcccg

SEQ ID NO: 95544 - DNA, 213 bp, Zea mays
  Clone ID: MRT4577_187126C.1
ttatattctggaaattgcagtattaagtgccttttcctctcctgaatattcaattgacctctatttaatgcatttttaaaccaaacttttaaacggactggtgcatgtgcaatgttagtaattagaagttttaccacatggaaaattcgtggttataaactttctaaatcatggtgacttcattgaaagccattagttgctattctcttaggg

SEQ ID NO: 95545 - DNA, 210 bp, Zea mays
  Clone ID: MRT4577_187127C.1
ttatttttttttttcttttttttaaattttcttacctggggggtttttttgtggtttataaatcctattcattaaaatttaaccccggggttccacccggaaattttggaccggtccctggggggggacaacttttcaataatgtgggtcttattaaacttgggccaaagaacggtaaaaaggaggtccggggtgaaaaatgtttcccct

SEQ ID NO: 95546 - DNA, 476 bp, Zea mays
  Clone ID: MRT4577_187128C.1
cggatgcgtgggcgaggtggtcccgtgccccccgcggtatctcccaggcctgtgacggccagcgcgttcgggaagatggagggagacgacttgtcatccttgtcgccatcaccggtcccgtacattttcggtggtgggttgaggggaaggaagccaccggctatggagaaggtggttgagaggaggcagcgccggatgatcaagaaccgggagtcggccgcgaggtcgcgccaaaggaaacaggtaaatacatttgtcggcgggttctgcctttacctagttgtatcaattcgtcacgtttcctgcttatattactagttatactgacacgtgtaacggtgtaactttaatgtctatgttttatttttttcctcccaacatgttaagtatttcgcactaatggcgttaagaattctgctgggccatgtgtctagtgttggcccatttacgtgtacacatatactacaagtgtgtgt

SEQ ID NO: 95547 - DNA, 373 bp, Zea mays
  Clone ID: MRT4577_187129C.1
attcggctcgagccgttgtgcagctagccctttgtgatagcactgttaccacacgctagtgaacttgctacgggagaaactggacggggcatgaccgctcatactcggggccatgccctagtagtatatagtcacacacacatctgcgcagatccagactgcctatcatgatggacttgcgatatagacagcctatgtgcaggctgtgtgtggcgatagagggttgttcgccctagcgggcatgtaccgtcactatgggcgtggatatagatggcgatacgcgttgtgccgagacctacaaacaacacggcatgattattattagtgtggtccatgcacgggtgcgacacgtccgagcggcacctcgactcgt

SEQ ID NO: 95548 - DNA, 401 bp, Zea mays
  Clone ID: MRT4577_18712C.1
aaaaaaaaaataccttgaccttttgcacatccaactggtgtacaaaaatttttgccccccccccaaacaattggaaaaatttggtcaaacaaaaaacccccccggtttgatttgcataaaccatgggcccttctttaaattaaaaaaaaacaaggggacagcctgacggattaaccagtttagtggacgggtcagtttacacacactttacagcctgagcgttaaattgggctcctcccgggcatgcacggggacccccccagcccagtttaagacgggcctcccccccggcacaagaaccacgggggtggctggttttaaactcccgggccaaccaaaatttattttcccctttttggccacaaggaaaggcatggggcttaacaacccccgcgcgggcc

SEQ ID NO: 95549 - DNA, 843 bp, Zea mays
  unsure (1)..(843): unsure at all n locations
  Clone ID: MRT4577_187130C.1
cattgggtacctcgaggccggccgggctataacccgctccgcctagctccttcctacccgttacctgctgcggagcggagacgacgaccacttccacctcctccccccttccgcacccaatcccatccccctttccaaattccaatttccagcaggccgcccgcgatgcccaagccggcgacggcgaaccggcgccggaagcgcggcggcggcggcggcggcgaggggggcgccgccgatgaacaggccagcagcaagaggaggcccgccaccagcgtgctcacctccctggacgtcaacgacgccccgcgcccggagctccccctcttccagctgagccggcctcgccagcaggcggaacaggacgacgaagaggaggaggtgaccggtgggggcggaggaggaggagcggggtcgttgttgtcatccgcggtcaacggccacgggcagagcccgcaccagcagcggcggctgtgggtcaaggaccggtcgcgcgcgtggtgggagcagtgcagcagcgccgactaccccggaggcggacttccggtccgccttccggatggggcgcgccaccttcgcgatgctgtgcgacgcgctgggcgcggccgtggccaaggaggacaccgcgctccgcgccgccatccccgtccggcagcgcgtggcggtgtgcgtgtggcggctcgccacgggggagccgctccgcctcgtgtccaagcgcttcggcctcggcatctccacctgccacaagctgggtcctggaggtctgcgccgccatccggngcctcctgatgccgcgcttcctccgctggnccgatgacgccgcccgccgaggcgttcaagtcc

SEQ ID NO: 95550 - DNA, 313 bp, Zea mays
  Clone ID: MRT4577_187131C.1
cgtccatttttttttttttttttttttttttttttttttttttttttttttttttgaaccaatcaaatgcacatgttacttttttattggaacaaaatgcaatatggaaactgaatacctccctgaatgaaaagtttatgaataaataaggggaaaatgaaatagaccacgagttctttgacacccgacgacaggggcacccccccatgcagcaacaagcacacccgttccatttgatgaccacgggccaaaacgaccacggggacgatgcatacccagcctgcactgttttgtcttgaaaaacaagttaacc

SEQ ID NO: 95551 - DNA, 548 bp, Zea mays
  Clone ID: MRT4577_187132C.1
gatgctctgctatgatatccatggtgcttaatgcttgattttaagtgtttcatcctttttagtatagagtatctatcttatactcgttctacttgtgctcatacatgtgcatcgtgcatctcatgaggtacgataaataatcatgtgatgcggaagacgagccaagtcgaccccaagcacgggctaaatccgcaggatgaagctgatggaccaacctgaagatggttaaattaagcaagtgctcggtcgagggatactcgtcaagcggacatcgtctaacaaacactaacgtagtgttattccaggttatagttttgtgctgctgttgatggtgttatgtgccggtgggctcggccttcttataagtctaagtaattcttctatacttcttattgaggatggtcacttgagctagcatatatttcaaacttacaaataatttataactgttcaaagttattcctttgaaccacttttgcaatcactccgataaatacaatgtaaacttgttgtaacttgtaaaatttggtaataagattttccgctgc

SEQ ID NO: 95552 - DNA, 1905 bp, Zea mays
  Clone ID: MRT4577_187133C.1
tttttttttttttttttttttttaaattacaaacagtttatatattacattcaaaactacaaaatattacacactttgttcagcaaatattacattaatattccaaatgtttttacaataatagccattcttcttttaaaactgcttctgcagcctcgtttagtagtcgagtaacagcttcgtccataatagcttcggccatcttagtaatttcatcttccttttttgcttcggggtcggccagtgactcgaagggatccgagggagaagatagttcggctggaataacactacgttagtgtttgttagacgatgtccgcttgacgagtatccctcgaccgagcacttgcttaatttaaccatcttcaggttggtccatcagcttcatcctgcggatttagcccgggcttggggtcgacttggctcgtcttccgcatcacatggttatttatcgtacctcatgagatgcacgatgcacatgtatgagcacaagtagaacgagtataagatagatactctactaaaaaggatgaaacacttaaaatcaagcattaagcaccatggatatcatagcagagcatcgactacattcattagccaaattgacctaataacactagaaaatctatttttattcctagctttttattaactctctaaactgtgtaacttaattacttgatttagcgagctatctaaatcgatcatcacaatatacgcatgctaaattaataacatttattgtgaccaacaattctatttaatctatttatagatctagttgactggaatacgaatcaacttacccttatgacatccgacttgaaaccacgaaattgacgacgcgtttcagctcagcatttcaccaaaaatagggtgagtgctgcgtcgaatcgcgcttcttctttgtccatatcaagaattctccggccgcgtactgatttattttcttttgcgcctaatcttctcggatcttggcgtagacgaggatgacgatcgacgacttgttcgagctttttgtcgagcacttggtgaatatcacgctgctaacttcgtcttcacccgacgctttgaatttcttgacgacacacggaacgacgacgagatcgtgtctggaacgagctggcgaggtgtggtcgagcaggttagcgcgagctcagacgacgttgaagtcacgagcaagggaggacgatttcaacagctcgacgtcaaacgtgagcacacagcgagacacgcaacagcgacgataatcgaatcggcaacaaagcgttggcaaactcgatgaacacgaccacggtcgtgtgctgacgcggataggacaacggtggctcgcgaaatccgagctgggaaaacggtgcgcgcaggaaaaactccggtcgggcgagctgagaacaccgacgagcacgcgcgcagtagcagcaatagagcagaggctaagctgggcgactgcgcgcgaccacgggcaagcacagattggcgccatggagagttccaggacacgcgcgggggagcagaggagatggccgtgcgccggaagctcgacggcgtccatgagaacgagcagaggaactccggagtccatggcagggagggtttcaccatggccgagcagacagggagcgccgcgagcagagaagcttcgcgcgcccggctggacgcaggagaacgcgcgcgcagggacgagctcgactgagctggagctgagcgtgcgtgtgatggagctcgacgtgggtgtccctggccggaccatggaggacagaggtgagctaaaataggcagaccatggaggacagaggtgagctaaaatagggagggacggcgtgctcagctgctggaaggggaagagctgggtgagcgcgcgcgccatgtgcaggagactgagcgctggaatcaggagacgtacgt

SEQ ID NO: 95553 - DNA, 895 bp, Zea mays
  Clone ID: MRT4577_187134C.1
aattcggcacgaggcaaaaacgatatggtatctagaattagggtttgggctcaccggcaccgccacgttggctgcagcttcgccccttcgcacgtcgacgttcccccgtgctgctgcgcgtcgccgttaccccaagctgttgcatgctgccgatcagctctgtgtgatcaccccctggccgtgggaaggggatttcattccggcatgagatttccagcaacagtgaggtcactgcggcgatgagccgaggacgtcacgggctgagtcagttatagctgttgtatcatgattcggcgtagacgacggtggtgtcgggttgttggatctgctgctgctgctgttgttgttaacaggggaaggtgacagcggtggcgttgggtcaacagtcgtcacctctttgccgtcgcagacgatcttgacttcgcagtagagagctggtagacctcttccgcacatttgactttgagacgcctagtaccagttgacttatgcgaaggaacaggaacaagctcgatgatagcgttagcaatctgatcactttcgatgaggtagacgtcaacggttaacctgcgtatgagcaggaatctcgcggcactggtccaagattttctgcagcatgtctcgcctcttcgatctctcttggttcaggtacgtttcgatctgctccgggcttgcttggctcttaggcatcattcatggggtgggtatgctggtgacgacggggaagacgtggacgaggtagacgaagctgcgcggcttggcgaggcggcgcagcgcccaggacagagccgccatgctggagccgccgctgccgaccgccacgtacacgtcgtcggcgaccgggacgctccgcggcggcccacgcgtccgcccacgcgtccgcccacgcgtccgt

SEQ ID NO: 95554 - DNA, 271 bp, Zea mays
  Clone ID: MRT4577_187135C.1
aggctcgaacagatcaacacgtgttccccggaaaagattcttgggggggcatatttaacacaaacacaccaatggaaacctgggaggaaggcggaagcaaggggccccgtttccaacattgattaccccagtgtgactacagagaccagttccccaaaacaggggggggctgggcttctttgcaaaaactacggggggattttccccaaatgggtgccagggctttggccaagcgtgcaaccacagggtgtcccctgccggggcggttcct

SEQ ID NO: 95555 - DNA, 907 bp, Zea mays
  Clone ID: MRT4577_187136C.1
ctttctctgtctttcctgtcaccgtttgcagctgttgtatcatgattcggcgtagacgacggtggtgtcgggttgttggatctgctgctgctgctgttgttgttaacaggggaaggtgacagcggtggcgttgggtcaacagtcgtcacctctttggcgtcgcagacgagatcttgacttcgcagtagagaggtgcgcccttgtgtacctgtcctgctatcgtggttcctttcttcagcttccgcacatttgactttgagacgcctagtaccagttgacttatgcgaagaacaggaacaagctcgatgatagcgttagcaatctgatcactttcgatgaggtagacgtcaacggtaacctgaatctcgcggcactggtccaagaatttctgcagcatgtctcgcctcttcgatctctcttggttcaggtacgtttcgacctgctccgggcttgcttgcgctcttaggcatcattcctaatggggtgggtatgctggtgacgacggggaagacgtggacgaggtagacgaagctgcgcggcttggcgaggcggcgcagcgcccaggacagagccgccatgctggagccgccgctgccgaccgccacgtacacgtcgtcggcgaccgggacgctccgcggcggtcttccgtcatccggctccagctcctctatctcccacgtgctgctgccgccgccgccaacaccgttggtgtggctcggcaggctaccggcgtcctggtcgacgccaccgccaccggcctctgccatgcacgcgcgcgcgccttggattaacccggccgccgggccctggccaggtgaggtagagggatgtgaagacgatcgagcaggagcaggagtcgtcgtctggcgcgtggtgccggtcccggccggcctcgagggacccaatg

SEQ ID NO: 95556 - DNA, 142 bp, Zea mays
  Clone ID: MRT4577_187137C.1
taccctataacaacagtccgtttatctgtactgtggtacatggcttaccgggcgactgcactaggaagatgtctaaccgtttcatgtacttttggcggtatgcacgcatagatatgcggtcctaacattattcacagatacg

SEQ ID NO: 95557 - DNA, 503 bp, Zea mays
  Clone ID: MRT4577_187138C.1
tacagcttttccccccccccccccccttcttttttttttttttttttttttttttttaccacccccccgggccgcccctaaaaggggctaattccacaccgctggcggccattactaggggctcccttcttaccaacaatgttggaaaaatcaagataatagtttttttctggaaaaaatttttctcccataaaaattcccaacaaaataacagccggaaaaaaaaagggaaaacccgggggcccctaaaggggggacccccccacatttattggggggcccctactggcctttttacaaggaaaaaacctgtgccccccgctttattaaataatccccccccccccgagaagagggcgttttattatagggcctttttcctctttcttgattaaataattgctggggtagggagggcggggggggggagggttattttttttctaaaagggggtaatacttttctccacaaaatggggggacaccccaaaaaacaacatttc

SEQ ID NO: 95558 - DNA, 609 bp, Zea mays
  Clone ID: MRT4577_187139C.1
ccggccgggaagcaagcactcggcctctcaaccaacggggcgcgcacacgcacactgccaacgaggcaccaagaaggcaggaagggatggagtactgctaccagtacaacagcgtcagcaacgcggagaaggagaagaggccgccgctgaggaggggcggcgtcaagctccagatcgtgaagaccctcagcaacctcgtcgtggcgcccagcaacggcagcgactccaagcaagcggaccgcaacagcttcacaagggagcgaagctacaactgaaacgaactgtatcttcagtatttggatacagatgtcgaccttgtgtctgaagaactccgctttgggactcgagaggttttcttagcttgttggacttccttgtttgcttggtccactagtgatgaaatggaactgtatgataagttcgttcccgtctgtgttttgttttggaaaggaagcttctatggctcatacatagacaaggactaaacggtaagacgagtcttctaagtctaattagtccttacctagtttagtgattaactaagtttgtaggaactatgtgtggcgcaatatgtagcctacgcaatcaaagtaaaaaagttatagctct

SEQ ID NO: 95559 - DNA, 318 bp, Zea mays
  Clone ID: MRT4577_18713C.1
gggggggcccgtctctaacactagggtgcccccccgctgtgcaggtattcggcacgggggctgttttagaaaccctctcatcctctcgcaccgtaccgttcgcttcctttcgtgaactccactcctcttggccggcgcattacctgctcttcgccgctgccgccaccgctgcaccggtcagtcagccagccctggatgaggagtacgaccgagatcgagcttggcacggggctcacggagtgcatgctcagaggcactgctttccgccgacggcctcgaggttttgcataggcaccgatacgactactatggaggaga

SEQ ID NO: 95560 - DNA, 284 bp, Zea mays
  Clone ID: MRT4577_187140C.1
ggcttttccttccccagcaggaagaaacaccattttttggttagaaaactcagaacaaatcctgacacggagtaacaacatccatcgatccacaggccatgcggggcgatgcatgggtcctctgcagccccagataaaaacactacttacaaaccacacagagcgaccttgcaaacaaaaacacatacgggcaccaacaaacgcgacgaacgcagataaaccccctggactagggtaaacatcacggcagcgaacaggataacctggacgccctggccccaccg

SEQ ID NO: 95561 - DNA, 103 bp, Zea mays
  Clone ID: MRT4577_187141C.1
cgttgctgtcgagcagtttcaaaccctgacttagtgaggatcacagcaagagcacagggatgtcatggtgctattttaagagcacagagtaaatattgcaagg

SEQ ID NO: 95562 - DNA, 268 bp, Zea mays
  Clone ID: MRT4577_187142C.1
cacgagggccgccgcaaccgacgcggtagccaccggacaaggcccccgccccgccgcggcatcccaccgaagcgccggcggccggagctcccccacccggaggcagagagggacagcgacgacgagggatggccaagggcacgacggcggcgacgccgaagcaggagaagcaaacacaccaggcgacggggcacgggctgacggccaagcacgcccgagaactcgagccggaggccgccgaggacaggaccaaagggtgcacgcgggg

SEQ ID NO: 95563 - DNA, 800 bp, Zea mays
  Clone ID: MRT4577_187143C.1
gccggccggttcagaaaggcagtggggagagagaaacaggttgatctgcttgaagccatcgtctcatatcgaatccttcagatctcacacacggagaccaagaaaagcacaattcccatccatctgatctgcatgcccatccctcatcggctcatccctctcccccctccatggaatcccacaaaagccgcaaccctagctccactccctctataaatagcgcgccccgtaaagcagcacatacattacagtgcagcaagagccgcagcagctgtggtctgtgagtggatcgctcggagcaagcaaaggaactagtagtggcggccatgggtgcttatcaaagggagcgcttactgagagttccttggcattctgtccacctccttcttgacgatcttgcagaaagtttatcagttctgttgcctcttttcttttttggaggtgggcatactgccaatggagctgcgtaggcctccctttgtaaagcccgcatgacataagtaagagctacgttagatttgatcatcatctgtgccggaaacgccttcgttttgctgccttttcttgcgtgtgttcatttgatgggcctgtttgtttgattgatgtcgatcgaggcgtgcccggccgacccggctcttgttttctttgttgggtttatggttcatcaccatccgagatatgctttgactttggggcaaagaatcttaggctcttagctacatatggtacgtaatctgatcccttctatttcaataagcctaatctagtctgctgctctgagctgaggcagccaaaaccat

SEQ ID NO: 95564 - DNA, 611 bp, Zea mays
  Clone ID: MRT4577_187146C.1
cacgcctgcgtgtaccgggctgctattacacggtcgacctcagcgttcgtaccatcttggcgaacgatatcccggggccgctgccttcctatgcgtgtctcgcattggcgcacattccgagggagccaccgcatacccaacgatcctggtggtgcggtcttctccgccacaaaagagagagatcggcgccacccaaaggggctgacccggagaggaagactctgttggtgccgtccgatgagggctagaccatttgtgagggcatcacttacaaggtcagagcactgctcgcgactaccatacacggtgccccacgatctattaaagtgctcgaccgcaaccacttgctcagcctcaggaaggtcaatgcagattaagccggagataccaactttaaacctgatcaaacatgccactgcgttacaaatgtatgaggctatagatagcagaactaatattacatggtgctagcattcaatgatagaggcgagctatgctatcagaccgtgaatcctggaaggctacgagaggacgaaactaggatatactatcatcaactctataaatgcaagacattattgacgtagccgtagagagcaccataaagacct

SEQ ID NO: 95565 - DNA, 1088 bp, Zea mays
  Clone ID: MRT4577_187149C.1
ctactcctcggagagggagaagccgccgcctcagcaatcacagcagcccggagaaagcccaggtccgacaagatgcagatcttcgtgaagacgctgacagggaagaccatcaccctcgaggtcgagagcagcgacaccatcgacaaggaagggatcccgccggaccagcagcggctgatctttgccgggaagcagctggaggatggccgcacccttgcggactataacatccaaaaggagtctacgcttcacctcgtgcttaggctccgcggtggcatcattgagccctcgctgcaggcgctcgctcgcaagtacaaccaggacaagatgatctgccgcaaatgctatgcacgactgcaccctagggctgtcaactgccgcaagaagaagtgtggtcacagcaaccagctgagggccaagaagaagatcaagaactgaggtgctgctcctagtcagtttcatggacaatgttgggctgtattgctgtgtggttgttgaaccgtgtttgtttacccaacatttgggccttctgttatgttttaccttgttgtcgatgacacaatactatatgacaatagcaactctgttattgtagttttggtcactgtccaaaaaaaaaaaaaaaaaaaaaaaaaaaaaaaaaaaaaaaaaaaaaaaaaaaaaaaaaaaaaaaaaaaaaaaaaaaaaaaaaaaaaaaaaaaaaaaaaaaaaaaaaaaaaaaaaaaaaaaaaaaaaaaaaagggggggcccttttaaagaaccaaattttactaccccgtgcttgcaaagtaaaattttttttttagggccaccaaaataaaattaatgggccggggtttaaaaacgtgggaacgggaaaaaccttgggttacccaaattaaatcgctttgaaaaaaatccccttttcccaagttggggaaaaaacaaaaaggccccaaccaatcccctttccaaaaatttccccaccctaaatggaaaatggaacccccctttaaccggcccataaaccccggggggggggggggttaccccaaggggaaccgttaaatttgcaaggccctaagcgcccgttcttttggtttttttcc

SEQ ID NO: 95566 - DNA, 326 bp, Zea mays
  Clone ID: MRT4577_18714C.1
ggcggcgttgagcaggtggtttatgatgatctcctatctggcgacgagctcctgggggctccattcacctacaaggaagctcgagaacggtgtgctggggttaggtccagggcaagtgggtcacccaaggccctgtggatgtggacattggggccaatgcatccttcgagggtggggaggacgatagcgatgatgacacagctgtgaaggtggttgatctggttgacacattcctgctacaggagcaacctccttttgacaagagagagttggggtcttacatcaaagaatacatcaggaatctcagtgctgtgtttgagccagag

SEQ ID NO: 95567 - DNA, 689 bp, Zea mays
  Clone ID: MRT4577_187150C.1
tcggccgggaaattcctcggagaggagaagccgccgccgccgccgcagcaatcacagcagcccggagaacgtcctggtccgacaagatgcagatctttgtgaagacgctgacagggaagaccatcaccctcgaggttgagagcagcgacaccatcgacaatgtcaaggccaagatccaggacaaggaagggatcccgccggaccagcagcggctgatctttgccgggaagcagctggaggatggccgcacccttgcggactataacatccaaaaggagtctacgctccacctcgtgcttaggctccgcggtggaatcattgagccctcgttgcaggcgctcgctcgcaagtacaaccaggacaagatgatctgccgcaaatgctatgcacgcctgcaccctagggctgtcaactgccgcaagaagaagtgtggtcacagcaaccagctgagggccaagaagaagatcaagaactgaggtgctgctgctagtcagtttcatggacaatgttgtgctgtattgctgtctggttgttgaaccgcttttgtttacccaacatttgggccttctgttatgttttatcttgttgtcgatgacacaatactatatgacaatagcaactctgttattgtagttttggtcactgttcacctgatatgtgccatatttcggtaaagtatcgttagtggg

SEQ ID NO: 95568 - DNA, 834 bp, Zea mays
  unsure (1)..(834): unsure at all n locations
  Clone ID: MRT4577_187151C.1
tttcaagctggaatcctcccatagtactttcgcctaaaaaggtgtcaacagctaagttcttatatggctgtgctatagatgcctggatattgaatcccatttggttcttcgattctcttcaagccggcatcaagctgccacctggaaagtaaggtatttaattcgacaaaggaatgcccagaagcataattcatcattcgaccgcccacttcacccaaaatgtaatacattgatatttgatggagtaggattcttgatccacggcaaaatcagcttctgttcaaaattttccaacattgtcaagcatggagggggccaagtttttatatctcttcagggattagttcaaagcttgaaggatggaagtacatcacgtggaatcattcttattgcaaacgccgctagtgcgtctcgtcatctaacccanttgtggtttggagcatgacataaatacagcgacagcaagctggatcatcgctagtttattttctggtaaattgattccattgaagaaagatcgctgtgcttcatttcgccgaatcaagatgccattgttccaacaaaagcaacatgtattttacatgagtcaagagatatgatctctgctgcatcacatagctacaataccatgggaatctcanatacttctcactgaaacatgactgctatgcattcactctgatgaactcttttaaaaagaagagtttgcacaggcatttttttgtcactcagaaatccctctgtcagcaccagggccgtattcttttgtcacttcacaattgaggggagctgggaatagagcatcttcactcatggattnacgcgctctatcag

SEQ ID NO: 95569 - DNA, 318 bp, Zea mays
  Clone ID: MRT4577_187152C.1
cagcaggagccaaaatggagaaagagttctctgaaaaaagatttgtgagtgtgacttttgtctaaaggagtaaaacccaatacaatttatttaagacctgcaagtttcttgagaaaattgcatcagtagaacattgccagcttggactgaaaaggacagagagagtacaaaataaaaggaagctgtagccagaagcaggctgataaaagaactcagctgcaaataagtggtaacttacatgaaaaaggaacaatgattaagagagtagagcttagacccacagagatttagtccctggtcttgaatcctaagaaaaat

SEQ ID NO: 95570 - DNA, 551 bp, Zea mays
  Clone ID: MRT4577_187153C.1
tgtacttgataatggtgccctcataccggcatgtgtttcctagaaataatcaatatattgattgagatttaaaaaaaaaaaaaaaaaaaaaaaaaaaaaaaaaaaaaaaaaaaaaaaaaaaaaaaaaaaaaaaaaaaaaaaaaaaaaaaaaaaaaaaaaaaaaaaaaaaaaggggcggccctttttaggggaccaaagtttactaccccgtccatgcaacgtaatagtttttttttagggccaccaaaattaaattaattgcccgggttttaaaaacgtcggaattggaaaaaccttgggttacccaaattaaatcgctttgaaaaaaatccccttttcccaagttggggaaaaacaaaaaaggcccaaaccaatcccctttccaaaaatttgccaaccctaaatggaaaatggaaccccccttttaccggccaataaaccccggggggggggggggttaccccaagggtaacctttacatttgcaagcgccttaacccccgttcttttggtttttttcctttcttttttcccaactttcgccggtttccc

SEQ ID NO: 95571 - DNA, 531 bp, Zea mays
  Clone ID: MRT4577_187154C.1
ccacctcttaagattaactgtgaaaataagggtgggttgacacaagccttaagagtactctgttgaagagaagggaagaaatagagtataagagatatgcaagttatgaagagtttcaagtctatctttaaactctgatgagtacaaggtcagcagtctagtgcttgctttatctgttgaaaaatttgtgtatcaacatccagggaaaggaatcaaggttcaaggatatgaataatcaattgttcctttacttgactaaagtcaagtattcttttcaggattttcttgtatactgttcagaattgtgcaattaattaaagctaaatcttgttatctgtaacagggagcctcgaggatttgggttcattcaatattatgatcctgaggatgctgctgatgcaaaataccacatggatgggcaaattctttttggcagggaagttactgttgtatttgttgaggagaacagaaagaaaccatctgagatgagggctagggaaagagtcggtagcagggacctgtcttatgatc

SEQ ID NO: 95572 - DNA, 771 bp, Zea mays
  Clone ID: MRT4577_187155C.1
acagagccccccagccccgagaacatccaggttcaacaagatgcagatcttcgtgaagaccctgactgggaagaccatcaccctcgaggtggagagcagcgacaccatcgacaatgtcaaggccaagatccaggacaaggaaggaatcccgccggaccagcagcggctgatctttgccgggaagcagctggaggatggccgcaccctcgcggattataacatccaaaaggagtccacgctccacctcgtgctcaggctccgcggtggtatcattgagccctcgctgcaggcgctcgcacgcaagtacaaccaggacaagatgatctgccgcaaatgctatgcacgcctgcaccccagggctgtcaactgccgcaagaagaagtgtggtcacagcaaccagctgagggccaagaagaagatcaagaactgaggtgttgccgctagtcagtttcatggacaattgaagtcctctgttgtagcaatgcatgttgtactgtgttgttgtcttgttgaaccgagtttgtttacccaacatttgggtctgttgtgatgtttcaccttgtcgattgtcgatgacgacagtactatatggcaatagctaattagctactgtgatttggtcacagtgtggtgctgcaactttgtttagtgggcagccggggccgtgtcctacccactccatttgaaattagtaactttaatttggctttgtcccgggttgtactattttttttctaactttgatcaatttaataaaagaactcatcatat

SEQ ID NO: 95573 - DNA, 820 bp, Zea mays
  Clone ID: MRT4577_187156C.1
aactgcaacaattgctgccattcaaccaacttgctttgacaaacccacagtgttctaccaacaacccatcattggtggtgccctcttttagattgcttatgagttatagttcaataatgaagttttttggatgatgtttgtggcgtcccagaaataagaaagtacatttctagaaaaaaaaaaaaaaaaaaaaaaaaaaaaaaaaaaaaaaaaaaaaaaaattaaaaaaaaaaaaaaaaaaaaaaaattaaaaaaaaattaaaaaaaaaaaaaaaaaaaaaaaaaaaaaaaaaaaaaaaaaaaaaaaaaaaaggggggggccggttttaaaggatcaaattttacttccccgtgcttgcaacgtaaaagtttttttttggggcccccaaaattaaattaatgggccggggtttaaaaacgtggggatgggaaaaaccttgggtttcccaaattaaatcgctttgaaaaaaatccccttttccccagttgggtaaaaaccaaaaaggccccaaccaatcccctttccaaaaatttgcccaccctaaatggaaaagggaaccccccttttaccggcccttaaaccccggggggggggggggttacccccaggggaacctttaaatttgcaagggccttagcccccgttcttttcgtttttttcctttcttttccccccactttcgccgtttttccccgaaaatttttaaaagggggcctccttttagggttccaattaaaggttttacggcccctgcccccaaaaaaatttgtttagggggatggttcacttaggggcccatccccttgaaaaaaggttttt

SEQ ID NO: 95574 - DNA, 917 bp, Zea mays
  Clone ID: MRT4577_187157C.1
aaaccctaaaccgctgccgcaaccacgtataaaaacaccgcacgcgacgccgccgccgtcctattcctcggagaggagaagccgccgcagcagcaatcacagcagcccggagaacgccctggtccgacaagatgcagatcttcgtgaagacgctgacagggaagaccatcaccctcgaggtcgagagcagcgacaccatcgacaatgtcaaggccaagatccaggacaaggaaggcatcccgccggaccagcagcggctgatctttgccgggaagcagctggaggatggccgcacccttgcggactataacatccaaaaggagtctacgctccacctcgtgcttaggctccgcggtggaatcattgagccctcgctgcaggcgctcgctcgcaagtacaaccaggacaagatgatctgccgcaaatgctatgcacgactgcaccctagggctgtcaactgccgcaagaagaagtgtggtcacagcaaccagctgagggccaagaagaagatcaagaactgaggtgctgctcctagtcagtttcatggacaatgttgggctgtattgctgtgtggttgttgaaccgtgtttgtttacccaacatttgggccttctgttatgttttaccttgttgtcgatgacacaatactatatgacaatagcaactctgttattgtagttttggtcactgttcacctgatatgtgccatatttcggtaagtatcgttagtgggcaaccggaactgtgtcctttctacttattccattttaaattattgaacttttatttagcaaaaaaaaaaaaaaggggcgcccgccgacaagggagctcgtcgcccgggaaataaatcccggacgggaccctgcgggggacccagctttcctaatggggaggcggataagagctgggggaaacca

SEQ ID NO: 95575 - DNA, 345 bp, Zea mays
  Clone ID: MRT4577_187158C.1
cgcgcgcacgcaaacttaaacttcgaattcagcttgcgaagtgactgacttaccacactatctcagggctcgtgtcaccaaaagggggtatgctatatctagcacgcaccataaccaacactctgggccatatgacttaatgtccatcatatatactcttaaacttaaagtcctctacgatgactaccagaggggcatactgatctctgagattatcttcgcgaagctttttcgacatccaccttgccttatcgctcatactctcatggataatggtgccgatcgtgcacatccagacctatataacctacttacactaccaaactatgtcactaaatcaccata

SEQ ID NO: 95576 - DNA, 323 bp, Zea mays
  Clone ID: MRT4577_187159C.1
gtgtgacagaaacgcacatattattgagattcatcgtagcgttcacttaaaaatcctgttgagactgcgtaaagcttacaaactgcttagtcctgccattcacaagtatcaacatactttccacaaagggcacatggtacaaaaaatcaaggacacagcacacattacttgttatgtgtgatcataacactggacggcatttgtcgaccgtcgtggcctcaagatagctagcgaacaaggctgagatatctatttcacttgcatacgcgctccacgggtttttgttagccaaagctacttgaccgcatggacgcacaaaaatg

SEQ ID NO: 95577 - DNA, 539 bp, Zea mays
  Clone ID: MRT4577_18715C.1
tacctcgaggccggccgggtaaaaaaatccaaaaaaaaaaaaaaaaaaaaaaaaaaaaaaaaaaaaaaaaaaaaaaaaaaaaaaaaaaaaaaaaaaaaaaaaacctccccgactcctccaacttaataatggtaaccaggaaaaagccccaggaacaacagcaaaaatggccggggaaaaaggaagggcccaaaaaggggggggggggaccgggaccgggaccggggcccgcaccggggggccggccaaaaaacgttggaagtttgccacctttaaactcccctaaattaccttttaataaaaacaaaaattggtcctggaacgggccgcccccgaatttccggaacccggggggggaatgaaggccgggtttcccgaagggttccggggtttttaaccggtcggcgggcggattcgccaagaaaaagggggggggttggaaatcaagggcaaacaggggccccaagttttcaaggccaaagcccaaggggtccccggcaaacacctccccggaggggactggacggaacagggggaaa

SEQ ID NO: 95578 - DNA, 902 bp, Zea mays
  Clone ID: MRT4577_187160C.1
tctgtccctgtccaccatatccaatgggccgaagagcacaaagcaaaacgcactgcccgatttgaacggcccatatcactcaacgaaaccctaaaaccgctgccgcaaccacgtataaaaacaccgcacgcgacgccgccgccgtcctattcctcggagaggagaagccgccgcaccagcaatcacagcagcccggagaacgccctggtccaacaagatgcagatcttcgtgaagacgctgacagggaagaccatcaccctcgaggtcgagagcagcgacaccatcgacaatgtcaaggccaagatccaggacaaggaagggatcccgccggaccagcagcggctgatctttgccgggaagcagctggaggatggccgcacccttgcggactataacatccaaaaggagtctacgctccacctcgtgcttaggctccgcggtggaatcattgagccctctctgcaggcgctcgctcgcaagtacaaccaggacaagatgatctgccgcaaatgctatgcacgactgcaccctagggctgtcaactgccgcaagaagaagtgtggtcacagcaaccagctgagggccaagaagaagatcaagaactgaggtgctgctcctagtcagtttcatggacaatgttgggctgtattgctgtgtggttgttgaacggtgtttgtttacccaacatttgggccttctgttatgttttaccttgttgtcgatgacactactatatgacaatagcaactctgttattgtagttttggtcactgttcacctgatatgtgccatatttcggtaaagtatcgttagtgggcaaccggaactgtgtcctttctacttattccattttaaattattgaacttttatttaagcaaaaaaaaaaaaaaaaagccccta

SEQ ID NO: 95579 - DNA, 834 bp, Zea mays
  Clone ID: MRT4577_187162C.1
aaccacgtataaaaacaccgcacgccacgccgccgccgtcctattcctcggagagggagaagccgccgccgcagcaatcacagcagcccggagaaagcccaggtccgacaagatgcagatcttcgtgaagacgctgacagggaagaccatcaccctcgaggtcgagagcagcgacaccatcgacaatgtcaaggccaagatccaggacaaggaagggatcccgccggaccagcagcggctgatctttgccgggaagcagctggaggatggccgcacccttgcggactataacatccaaaaggagtctacgcttcacctcgtgcttaggctccgcggtggcatcattgagccctcgctgcaggcgctcgctcgcaagtacaaccaggacaagatgatctgccgcaaatgctatgcacgactgcaccctagggctgtcaactgccgcaagaagaagtgtggtcacagcaaccagctgagggccaagaagaagatcaagaactgaggtgctgctcctagtcagtttcatggacaatgttgggctgtattgctgtgtggttgttgaaccgtgtttgtttacccaacatttgggccttctgttatgttttaccttgttgtcgatgacacaatactatatgacaatagcaactctgttattgtagttttggtcactgttcacctgatatgtgccatatttcggtaagtatcgttagtgggcaaccggaactgtgtcctttctacttattccattttaaattattgaacttttatttagcaatttcttgaggtgtaattttgctgacttcaataaaattttaaaaaatcaattacatcaga

SEQ ID NO: 95580 - DNA, 1354 bp, Zea mays
  unsure (1)..(1354): unsure at all n locations
  Clone ID: MRT4577_187163C.1
cattgggaccctcgaggccggccggggtaccaaccttaacaaaaccacacaccacctcctcgccggctcgtcatcgccatcgccatcgccatcgccatcgtttcattgcgagtctccgtttcatctcgccccctcacccccacacacactggaatccccgcgtctgaatccggcgccccccgccccgatccgcgctgcctacgtctcgctcttcatagccctcaccagcgagggcaccgatgtgcgcgcgctgttcgagctcacgctcgtcgaccagagcggcaagggtcaggataaggtgcatacccactttgggaggtcgctcgagagcggcccatacaccctcaagtaccgcggcagcatgtggtgagtcttcctcaccctgtgtgtgtgagacgggtgtgcatgtcacaaaactttgtggtgcctgccaaattgaactaacctgcccaattggaacttgctaaattgatcattatcttgagtaggaaaaaaaaaaaaaaaaaaaaaaaaaaaaaaaaaaaaaaaaaaaaaaaaaaaaaaaaaaaaaaaaaaaanggtcctattcctcggagaggagaagccgccgtcgcagcaatcacagcagcccggagaacggccaggtccgacaagatgcagatctttgtgaagacgctgacagggaagaccatcaccctcgaggtcgagagcagcgacaccatcgacaatgtcaaggccaagatccaggacaaggaagggatcccgccggaccagcagcggctgatctttgccgggaagcagctggaggatggccgcacccttgcggactataacatccaaaaggagtctacgctccacctcgtgctcaggctccgcggtggcatcattgagccctcgctgcaggcgctcgctcgcaagtacaaccaggacaagatgatctgccgcaaatgctatgcacggctgcaccctagggctgtcaactgccgcaagaagaagtgtggtcacagcaaccagctgagggccaagaagaagatcaagaactgaggtgttgctgctagtcagtttcatggacaatgttgtttggttgttgaaccgtgtttgtttacgaactgtatttttgtttggttgttgaaccgtgtttgtttaccgaacatattggccttatgttatgttttaccatgttgtcgatgacacaatactatatgacgatagcaactatgctattgtagttttggtcattgttcacctgatatgtgccatatttcggtacaatttcgttagtgggcatcccgaactgtttcctttctactcattccattttaaattattgaacttttatttagcaaaaaaaaaaaaaaaaaaggcccctagggcc

SEQ ID NO: 95581 - DNA, 680 bp, Zea mays
  Clone ID: MRT4577_187164C.1
ggggcgaagaagcataccgcgagacgcgagtcgttctcctctctgtcttcgctcggcgatctatcaaggagggtgagggggagatggcggatgaattcgcatctgtgtggtaacgggatgccggggccgctctacggtgagatgttagtcctcagcacgctactgtggctagtttcacgtcgacatgattccgatagctgctggaggtagtgtgagaacaaacggcacattttatcttgccagtttaaggatggagtttgatgacgcaactgactgtttgatcactcctgtgctttcagacatgcgcctgccgtatcgtgcgtggcagagaattataacaaaccattatggcactgcagctgcatctactggtgctaccaacgattagccacatacaatctagaacaacctttctgcctttctctaacaccttcaatatcttgcattcagccagctgttgacactgtaccctgctgcttattcgtagcctcaacgactactaccattgatccagctagctactggctactcttagtagtaacatggtcttgcatgtgaccacttggccggactgaaccactctggttatttccaggaggcaatactactaccattggcccagctagctacaacaagccccgcttccttcttgtcacaacaacaattgcttgcggtctacc

SEQ ID NO: 95582 - DNA, 193 bp, Zea mays
  unsure (1)..(193): unsure at all n locations
  Clone ID: MRT4577_187165C.1
tgtagctttggccatgctaatactctggtatgtgcacttagattactcatactcatggacaatttcaccatatataccgtgtgtnaatttcaagaggaagatcttgacaattcaattggctgcaagctactcgatacccccgagtacatgtgccacctgttttgttgcgtgctcgagcaaggatctaaaatgt

SEQ ID NO: 95583 - DNA, 214 bp, Zea mays
  Clone ID: MRT4577_187166C.1
ttctccccgctgttcggggagaagtcgatggtctaggagtgactacaccgttctgatggtggccaatggacagaactacagacaacaagaaagtcgggaagcagttcacctgacacacacacattaatcatgggcaagtgactgccatgacatcatgccccggaacaacatacagtgctagaactacgtagataagctggatggagtgtctgcg

SEQ ID NO: 95584 - DNA, 263 bp, Zea mays
  Clone ID: MRT4577_187167C.1
gatcagcggaacctccgaggcattctccagtcgccacatttccaacagcttcctcctagatcgaattcttttacatttcaatcacacatcccctcgttgttaattagttatactaccatttaattgttatgtgttaattgttaattcttttacagatctaccagttaattttgttcctatcaaattggagagtcaattctcgatgttacggatccaagtctcttactagaaactggagcatagcctagtagcttggtacattg

SEQ ID NO: 95585 - DNA, 299 bp, Zea mays
  Clone ID: MRT4577_187168C.1
ggggaggccgggggtcattttaaaccgccccacaaaaatggccccgtccctttttaggacgggaaacatggcttcaattggccccaggggaagggcccttgtttttcaaaccccgccattgaaaagccgggggggggcccaaaaattcccatttttatttctgggccaacaccccttttaaacaggaagggttttggaccgggggaagttttcccccccctttgcgggacttttgtttacgggccccccttgccataatgggagatgacccccaccccctgggggggggggggggtttt

SEQ ID NO: 95586 - DNA, 278 bp, Zea mays
  Clone ID: MRT4577_187169C.1
tcgagctcgagccgattcggctcagcaagcacttcgacgtcgcacgggcgatgcacactgacaactccagcgtcggcaccaatggcttaataccaagaggtggactactgctcggaggaagtgaggtcggtggccccggccggcttcggcagccacggaggcggcgtccagcagcacgtcgtcaaggtgaagtacgaggaagtcgacacggtctcacgcgccggcgccaaccacaaccaacaccaccatgtcaccacggcggcaacagcttcgtggtg

SEQ ID NO: 95587 - DNA, 498 bp, Zea mays
  Clone ID: MRT4577_18716C.1
gggcgccatcgccgtcgagtgcatcgtcgcgcccgtcctacaaggccgcgagcgcaaccaggccgccattgacgagaacgtggagaagctcaagaaggtgctggaggtgtacgaggcgcggctgagccagagcaagtacctcgccggcgatgtcctcagcctcgccgacctcagccacttcaccatcatgcactacttcatggccaccgagtacgccacgctggtcaaggcactccctcatgtcgacgcatggtgggagggcctcgccgcccgcccggcggcgaagaaggtggcggagttcatgccgcttggctccggcgtgccggagtaacatgagtgatatatatacagtgatgcctgatgcatgtcgtgtgattgttaactacttttccaggcgtgtgatgtctgtctgtactttgtgtaactttcatatttgttttttttagctacttttgtccatgaataccaagagtttgtgtaaatgtaatgtatttcatc

SEQ ID NO: 95588 - DNA, 380 bp, Zea mays
  Clone ID: MRT4577_187170C.1
gtcctcgggacgccgggggcccccagggtgtcccggaccggaccctggaggcgcacccgcttcccctaggggggggccctcttgacccggggctctttctggccaacggtgcccccgtgggcgctcgcacccgccccttcggccccacttgcgaccctgcaccttaagaggggacgcctgcggggggtacggcgggggctcacccctcttattggggttgcgcgcccggcccgctctgagtgcggtaatcccggcctggcccttgcttttcccaatcgccccgcccgccccgagagtcgctgtacgcttcgtcctcgcgggcggtttttcttttctccggggcgtcgggcagctcggggttgccctggacgtgggggccc

SEQ ID NO: 95589 - DNA, 378 bp, Zea mays
  Clone ID: MRT4577_187171C.1
cggactcgtgtgaaaaacaaaaaaaaaaactaaaacaaaaaataaaaaaaaaaaaaaaaaggaaacaatcatgggagaaccaaacttacaaactcttacctacttcattaactactaccttatccaaccacctatatcttacttaccttacctccattatccacattatggactttgacttcccttaccttacccaatttattcgcttatacactatcaccctttatgatttcttgaatgacaacatctagtcccacacctaacaaccatccaaccatatccacgacatagaccttcattctcaccagaccatgtatgctccattacttcctctcgctttgccggctccgcccatgcctgacatatctcttcctacac

SEQ ID NO: 95590 - DNA, 676 bp, Zea mays
  Clone ID: MRT4577_187172C.1
atgtctatctcaaacgaaagcttcaagcatctctgctgctattttatcaagagtcaacgacgagcgacccaaaaaaagcaatcaatagtcaccatatctgctcctctcgctccacacccccctcctctgcgacttgaggcactgaaggagcgatacacctacaatgaggatcgagctgatgatatctctgcccttcatcttcctctccatcctcctcagattgggatgatacttcctcggaaagcacatgacgccgggaggagatgcctaccggcgtctatgagcagatctacgaaacaccgttgccgccgcccggcgtatgcgaaagactcctcgcgcaccgcactgagccaggtaccacagcaataaacaatggatctagagtgggtgactgagattgagactgctctccatacattctactaagactactacatatagtagtcttgatgacgacgatataattatatccgttcttcatctagtttcatactggatagtcttgagatggtgcatggagagacgactacgatgttagcgtgcctagatgcagattgtggtactttgtaatagtatacctagtgctgaatgacaccaaagacgggcacatcgttgcaacattgcctcaataatttgctcgctcaattgttgattttggtaagagaaaaataataaa

SEQ ID NO: 95591 - DNA, 306 bp, Zea mays
  Clone ID: MRT4577_187173C.1
aaaaaagaacgggatagggtcctaataaaaaatctcccaagttttttacttttccccaagggcccatgagggggcatttggttttcaagcttctgcctgaattcccccaaaaggaacctaacccgtcccccccccctaattccatataaaaataggggggggggcggggtaaaaaaaattttcgctgctctgcctaggtccaaattttggacattttacatgtcctatttggggccaacaaatttttttctcaaatgaaaaaattttgcacaagtttcccgccccttaacctgaacaagatttggg

SEQ ID NO: 95592 - DNA, 647 bp, Zea mays
  Clone ID: MRT4577_187174C.1
gatggcccgcgcgtcacagaataatatgatagcggcggcgcggtctacgcgttctagactcccctctgaccccctgacgatagcgtcgaagatgtccacaaccagatccgcgtccctgctcgcgctgctcctcctggtctctgcgaccgccgccgctgccgggacgagcaagggccgcgcgggggtgcggccgtgccaggatctggcgacgcggggccagtgcgcggcgagcggcgggtgccggtggtgccgcagcgaggcgctcgacgacatgtgcttcgaggccatcgaggcgtggcgccttccgcgccaggtgttctcctgcgacccaccctccggtgccgcccacgcccgcttgaactgaagtaatgccgcggccggccgccggcgaagctatgttatgctatcgccttggtcgggatcgctcgatctgatctcgtttgtcgccaggcctccgttgttttctttgctggatctgagatatacaatagcgtgtttcatgctgctgcctgtctggtctgcggttctttcattcattgattgtgctgcccatcatactctcgattctcaaagtccaatggcctgtcatttgtattctcaaaattatgttaatgagcacgatcgtaccattccagaaaaaaaaaaaa

SEQ ID NO: 95593 - DNA, 251 bp, Zea mays
  Clone ID: MRT4577_187175C.1
tgggcatagacaaggacgcgacgaagctcgaattcgctcgaggtggcagacacgcggtccgcgagcaccgcgccgacttgccattttttgacgctggacctactgctgagctactagtgtacatatgcaagagtacgtatatatatatatatatacggatcttctatatattatatagtaatagcaaggcggcccggggctccttctcttgtttggcaaaaaaagaaaagttataaggagaaaagaaggag

SEQ ID NO: 95594 - DNA, 296 bp, Zea mays
  Clone ID: MRT4577_187176C.1
tttttaaatatgaaggggggggtgcatatattatatcaaaatggacattgtttgattcatccaatggtcagacgaggaatacttttcttggggggggaaagagagagtccatattccctccctaaacttgatggcttggggagtccatctaatgacacagccttgccctgaagcaggggcattcaccccaggaatttgtccaccttggccacttcctccacgctcccaattgtcagaggcactctttggtggatctatactaggcgggatgtgaagaatttgtccaccttgaccac

SEQ ID NO: 95595 - DNA, 316 bp, Zea mays
  Clone ID: MRT4577_187177C.1
ccacgcctttttttgctcaaacttttaagctttgccaaggacagcggcttgatatgtctgacgaccaaaacaaactcaacacatagtctgcccaaaaacaaatgctccaatcaactacacgaggtttcaaacgcccacacccacaaccaacaactacagaatgctgggtttattgattcacatgccgcccatcatatttacaaaacctaagcacacctatcaaaatccttctccgcccgaaaatgacatattagcaacagaaccccgcaagatgttgttactacagtaagattcctggctattaatgatgtaatac

SEQ ID NO: 95596 - DNA, 401 bp, Zea mays
  Clone ID: MRT4577_187178C.1
cctctaatgcttgtgaggtgttgtttttattacatggacggtatcctcatgagggtggacgcggaagacgtcaaaggggattccaccggcgggaagccaacgcgagcatcgtaaacaattcaaagaatttaggaagcagcgtgaagccatgcaccaattttttcagaccttaaggatgcaccaaaggcgagggctggcgccaagtcatgagcttccctgacgacataccgatccgggaaaaaacaagccacgtgttctaaacaacagtcggacttcccggatgaatgatacacggagggaacaggtacacccaccgcataagactcgctccctctcaagaacaacaccacatatggatgcaaaaggggggacagatgccactgtggacatcaataaagtga

SEQ ID NO: 95597 - DNA, 2297 bp, Zea mays
  Clone ID: MRT4577_187179C.1
gcgtgaaaaacttttccacatcacacaagaattgaactcacaattaaccgagcctgagaaagctggactaaaagaatcagaggatcatttgctcaaatgggcgtggcgatgtaacaaagctcaggaagagcaggctgcccaactcaacatgttgactggctcggcacagaacaatgaggatgctgtatcaagaaggatgtcattattcgaggactgctctcagctattgctagaactgcttgatgcttcgttgaatgccacaacatctccagattgttcagtgaaaatggcatatgttttaactaatgtatcgttgacctgtatggcgaaactgcgggatgaaagattcatatgcccagctggtacagattctgatgcggttacttgccttgacattatttcgtcaaagcagctaccaaatgcagcttgtaactcattgttattcaagcttgtgatcgcaacagtgggcggtgaagcgggtgaaatcttgagaagacggcaatatgcattattactgagttattttcagtattgtagcagcattctggactctgatgtccctccatctgttcttcggttcttgctactggaggagcaagatggtgatgatgaggacatcactcttcaaaaggttctcaaggagcacaatgaattagcacatgccaacttttccatcataaggaaggaagctcaagctatcgttgatttggttactaaggatgctttccatggtagtgaagctgggaaagcactttccttttatgttcttgatgcattaattagtattgaccatgaaaagtattttctaaatcaacttcaaagtcgagggatccttagatcatgcctgagtgatgttgcaaactatttgtcaaaggattcgtcattggcatcagaatcttcacagcggttttgcactgtggatgctcagttttcattactgctgagattaagccatcattatggcaaacatggctctcagattctattgtccatgggtgctttacaaaatctttcagcatgcaacctcatgggtggccagaaaaaggtaaatccaagggcaatctctaaaattgcataagaacggactggtgaaattgacaagaggtcacttattacacctgtactgcgaatagtcacctcttttacatcgctagtggactcggctgattttctcgaggtgaagaacaagattgtacgagagatagtggacttcgcaaagcagcatcagtcagtttttaatagcattttaagggagaacatgactggaactaatttgctcacgttggagcagcttagcatggcggtttctattctcagcaaggtttgggcgtatgaggaaaatgaggaatgcagctacattcaagatctattttccttgatgcattctctttttagcgttgactttgggattctaaattttatgcaatcaccaaacatgattgagaatcagaagtcagaattgatagcatttggtctttgcttcagccttgtctcttacctttatgttctcgctacaaggaaaaacatgcgatttcaagtttcatatggccgtaacagtgatcagcagcacccaacactacaaatggtttctgatcttctgaattcagcaacacttgccctagaaagagttggtgaagaaaaatatatgcttttaaacaagatccgtgacttaaatgagttgtccagaaaggaggttgatgagataataaaagtgtgcatgaagcaagattgcatatctcctaacgataacatccgtaaaaggaggtacattgcaatgatagatttgtgttgcatggctggcaaccgagaccaactcattacccttctactccaaataacggaatgtgccgttactattctcctcattcattttcaggacgatgcttctgcaaaaggtctttcttcattttctgatgaactccttcctgtgctggagagactagagcatttgaaagaggacaaagttggacgtagtctgaagttgttccacagatccattactacactaaaggagatgaccatcagaaccataaccatctgaaggccgcagcctgtacaatgtacatgtttattaggatagtacacctcgctagatttgcagatgtaaaacattgttgtgtaagctctcatatatatatatacacacttttgccctgaggcaatgagctgtatgtcatgttttaagagtaaaatgtgatttttgaggggtttccatctaggaacattaacatttaaactgtatttttttggcctataaactttcactggagatattactttttttgttttggttcctt

SEQ ID NO: 95598 - DNA, 618 bp, Zea mays
  unsure (1)..(618): unsure at all n locations
  Clone ID: MRT4577_18717C.1
atttggcaattctggggctatctcaaactgtaaagggaggttagctttaagatgatataggtagaggactagatatttcaacatgccacactgtcatggggggtcatgcactgagttgatacttgctacatgtatgaatgtgccaacccgaatgttgacttggtctggtgttgatggtttagggtttgtttggatgtccatatatccacctcaatttacatgtgtaaattccacatcaaacttgtccaacgtacatagactgaggtggatacatgtgcatctaaacaaggcctcaaatggaatgagtgagttttgttgtagacttaatatggtgaagagaacgaagtagtcaaattggcccattggggatgtttgggtgggtacgatcttgcactttggttggcttccttagccaactttcactgtacttgctacaaaggatggattgaccaatattcttttctggctagagaataatatcatccttttgtgacctagagtatgttaatgccaagctgctgtctttctgttcctttttttctgtagcactctggaattgaaacgcaattctgaacttactccttttgaccttctgnngttgtatttctttgaaattga

SEQ ID NO: 95599 - DNA, 452 bp, Zea mays
  Clone ID: MRT4577_187180C.1
gggggggggggggggggggcccggatagttggggagagggaaggggaaagacaaacacagggaatggtccgtcaaggttgttctcgacttatagtatccttataattactaaagtatactttatgccgatatggagttcaataagtgaagcaagataatactactgctagacagaaaagtgatacgagtgagcatacaaatgagtacacggtatcataatgcagccggactgtgcatgaccggctaggatatcgtcgaaaacacaaccccccaaaaagtggatacttgggcgcagatcgcactaccgaggttgcgcattgcgtgcgtgcgtggtggattctggttggggagttggttctacttaagggtctgataacctacctactgatacttcgtcgtagattggcccgcttaaaaactggtccgaagaagaaattacgaatatagctggt

SEQ ID NO: 95600 - DNA, 264 bp, Zea mays
  Clone ID: MRT4577_187181C.1
acaatagagaaccgtcacaagctcagacaagatcccacggtccatgtgtgcaccttaccaaataagctaccacctgaagaaaattgtgctcataaaacaaataaacaagaaatcattgatcacaaataaatgcattgagacctgtttacaaatgaatatcttgcaactactaaacgagcggagaaaacgactgcacatgcaagaattacaacatgcccacaacaaacggacacggccccataccaaatgggcacatgaaatgct

SEQ ID NO: 95601 - DNA, 310 bp, Zea mays
  Clone ID: MRT4577_187182C.1
gttctttcagtcgctcaacatctccaccaagaataacgaggggactatggcaattatcactctcgacaccgcttatcaagaaggggacgtcgatgctttcctggccgactacttttacgagccagcacagcctgcggccacactcaaggtgctgcatgatgtgaagtccgaagacaagctgaacaccggcagcggcgggagcgcggttgtggacgcagactcgcttctttaccgcaagttcgccgaggtagttgaatacaacgttgaatcgtactttcccggcggggaagaccactaccacgactgctgg

SEQ ID NO: 95602 - DNA, 178 bp, Zea mays
  Clone ID: MRT4577_187183C.1
atccaatttaaacgcgcgcgtctgctttagtgtatctatgtttaccgacccaagcttgcgacgccaatctaattgtctcgtggccgcgaagggccatacgctgttcgtcggtggacaccggaaatgctgtggaaccacagatcatgccgagatgaatgtcaaaaccctgcatgaagga

SEQ ID NO: 95603 - DNA, 179 bp, Zea mays
  Clone ID: MRT4577_187184C.1
atcgattgctctcattagtcaggtgcggtgcgagcctctcacggcttgtatctcctagatacttcaagatgccatgaagaatatgatgtccaccgcgactgctgtgcttgatgtcagtgaccagaactatgctccacatatggacacgcgtctcaggggctccgttaagctgtcttaca

SEQ ID NO: 95604 - DNA, 349 bp, Zea mays
  Clone ID: MRT4577_187185C.1
ctcgacgcgtgtttcttctaaggaagaggcgcgcgcgcgcgccgtcagttgtgtactgtgcatgtgcctgccggcggccggcacgtatacatacttgtgtggtgtgttgtgtagtgtaaaacgcagagttttggtgcgtatcggacagcgtactggccagggtgctttcaggagccagtgtcgtttttttttcttgtttgttttggacttcgggggaaaaacacttcagtatggtgcactcgggttgcctgtaggtactacaagcttgctatagagatgctatgtatcaattcgttaatgtaagaactgtaaaacccttctaatacttctgtcctaaaagaaattattt

SEQ ID NO: 95605 - DNA, 454 bp, Zea mays
  Clone ID: MRT4577_187186C.1
aaaaaaaagagggagtttattttttggccaaggggaccaaggtttaaaacaggggggaaaaacaaacctgtttaacgagggttaaaacccagctaacgttccctatggggggggaaaaaaccaaacactggggaaattctgcttaaaaaggaagggaaaaccccccttcaaaggataaaaaagaaacgtctttaaaaaccctgggttgccaaaacccaattatccctggggaaacttttttaacccctttagtttaaaactccaaaggttaaaaggatcaatgggcccccctttcacggttggttttcgcccgggaaataaaaataaaacgagttttaacctttttgtccaaaaaaaaatttttgttctcgtggacccaatttaagaaccccggggttatttttaaaaaaatgggcccccccagcaaaactccccaccgaaaaaggtttccccc

SEQ ID NO: 95606 - DNA, 578 bp, Zea mays
  Clone ID: MRT4577_187187C.1
ccggccgggacgagcccatacaatgaactggcttcttctagctctagctaggctcgtctgctgcaagaaggtaaccgcgcatgcatggaggggaaggaggaggacatacgcctgggcgccaacaagatctcggagcgccagcccatcggcacggcggcgcaaggcacgaacaataaggactcaaggagcccccgccgacgccggtcttctgagcccgaagagcataagtcctggtccttctacacgaggccggcatcgccgagtttgtcgcacacctttctcttcctctacatatgcatactgaccgtcatgggcgtatccaagtgcacctgcgagtgcgccacacgagggatacagagcatcacctggtccttcggcggcatgatcttcgccctcgtatactgcaccgccggcatctccggcggtcacatcaaccgcggccgcgaccttcgggctgttcctgacgaggaaggtgtccctcaccagggtgggtgttttacatcatcatgcagtgcctgggcaccatctgcggcgcgggcgtcgtcaatgcgttccagcaggggctgtacatgggcaac

SEQ ID NO: 95607 - DNA, 769 bp, Zea mays
  Clone ID: MRT4577_187188C.1
cggccgctcgaggcggccggccgggaaacctcaacccacttccgcaaaggagatcgataaggccgagaggaggaggaagaagctccagagttcaggcgaggagagggatcgcgttgcgcgtcggcgtggcgatggatcgggtccgcggctccgcgctgctgctcggcgtcctgctcgcaggatcgctgtttgcgctttgtgctgcaaaggaggaggccaagaagctcggtaccgtgatcggtatcgatctcggtaccacctactcatgtgttggtgtgtacaagaacggtcatgtcgagattatcgccaatgaccagggtaaccgtatcacgccctcatgggttgggttcaccgatggggagaggctcatcggtgaggctgtcaagaaccaggcggctgtcaaccctgagaggaccgtctttgacgtcaagcgtctcattggaagaaagtttgaggacaaggaggtgcagagggacatgaaacttgtcccctacaagattgtgaacaaggaggggaagccttacatccaggtcaagatcaaggatggagagaccaaggtcttcagccctgaggagatcagtgctatgattcttggaaagatgaaggagaccgctgaggcataccttggcaagaagatcaatgacgccgtcgtcactgttcctgcgtacttcaatgatgcacagagacaggcgaccaaagaggttggtgtgattgctgggcctcatgtggctaggatcatcaatgagcccactgctgctgctattgccta

SEQ ID NO: 95608 - DNA, 1732 bp, Zea mays
  Clone ID: MRT4577_187189C.1
ctggttttagcttgcatatcctttgtttaggccagagttgagttgtgttccaacttccaagtcttgggttgcggaatcaccggcctcgctcaatcccattgggtacctcgaggccggccgggacgccattcccgtatctcttgtttaggccgggctcgagagagttgggctccgaatcctgggtgggtttggagttggagaatcgccttcgtcgctcgacccagaaagattcgatggagagccacaacccatcgcactctcagatcgccgaagtgaagatggacatcgcagcgtcagcttctggagcggcagggagcaagttctgcaagggcgcagcctgcgacttctccgacgccagcaactcctcgaaggacgccagggagaggtcggcgtcgatgaggaagctgatagtcgcggtggtcctctgcgtcgtattcatggcggtggaggtggtggggggcatcaaggcgaacagcctggccatcctgaccgacgcggcgcacctcctgtcggacgtggcggcgttcgccatctcgctgttctcgctctgggccgccgggtgggaggcgacgccgcggcagtcgtacgggttcttccgggtggagatcctcggcgccctcgtctccatccagctcatctggctgctcgccggcatactggtgtacgaggccgtcgtgaggctcgtcggcgagagcggcgacgtgcgggggtcgctcatgttcgccgtgtcggcgttcgggctggtcgtcaacgttctcatggccgtgttgctgggccatgaccacgggcacggacacggacaccatggacatggacattcgcatgaccatggccacggccatggggattcggacgatggccattcccaccacgacgacgaggagcaagaacagggccgtgtccatcaccacgagcacggccatggaggcgctatcactgtcacaacccaccaccaccaccatcatcacgatcacgatgttgaggaggcgctgatcaagcatgagggtacccagtctgctggcagagctggtaagaagcctcggcggaacatcaacgtgcacagcgcatacctccacgtgctcggggactccgtccagagcgtcggggtcatggtgggcggggcgatcatctggtacaagccggagtggaaggtcatcgacctcatctgcacgctcgtcttctcggtggtggtgctgttcaccacgatccggatgctgcgcagcatcctcgaagtgttgatggagagcacgccccgcgagatcgacgccaccaggctggagagcgggctctgcgggatggagggcgtggtggccgtccacgagctgcacatctgggccatcacggtgggcaaggtgctgctggcgtgccatgtgaccatcgccagggatgcggacgctgatgagatccttgacaaggtgatcgggtacatcaagacggagtacaacatcagccatgtgaccatccaggtcgagcgcgagtagggagctctgtctttggctgctgtcttgggcataaatggctggcgccattcgagctctggtgtgctcggtggtgttgtctattgctagtctattaggcaggccgggggaattatttgcgtggtggtcgtcagtcagtcagtcggtgcataaacaaggatgaaattttcggtaaaaaaaaaaaaaaaaaaaaaaaaaaaaaaaaaaaaaaaaaaaaaaaaaaaaaaaagaaaaaaaaaaaaaaaaaagcggcc

SEQ ID NO: 95609 - DNA, 827 bp, Zea mays
  Clone ID: MRT4577_18718C.1
ctcgaggccggccgggaacctggggctagctatatagtaataccatcccacctcgctcctcaaaaccctagctagcgccgccgccgccgcagactcctccttttcgatcccttcgcaaagcgccgccgtcgccccatccggcatggctccgaagaaggataaggccccgcccccgtcgtcgaagcccgccaagtccggcggtggcaagcagaagaagaagaagtggagcaagggaaagctaaaggagaaggtgaacaacgcggtgctgttcgaccaggctacctacgacaagctgctctctgaggtgcccaagtacaagcagatcaccccctccatcctatccgagcgcctcaggatcaatggctccctggctcggagggctatcaaggacctgatggcgcgtggcctcatccggttggtctcggttcactcaagccagcagatctacaccagggcaacgaatacctaaggatgggattcccttgtttgccctctctgtaggagctcgtcttctttagaacagttgccatctctgtcaagagtttgctaatgctatgttagatgagtttctcacgtggctgaaacgtttcagagagtttgcgttagtttggcttgcctattataccttacctggcctcaatagcctttttctttgatggatagattttatgttaccttgagttcccgtgtgtttgcagcttctatggaaatctgccttgaaacgtctgatccgtaattatgcgatgcctctatctagactactgttctgctgcatgcagggcgctggcgggcgttgctggggggtccgtgctggggccgggcttggg

SEQ ID NO: 95610 - DNA, 321 bp, Zea mays
  Clone ID: MRT4577_187190C.1
acgcgctgccgtggatccacggacacatcgggaggcaagacgatgcagaataagggacctacacccactatgggaaagaggcctccgctgagaggatacgtcctcgatccggagctcggatccaacgagggacagaggcagtgcttgctcttttgggtagcggaaaaaataggccgtttctcccccccgactctaggtgctatattggatatttaagaccagggaaaaaaaactggtatcacacactgtggaaccgaagccaacttgagcaaaacaaaaaacaaaaaaggggcggccctccagctccacctttcggtccct

SEQ ID NO: 95611 - DNA, 555 bp, Zea mays
  unsure (1)..(555): unsure at all n locations
  Clone ID: MRT4577_187191C.1
nacgctgttcggcagagccccatccccgtgccaggccgctcggccctcgacgccgtgagtcaggcaggcaggcgcctctttctgtccctccacccgggtctccacgccgccgccgccgccgcctcgaccgcccccacgcatccgccgctcctctacccatcctcggcccgcggcccagggagaagaccgcacgggcgggcgagattgctgaagtgaaaatggacatctcagcatcagcttctgttgcatcagggaacaaattctgcaagggtggtgcctgtgatttctctgattccagtaactcctcgaaagatgccaaggagagatccacgtccatgaggaagcttataatcgcagtgatcctttgcatcatattcatgacggtggaagtggtcgggggcatcaaagcaaacagtcttgccatcttaactgatgcggcgcaccttctttctgatgtggcagcatttgccatatcgntattctctctctgggctgctggntggggaagcaccaccgcagcagncatatggggntcttccgggtnggagattcttg

SEQ ID NO: 95612 - DNA, 847 bp, Zea mays
  unsure (1)..(847): unsure at all n locations
  Clone ID: MRT4577_187192C.1
attttccagacggcagtccactggtttttgcttgcatatcctttgtttaggccagagttgagttgtgttcgaacttccaagtcttgggttgcggaatcgccggcctcgctcaatcgattgctgaagtgaaaatggacatctcagcatcagcttctgttgcatcagggaacaaattctgcaagggtggtgcctgtgatttctctgattccagtaactcctcgaaagatgccaaggagagatccacgtccatgaggaagcttataatcgcagtgatcctttgcatcatattcatgacggtggaagtggtcgggggcatcaaagcaaacagtcttgccatcttaactgatgcggcgcaccttctttctgatgtggcagcatttgccatatcgttattctctctctgggctgctggatgggaagcaacaccgcagcagtcatatgggttcttccggattgagattcttggtgccttggtccccattcagctcatatggctacttgctggcatactggtatatgaggctattgtaaggctcattaacgagagtggcgatgtgcagggctccctcatgtttgctgtgtcggcgtttggactgtttgtcaacattataatggctgtattgctaggccatgaccacgggcacggccatggacacagccatggacatccacatgaccatggtcatggtaattcagacgatggccattctcaccatgaagaaccagaacagggccatgttcatcatcatgagcatagccatggaagttctattactgtcacaacacatcaccaccaccactcaggnactggacacaccatgacgctgaggagccactgatcagcacg

SEQ ID NO: 95613 - DNA, 2632 bp, Zea mays
  unsure (1)..(2632): unsure at all n locations
  Clone ID: MRT4577_187193C.1
tcgcgctgttcgngcagnaccccatcccctggaccccgtgccaggccgctcggccctcgacgccgtgagtcaggcaggcaggcgcctctttctgtccctccactcgggtctccacgccgccgccgccgccgccgcctcgaacgccccacgcatccgccgctcctctacccatcctcggcccgcggcccagggagaagaccgcacgggcgggcgaccgggatccgacaaagtgcgtgggcgcgcgggtgggtagttggcgcccgcgcccgcgcgcgcgcgcatagcctgcctgccttgccatgccacagtcgctttccccctcccttatcagttatcacccagccaaaagcgagggaggggtggtggggactcggtcttgttcgtttccgccggcgggtttattcgccgggaccgcggttccattgctctctgcttctctagacaccggcggccgtcgccgtcctcgccagccagtcctactcctaccactcgcccgctcgtccgcgagcgagctgatgggttgcgtcggtcggctcggctgattgggttccgtcttccgtcctctcaatcattcggttccgcgacctggggtcctaagacctaagcgtcgcgtccgtccaaggccacggagagtcctggtggccgtgcgggcactgtgcgcccgtggaggtgtcgtgtctcggtgcccacacgacaacgacgctcctctgcacccccgtctctacaagtaccacctggctgactccagtttcccgacgccattccacgtatctcttgtttaggccgggctcgagagagttgggctccgaatcctgggtgggtttggagttggagaatcgccttcgtcgctcgacccagaaagattcgatgccttcagccatcttgatcctgcctgcctgcgcgtgcctatctgatggagagccacaacccatcgcactctcagatcgccgaagtgacgatggacatcgcagcgtcagcttctggagcggcagggagcaagttctgcaagggcgcagcctgcgacttctccgacgccagcaactcctcgaaggacgccagggagaggtcggcgtcgatgaggaagctgatagtcgcggtggtcctctgcgtcgtattcatggcggtggaggtggtggggggcatcaaggcgaacagcctggccatcctgaccgacgcggcgcacctcctgtcggacgtggcggcgttcgccatctcgctgttctcgctctgggccgccgggtgggaggcgacgccgcggcagtcgtacgggttcttccgggtggagatcctcggcgccctcgtctccatccagctcatctggctgctcgccggcatactggtgtacgaggccgtcgtgaggctcgtcggcgagagcggcgacgtgcgggggtcgctcatgttcgccgtgtcggcgttcgggctggccgtcaacgttctcatggccgtgttgctgggccatgaccacgggcacggccacggccatggacatggacattcgcatgaccatggccacggccatggggattcggacgatggccattcccaccacgacgacgaggagcaagaacagggccgtgtccatcaccacgagcacggccatggaggcgctatcactgtcacaacccaccaccaccaccatcatcacgatcacgatgttgaggaggcgctgatcaagcatgagggtacccagtctgctggcagagctggtaagaagcctcggcggaacatcaacgtgcacagcgcatacctccacgtgctcggggactccgtccagagcgtcggggtcatggtgggcggggcgatcatctggtacaagccggagtggaaggtcatcgacctcatctgcacgctcgtcttctcggtggtggtgctgttcaccacgatccggatgctgcgcagcatcctcgaagtgttgatggagagcacgccccgcgaggtcgacgccaccaggctggagagcgggctctgcgggatggagggcgtggtggccgtccacgagctgcacatctgggccatcacggtgggcaaggtgctgctggcgtgccatgtgaccatcgccagggatgcggacgctgatgagatccttgacaaggtgatcgggtacatcaagacggagtacaacatcagccatgtgaccatccaggtcgagcgcgagtagggagctctgtctttggctgctgtcttgggcataaatggctggcgccattcgagctctggtgtgctcggtggtgttgtctattgctagtctattaggcaggcgggggaattgtttgcgtggtggtcgtcagtcagtcagtcggtgcataaacaaggatgaaattttcggtaatgctattgacagcatcgtggttcatcgaactgcatattctagtacgctgtgccgtcacatcttgtgtaaggtcacgtttctgtgctgcggtatggaagatgtgaagttcgtggttggcatgttgctatttgttttgagcatgccttgtcgtttcagtcgaatggacttgtgggaaaaaaaactcggccagatggtggcgtggaggtacgcctgtggatgggttatatctatatttattacttttattattaagggcctgtttggttggactgtgagtgcgaaaaaaaaaaaaaaaaagcggcc

SEQ ID NO: 95614 - DNA, 257 bp, Zea mays
  Clone ID: MRT4577_187194C.1
ctgaacagattgggcaggcagggtcaactgcagggccacagcagcagcaaccagctggagccccccagcctggggcagtcccaccaggggttcccacccctggaccccatggcccctcaccgttccccaaccaacaaactcctccctcaatgatgccaggggcagtgccaggcagcgggcacccaggcgtggcggcccaaagccctgccattgtggcagctgttcagggcaacctgttgcccagtgccagcccactg

SEQ ID NO: 95615 - DNA, 2711 bp, Zea mays
  Clone ID: MRT4577_187195C.1
aaaaaaaaaaaagtaatgtagctttgtccgaggccataaataatttgtgtggatattccgttcctgtccatttttaagggcgctgcttgaatcttgtatccgtttttttcatgcaattgtctgcactcagagatggtggaaataggaagggaaggaaaagacaaatggttttttttacttgtctgctgttcttcctcacttgaaacctatgtgatgaacagagatgtgctgctgctgtatgtttcgatggaccacaaagtgcgtggttgatcaacataatattttttttagttttgttccctcacttgaaacctatgtgatcaacataatggcactggctactctttttttttagttttgttcctttagtgacacacagattgctcgcctgatcttcattcccacactagctttggcaggaactggaacgcgtataaaagtttttctagactctgtcatttcagctgtgcatctacatcatctttgttgttgtgtattgattcccacgctagctttttgcaggaattggaacgcgtgtaacaagttggcattccattgtgcatctacataatctttgtagtcgtgtactgactgtcctagtatcctattcccgtgccaggccgctcggccttcgacgccgtgagcccgtgagtcaggcaggcaggcgcctctttctgtccctgggctcgggtctctgggtgggtttggagttggagaatcccctccgtcgctcgacgcagatcctttcgatagcctcgcacagcgcatcgcacacacagcccgccgaaggggcgatggacacggcagcgtcatccactcgatggacagggagaaagcactacaagcgcgcatcctgggagtgctccggcgccagcaaccacctcgtagtgcgccacccgggagctacatgttcatggggagtccctgtggtttgcaggttgacagccacaactcaatagatgctcagatagctgaagtcatcaaggacatctcagcatcagcttctgttgcatcagggaacaaattctgcaagggtggtgcctgtgatttctctgattccagtaactcctcgaaagatgccaaggagagatccacgtccatgaggaagcttataatcgcagtgatcctttgcatcatattcatgacggtggaagtggtcgggggcatcaaagcaaacagtcttgccatcttaactgatgcggcgcaccttctttctgatgtggcagcatttgccatatcgttattctctctctgggctgctggatgggaagcaacaccgcagcagtcatatgggttcttccggattgagattcttggtgccttggtctccattcagctcatatggctacttgctggcatactggtatatgaggctattgtaaggctcattaacgagagtggcgatgtgcagggctccctcatgtttgctgtgtcggcgtttggactgtttgtcaacattataatggctgtattgctaggccatgaccacgggcacggccatggacacagccatggacatccacatgaccatggtcatggtgattcagacgatggccattctcaccatgaagaaccagaacagggccatgttcatcatcatgagcatagccatggaagttctattactgtcacaacacatcaccaccaccactcaggcactggacaacaccatgacgctgaggagccactgatcaagcacgaggccgactgtgagggcacccaatctgctgctaagaagcctcgacgcaatataaacgtacacagcgcttaccttcatgtgcttggggactccatccagagcatcggggtgatgatcggcggggctatcatctggtacaagcccgagtggaaaatcatcgatctgatctgcaccctcatcttctcggtggtcgtgctgttcaccacgatcaggatgctgcgcaacatcctcgaggtcctgatggagagcacgccccgtgagatcgacgccaccaggctggagagggggctctgcgagatggaaggcgtggttgccgtccacgagctgcatatctgggccatcacagtggggaaggtgctactggcttgccatgtgacggtcgccagggaagccgacgcagacgagatccttgacaaggtgattgggtacatcaagacggagtacaacatcagccatgtgaccattcaggtcgagcgtgaatagagggggagctgtcttttgggctgtcagggcataaatggcgtcacgccttcactggttatcttactctgtcggttaaaacttttttttggcacctgggaaggcatcaggcagccatcggagtcttgatgtgcttgcaagttcatctgtggttcaagctttgatggtcagtagtgttatctgttactactagtctattaggcgggggtaggcgtcaaccagtgtgtacgggtttgattttcggtcatgctgttaacagcattgcggttcgtcgaactggatatgtagtttagtacgctgtgtcatcacctcttgtgtaagggaacgcttcttttctgtggtatggaagatgtgaacttcgtgattggcctgttaaaaaaaaaaaaaaaaaaaaaagaagttgtaatataagttgaaaaaaaaaaaaaaaaaaaaaaaaaaaaaatagtggtcgccagttggccagtcggggcataaccaaggatgaaattttcggtaatgctattgccagcatcgtggttcaccgaactgc

SEQ ID NO: 95616 - DNA, 457 bp, Zea mays
  Clone ID: MRT4577_187196C.1
cccatcgtcgtccgcaaaaaaaaaaaaaaaaaaaaaaaaaaaaaaaaaaaaaaaaaaaaaaaaaaaaaaaaaaaaaaaaaaaaaaaaaaaaaaaaaaaaaaaaaaaaaaaaaaaaaaaaaaaaaaaaaaaaaaaaaaaaaaaaaaaaaaaaggggggggcccgttttaaagggaaccaaatctttcacttcccgggtggcttggaaaggataatagtttcttttttatgggtgccccctaaattataatttacaggggccgcgggttttaaaaacgtgggggaatggggaaaaaccttggggtctaccaaatttatatggttttggaaaaaatccccttttcgccggttggggaaatagcaaaagggccggaccggttcgccttttcaaaaatttgcccacccttaatgggaaaggggaccccccttttaggggcctttaaaccgcggggggggggg

SEQ ID NO: 95617 - DNA, 1242 bp, Zea mays
  unsure (1)..(1242): unsure at all n locations
  Clone ID: MRT4577_187197C.1
cattgggaccctcgaggccggccgggtttgcttttctcggggggactgtaatgtagctttgtctgaggccataaataatttgtgtggatattccgttcctgtccatttttaagggcgctgcttgaatcttgtatccgtttttttcatgcaattgtctgcactcagagatggtggaaataggaagggaaggaaaagacaaatggttttttttacttgtctgctgttcttcctcacttgaaacctatgtgatgaacagagatgtgctgctgctgtatgtttcgatggaccacaaagtgcgtggttgatcaacataatattttttttagttttgttccctcacttgaaacctatgtgatcaacataatggcactggctactctttttttttagttttgttcctttagtgacacacagattgctcgcctgatcttcattcccacactagctttggcaggaactggaacgcgtataacaagtttttctagactctgtcatttcagctgtgcatctacatcatctttgttgttgtgtattgattcccacgctagctttttgcaggaattggaacgcgtgtaacaagttggcattccattgtgcatctacataatctttgtagtcgtgtactgactgtcctagtatcctattttcagatggagagccacaacccatcgcactctcagatcgccgaagtgacgatggacatcgcagcgtcagcttctggagcggcagggagcaagttctgcaagggcgcagcctgcgacttctccgacgccagcaactcctcgaaggacgccagggagaggtcggcgtcgatgaggaagctgatagtcgcggtggtcctctgcgtcgtattcatggcggtggaggtggtggggggcatcaaggcgaacagcctggccatcctgaccgacgcggcgcacctcctgtcggacgtggcggcgttcgccatctcgctgttctcgctctgggccgccgggtgggaggcgacgccgcggcagtcgtacgggttcttccgggtggagatcctcggcgccctcgtctccatccagctcatctggctgctcgccggcatactggtgtacgaggccgtcgtgaggctcgtcggcgagagcggcgacgtgcgggggtcgctcatgttcgccgtnngtcgcgtcgggctggtcgtcacgttctcatgggccgtgtgctgngcccatgacacgggcacggacacggacacgggcatggacatggacattcgca

SEQ ID NO: 95618 - DNA, 1674 bp, Zea mays
  unsure (1)..(1674): unsure at all n locations
  Clone ID: MRT4577_18719C.1
cacgcgttccggaaaaggtcccttggagaagaggaaagaaaaataccgacaaaacgagaagtcgaagtaccctagaggcccagacgaaggcatctccaatctcctcgccccccacggacctgaaccgagaacctttaccgccgccgcctctcgcctagccgccggagaagcgccgctcgctcaggaggacagccatggcgccggagccggaggatgatattatgaacgagaagaatccccgcccgctcgacgaggatgacatcgcgctcctcaaaacctatggactggggccgtattcgaccagcattaagaaggtcgagaaggagatcaaggaaatggccaagaaaatcaacgacctctgtgggataaaggagtctgatacagggctggctccacctagccagtgggatttggtttcagataagcagatgatgcaagaagaacaaccgttacaagtagcaagatgtacaaagattataagccctaatacggatgatgccaaatatgttataaatgtaaaacaaattgcaaaggtagcaagatgttcaaagattataagccctaatacggatgatgccaaatatgttataaatgtaaaacaaattgcaaaggagctgatataaggagcgtttgcacagaagccaggatgtacgccattcgtgcccgcaggaaaacggtgacagaaaaggattttctcgatgctgtcaacaaggtcatcaagggctaccagaagttcagtgcaacacccaagtatatggtgtacaactagtcggcgtgtcttcatgggatctgttgtttctagaaactctggatctttttcatggttgtatcatcatgagattctctatgcaaaggttgttgtttgtttagcaaattggatgccgagtgatttgtgacctgtaccgcatgtttttaagataacaatgttcttcgctcggtggttcactgctgcttgtgtctatgattgatgatgtgcacagggcgcaaagttcattcggaaaactgacgcaatgtaaacatcaggtaacgcaggttgttgtttctctgtggtcgcttggacagaaaggtggaattcgggctacctgacttggaggcccgcacccaaattttcaagatccatacacgtaccatgaactgtgagcgagatattcgtttcgagcttctggcacggctctgccccaactctactggagctgatataaggagcgtttgcacagaagccgggatgtacgccattcgtgcccgcaggaaaaaggtgacagaaaaggattttctcgatgctgtcaacaaggtcatcaagggctaccagaagttcagtgcaacacctaagtatatggtgtacaactagagttcagtgcaacccccgatctgttgtttctagaaaggggggtcttcttcaggggttgtatcatcatgaaaatctctatgcaaattttgttgtttgtttagcaaattggatgccgagtgatttgtgaccaaaaaaaaaaaaaaaaaaaaaaaaacaaaaccatttgtttcctgtcccgcatgtttttaaaaaaacaaggtttttcgcccggggggtcccaaaaaaaaaaaaaaaaaaaaaaacatttaatttaaaaaaaaaannnnaaaaaaaaaaggggggcggcgctccagaagacacgagcgcgtacgcgcgcgcgcaacgtc

SEQ ID NO: 95619 - DNA, 345 bp, Zea mays
  Clone ID: MRT4577_1871C.1
atagaacgcggaatccactagctacaatcgagcaacaatggcgaccaagatattctggctccttatgctccttgctctatctacatgtgttgctaacgcaacaatcatcgctcaatgcttacaagctccaatagctcaccttctttcccaatacctaccataaaggatagctaacatatgtgaaaacccagctattcaaccatataggctacagcaagcaatcgcagacagcaacatacctttatcgcccttgatgattcaacaatagacagacctatctttggtgcagtcattgatacacaccatcatggcacaacagctgcagcaacttatgctacctgagat

SEQ ID NO: 95620 - DNA, 297 bp, Zea mays
  Clone ID: MRT4577_18720C.1
ccaagcaaagagaaaccgcggcgcgagaagagggaggaagggcagattggcccgcaggatgagagagatcatcagcatccacatcggccaggccgggatccaggtcggcaacgcctgctgggagctctactgcctcgagcacggcatcgagcccgatggcaccatgcccagtgatacctcggttgtcgtcgcacatgatgagctttaagacgtccttcagcgacgaccggctctggcaagaatgtaaaaattttttttttccaagacctccccccccgcgccccccccttttttttt

SEQ ID NO: 95621 - DNA, 1624 bp, Zea mays
  Clone ID: MRT4577_18721C.1
gcacgagcgccgtcgaactactccggacgggaagcacctccaatcccctcgcccccacggaccctcgccgccggggaagcgccgctcgctcaggaggacagccatggcgccggagccggaggatgatattatgaacgagaagaatccccgcccgctcgacgaggacgacatcgcgctcctcaaaacctatgggcttgggccgtactcgactagcattaagaaggtcgagaaggagatcaaggaaatggccaagaaaatcaatgacctttgtggtataaaggagtctgatacagggttggctccacctagccagtgggatttggtttcagataaacagatgatgcaagaagaacaaccgttacaagtggcaaggtgtacaaagatcataagccctaatacggatgatgccaaatatgttataaatgtaaaacaaatcgcaaaatttgttgttggactgggggataaagtgtctccaactgatatcgaggaagggatgagggttggtgttgatcgcaacaagtaccagattcaaatccctctcccaccaaaattgacccaagtgttaccatgatgactgtggaggaaaagccagatgtgacgtacaatgatgtcggtggctgcaaggagcagattgagaagatgcgtgaagttgttgaacttcctatgcttcacccagaaaagtttgtcaagcttggtattgaccctccgaaaggtgtcctttgctatggcccacctggtactggcaagacacttcttgcaagagctgtagcaaaccggactgatgcttgtttcatccgtgtaattggaagtgagctagttcagaagtatgttggagaaggtgctcggatggtcagggaactgttccagatggcccgctcaaagaaggcatgcattgtattctttgatgaagttgatgcaattggtggtgctcgttttgatgatggggttggtggtgacaatgaggtgcagcgtacaatgttggaaatagtaaaccaacttgatgggtttgatgcaagagggaacatcaaagttctcatggccactaataggcctgataccttggatcctgcacttctgcgccctggtcgcttggacagaaaggtggaattcgggctacctgacctggagggccgtacccaaatttttaagatccatacacgtaccatgaactgtgagcgagatattcgtttcgagcttctggcacggctctgccccaactctactggagctgatataaggagcgtttgcacagaagccgggatgtacgccattcgcgcccgcaggaaaacggtgacagaaaaggattttctcgatgctgtcaacaaggtcatcaagggctaccagaaattcagtgcaacacccaagtatatggtgtacaactagtcggcgtgtcttcatgggatctgttgtttctagaaactctggatcttttccatggttgtatcatcatgagattctctatgcaaaggttgttgtttgtttagcaaattggatgccgagtgatttgtgacctgtaccgcatgtttttaagataacaaggttcttcgctcggtggttcactgaaaaaaaaaaaaaaaaaaaagaaaaaaaaaaaaaaaactcgagactagttctctcctcgtgc

SEQ ID NO: 95622 - DNA, 244 bp, Zea mays
  Clone ID: MRT4577_18722C.1
accaattccaaattgcatgaagaggaaccacctcagaatatgaaaccacaatcaggaaacgataagccattatcaaaaacagctcttaaaaatcaaaggaagcatgaagctaagaaagctgcaaagcaggaagcaagaagtgacaagagtccagatttggcacctactcctgccccacagagcacaccacgaaacactgtctctcagtcaatttctggggaccctgagatagacaaaaaaatca

SEQ ID NO: 95623 - DNA, 1827 bp, Zea mays
  unsure (1)..(1827): unsure at all n locations
  Clone ID: MRT4577_18723C.1
attgggaccctcgaggccggccgggcaggcatctccaatctcctcgccccccacggacctgaaccgagaaccgttaccgccgccgcctctcgcctagccgccggagaagcgccgctcgctcaggaggacagccatggcgccggagccggaggatgatattatgaacgagaagaatccccgcccgctcgacgaggatgacatcgcgctcctcaaaacctatggactggggccgtattcgaccagcattaagaaggtcgagaaggagatcaaggaaatggccaagaaaatcaacgacctctgtgggataaaggagtctgatacagggctggctccacctagccagtgggatttggtttcagataagcagatgatgcaagaagaacaaccgttacaagtatattaactgaacctggtagcaagatgtacaaagattataagccctaatacggatgatgccaaatatgttataaatgtaaaacaaattgcaaagtttgtggtcggattgggagataaggtctctccaactgatatcgaggaagggatgagggntttggtgttgatcgcaacaagtaccagattcaaatccctcttccaccaaaaattgacccaagtgttaccatgatgactgtggaggaaaagccagatgtgacgtacaatgatgtcggtggctgcaaggagcagattgagaagatgcgtgaagttgttgaacttcctatgcttcacccagaaaagtttgtcaagcttggtattgaccctccgaaaggtgtcctttgctatggcccacctggtactggcaagacacttcttgcaagagctgtagcaaaccggactgatgcttgtttcatccgtgtaattggaagtgagctagttcagaagtatgttggagaaggtgctcggatggtcagggaactgttccagatggcccgctcaaagaaggcatgcattgtattctttgatgaagttgatgcaattggtggtgctcgttttgatgatggggttggtggtgacaatgaggtgcagcgtacaatgttggaaatagtaaaccaacttgatgggtttgatgcaagagggaacatcaaagttctcatggccactaataggcctgataccagggcgcagaagtgcaggatccaaggtatccagaaagcaagccaatagctagaggttccttcgctgtgctgctagtgctagacgacgacatatagaagaaatatatatagagaaagagagaaaagatgaggccggagagagttggatcaggtggtgtttgggtgaagctcatgggcggcgccggcgggcccccgccgagcccatggaggacgccgacaccctacatcttcctggcgctctccttcatgatgggcgtcgtcgcggtggcgctcgccgtgctcatctgcatgcgcaagaagctgccgtcgtcctcgccgcagggggccgacgagaaggcggcggccgaggcggcggcggcggcgcgggccctcgacccgctgcaccgcgagcccaaggtcgttgtgttcatgccaggcgaccacgacgcaccgtccttcgtcgccagcgccaagccgctcggcggcgacggcgcggcggcagtgtagcctggagggatcggaaacggcgactgacgacatcgaggggctaccccggcggtgacggcgcggcgcggtggtagtgtgtgtgtctgtgcgcgcgcgcgtcgcggacgccgagccggagacacgcggtcaattttatgaataggttttttttgtccccttcccacatgagaatctgagactatgaggggcggcgcgccttttgaaatcagcgaaaacgaatgtttggtttgcc

SEQ ID NO: 95624 - DNA, 1747 bp, Zea mays
  Clone ID: MRT4577_18724C.1
tcgagggccggccggggaaaaaaaaaaaaaaaaaaaaaaaaaaaaaaaaaaaaaaaaatacccgacgaaacgagaagtcgaactaccccgaccgggccagacaaaggcatctccaatctcctcgccccccacggacctgaaccgagaaccgttaccgccgccggagaagcgccgctcgctcaggaggacagccatggcgccggagccggaggatgatattatgaacgagaagaatccccgcccgctcgacgaggatgacatcgcgctcctcaaaacctatggactggggccgtattcgactagcattaagaaggtcgagaaggagatcaaggaaatggccaagaaaatcaacgacctctgtgggataaaggagtctgatacagggctggctccacctagccagtgggatttggtttcagataagcagatgatgcaagaagaacaaccgttacaagtagcaagatgtacaaagattataagccctaatacggatgatgccaaatatgttataaatgtaaaacaaattgcaaagtttgtggttggattgggagataaggtctctccaactgatatcgaggaagggatgagggttggtgttgatcgcaacaagtaccagattcaaatccctctcccaccaaaaattgacccaagtgttaccatgatgactgtggaggaaaagccagatgtgacgtacaatgatgtcggtggctgcaaggagcagattgagaagatgcgtgaagttgttgaacttcctatgcttcacccagaaaagtttgtcaagcttggtattgaccctccgaaaggtgtcctttgctatggcccacctggtactggcaagacacttcttgcaagagctgtagcaaaccggactgatgcttgtttcatccgtgtaattggaagtgagctagttcagaagtatgttggagaaggtgctcggatggtcagggaactgttccagatggcccgctcaaagaaggcatgcattgtattctttgatgaagttgatgcaattggtggtgctcgttttgatgatggggttggtggtgacaatgaggtgcagcgtacaatgttggaaatagtaaaccaacttgatgggtttgatgcaagagggaacatcaaagttctcatggccactaataggcctgataccttggatcctgcacttctgcgccctggtcgcttggacagaaaggtggaattcgggctacctgacttggagggccgtacccaaattttcaagatccatacacgtaccatgaactgtgagcgagatattcgtttcgagcttctggcacggctctgccccaactctactggagctgatataaggagcgtttgcacagaagccgggatgtacgccattcgcgcccgcaggaaaacggtgacagaaaaggattttctcgatgctgtcaacaaggtcatcaagggctaccagaagttcagtgcaacacccaagtatatggtgtacaactagcggcgtgtcttcatgggatctgttgtttctagaaactctggatctttttcatggttgtatcatcatgagattctctatgcaaaggttgttgtttgtttagcaaattggatgccgagtgatttgtgacctgtaccgcatgtttttaagataacaaggttcttcgctcggtggttcactgctgcttgtgtctatgactgatgatgtgcacagggcgcaaagttcattcggaaaactgacgcaatgtaaacatcaggtaacgcaggtttgttgttt

SEQ ID NO: 95625 - DNA, 445 bp, Zea mays
  Clone ID: MRT4577_18725C.1
ggagggagaagacacagggctgacgcacggaacgcacgatgatattcagagagggtacatataccttgcatatgtattcaactaagtatactatctgcgtagctagctcgtacgaccgatgaaagcgtagaggagcacgaaccaaagcgatggagaaccctgcgagctgtgctagtgctaccaatcgacctcaccaaactgaccttccggaaacctgtgcctccgccgagatcgcgcggagcagcataggagataaccgacgatggcacagtgcagacctggacaagaaatacgtcagtgtagcttccccgacgtacgagacgccgctgcaccgacgctgccttgagtgccagatgcaccctatcaccatgctaatcaggaacgcgatccaactggtcacctttgttatcgacaccgacaggatctaggacgtccacggtcgtca

SEQ ID NO: 95626 - DNA, 589 bp, Zea mays
  Clone ID: MRT4577_18726C.1
tccggggacgagttcatcgaatggacgggctgcagaggtcggcgcagacattcaggaggtcgggctcgtcggggctggtctgggacgagcgcttcatcaccgagggcgccggcgcggcggcgccacgccagcagccggagctgcggcactcgaggagcgtcggcagcgtcgccatgctgctgctcggcggcgaggcagatcgcgacgacaagaggaagctgacgctggccaagccgaacctgaagggccaccacaagaagcaggaggagctggtgcctggcaggaaggcgtttcggaccagggacgtagccccggccgccgagccaccgtcgccgagggtgctcgccatctgctgcgcgccctgctccatcttccgggatgccggcgccggtggctcgtcgtctctggcgcggcgggccaagaagcggtaggataggaaaatcaatatgtttattttttcgggttcacggtatgcttgagacgaagtgtaaccgtacgggggatcgtgaccaagtggctcgcgcgtacgtacgatttgaggctcataaaatctctctgattctgaataaatttgtactacatgatggat

SEQ ID NO: 95627 - DNA, 2325 bp, Zea mays
  Clone ID: MRT4577_18727C.1
aagttctaatggccactaataggcctgataccttggatcctgcacttctgcgccctggtcgcttggacagaaaggtggaatcgggctcctgactgagggcgacccaaatttaagatcctacacgtcatgaactggagcagatattgttggctctggacgttgccacccggccggggcccccatcgtctagtgttcaggacatctctctttaaggaggcagcggggattcgacttcccctgggggtaccatcggctcgccgggggccggagggccgggccgggggtcaaaggtcccttggtaccgtgtggcgggcggagaccgataaaacgccgtcgaactactccggacgggaagcacctccaatcccctcgcccccacggaccctcgccgccggggaagcgccgctcgctcaggaggacagccatggcgccggagccggaggatgatattatgaacgagaagaatccccgcccgctcgacgaggacgacatcgcgctcctcaaaacctatgggcttgggccgtactcgactagcattaagaaggtcgagaaggagatcaaggaaatggccaagaaaatcaatgacctttgtggtataaaggagtctgatacagggttggctccacctagccagtgggatttggtttcagataaacagatgatgcaagaagaacaaccgttacaagtggcaaggtgtacaaagatcataagccctaatacggatgatgccaaatatgttataaatgtaaaacaaatcgcaaaatttgttgttggactgggggataaagtgtctccaactgacatcgaggaagggatgagggtcggtgttgatcgcaacaagtaccagattcaaatccctcttccaccaaaaattgacccaagtgttaccatgatgactgtggaggaaaagccagatgtgacgtacaatgatgttggtggctgcaaggagcagattgagaaaatgcgtgaagttgttgaacttcctatgcttcacccagaaaagtttgtcaagcttggtattgatcctccaaaaggcgtcctttgctatggcccacctggcactggcaagacacttcttgcaagagctgtagcaaatcggactgatgcttgtttcatccgtgtaattggaagtgagttagttcagaagtatgtcggcgaaggtgctcggatggtcagggaacttttccagatggcccgctcaaagaaagcgtgcattgtattcttcgatgaagttgatgctattggtggtgctcgttttgatgatggggtgggtggcgacaatgaggtgcagcgtacaatgttggaaatagtaaaccagcttgatgggtttgatgcaagagggaacatcaaagttctcatggccactaataggcctgatacattggatcctgcacttctgcgtcctggtcgtctggacagaaaggtagaattcgggctacctgacctggagggccgtacccaaattttcaagatccatacacgtaccatgaactgcgagcgagatattcgtttcgagcttctggcacggctctgccccaactctactggagcggatataaggagcgtttgcacagaagccgggatgtatgccattcgtgcccgcaggaaaacggtgacagaaaaggattttctcgatgctgtcaataaggtcatcaagggctaccagaaattcagtgcaacacccaagtatatggtgtacaactagagagtgtcttcatggaatatgttgattttagaactccgggatcttttcggtgattgtgtcatcgtgaggttctatgcaaggattgttgtttgttttgaaatctggatccccagggattgcatcctgtaccacatgtttttaagacaaggttatccgcttggtggttcactgtacctgtggcaattgttgccgacaccgaactgaacataaagtcagaaacaggctacagtgagtgttgaaaaggaagaaatacagtgggtgcctgtttaaatatagcgttgtattactgactgaaaaagaaactgtccacctgaggaacagccgttgaagcgggtttgtagggtaggggcttgagggagttggcgcgaaacaggaagagtctggactgtagcagccgtggaaggaggcgccggtgcccacctgaggaactggagcagccgcagtagatagatcaagcaatcagcctagcggggatttcatcgcctgggtagtcgtgaggaccggtttggtttcatgaagctctcttcccctctcataaatatctcgacgcataagcagatttgctgatatgtcaaaaaaaaaaaaaaaaaaaaaaaagaaaaaaaaaaaaaaaagcggcc

SEQ ID NO: 95628 - DNA, 346 bp, Zea mays
  Clone ID: MRT4577_18728C.1
attcggctcgagctgctagaagatgacaatgctgcagaagcacttcttagctttatttcggagtccgggtcccaaatattagtgctgggttctgactcctcaaatttcataacaaggaagctaaaaggacctgggataccaactaccattctaagatgtgctcctgacagttgtgatgtatatattggagctagagatagaattatatccaagttggctgacttttcatcttcacgttctcatgagactagccctaaggacttcttggctacttaaggtaataaagaggaccatggcattggcagagaaatgtctggaattagttcattctcaactgaacctaaaa

SEQ ID NO: 95629 - DNA, 179 bp, Zea mays
  Clone ID: MRT4577_18729C.1
accccacccccccccccccccccccccaccctttggagcaaaacactgtaaatctacattttttctctataaattaaaccccacctagttttacaaccgcaagtaactcaagactcgccgaagccccgcatttcattttttaccctaacaacaagcctaacatctttgaaccatggtac

SEQ ID NO: 95630 - DNA, 421 bp, Zea mays
  unsure (1)..(421): unsure at all n locations
  Clone ID: MRT4577_1872C.1
gacctttgggctgtttagtgctgcccattctcctaatgaatagcacctacatccgaactcatcgtgcttatgttagagtcatataacgaaaatagggtgcataccagacgacgctagatcctactacttaaccccgtcggtatagcggtaggatagagcaatatgcgccgacccggtcaaagggcctctccccgaggagcccacgaagtgcggcggaaattccgttacgtccgtcgagtgtccttcgtatgaggcggtacccaagtctcggaaagtgttcaaacacggggtccgaggagggcacttagtgccgatcgatccggtgctgtggacaaacaactgaagtattagacgagccgctgtcccgcaatggaaacgatcngagcgacgttggatatcgcggtgcgcgagtccccacgcg

SEQ ID NO: 95631 - DNA, 355 bp, Zea mays
  Clone ID: MRT4577_18730C.1
ataccctagatctcatacacattggcgagctttaccaataaaaagcatactgatttccaacataagccctaacactagttatatgaagggcttaaatattcacttcatcatgggatgctcttttaattgaatacactgtcccactttccgcctacatgtattttaagtgtgccatattatcacatgaagacccttcattgatacttacttaaccattaaattggtgaccaaaaaacaaatttatacaaaattctttctcttaaaacatcatacattacctgacttgaatagtgagtgtgataactttcattaatcgaacatcattaaccgaaaacattccaataaggaaaacttt

SEQ ID NO: 95632 - DNA, 301 bp, Zea mays
  Clone ID: MRT4577_18731C.1
cttttaagacaaattttagacgtaaaagtagatttaatacatagaaacgaaaggactacatggcagagtgatctaacaatcaatctaaaccagctggtaactaacaatgatagagggactgaccaacactgccagcttaatctatcagtccgctgcctccattttccacaaaaagaagcttatccagtcctgtggatctcttgccatatgtcatccttgcaagcggataacactagtccttggcatggtctagtgcgggtttctatgtattaaatctacttttaagacaaattttagacgt

SEQ ID NO: 95633 - DNA, 922 bp, Zea mays
  Clone ID: MRT4577_18732C.1
gccggccgtgtcgggtcgaagacgatgagttcattgcaaatgcactgattaatttgtattccaaagtatgtctagttgatgatagtctgagatgcttccataggactcccaaacaagagatttttgcatggacttctatgattagagcatttgtgcacaatgaacattctgataaggcactacactttttcagagagcttcgttatacaggagtggagcctgaccaattcaccatttcatgtgtgatgaatgcctgtgctgatctgagtatgccaatagcatgtgaacagatacactgttatgcagtcaaatctggatttgatcggtttactctatgcggcaattcacagatcgagatgtataggggtacaggtgatcttaaggctgcaaaaaagtcatttgagagaataccatccctggatactttctcatggtctcaaatgatcttgagctatgcagtgcatggccatggaagagaggctctactgctatttgagaaaatgagggattgtggtgtcatgataaatgagtttgcatttcttgctgttcttgttgcttgtagcttggggggactgatagatgaattttacaggaattatgacagcatggtatcacattacagctttgtcccggacatgaagcatatagcatgcatggttgacctcctaggtcatgttgggaaggtggctgatgctgaagatttcataaaaagttatggattagaaaataatgcagtactttggcatacactgttgcgtgcctgcagaatccatggggacaaagatagaggtataaaaacaggagaaaaactaatgatgcttgagccttttactgcaagttcctatgtcatgctgtacaacttgtacatggatgctgggaaaatttcacttgctatgaggacaagaggccagatgagagagcg

SEQ ID NO: 95634 - DNA, 409 bp, Zea mays
  unsure (1)..(409): unsure at all n locations
  Clone ID: MRT4577_18733C.1
ccttcggaggtcgcattcagcgcagcgcaggtgtgaaggaaggnnnacnnnnnnnaanannnnncncnnnnncnggangccnnnnnncccnnnnnncncccanaanganatgcggatcctcatggtcggcctcgacgccgccggtaaaaccaccatcctctacaggcgcaagctcggcgagatcgtcaccaccatccccaccatcggtttcaatggtgaaactgttgagtacaagaacattagctccactgtctgggatgccgggggtcaggacaagatcagacccctttggaggcattacttccagaacacccagggtcttatctccgccggtggacagcaatgaccgggaccggggggtcgaagccagagatgaggtccgcacgatgctgaacgaggacgacccacg

SEQ ID NO: 95635 - DNA, 1288 bp, Zea mays
  Clone ID: MRT4577_18734C.1
ctactgacgacaactatccctaatctcgaggccggccggagcctccgcctctcccctcccactcggccactcccagtgccagccgccgtgcgctcgctcgcgcgcgctctctttctgggacgaccagtgggatatctccaccgccgccttacgccaggtgcggaccttcgccgatctcttcgccagcgaagagcgtccatcagtaaaaatggtggcccttgcaaatgaagaggccttggcccatgatgaagatatcatggatgatgttgattctgatgttgaagaatcggactcagaagacgattcaggtgaagaagctcaggataagccttcagacaaagctatatacaacaaggaggccatccttgaaaaacttgaagatattgcctggcccaagtatgtggactggatacacaagctcaccattgagcatgatcagggggaaaaggttgatgtgaatgatgatcttgctcgtgaacttgcgttttacacccaagctttggatggcacaaggcaggcctttgagaagctgcagtcgatgaaggtcaggttcctcaggccaacagattactatgctgagatggtgaagactgatgcgcacatgcacaagatcaaggggaggctgctgtcagagaagaagaggatcgaggaggctgaggaacggaggaaggctagagattccaggaagaaagcaaaggaggttcaggctgagaagaagaaggagagggctaagcagaagaaggagcagattgagtcagtcaagaagtggaggaagcagaggcaacaagggggattcaccaagggaaatgatgatgcaccagaccttaattttgaaggagaagaaggatttaaacaatctaagaaaaggagacccggtgtttctcctggtgacaggtctggtggtcttgctaagcgaggtaaaggaggaaagaacgggagggcaagggattccaagtttgggcatggtggtcgtaaagggctgaagaagcaaaacactgctgagaccacaaatgatttcagaggctttaaccaggggtgtgagcctcaaaacaagaagagaaagaggttttgaaggatattgtaacttgtaagaatttgggtgtgtgccaaaaccagaattaaaagatgttcgaacttttgctgttattactattcttgttgcagcattattttgttatgccgtttgctagaagcaaaaaatatctaatgttagtctagggaatcagtcaaacacaagacttgatgttttgctttatctggttatggttttcttttatcgtggattgca

SEQ ID NO: 95636 - DNA, 340 bp, Zea mays
  Clone ID: MRT4577_18735C.1
ctcagttacgcgcaaaccgcgtctcgcgcggggggtccgcatttccccttccccgcaccgcacccaacccccgtcggagagagagagagagagatggcatcggtggcggagatgcagcccctcgcgccggcggggtaccgccgcgcgccggatatgaaggagaaggtggaggcgtcggtggtggacctggaggccggtaccggagagacgctgtacccggggatctcgcgcggagagagcgccctccgatggggctttgtccgcaaggactacggcatcctcgctgcgcagctgctcctcaccaccgtcgtctccgccctaaccgttcttcaccccaccc

SEQ ID NO: 95637 - DNA, 1518 bp, Zea mays
  Clone ID: MRT4577_18736C.1
cggacgcgtgggcggacgcgtgggcggacgcgtgggtttttttttttgccccacaaaaaagtaaaattaatatagtttaatctcttttagccactcattgagggactagagactaaatcagttcagtccatgttttagtcccaccatttggtaatttagagactaacccaaacaaatgcagaacagaaggaataacaacaggaagaacagcagcaacttcgagtatacttgcagtgggggtaagattaatctgcattccgtgataaaagaagaccattaccagataaagcaaaacattaagtcttatgtttggactgcttccctagactatttttccttctggcacacaccataacaaaataatgccgcaggggggaatagtaataacacaaaagttcaaaacttcttcctcttctggttttgagactcacccaaattcttaatatatccatcaaaagttcaaaacctctttctcttcttgttttgagactgacccccctggttaaagcttctgaaatcattagtggtctcagcggtgttttgcttcttcagccctttacgaccaccgtgcccaaacatggaatcctttgccctcctgttctttccttctttacctcgcttagcaagaccaccagacctgtcaccaggagaaacaccaggtctccttttcttagattgtttaaatccttcttctccttcaaaattaaggtctggtgcatcatcatttcccttggtgaatcccccttgttgcctctgcttcctccacttcttgactgactcaatctgctccttcttctgcttagccctctccttcttcttctcagcctgaacctcctttgctttcttcctggactccctagccttcctccgctcctcagcttcctcaatcctcttcttctctgacaacaacctccccttgatcttgtgcatgtgtgcatcagtcttcaccatctcagcgtagtaatctgttggtctgaggaaccggaccttcatcgactgcagcttctcaaaggcctgccttgtgccatccaaagcttgggtgtaaaacgcaagttcgcgggcaagatcatcgttcacatcaactttctccccttgatcatgctcaacagtgagtttgtgcatccagtccacattcttgggccaggctatgtcttcaagtttttcaagaatagcctccttgttgtatatcgctttgtctgcaggcttagcctgagcttcttcacctgaatcatcttctgagtccgattcttcaacatcagaatcaacatcatccatgatgtcttcatcatgggtccaggcctcttcatttgaaaggaacaccatttttagcagagtcaccggccggtgtgaccggaggcgagggcgcgaggcgactggcgagaggcggaggggatgccgctgacgccgtagcccgagcctgagcggcgccgccgccttgccgagcgcgagtaggagagagagcggaagatagagcgccggcagggtgagttggcgcccgggggggctcgagggtcccaa

SEQ ID NO: 95638 - DNA, 1811 bp, Zea mays
  Clone ID: MRT4577_18737C.1
ggctcctatagggcgattggcttggggacgccgggacagcagctccgaagccacaccacagttatttattactgttttttcgttgcctccaatccaatagagttgaccgaaccacgcgccgcccgctgacatggacgacgtagtaccagcgacagcgaagcagaccgtcgttctgtaccccggcggcggcgccgggcacgtcgcgccgatgacgcagctcgccaaggtcttcgtccgccacggctacgacgtcaccatggtgctcctggagccgcccatcaagtcgaacgcctccggcgccagcttcgtcgagagcttcgccgcctccaacccgtccatcaccttccacctcctcccgccgatccctccccccgacctcgccagctccaccaagcaccctttcctcgtcgtgctggagttgctgggccagtacaacgacaagctcgagagcttcctccgcaccatcccgcgcgagcgcctgcactcccttgtcatcgacatgttctgcaccgacgccatcgacgtggccgcgaaggtgggcgtccccgtctacacgttcttcgcggcgaacgccggagccctggccgtcttaacacagacggtggcgctgcttgacggccggcaaacgggcctgaaggagctcggggacacgcccatcgagttccttggcgtgccgccgatcccggcgtcgcacatcatcagggagatgctcgaggacgcggaggacgaggtgcgcacggcaatggcgaagatctggaagcgcgacacggacacccggggcgtcctcatcaacaccttctactcgctggaggcccaggccctgcaggcgttcagtgacccgctgtgcgtccctggcaaagtgttgcctcctgtttaccccatcgggccgttggttggcaagggcgggagcgggacggacggaggagaggcggcggagaggccgcatgagtgcctcgcctggctcgacgcgcagccggagcgcagcgtcgtgttcctctgctgggggagcaggggcttgctgtcagaggagcagcttaaggagatagccgctggcctagagaagtccgggcaacggttcctgtgggtggtgcgcacgccggccagcagcgacgacccgaaacgattctggctgccacgcccggagccggaccttgacgcccttctgccggaggggttcttggagcggaccaaggaccgcggcctcgtcatcaagtcgtgggcgccgcaggtggacgtgctcagcaaccccgctgttggcgcgtttgtcacccactgcgggtggaactcgtcgcttgaggccatcacagcgggtgtgccgatgctgtgctggccacagggcgcagagcagaagatcaacaaggtacttatgaccgaggccatgggcatcgggctggagctggaggggtacaacacaggtttcatcaaggctgaggagatagagacgaaggtgaggcttgtgctggagtccgaggaggggagggagattaggacacgggcggcagaggtgaagaaagaagcacacgcggcgttggaggacgggggatcatcgaaggcagcatttctccaattcttgtcagatgtcaagaatattaattaggtcgggaagtgatcaatctttaaccgcccgatacaacgtaacacaaactattcaataaaatattagtatacatattgcttaggaaaaaaaatcccataaacaagtaataaagaaaacatgtgtgtagcaacaacattataccataaaagaacaatcctacattaaaaacctttaaaaaaaaaaaaaaaaaaaaaaaaaaaaaactcgaagaggg

SEQ ID NO: 95639 - DNA, 178 bp, Zea mays
  Clone ID: MRT4577_18738C.1
ccggccgggaattgtatttaccagagagaagcgagtgcacacactccaacagctgcgaggcaaacatatcaccgatgtcacacttaactgcgtcgctgtcctcgttcacacgataccatggggtatcgatgtactattcaagttcggcagccgaggacaaagctaggtatggcttatt

SEQ ID NO: 95640 - DNA, 352 bp, Zea mays
  unsure (1)..(352): unsure at all n locations
  Clone ID: MRT4577_18739C.1
ccttgtttttttttttttgcagagggatcggtatatttcatatagtggaacctagatttaacattctgcattctgcaatacatacaagctactatctgaacgacttgggattgaacttgagagaactggaatagcatcaggctttctttataaggggcagtgatgtccaggtcttgattggctgtacacagctactgtttccaccttgggcggaaaacaggcatttgcctgaccctgtgaagatcgaccgcgatccggntgaggtaattacatgccaggatgacacattggcttaagatcctacctaacgaactttgatttcatcaattgggagaagagaatcaattgcctg

SEQ ID NO: 95641 - DNA, 1097 bp, Zea mays
  Clone ID: MRT4577_1873C.1
aaacgtgggaaaaatatcagttttgcatgcgatggaatatatgcggcctttccaggattggattgccataaaagaacgcaaccaatcaggatataaccacacaactattttagaataccatgtggcgtccgagccattatacaaagaggaacagagtcttccttcagaattggtaatggacgcatttaataaaaaaaaaatcatctaaaatgtcaggtattgcccgctcgatagatttgagttcagacagttaacggtttggtcttcaactaccactagtatcagaaactctagtccaaaacacagttgttcatcaccattcaaaattcatcttctcagaacaggaagtaaaaaacaacataagtaaactactaataaaaagggtttgatcgtcaaatactaccatggtagcatctgaaactctagttcacaaaagttgctcttcatcgctctcgtctaactgaaccacaaaaaatcagtttatgataccgcctgcaacaaagagaaaatatagcagaaccaggacaagacagtgagctacgacttggtgccacagctggacaacgtacttataatcctagacaagaaaaaaattaaggggtgtacatgtaagttatttaatacccttggggtttctatgcattattatgctacatagcatgcattttggattttgcccaatccagaatagattacaacgcacaaatgtagatcaacaaactttaacagtcttgacttttgacaaataatttagccaacaattttaaccaataaataatacagacttaatgtatccttcagtaaccacaagtttataataaccataaacaatataatttaaactaaataaatagtgaacgtgtgagaattgaggtggcaagtgtaactgcaccttataaattctacaaaaggtaacagtagtcaggccaacctaggaaataattccagtgattactataaagactcaaagcaaaattgccagtcctgttataagcacaatagtcaacacagggcgtgagcatcagctacatgcaaagggagacaaaactactggttgaactccttgttctaaagccttaaaaataattatgttgcat

SEQ ID NO: 95642 - DNA, 372 bp, Zea mays
  unsure (1)..(372): unsure at all n locations
  Clone ID: MRT4577_18740C.1
gggngggccaagccgaccgaacagaaatcaaaacaagcacttcaacttattacggcccctgccaacaaacacacaaagcgtggcacccaatggttaattagcggaaggtgaactactcttcgaagaagttaaggtcgttgcccccggccggtttcggccgcaacggcggcggcttcaacaacaacttcttaaaggaaaagttcaaggaggtcaacacggtttaacccgccggtgcaaacaacaacaacaacaatgttaacaacggcggccacggtttcttgttccccaagaccagggtcaaaaagaacataaccacttgaaccgggggggtccacaaccccaggaaaagcttctttgccagggttaattaag

SEQ ID NO: 95643 - DNA, 324 bp, Zea mays
  unsure (1)..(324): unsure at all n locations
  Clone ID: MRT4577_18741C.1
gcggccgnccttnntttntttttttttttttaggggagagctacagtcacaaagaacaggatctttgggccctctatgcgcactaacatatgtcactgcccacatactaggcatctagcagtaggtgagaccagcaaatgcccctggcataagcactcagccacagagggcgtcgtgaaaaaacaaggtcctgagcgcatgacagagccctaccttacactgacacacacacacaaggcactatccaaaagctctaatatgggatggccaaacccccttaactacggaaatcggaagctcactgttacctataccgcccagctg

SEQ ID NO: 95644 - DNA, 444 bp, Zea mays
  unsure (1)..(444): unsure at all n locations
  Clone ID: MRT4577_18742C.1
acccaggcgggcggggctggcttctcctcccccgcgaaccaagacctcgctcagtcagggctagtcagggttcatgagcgggggcaaccgaagggagctgctggggagcccccacccaatccaagggtgagtacgggtcgacccacacaggagcacaggaagcggggcggagatgaccctnctcacttactacaggcgaatgagacttacactgcgcacaggagcactagacactgcccgccacgacatggagagcgcctccagggcgttcgcggttcggctaccttatccgccaagaaccccatgctcacgctgtcgagaacatgaacggcaaggagctcgacggcacgaacatcaccgctaaccaggcccaggcccgtggcggcggcggcggcggcaggggctacggcggcagacgcggcggcggcggatatgggggcgggc

SEQ ID NO: 95645 - DNA, 753 bp, Zea mays
  Clone ID: MRT4577_18743C.1
aattaagtaaaaccaaaatgctgtccacattctattccttattgcatcggacatataacatgcagttcattattcagagcgtcatcgtcatgctgaaaccagaaagctgatcaaacatcagagcgagcaaatgtagtccaccagaccgtcgagagccaaactaattcctcctccttctgcaacgcactgcttcgcctgcgccttaagaagccgagccctctcccttggcccctgtggccccagctcgccggccatcagctttctagccgccttcgccatggctgtcctctcaagcggcttcccgacctcgtacccgatgccccactggtgcgtcacatacctcgcgttcactatctgctcggcgaagcacggctgcacgagcatgggcaccccttcggatatggcctccaccatggatttccacccgcagtgcgtccagaacccacccaccgccgggtgcgccaggacctccctctgcggtgcccacgccacgatcttgcccctgtgcctcaccgtctcgcggagctcctccgggaccggcggcacatcctcctcatccgcgtccgcgccgcggacggagccgcggcggaggacccacaggaacggcacgccgctgccggccagcgcccacgccgtctcctcgaacacggcgcggtcgacgcgcgccacgctgcccatgctgacgtacagaacggagcgcggcgggcgcgcgtccagccacgccaagcaggtggggtccggcgcgtcctggcc

SEQ ID NO: 95646 - DNA, 987 bp, Zea mays
  Clone ID: MRT4577_18744C.1
tttttttttttttttttttatgaagaatgatccatttcaccagatttgatgtctagtaacttaatagtttaatgttgttgagacttgtgtaactgccatgctgtttctgaaatttactctataagggtgcatcatctgccaacgtagcatacacctagactagagtagtaccaagcagcaacagttaccttccctccctggggaaaaaggcgcaaaatggaaagcaggcaggcagcaaactctcaagtagcagcggcagctccaggctccgtctctggctgcgctgctgctccaggctccttgctctggcagcgttcaaggtagaactgcaggatggcaagcttcgcggtctcaaaggcacagtagcctagcgccgcaaagcacgcgctgtgcagcaccctgggcccgatgccacgggacaggccgacgagcccctcctccgcgacgacctccctcatggtcccgagcacggtgcggctaccctcggcgccgccgaccctggtcatgaggcgcgtcttgacgacgtcgagcggggtggtgaccgcggcggagatggcccccgcgagggcgccgcagaggacgctctccccgggcgtcaggctctctccgccggggcgcctcatcgcgaacgccttgaggtactcgaaggaggagtagctgagcacgcccgcggggaggttgcggagcaacctggtggggtaacccgcgtagaggccgaggaagccgtcggcgcggaggatgcccaggagcacctgccaggaccggcccgtggcggcgccggactggaggcgctgcgtgatcagctccttgggcaccatgatggcggaggacgagacgttgccgctggcccccgcgagtgggggcacgaggaacggcgggaggtgcggccggagcagcgacttggcgagctcgcaggtgccgaagtagacggcggaggaggaggcggagccgaggatgacggcggagaggccacggtagaggccgagg

SEQ ID NO: 95647 - DNA, 385 bp, Zea mays
  Clone ID: MRT4577_18745C.1
caacaccgaaggtctgctagttgagcaatatgccatatgagacggttgcaagctctgataacatcctctctggaacggacaatgtgctgacaccatctgcttctttggtgagctccctagagatgactaacttcccgactaacaatgatatatatgagcattctcgtggatcacatgctaatctctaccacgattgtgcctatgaacaggagacatgatctgtctatcctgaagaatccatggacccatcaagtagaagtgaggcacatgcacagtatgtgcctgtgtgtgatatcgatatccgtatatacctgcaaactacaatgacgacaagacgcctcatgcaatcagctggatgtgtgaccaagaattgcacgatggatgg

SEQ ID NO: 95648 - DNA, 436 bp, Zea mays
  Clone ID: MRT4577_18746C.1
tcgagacggcaccgctgcagcgcgtcgtgtcgcgggggttggtggcaggcaggcagcgagagcttgccgttcctctctctcagctcaggtcctaggctcacctcaccggctcccagcccgcttctatttcttcctccccgaccccgtgcaggtggcagtccagtccacgccaccaaccgcgaggcgaaccaaaccaacccactctccccaatcccgcgcgcccaggccgccagccctaccaaccatcggcgtcggcaatggcggtcatggcgaccaaggccgccgcgggcaccgtgtcgctggacctcgccgcgccgtcgcgccgccaccaccgcccgagctcggcgcgcccgcccgcccgtcccgccgttcgtgggctgcgggcgcctgggcgccgcgtgatcgccgcgccggcagcggcggcagcggcggcggc

SEQ ID NO: 95649 - DNA, 670 bp, Zea mays
  unsure (1)..(670): unsure at all n locations
  Clone ID: MRT4577_18747C.1
cctcgagccggcggggctgatttggaactatgtagaatagagtgcttgaaggtaggctaccctactctcactctctccggcgctctgtattgctacgccgactgcctccggacgcaggagcggcctctctgcctacattaactgaactatctcgtattacccgtgtggagaataatgcggagctgccgccgctgatgtaagcttcttacaagatggatgcctacatatgcgacgccaggaaggtctgtgacgaacacggcccctgtcctacgtatagtacgaatgctccgcccgctgatcccgaggcatatccttgtagattcctccaggatctagcagcatagtgaagttncgtttcgaacgctagagtattgtagccattataccacatgatagtagatgcgcccaagcctagttttcttcggtatgtgactatctatatgtggctcactgcagataaccatgaaactttagttaccgaatgcgttgaactctcttcatgttagacatgaatattacgacagactacggaagatcaaggatgtttatggcactcatgtacagataggtctggttagaagattactgacttgactcgtaggagatgcagctttccgtgactacatctacaattctgtgacatgatgatatctttcctttgctctatcaa

SEQ ID NO: 95650 - DNA, 371 bp, Zea mays
  Clone ID: MRT4577_18748C.1
caagcaaggaagcacacgatggctcatcgcgttcgcctctacctctctcccgcgtaaggcacggcagttgcggccaccgtcggacctgaggactcgctgatccggaacgtgattctgcggtggagatgataacaatctggagctgaacgcggagtcccacttcctgaactacgtgcatcggtacggcaagtcgtacaatgacgccgacgagcactcgataaggctgtccgttttcaatgccaacctactccacgcactccggcaccacctgcaggaccagtcggcggagcaccgcgtcactaagttctcagaactcaagcaggcagatttccgccggacgtatctcggactccgcaagtaccggtgcgctc

SEQ ID NO: 95651 - DNA, 506 bp, Zea mays
  unsure (1)..(506): unsure at all n locations
  Clone ID: MRT4577_18749C.1
cctcccctncccgnncgaanccncngaccaccgcagagccggcccccngaggaaacccnagcgcagccgccgaccgccgccgacccgnagcagggcgnccccggcccggcccgncgccgcgnccgncnccggcgccnncggccccncgcccgaccccaagcgcggcnccnncgaccaggcgcnccggggggggggannnccaggagaacaggcngnnngangncannnngnnaannnccangagcaagagaagaacncnaaagaaancgnaacacacgcnanagaaagcggcangaagaaacaagcangaaaccnggnngaanncaccggacgnnancagcggnaggnngncacagnnnggagnnanaccgcganagacgggaaagggccannggagaancacgaagngacgcgacggannaccanaacgaagcacaaccgaaccnccggggcgcngaaaagctagngaaagaggnccagaaaaccgggcaggcaccccaggaaaa

SEQ ID NO: 95652 - DNA, 645 bp, Zea mays
  Clone ID: MRT4577_1874C.1
accaaaggtaccttgcaatcacaacgaacagaagctctcgatctcaccgacaccgaggaagaagagatcaatggcgtccgagcagggagtcgtgatcgcgtgccacagcaaggctgagttcgacgcccacatgaccaaggcccaggaagccggcaagctggtggtcatcgacttcactgccgcctggtgcggtccatgccgcgccatcgccccgctgttcgtcgaacacgccaagaagttcactcaccgcggcctacgaggtcgaggcgatgccgaccttccacttcgtcaagaacggcaagacggtcgcgaccatcgtgggtgccaggaaggacgagctcctggcccagatcgagaagcatgccgcgcctgcgcctgcgtctgcgtctgcctaaaggagatcagtcgtcgccgtcaataagggccagcacgtatggctgtaaatgttgtcgttatcagttctggctttgtcgtttgtgggcgattgtgaactagtagtatgtttgtttctatccgagccggaggcgatacttaaccatggatacttgttgtgagttcgtttctgttcgcgtgtgactcttgaattgaatcaaccagctcaccactgcaccaggccgtggtgagtggtgacagtgatttcctgtt

SEQ ID NO: 95653 - DNA, 351 bp, Zea mays
  Clone ID: MRT4577_18750C.1
cccgaagcgaggcttgcctcattgcctgtctcgctctcgcgcgaccggagcagagcagcagtacagagtggagccaggtcgcctcgcctcctcaactccctctgccccagccctgtgcgccatcgcgcggcccacacgtgcggcttgccggattcgcgccgacgcggcagacccagacaggtcagcttcggatcgaggaagaggaggcggtggaggcgaggagtcaactaaacttgccagccatggacggatcggccgcggagctggaagcggcggaacgggtggtgatgcgatgggagtatgggactcgcccttggcgtgcagtggcgcggacgagccgatgctgtacga

SEQ ID NO: 95654 - DNA, 285 bp, Zea mays
  Clone ID: MRT4577_18751C.1
gggggggattttgccgggctggccttttttttgcttacaaaaattccaaatttgcaatacatgtttgggccccagcaaattccactcaaacttactggaaaggggggggaattttttttagttcaacctgaccccatttttacttggttttatccccaactcgaatgggaaaagtttgaagggtcaacccaacttttccctgttgctagctttggccccttgggaaataacagaaaactctttaaacgttttgttccaatgcaaacgggccattcaccgggtaaa

SEQ ID NO: 95655 - DNA, 788 bp, Zea mays
  unsure (1)..(788): unsure at all n locations
  Clone ID: MRT4577_18752C.1
ttctgggggacccccgggtctgccgggtcgctagtccttcaccgccttgcgcggtatatccaatcatttcaactcaaacgcacgagagggtctttatcctcagaaggtcctttatatggaaatccggagccagggggccagttcacttggctggtacttgatgagaagntatttctactacaccgagacacggaccaaaacgctgacggatcggactagtttcttgcgagtccaccggtacattatgggtccaatcggaacaatatgcaatgggcgcgcgagactcctagtatttatctaatagcaaaggaaggaacgaacgaggatcagagaacattgattggaactaggtatgtacaaccgagcaatatggcgtactattcttccatcattatacgacaggccttgctttattagtctattccactccattcagatctaagaaagaacccattacagctagagttccactagtgtacaactagaggaccagatactcacacatggcctctatccttgctatagaattgctgcttaagagaagagatatatcatatgtattcagctgacacatacagaatgtatgaagatgagagcattgacttgtttcttatatccagtatgtatcggactttggccctgngtgaggctctctctctgttaacacctgtctggaactntggatttaggaattgctggaataccaggcaatcgcgaactttcttgactgatattcaagagattaggattctagtaggattcatagaatacgagggactttttctctt

SEQ ID NO: 95656 - DNA, 190 bp, Zea mays
  Clone ID: MRT4577_18753C.1
aatcgtagagttttttttctgacagacactggccactgatctacgctgttgggggatccgcccccaggatgatgatgctgacgcactgatctaagtgccatcttccgctggatctgtcagacggtgatccatgtttccggtgcaggctttgtcggcatatcacgcacgtagacggcgccctctcatgtcg

SEQ ID NO: 95657 - DNA, 754 bp, Zea mays
  Clone ID: MRT4577_18754C.1
aggctcccaaccggccgccgtccaccccctcctagagcggaaccacattccacggctctaaggccatgtcgccggcgtccctcgccgctcggctcctacgccgcgccgcttccacttcttcctcggcgcccgttcccctcctccgccgtctccctgcggccacctcatcgacggcggggaccaccgcccgccgcttcctggcgtcgcagtccccggcgtcctcctccacgtcttcggcggacgataacctgaggcgcatcgtcgagtctgagatcgagtgcgttgtccagtcggaggagagcaacaccgacaagcacattgatctaccagacgacttcccttttgagatcatagacaatcctggtgatcagtcaataaccctccaaagggagattgcaggggagacaattaaagctgttatatacaccaactttgatacagatgaacatttggatgatgaggatgacaaaagtggcacagatgaggaatctttcaaaccagtacttcagatggttgtcactattaaaaaaccagaaggtccaatcctagaatttgactgcaactttaatgatgatgaactaacaattgaaaatatgagggtgctgaaccgtggtaaccccgatgctaagaatgtgtatgaggggccacaattttcggacctggataagagcttgcagaaggccttgcacaggtaccttgaggtcaggggggtcaaacattcactacatgatttggctgtacgagtacatgatga

SEQ ID NO: 95658 - DNA, 245 bp, Zea mays
  Clone ID: MRT4577_18755C.1
accttcaaatttttcgtcaccatcgtttttaacgtcaaaccaaacgatgttcagggcttcgagttttcatgggcaccaagtttactgggccgaataactaagttcaaattcccccttggtgggtcctaaccttaaattatttttgttaaaagcaagccctttgttggcaaatgccccaagaaactattccttaccacccgggggaaatgtggaaatgccgttggccaggaccagccttctttccc

SEQ ID NO: 95659 - DNA, 1160 bp, Zea mays
  Clone ID: MRT4577_18756C.1
cattgggttgctcgactcgggccgggcaggctaaaaaccggccgccgtccaccccctcctagagcggaaccacattccacggctctaaggccatgtcgccggcgcccctcgcagctcggctcctacgccgcgccgcttccacctcttcctctcctctctccgctcttgtccgccgcggcctctgttcctcggcgcccgttcccctcctccgccgtctccctgcggccacctcatcgacggcggggaccaccgcccgccgcttcctggcgtcgcagtccccggcgtcctcctccacgtcttcggcggacgataacctgaggcgcatcgtcgagtctgagatcgagtgcgttgtccagtcggaggagagcaacaccgacaagcacattgatctaccagaggacttcccttttgagatcatagacaatcctggtgatcagtcaataaccctccaaagggagattgcaggggagacaattaaagctgttatatacaccaactttgatacagatgaacatttggatgatgaggatgacaaaagtggcacagatgaggaatctttcaaaccactacttcagatggttgtcactattaaaaaaccagaagggacctggataagagcttgcagaaggccttgcacaggtaccttgaggtcagggggttcaaacattcactacatgattggctgtacgaatacatgatgagaaaggatgagaaggagtatgttgtttggctgaagagcatgaaggagttcatcggcggaaattgattgtttgcgctttaagttttatctgcattgtgagaacgagacctgtactcatcatgaaatactagcatcataattgcacgaagatacctggcatggctgtacatccaaaaaaaaaaaaagaaaaaaaacaaaaaaaaaacaaaataaaaaaaaaaaaaaaaaaaaaaaaaaaaaaaaaaaaaaaaaaaaaaaaaaaaaaaaaaaaaaaaaaaaaaaagggggggctcctctaaaagaaacaaaatttaaatacgcggacatgcaaataaaagccttttttatgggggcaccaaaaacaaatcaagggggcctgggataaaaacgtgggaaagggaaaaaccatggggtaaccaaaataaatggctgggaaaaaaatcccctttcacccagtggg

SEQ ID NO: 95660 - DNA, 1213 bp, Zea mays
  Clone ID: MRT4577_18757C.1
gggggggggcccccctggcccctcgaggcggcgggggactccatagggccattgggtacctcgaggccggccgggccgggacaaccggccgccgtccaccccctcctagagcggaaccacattccacggctctaaggccatgtcgccggcgtccctcgcagctcggctcctacgccgcgccgcttccacctcttcctctcctctctccgctcttgtccgccgcggtctctgttcctcggcgcccgttcccctcctccgccgtctccctgcggccacctcatcgacggcggggaccaccgcccgccgcttcctggcgtcgcagtccccggcgtcctcctccacgtcttcggcggacgataacctgaggcgcatcgtcgagtctgagatcgagtgcgttgtccagtcggaggagagcaacaccgacaagcacattgatctaccagaggacttcccttttgagatcatagacaatcctggtgatcagtcaataaccctccaaagggagattgcaggggagacaattaaagctgttatatacaccaactttgatacagatgaacatttggatgatgaggatgacaaaagtggcacagatgaggaatctttcaaaccactacttcagatggttgtcactattaaaaaaccagaaggtccaatcctagaatttgactgcaactttaatgatgatgaactaacaattgaaaatatgagggcgctgaaccgtgataaccccgatgctaagaatgtgtatgaggggccacaattttcggacctggataagagcttgcagaaggccttgcacaggtaccttgaggtcagggggttcaaacattcactacatgattggctgtacgaatacatgatgagaaaggatgagaaggagtatgttgtttggctgaagagcatgaaggagttcatcggcggaaattgattgtttgcgctttaagttttatctgcattgtgagaacgagacctgtactcatcatgaaatactagcatcataattgcgcgaagatacctggcatggctttacatcctgctggtgcaagagtttttgttgacctggtaaaaaaaaaaaaaaaaaacgcccctagggagcgatggactgtgttgtcatctttatcaacgctcctaacagcataggggattagcacataggggattagcactccagacaaccctattctctttataaatgggatccacaagtgag

SEQ ID NO: 95661 - DNA, 3383 bp, Zea mays
  unsure (1)..(3383): unsure at all n locations
  Clone ID: MRT4577_18758C.1
gctgcgaacgatgcatgccaacaaaatggctttgtgcctgatgctcatcttggtgcggaaatcgctcttgaagatcagagggatctcatcagggatcttaacgcttcagccagtgtgcctccgagtagatgtcaagcctttaaggatgggatgaaacaaggaattattaatccaagtgatattgatgttacctttgaggattttccttattatgtcagtgagaacacaaagaatgtgctcttgtcatgtgcattcatacacttggaaaagaaggagttcatcaagcagtttgctgagatttcatcaataaaccaacgaattttgttatccggtccagcaggttctgagatttatcaggaaacattggtaaaggcacttgcgaaaacattttggtgctagacttcttgtcgtggattcacttttgctacctggggcacctttgaaggatgcagagtcccagaaagatgttgggaagggtgataaatcaggggataagggaactgctgagaagtttgcaatatatcagaagcatcgttcttcgttggcagacactgttcagttcaggaggccagctgctccaacttccagtgtgaatgctgatattgtgggaacatccactctgcagtctgcatctctaccgaaacaagaatcctcaacagctacatccaagagctatactttcagagaaggtgatagggtgcgttacgttggtccagctcagctatcctcattgtcacaaaggggaccaagttatggttatcgaggcagagtgatgcttgcttttgaagataatggatcctcaaaaattggagtccgatttgacaagcagatccctgatggtaatgatcttggtggtttgtgcgaggaagatcatggcttcttctgctctgctgaatcacttcgcccagacttttctgctggtgaagaagttgagaggctagctatgaccgagttaatagaggtcatttcagaagagaacaaatctggacctctgattgtgttacttaaggatgtagagaaatcattcactggagttaccgagtcactttcatctttgcggagcaaatttgaatcgcttccatctggtgttcttattataggatcccacactcagatggacagccgcaaagaaaaggcgcatcctggaggttttcttttcacaaagtttgccagtagcagccagacactttttgaccttttcccggatagctttggtagcaggtggttgcatgaaagaagcaaagaaagtccaaaggcaatgaaacatctgaataagcttttcccaaacaaaattttgatccagcttccgcaggatgaagctctacttacagattggaagcagcagttggatcgtgatgttgaaacccttaaagccaaatcaaacattggtagcattcgcacgtttctgagtcgcaatggaattgaatgcaatgatattgaagaattattcatcaaagaccaatcactgagtaatgaaaatgtggacaagattgttggatacgcagtgagttatcaccttaagcacaataaaattgaaacctccaactcgaaggataataaacttgtactcacaagtgaaagccttaagcatgggctcaacatgctgcaaagcatgcaaagtgataacaagagctcgaaaaaatcactgaaggatgttgtcacagagaatgaatttgagaaaaggcttttggtggatgttataccacctaatgacattggagttacctttgatgatattggagccttggagaatgtaaaggacacattaaaggagctggtgatgctccctttacaaagacctgaattgttctgcaaagggcagctaacaaagccttgcaagggaatattgcttttcggacctcctggcactgggaaaactatgcttgccaaagcagtagcaactgaagcaggtgctaatttcatcaatatatcaatgtcgagcattacatcgaagtggtttggtgaaggggagaagtatgtaaaggctgttttctcactagcaagtaaaatagcccccagtgttatatttatcgatgaggtcgatagtatgctaggaaggagagaaaatccaggggagcatgaagcgatgcgcaagatgaagaatgaatttatggtaaattgggatggactgcgcactaaagataaggagcgtgtgcttgttcttggtgctacaaatagaccttttgacctggacgaggctgtgattaggaggttcccccgcaggttaatggtaaacttgcctgatgcatcaaatagagagaaaattctgaaagtaattttggcaaaagaagagctgggatcggatgttgatctcgactcacttgccaatatgactgatggttattcaggaagcgacctgaagaatctgtgtgtgaccgcagcgcattaccccattcgagaaatcctagagaaggaaaagaaggagaagagtttggctaaaacagaaggtaggccagagcccgcgttgtatggaagcgagcacatccgtcctcttagcatagacgacttcaaatccgcccatgagcaggtttgcgcgagtgtttcatccgactcggcaaacatgaacgagcttctccaatggaacgacctgtacggcgaaggtgggtcgaggaagaggaaagcgctgagctacttcatgtgacggcgagagacataaaaccagaaggatcacaaccgcgccataaagccagaaggtatcgcagttgcgccatattgtacagccgccatagtacttcccccctccctggccctaaatccagccagggttttcctcctccctcctgggtagccgtggccgcctgtagtccctccctcgtgtaattagaaccgtgtaccgagtcgagttcatttacccactgtttgaggttccagagagttgagatttaaattttaagtggcgccattgcccttcctttcttcctcccctcctaagttattaactttgttgcggccattgttgtcgtgactctggccatagatccttttatgtacatgcgaaatgtaaccaagggatatggaataagaacatgttcatcctgttgtagacagcatggtggtacaggaattctttttatttttcatagttgattggtgatgaactggatcggtgccagcataagaattatgataaggtaccttttctgccgctgaattttttggtgtatgtcgatttgtcgagtggatttagtattgagatgaatgatatgacatcacatggattttaaaaaaaaaaaaaaaaaaaaaaaaaaaaaaaaaaaaaaaaaaattataaaaaaattaaaaaaaatttaataaaaaccctcttaaaaaaaaaaaaaaatttttttaatttaattatatttttaatttttaaatatattattttatttnggggggggcccttt

SEQ ID NO: 95662 - DNA, 236 bp, Zea mays
  Clone ID: MRT4577_18759C.1
cacatgtgagaaagaatagaacggctggagagggggcactacagggggcacaagccaagaaacctgggcattcccccgaccagtatggggtgttaaactggaccaacacacttgttaaagtgggatccagcgtacagtcctaggaccaggtgaaaaagaagaatggcttgatccatacaactggtagtagacaagacggctcctggcccgggaacgtgcaaaatgaatccgcaacc

SEQ ID NO: 95663 - DNA, 795 bp, Zea mays
  Clone ID: MRT4577_1875C.1
gccggccgggttcgggcaccaaaggtatcttgcaatcacaacgaacaaaagctctcgatctcaccgacaccgaggaagaagagatcaatggcgtccgagcagggagtcgtgatcgcgtgccacagcaaggctgagttcgacgcccacatgaccaaggcccaggaagccggcaagctggtggtcatcgacttcactgccgcctggtgcggtccatgccgcgccatcgccccactgttcgtcgaacacgccaagaagttcactcaggtcgtcttcctgaaggtggacgtggacgaagtgaaggaagtcaccgcggcctacgaggtcgaggcgatgccgaccttccacttcgtcaagaacggcaagacggtcgcgaccatcgtgggtgccaagaaggacgagctcctggccctgatcgagaagcatgccgcgcctgcgcctgcgtctgcgtctgcctaaaggagatcagatcagtcgtcgccgtcaataagggccagcacgtatggctgtagatgttgtcgttatcagttctggctttgtcgtttgtgggcgattgtgaactagtagtatgtttgtttctatccgattcggaggcgatacttaaccatggatacttgttgtgcgttcgtttctgttcgcgtgtgactcttgcattgaatcaaccagctcaccactgcaccaggccgtggtgagtggtgacagtgatttcctgttattatggatggatatagaataatagataaatcacgttgcgctgcaaaaaaaaaaaaaaaaaactcgagaaggggcgccggtacc

SEQ ID NO: 95664 - DNA, 359 bp, Zea mays
  Clone ID: MRT4577_18760C.1
gtttcctagaaagacaaaggtcaagtaaataatgttcgacactcgttccctcctccttactctggccaccctccagggtgcccaagcctggggtattctcggccacgccactgtcgcttacatcgcccaaaactacctaaacgacgataccgcaacctgggcccagggcgtattgggagatacctcaaactcttacctggccaacatcgcctcgtgggctgatgactatcggtatacctccgctggcaaatggtctgctcctttgcactttatcgatgcccaggacagccctcccaccaattgcaacttcaactattagcgagactgcggttacacgggctgctccgactacgctattg

SEQ ID NO: 95665 - DNA, 344 bp, Zea mays
  Clone ID: MRT4577_18761C.1
tttatattttttgccttgcaaacccagaggatgggtaccttaaaaactacggtttttgagtctctacatatataataatatgaggaaataaaagatgcaaaacaacgactcaagtttttttaccagagcagacgacaattctacccgaaagaaacaaactgagcagcaatcaccaaaacaaccgggaatcgctaagcacgagactaggctcgcttagctatgctataacaaaatggcctccgcaacacttcgagctattgcgtggtagaactcttgagcctacgagaatatcctgtgggccaacatcttatcctatctggaacacttggtcagctagctgtaaa

SEQ ID NO: 95666 - DNA, 268 bp, Zea mays
  Clone ID: MRT4577_18762C.1
aaaaaaaaatggattgttggggaccgtcaaaagtgtaacagttttacacaaaaatccgcacgaaccttggatcgcatttttcgtttgtttttttgaaagcgattgttaaaccgaccaactgaaccgtatatgaatttccctatcaaaaggtttggggggcaaaaaggaactagcctacttgtgggcagcaccatttgttagctttggaatcgaatcggcttggccatgggaaacaccaatgcctattttcgaaaaccaaatcaagggt

SEQ ID NO: 95667 - DNA, 184 bp, Zea mays
  unsure (1)..(184): unsure at all n locations
  Clone ID: MRT4577_18763C.1
agaatgctggcgtcgaggtaacgcgattgagctagaaggggcaatgcttgaacggactggtgcgtcggtggtacgatccatngtgttgtctgcacgatcgtatagctggctcgatcaatgttgagggcgagagcgcctcgaggaaatttttctcagtagcttgcataggaagaagctactgctg

SEQ ID NO: 95668 - DNA, 421 bp, Zea mays
  unsure (1)..(421): unsure at all n locations
  Clone ID: MRT4577_18764C.1
caaaggattcagcacgtcttcctttgtgaaggtagcttcgaggcagccctacccttcncctgtgggccgaccatctgatccaagggaacaaacccttgcagcgctaacgccctaacgtccgacgaagaagtcggtgtgcagatgctccagttgctagcttgaattctcacttagacgcgttcagccataattcaaaacacggcagctctcgcaccactgtatttacaactcacccctataactaattgtctgaactaactatttctctggcactaggtttaatctctatcgcaacgcggtcatgaacaacgtaaaaataacctttatcacgaccgactaaatctatctcacgttcactattagtaggtgaacaatctaatacttcgtgaattctttttcacaatgataggaatagccaaca

SEQ ID NO: 95669 - DNA, 265 bp, Zea mays
  Clone ID: MRT4577_18765C.1
cgtcgccaccacctctgactttacctcttctgactatcattccctagcgatgcatatactataaatctgctatgcaccccaggtatctgtgtatatacatcccatgcacccttcacataatgtcaacttagaaaccctgccctcggactctatttgtgctgtcttaatacatacggtatctttcagaactgccaaaaccagagcagccttgtgatgtctagaggagctctccgctcagtgacggcacatgagtgtgcactataga

SEQ ID NO: 95670 - DNA, 484 bp, Zea mays
  unsure (1)..(484): unsure at all n locations
  Clone ID: MRT4577_18766C.1
ggggactaataaatatgcccgatctattcctcaagccaactagcaaaaacaacaattacagtttaccaggaccaattagattaaaatccccgaaaagcggccacgctctatgggttggaacaggccataaaacaccacacagctgccgttttcttccttaacgacgccacggaataacacaggcaggaacaaagaatttgaaaaaattaccgggggcactacaaccaaaattgactcgacattcgctcaaacggcaaggactcttggctcaaggaagtctaccgaacacgcagggagcattggattgggcttgggttcctttttcaccaaactcctttcttccccaactcttgacgcaacaagggcgaacatggttgagggcgactggaaaaggagctccggcagggaaagagtcaaggggaggacgaggagttaggacgggcaatcccgtngggcacgccactgtagtttgcacgcgtttaaa

SEQ ID NO: 95671 - DNA, 761 bp, Zea mays
  Clone ID: MRT4577_18767C.1
tcgcctcgagccgggccgggagagattcagagctgatgaactgcttctggtgtcctgtacatctcaagatgaaaaaaagcaccaccgtcctcgccatctccatcttggtcctctcccttgcctcccagttctcatggtgtgcagaagcagctgagggaagcgccggaatttccacagagcctgatctccaggtgcaagaacaagtgcacggcgatatgaaaaaccgcctggaaatgcagggtcgcaaccggaagcttggccatgaggtgaccacagtggagttgaagcatcacaggaggattaccagtgggcacaagggtggcagcgcgggtggaggcgccggcgccggtgccgcgggcgcaggcacgggtgggcataacgtgggcggcgggggcgccgtgacgaggccgcacagctccaagaacggcgcggcggcgctcccagtgccggtgtcgtccgtcctgacgctggccttggcctgcggagttgttctgtcagtcatgagctactgatgagatgaaactctcgtcttcccggagccgatcggtatctccgagccgattttacgggtattggtgcgatagtttctcgatttgttcgttgtaacttgtatatcatatcatcatgcagtggtgaaaaccggacggatgctgacggatgtagctgtcattatatatctatcgtaatgtatttctcgcgaatacagaatcaatacagttatttaaaattggagcaaaaaaaaaaaaaaaaaagcggccctc

SEQ ID NO: 95672 - DNA, 398 bp, Zea mays
  Clone ID: MRT4577_18768C.1
attctacatgataccgaatcatggatgggggaggggaacaaccaagaaagccaacgcaacaccagaaccgagccggactgaaaacgggaagagaacaacagcaaagaagagcatgggaaaaggcaagccaaacaaaaggaaaaaacgacaaaaaccaaaaacaaaagaaagagaaacggaaagaaaagaaaaaacaggagactaggaagaaaaaaccgggaacgctaagagggaaaaagaaaccaggataaaaaaacacaaacacagccaaacgaaaaaggatcaactggtgaacaaaaacggatccaaacggaacaacaagcctgacgcggggggcgaccccggaaggcccgaccgaaaccggcaggcgggccaaacctaacaagggaggggaagga

SEQ ID NO: 95673 - DNA, 603 bp, Zea mays
  unsure (1)..(603): unsure at all n locations
  Clone ID: MRT4577_18769C.1
tttggncgcgtgggcggccgcgtgggctgatgaactgcttctggtgtcctgtacatctcaagagaaaaaaataccaccgtcctcgccatttccatcttggtcctctcccttgcctcccagttctcatggtgtgcagaagcagctgagggaagcgccggaatttccacagagcctgatgggggggggcaagaacaagtgcacggtcagttttgctgtctttttttctctcttcattggtgcctgaatcgttgccatgcatgattgggcaaattattctccggactttacagaataacatgactttgattaagaaactggttggtttgttcatgaactgaaggcgatatgaaaaaccgcctggaaatgcagggtcgcaaccggaagcttggccatgaggtgaccacagtggagttgaagcatcacaggaggattaccagtgggcacaagggtggcagcgcgggtggaggcgccggcgccggtgccgcgggcgcaggcacgggtgggcataacgtgggcggcgggggcgccgtgacgaggccgcacagctccaagaacggcgcggcggcgctcccagtgccggtgtcgtccgtcctgacgctggcc

SEQ ID NO: 95674 - DNA, 521 bp, Zea mays
  unsure (1)..(521): unsure at all n locations
  Clone ID: MRT4577_1876C.1
cgttgctgtcggtaattgagctggcagttgttctatttggagatctgtatttccactaaatatacgaagtagtagatgcatagataaacttaagctgtcatagaaagtcatttaaaacatgggaagagtttgccgtttagacctctgttaagtgctcatgatgtcatattgaaatttggtacactctaaggggagtaatttggaattggggaagaattcaacagctgcagttgagatttgatcggaagtcaagttgaaattgggaaggattcaagggctacagaccacctccgtagaccgtagcttctcctgtgtacttttctcctgtgtactgtagagtaactgattttaggtctttttgtttgagagactaatctctagttgtcgtttagagctagctttggaattttatttttccaaaagatttctattttcttaaaagaaaatgaactaattttctttggaaaatgaaaaccctttgaaaaaaataggntcccaatttaacctttagtttttttttg

SEQ ID NO: 95675 - DNA, 456 bp, Zea mays
  Clone ID: MRT4577_18770C.1
ccaccggacccaggggggaccaacagctgggccgcccagtcccattactaaaccaggatgcggggcaggcctggttccccccgcgtgaccaaaaggccgggtcccatgaaaaactgctcgcacgggggaagccacccttgctggggggcggccccttgaaataataaaaaccgggagccggcaaccggttgaccccacaacctttcttcggtgggggaccccgaagtcaaggacgggtatggcccccctgagggaaaaaccacaaaaaccgatggggggattttgccccgggaggaggccttgcaatgggggggttggaaaccttggccaaaagggggttttttaacccttctcctgagccaacaggcttggaaaacggaaaacccccggtccaaaaactgcatgtcccaggcttgcaaaaccaggaaccccaccctttgatcccaaaaagggcct

SEQ ID NO: 95676 - DNA, 340 bp, Zea mays
  Clone ID: MRT4577_18771C.1
gttagcggaaaaaatttcaaggtttcttgaaagggcttatataccgctaaatgcttggtttcaatgggtcaacagtacacaatcaggtgagtatgaaagcaccctctattggcattggagagacaacattacgaccaaagggttggacccaaagactttgacatttggattggatgactattcttgggcattttattctaatgattaaaaaccccattgtgaccttcggtggtggatgcttctaacttccaaatgattttgttcattggaaaagttcttaaaaaggattgggcttttgagaaaggatactattaaatggtaaattaaactttccaatttt

SEQ ID NO: 95677 - DNA, 384 bp, Zea mays
  Clone ID: MRT4577_18772C.1
gtaagctcggaattcggctcgaggtggtatataaccgcccttttttttacggccatctagcgtcaacaccaaaggggcctttgaaagctgaacgagtgatcactatcacggcatccaacaattgactcagctcacatgctaaaagattattgatgatttcacatggtgagctaccatgcagcagcgcggcagcatgtgcctgaggggggacatggactcacactaaatgctgccacctgggacataccctggagccttttgacactcctcatgaaccgtacatgtgatgcactacctgtctcttaaccacgaagaactgttctggcctagaagtctcaccagctgaaagggccagtcgcttacaaaagcctccaggatagaagg

SEQ ID NO: 95678 - DNA, 200 bp, Zea mays
  Clone ID: MRT4577_18773C.1
agtgcacaaggcggcaggatctaagctcggctagaggcactagcaactacgaggcctcgatctctctctctcaagcaatccccgtagcgagagggagggcggaagaggatgagcgcgtccaggttcataaagtgcgtcacggtcggggaaggagccgtctgcaataccagaatgctcatcactacacctaaaacaccttc

SEQ ID NO: 95679 - DNA, 422 bp, Zea mays
  Clone ID: MRT4577_18774C.1
cttagtgcctagagtcaaagaagttaaatctgctcaggaaactcctgaaagctctctggctggaagtcctgatactgaatctccagtgttagtgaatgactatgaagcagaatctggtaatataagtcaaaagtctgatgaagaagattttgtaaaagttgaagatttaccactgaaactgacaatatattcagaggcagatctaagaaagaaaatggtagaagaagaacagaaaaaccatttatctggtgaaatatgtgaaatgcagaccgaagaattagctggaaattctgagacactaaaagaacctgaaacggtgggagcccagagtatatgagatgtcttcagaggctcatctaactctgtccttacatactcaatgcatatatgaaaacaatactaaataaacatctgatctgtat

SEQ ID NO: 95680 - DNA, 832 bp, Zea mays
  Clone ID: MRT4577_18775C.1
gccggccgggtccggacctccctccatagttctcgtcttgttctttgctacgtacggctctgtgcctagctagcaatagcaatgagggcgcttggaacggttgcttgggcatggctgctgctcctgcagcaactcgccggggcctctcatgtcgtctacgagaaccttgaggtggaggcggcgacagcagccgccgtgcggccctccattgtcgaccccctgctgaggaccgggtaccatttccagcctcgcaagaactggatcaatgatcccaacgctccactgtactacaaggggtggtaccatctcttctaccaatacaacccgaagggcgcggtgtggggcaacatcgtgtggggccactcggtgtcgcgagacctgatcaactgggtggccctgcaaccggcgatcgagccgagcatcccgtccgacaggtacgggtgctggtctgggtcggcgacgacgctggccgacggcacgccggcgatcatgtacacgggcgtgaaccggccggacgtgaactaccaggtgcagaacgtggcgtacccgcggaacaggtcggacccgctgctgcgggagtgggtgaagccgtcgcacaaccccatcatcgtgcccgggggcggcatcaacgcgacgcagttccgggacccgaccacggcctggcgcggcgcgggagacggccgctggcgcctgctcatcggcagcgtcaccgaggcgcgccacggcgtggcgtacgtgtaccggagccgcgacttcaggcgctggacgcgggcgcggcggccgctccactcggcggccacggggatgtgggagtgccccgacttctacccgg

SEQ ID NO: 95681 - DNA, 337 bp, Zea mays
  Clone ID: MRT4577_18776C.1
gtaaatctgaaagaaaatcccagttcttctgcccaaaaaaaaaaaaaaaaaaaaaaaaaaaaaaaaaaaaaaaaaaaaaaaaaaaaaaaaaaaaaaaaaaaaaaaaaaaaaaaaaaaaaaaaaaaaaaaaaaatgaaaagattaaaaaaaaaaaaggacatgccactggcgcgtggtctttagaaatggctatgctgaattcactatgtttgcttatgagttgttctacttttaccttacaaacaaggaaaacaagctggttttctccagtaaaaaattcgatacagcactcgatttcactctatgaaatgtcagtattcgtaagcgggctcttaac

SEQ ID NO: 95682 - DNA, 298 bp, Zea mays
  Clone ID: MRT4577_18777C.1
acccgcctcctcccacgcatattggcaccttacggaagggcttggcggccaacgacattgatactgagggcatggggatggaggccagggacgatgaagacgtgaccttcttctgcgcgccaatggacgacgagaaacactgcttctgattgcctgcatgagacgaagatgaacacttggatgcactgcatgcttggatcgagatttgtgacctgcatgctcgttaattgctgatatagatctgtgactgttggtatgcttcaatgcttttatttatcaataaatataggatcgcagc

SEQ ID NO: 95683 - DNA, 116 bp, Zea mays
  unsure (1)..(116): unsure at all n locations
  Clone ID: MRT4577_18778C.1
atcgtagagagngctggccagattgaactcttcacacatgttctagttctgcggaactatgtgcgatttctgagacgatattatttcaacgatgcgctgtttaccttcttgattca

SEQ ID NO: 95684 - DNA, 285 bp, Zea mays
  Clone ID: MRT4577_18779C.1
ggaaggtaaatacaagcaagctttactacagtataagaagatcgtgtcttggctggaatatgagtctagtttttccaatgaggaagcacagaaagcacaggcccttcgactggcctctcacctcaacctggccatgtgtcatctgaaactacaggccttctctctgccattgaaagctgtaacaaggccctagaactggacagcaacaacgagaagggcctcttccgccggggagaggcccacctggccgtgaatgactttgaactggcacgggctgatttccag

SEQ ID NO: 95685 - DNA, 805 bp, Zea mays
  Clone ID: MRT4577_1877C.1
aaaaaatacaaaaaaaaaaaaaaccaaaggtatcttgcaatcacaacgaacacaagctctcgatctcaccgacaccgaggaagaagagatcaatggcgtccgagcagggagtcgtgatcgcgtgccacagcaaggctgagtttgacgcccacatgaccaaggcccaggaagccggcaagctggtggtcatcgacttcactgccgcctggtgcggtccatgccgcgccatcgccccactgttcgtcgaacacgccaagaagttcactcaggtcgtcttcctgaaggtggacgtggacgaagtgaaggaagtcaccgcggcctacgaggtcgaggcgatgccgaccttccacttcgtcaagaacggcaagacggtcgcgaccatcgtgggtgccaagaaggacgagctcctggccctgatcgagaagcatgccgcgcctgcgcctgcgtctgcgtctgcctaaaggagatcagatcagtcgtcgccgtcaataagggccagcacgtatggctgtaaatgttgtcgttatcagttctggctttgtcgtttgtgggcgattgtgaactagtagtatgtttgtttctatccgagccggaggcgatacttaaccatggatacttgttgtgagttcgtttctgttcgcgtgcgactcttgaattgaatcaaccagctcaccactgcaccaggccgtggtgagtggtgacagtgatttcctgttatcatgaatgatcctatggatggatattatagaatataggataatcacgttgcgctgcaaaaaaaaaaaaaaaaaacggccctcgagct

SEQ ID NO: 95686 - DNA, 322 bp, Zea mays
  Clone ID: MRT4577_18780C.1
gccggccgggccgggatctgctaccaatggcgcgacttgcagaatgcttccctggtagggaacggctgggctgtcaattcgcctggaagtggggaagctttatgctactgtgtgtgaaggtggtagtgcatgcgcgcccagtctcctagatgtagcgagccaaatatgtgctgaactgtagtcaatggatgtaaagggtccggctcttctgatacagccaaccccaaccaaacacggctccccgccctgacgagcagtttggctcaaaaaattagaaacggcgagaagcattgtgtaaaaaaaaaaaaaaaaaaggccccta

SEQ ID NO: 95687 - DNA, 188 bp, Zea mays
  Clone ID: MRT4577_18781C.1
cacacctcccgttgcaaacggagcttgaggcggccagccactgctcgtcatgcctggcggactgacccaatggcacggtcccttggggcgcgaacgccctaccgtaggcaggggcaggcgtcgagcagaggcgccggctggtagctcggattcccaattaaaggctttagtaataattctgctcaggg

SEQ ID NO: 95688 - DNA, 507 bp, Zea mays
  unsure (1)..(507): unsure at all n locations
  Clone ID: MRT4577_18782C.1
cccggggncnaaccacccggcacggagacccaaaaaaacaanacccgggcgcgagacgggacacccaacagaggagaggacaggctaacacggggaacgagggaacgacgcgagggcaagagnggngccggcagccgaggcaagnccagcgaggaacgcggacaccnaagcgggggcagncaaaaagcacgaagnaggacccggggccgggccggccgggccgccgcacggcgagaaccgaccggcgcaacccgacggccggagacgcgcgccaggccngaaccggccggggcgagccgacagcgccgncccggggacgaaancagacggcncaaagcaagccaacgcgcngggaacaagcgcaggggataacagcaaaggacggcggacccagcgcggaggccgccgggagcggagccacgacgaacagggacagccgggggcatgcngannncacagccagaggcgaaacccaaggagcgacgaaagaccaacaacggcgaaagc

SEQ ID NO: 95689 - DNA, 573 bp, Zea mays
  unsure (1)..(573): unsure at all n locations
  Clone ID: MRT4577_18783C.1
gggcctgcaanactgacgggcggccgcgcgggaggttgagaagccacggtgagaccaactgccgttaataccgancttctcgcgccgttacccgctggtcctaaaaccctagcgaaggcgagccttccacttccctcagcctgccgccgccaccgccgccgccgccgccatgtgcccagcagcggcgaccacgagctccgccaagccgtcgaagaagcggaaacagcccgtcatagcgccgccggagtcggactctgaggaggaatctgtctacgacactgcctccgacgatgacgaggaggaagaggagacgcaggagttagagagtgatgatgtagacgaggaggtggaggaggggagcgaggacggcgaggaaaatgaaattggtgacgatagcgaggtggaagaagaggaggtgaaggagaaaaaagaaaaggaggagacggtgaaggagaaaaaggaaaagaaggacatgaagcatgaggggaagaaggccgaaaagcatgaggaaaagaaggcgaagaatgacaagaaggaagaggaaaaaaagggaaggagggacagaaagaagag

SEQ ID NO: 95690 - DNA, 231 bp, Zea mays
  Clone ID: MRT4577_18784C.1
accggacccccagttcctgccacacccactcgttttcccaccccaccacccacaccggggggaggtttaaacaaaagcagggggcggacccaaacaataccgagaacatggaacaccacccccccgagtgcaaccaaaactagaggattccgaagcacccaatgctaggcctaaattcgccaaccaaaccaaccctaccatacccaacatcccgtccacatggtgaacaag

SEQ ID NO: 95691 - DNA, 593 bp, Zea mays
  Clone ID: MRT4577_18785C.1
agacaaaacactcccactgtcccacaccctcagtccacagactcgcactgcactcgtccaatccagggaggctgggaaggatcagggatccatccaccgttctgtcttctcaggtcgacaggaggccagaccaggtgcgcgcgtccgtgtcggcgatgagcgcgggcgggagccgggcgcggcagaacgcgatgcgctcaggggtggtggtgctgggcgccgtggccttcggctacctctccttccgcgtcggcttcaagccctacctcgaccaggctcaggaggccatcgactccgcccgcgaccccgaccctgaccccgccaccaccgccgcgagggacgcgtccgacgatcccggcgccggtcgcccagggggagacctcgggccgtccaaggacccggccgtcgtactgcgcgactgaggcccggtgcgggcgtttggttgcgccattttggcaaacaccttgtacgcgggcccttgcttcgactgttttggtagtatgggccaccctgtgtgagatcttcttccctgctgctttgaagtttgaactggtttctgtgtgatgcccacataaagcttcctgttcgatcaa

SEQ ID NO: 95692 - DNA, 524 bp, Zea mays
  Clone ID: MRT4577_18786C.1
ttttttttttttttttttttttttttttttttttttttttttttttttttttttttttttttttttttttttttttttttttttttttttttttttttgggggacaaaattttggaacttatttttaatttccattacaacttaaaggggggggggggcatacatacagggggtttactttaggaggggggacattccacccgacaccaatttaaaaggactttttactcaagaaaacttttgtttattcttaaccaaaaaggaaaagctttttaagcttttgcccagcccagttggggggccattttatgcaaaatggttttgaaatctggccccggcttaatgttgggggggctgaacaggggcccaaatttaaaagccccccacattacaatgggcccgtgagctggctttacatgcataaaaggggccaaacatgaaaggggatattaaaacccgacctttggagaaaccttgccgccggttgaaaacccggaattacaaaatggggcatcaccccctgg

SEQ ID NO: 95693 - DNA, 372 bp, Zea mays
  Clone ID: MRT4577_18787C.1
agtgtattggagtggagatcccggcggaagcggaggctttaaccgtccttggtggttactattctgctgtgctgtcatcagtgaaagatgaagaggatcatgcttgcctgtttgcttgttatctttgtgcaagtgcaatgggcgtcccttggaacgcatgatgtgtacatcgtgaccatggaaagggatccagtcgttagctacagatgcgatgtccaatgattcccagcaaccgctttggattctgacgaggaaattgatctaaccagcgatgctgtcaaatcgtatgccctccaccttcgaagacaccattacaagcttctagactcgcttttattagaaggaacttactagaatctttatagctaccat

SEQ ID NO: 95694 - DNA, 598 bp, Zea mays
  Clone ID: MRT4577_18788C.1
ccctaagggggacataaccccagcatttttttttattagtcaacgagtttgggcccaaccaaccttttttcaccccttgatttttgttggggggtaaaaaacggggttggggaaaaaccattcctttttgtcccactcaaaaagatttccccggggtaaaaaaaattcttcccaaacccccctacttggttagatctacaaattttccgacgacgggggggtttccatgggcctcaacccaaaggcataaaaacctttgttttggttgttgtcccagctggactggttgaaatccgccggaaaattttggttgccaaaccccttccgttgaaacagcctgatctcggccgggctcgcaacgttaaacatttcgtttttgcctggctgccccccgttagttaaatcgacttcagggagactgtggagcccccgcacaacctggttaatcctgggtctcctggatgctgaatgccaaatgcaacctgcaacattttcaatcatacggaacatttcgacttcgttgaagtttttgttaagccgggcgtccaccagttccccggggttgccggtctaaaccccctgcgtgagcatgggccta

SEQ ID NO: 95695 - DNA, 445 bp, Zea mays
  Clone ID: MRT4577_18789C.1
atgccgcgtagcgtaagctcggaattcggctcgagaccaaggacgcgcctttctctcaactctactgccccatacccctgtgatgcgtctgttacctgccgcgaggtacaccctcacgatccgcacttcctgcctctcctagaggccactggctggtgtctcttcggatcacccctgcatggacctgactgatggccaactatgcgcatcaagccgcgaatgcagaggaaaccacgatggacggtcgaagcaagactgacgggctgatcgatagggtcactggggcttcagggcaaacgtctaacacaaccatgtagcttctgggcccctacagggttacattcaccatgcctgacgcctacactagatttatcagcgagcgaccttgaactcatgcatttgaggcgcaatgacttggacactatttttaccttgacctaggtga

SEQ ID NO: 95696 - DNA, 709 bp, Zea mays
  Clone ID: MRT4577_1878C.1
gccggccgtttccagatagcggtcaatcattccatcttctgctcgctattgcctagaagtatacaacagatagcttgctgtcctagtcctacctactgactagctctccaggtcctccctctcctctgtggccgctaccgacccttcattcaccacaccagcgaacagcacgaaccgtggtcagaagaaagtccttcaccgtgcgcactatctctccgcaaggccaccggtaccgccgccgtggcgatgactgccagcgccctgattgccggcggggccatgacccaggaggtgctgctgggcgcaagtgacggcgggctcgtcttcaacgccagccatatgaccgttgacggcgctgatccatcacattcaagaacaacgacgccttcccgcacaacgacgccttcgacgaacacaatgagaccagcgcagacaacgacatccagatatcgcaggacgagtacctctatgctacataagagacctactccacctccctcaccgtgccggatacctacctattctactgatagtatacatcaaggagccgaaatgctcggtaagatcaccgtcaactaatgaacctatatatcgatcgatatccattcatgtattagctgttgcttcctgatttgctactccgccgatctggccatatatacatggtatccccctcacaccagaaattacaatataaaggttcctaaga

SEQ ID NO: 95697 - DNA, 3653 bp, Zea mays
  unsure (1)..(3653): unsure at all n locations
  Clone ID: MRT4577_18790C.1
gccggccgagatggtcccagcgcaaaggcctcgtccgtctccgtttccgtctccctccccgcgccacctcactcgttcgccgcctccgccggcgcccgtgcgccatctccactccagcgcgctctacgccgatcgagctgccaggaggttgtggatttcatgtccgtgatctaggcgccttacttggactcaggtatgggttctgctgctactgagggcaatgacaccttgctgggcaatggagttgttgggattcttgctgagacttgtaatatgtgggaaagaagggcgccgttaactccttcccattgtgcccgccttctgctaggaggaggcaagaacggacctcgagtaaaccggattattgtgcagccaagcacaaggaggatccatcatgacgctcagtatgaggatgcaggatgcgagatttcagaagacctgtcagaatgcggccttatcataggcatcaaacaacccaagctgcagatgattctttcagatagagcgtacgctttcttttcacacacacacaaagcccaaaaagagaatatgccactgttagacaagatccttgaagaaagggtgtccttgtttgattatgagctaattgttggagatgatgggaaaagatcactagcatttgggaaatttgctggtagagctggactgatagatttcttacatggtctcggacagcgatatttgagccttggatactcgactccatttctctctctgggacaatctcatatgtatccttcgctcgctgcagccaaggctgcagtcattgtcgttgcagaagagatagcaacatttggacttccatccggaatttgtccgatagtgtttgtgttcactggagttggaaacgtctctcagggtgcgcaggagatattcaagttattgccccatacctttgttgatgctgagaagcttcccgaaatttttcaggccaggaatctgtctaagcaatctcagtcgaccaagagagtatttcaactttatggttgtgttgtgacctctagagacatggtttctcacaaggatcccaccagacaatttgacaaaggtgactattatgctcatccagaacactacacccctgtttttcatgaaagaattgctccatatgcatctgtcatcgtaaactgtatgtattgggagaagaggtttccaccattactaaatatggatcagttacagcaattgatggagactggttgtcctttagtcggcgtttgtgacataacttgtgatattggaggttccattgaatttatcaacaagagtacatcaatagagaggcctttctttcggtatgatccttctaagaattcataccatgatgatatggaaggtgccggagtggtctgcttggctgttgacattctccctacagaattctctaaagaggcctcccaacattttggaaacatactatctagacttgttgctagtttggcctcagtgaagcaaccggcagaacttccttcctacttgagaagagcttgcattgcacatgctggcagattaactcctttgtatgaatatatccctaggatgagaaatactatgatagatttggcacccgcaaaaacaaatccattgcctgacaagaagtatagcaccctggtatctctcagtgggcacctatttgataagttccttataaatgaagctttggacatcattgagacagctggaggttcatttcacttggttagatgtgaagttggacaaagcacggatgatatgtcatactcagagcttgaagtaggagcagatgatactgccacattggataaaattattgattccttgacttctttagctaatgaacatggtggagatcacgatgccgggcaagaaattgaattagctctgaagataggaaaagtcaatgagtatgaaactgacgtcacaattgataaaggagggccaaagattttaattcttggagctggaagagtctgtcggccagctgctgagtttctggcatcttacccagacatatgtacctatggtgttgatgaccatgatgcagatcaaattcatgttatcgtggcatctttgtatcaaaaagatgcagaagagacagttgatggtattgaaaatacaactgctacccagcttgatgttgctgatattggaagcctttcagatcttgtttctcaggttgaggttgtaattagcttgctgcctgctagttttcatgctgccattgcaggagtatgcatagagttgaagaagcacatggtaacggcaagctatgttgatgaatccatgtcaaacttgagccaagctgccaaagatgcaggtgtaactatactttgtgaaatgggcctagatcctggcatagatcacttgatgtcaatgaagatgattgatgaagctcatgcacgaaagggaaaaataaaggcatttacatcttactgtggtggattgccatctccagctgcagcaaacaatccgcttgcctataaattcagttggaacccagctggtgcactccggtcagggaaaaatcctgcagtctacaaatttcttggtgagacgatccatgtagatggtcataacttgtatgaatcagcaaagaggctcagactacgagagcttccagcttttgctctggaacacttgccaaatcggaattccttgatatatggtgacctttatggtatctccaaagaagcatccaccatatatagggctactcttcgttacgaaggttttagtgagattatggtaaccctttccaaaactgggttctttgatgctgcaaatcatccactgctgcaagatactagtcgtccaacatataagggtttccttgatgaactactgaataatatctccacaattaacacggacttagatattgaagcctctggtggatacgatgatgacctgattgccagactgttgaagctcgggtgttgcaaaaataaggaaatagctgttaagacagtcaaaaccatcaagttcttgggactacatgaagagactcaaatacctaagggttgttcgagcccatttgatgtgatttgccagcgaatggaacagaggatggcctatggccacaatgagcaagacatggtactgctccaccacgaagtcgaggtggaatacccggacgggcaacccgccgaaaagcaccaagcgacgctactggagttcgggaaggttgaaaatggcaggtccaccactgccatggcgctgaccgtcggcattccagcagcaataggggccctgctattgctaaagaataaggtccagacgaaaggagtgatcaggcctctgcaaccggaaatctacgttccagcattggagatcttggagtcgtcgggcatcaagctggttgagaaagtggagacttgaaagttccctgatacacagataaagatagtatgatatagcagggcacatgtatcttttgtattaactccgttctggaatatatatttgtgaactaaaatgtgacaaataaaaagaacgggtggagtatattgtaagagacggcaaagaaacctctgtatatatgacctgtcgatatcaaataatgccgatcagttagttggcttggctcttttgagggtttagaaaaaaaaaaaaaaaannnnnnnnnnnnnnnnnnnnnnnnnnnnnnnnnnnnn

SEQ ID NO: 95698 - DNA, 375 bp, Zea mays
  Clone ID: MRT4577_18791C.1
gccgcctcacgctctcatccactctgagaccgcagatccgctgtccgagtgagggaacagcgcaccaacccatggactccggagagcttgcctgcacctacgccgctctcatcctcagcgcacgaggggaggggcatcaccgccgagaagatcgccacgatctggaaagcagcacaacatcaaggaacgagcgaactcgagcgacagcagcccacaaggcgctagcccaagagctgggaccgagaccagtaaatctgtagccatgcacgtcggataccggctgcaagctaccaccacgaacatccccacaggacgagaatttttttttaccacccccccccccggggggggtgtggcaggagaggacacaaggac

SEQ ID NO: 95699 - DNA, 1645 bp, Zea mays
  Clone ID: MRT4577_18792C.1
gatttgttgattacagtactaactagtcagaagattaatgatgcgagctcctcttgcaggttgaggttgtaattagcttgctgcctgctagttttcatgctgccattgcaggagtatgcatagagttgaagaagcacatggtaacggcaagctatgttgatgaatccatgtcaaacttgagccaagctgccaaagatgcaggtgtaactatactttgtgaaatgggcctagatcctggcatagatcacttgatgtcaatgaagatgattgatgaagctcatgcacgaaagggaaaaataaaggcatttacatcttactgtggtggattgccatctccagctgcagcaaacaatccgcttgcctataaattcagttggaacccagctggtgcactccggtcagggaaaaatcctgcagtctacaaatttcttggtgagacgatccatgtagatggtcataacttgtatgaatcagcaaagaggctcagactacgagagcttccagcttttgctctggaacacttgccaaatcggaattccttgatatatggtgacctttatggtatctccaaagaagcatccaccatatatagggctactcttcgttacgaaggtaagcaactgcatacctttttgcttcagtgaggcattgctttgcattgcaagtctgatttccgttcaccattttgctgcatatgtgcaggttttagtgagattatggtaaccctttccaaaactgggttctttgatgctgcaaatcatccactgctgcaagatactagtcgtccaacatataagggtttccttgatgaactactgaataatatctccacaattaacacggacttagatattgaagcctctggtggatacgatgatgacctgattgccaggctgttgaagctcgggtgttgcagaagtaaggaaatagctgttaagacagtcaaaaccatcaagttcttgggactacatgaagagactcaaatacctaagggttgttcgagcccatttgatgtgatttgccagcgaatggaacagaggatggcctatggccacaatgagcaagacatggtactgctccaccacgaagtcgaggtggaatacccggacgggcaacccgccgaaaagcaccaagcgacgctactagagttcgggaaggttgaaaatggcaggtccaccactgccatggcgctgaccgtcggcattccagcagcaataggggccctgctattgctaaagaataaggtccagacgaaaggagtgatcaggcctctgcaaccggaaatctacgttccaggtgtgctacgtagtttttcatgcttgtccttgtggaattaccatgacgtgtaacggtgctgacccgtgtgtttgcgtgtctgaagcattggagatcttggagtcgtcgggcatcaagctggttgagaaagtggagacttgaaagttccctgatacacagataaagatagtatgatatagcagggcacatgtatcttttgtattaactccgttctggaatatatatttgtgaactaaaatgtgacaaataaaaagaacgggtggagtatattgtaagagacggcaaagaaacctctgtatatatgacctgtcgatatcaaataatgccgatcagttagttggcttggctc

SEQ ID NO: 95700 - DNA, 336 bp, Zea mays
  Clone ID: MRT4577_18793C.1
cggacgcgtgggcggacgcctgggctgttgtctcggcgacggactagtaacgctttgcttgacgtgcacgtggcgatggaagcttcacggacggtggagggtgttggatcatgacgatggcacaggtgagcttctacttcggcgtgacggcggcaccggtgagcacgaccagaggcataagcaaaggccagggcgcgcgctaaaaggcgccctcaggccgcgtatgcccgaaagtggaaacacgctgaggtttgttggcacgcgaatcgcagatgccaccaggaaactggatccttcaggccggggagctgctcctgtcatcacactcaccggggc

SEQ ID NO: 95701 - DNA, 390 bp, Zea mays
  Clone ID: MRT4577_18794C.1
tcagaacacgatctcatctctccgaggatctcgacacgacactgatcgtctcagccacaatgctcttatgccagaatacaagccggaggcaaactgcgcgtgcagcacttaaatcaacctgatctacctgatgcaacacgtgactctactgccacgaaacctcgcctacgggactatccagtgaacctgtgtgattgcaaccctaagtggctgccgggcctggtcaatgatcaagaactaacattatgctgcgctcacattctgatagatacgccgacaagtatctgagagaggaacgccatgaatattgaagacgacaatggtctcgcctgactacacaggaaatacgcctctgcatcccataacgaacgactcgactgtgccgaacaa

SEQ ID NO: 95702 - DNA, 435 bp, Zea mays
  Clone ID: MRT4577_18795C.1
gaaaacaatggtttgagggggctcaaattaggggagaagaacagaaaaagccaaacacccaggggcccaaagggtgattattagccgggtaaaaaaaactcgggaatgcttaaacgcacaaataatactaacataaaaaaatgaacgggcactaaagggaaccccgggacaaggaaaacccccaagaggggactcagaccagaagaccctgccccggaaggccccggtcaaaaactcggtcccccaagaatgcaaccccaaagtctaaaacctgaaaggaaaacgcgcccatggggacggggaccggcaggacttctggaagaaggcctccatgttaaaggcaggcagggcaaaccccttcaacgggccccttttgttacaagcgctggggggggggggcactgaggaaggggggaccggggtaaggggcccctt

SEQ ID NO: 95703 - DNA, 283 bp, Zea mays
  Clone ID: MRT4577_18796C.1
ggacaagggggcaactaccagttagaaaccaggggtagctgaacattgtcatttttcaatttacagagcttcagcacaaaacccatgatgggtgtataagaatgactgctagaaagatttggtgtagattaatatgacccgatcatcaacagctatttgggggtctcctgacttgggtagacctcaaacctaccaaatacccccaacaaaacaccgttcactaccaagcggaaaaattaattctaaggggtgccaaattccgatggggggaaccatcacgggg

SEQ ID NO: 95704 - DNA, 559 bp, Zea mays
  unsure (1)..(559): unsure at all n locations
  Clone ID: MRT4577_18797C.1
caaaggaagatagaaccaaaataggggcgctgggataccccacccaaggaagatagaaccngaaataaaataccaataacaagaaactagcgtcctgctagagtgacgagggcgtacctctataatagaaaatagaggtaattaaaacgcaaagatgaatagttgatagtggtcgtagttgtagttgattagggctttttatggtaattggctaactaatataccgtttgggggtacctacttgcctttatttattctgtgtagtgggtggcggtgcctaantagagcccggtggacccataatactgcggggctgtgttgctaaagaccaaccttaagataactaaatgtgaaaatctgaatgtaatagcgagtaaagacataatagtgaatactgtaacagtaaatgtctaccctcacgtagtgcactttggantgcataacggcaaagccttgggacctggtaaagttgctgctatatttggcctcgtacataatgtgagcagtaaaaatatttgctgacagtaaaatgcatacattaattaagtctagtacttta

SEQ ID NO: 95705 - DNA, 956 bp, Zea mays
  Clone ID: MRT4577_18798C.1
ggctcgccatgtacaccttcctcccgttcggcatggtgctcgtcgtcttcggcatcatcgccttctccttcctcccgtatcgcgtctgcttcccggtaggtgcgctcaccggagtgaactaccgcstcgtggccggccacgagcccaccgccacgcgccaaggcggcggcgggcgactgtacgtctgcaaccmccgcasgctgcttgaccctgtcatcgtggccgcggcgctggggaagccggtgaccgcggtgacgtacagcctgagcccggtgtcggagctgatcgcgccgatccgcacggcgcgcctgacgcgggaccgcgagaaggaccagcgcaacatggcggcggtgtggcgcgcggcgacctggtggtgtgccccgaggggaccacgtgccgggaggagtacctgctccggctcagcccgctcttcgccgagctcggcgtcgacgtgaaccccgtggcgctggaaacgcgcgtcggcatgttctacgggacgtccaccaagccggggcgcaagtggatggaccccttctacttcatgatgaacccgcggccggcgtaccgtgtggagttcctgccgcgcgccgccaccgcgccggtggacaacggtggccgcggcvacagcatcgacgtggcgaaccgggtgcagcgcgaactcggcaaggcgctggggtttgagctmacagggctgacccggaaggacaagtacatgacgcttgccggcaacgaaggckcgtgccgacagcgcccaaaaacractgacgtaaataattgtccatgtggtttttccgttccaatgagcagcccggccggacctctctaagcacgtacggttgctatatrggtccagtcgtctttgcgcaaataataavasatacacgtgcatgtaattaaggttaccatttagtttgcaaatcaaacgatctatgcacaagctcaacaaaaacaaatca

SEQ ID NO: 95706 - DNA, 543 bp, Zea mays
  Clone ID: MRT4577_18799C.1
ctgcaggaattcggcacgagaaaaggtaggggtcaaggaccttatgggactgcaatcgtgcctgccaattggggaaggacgcgggcctggcaaccgctcggctctagtaagggaaacaggtatgtctcacatcattgctcgaagactggaaaaacagcaagttagctcagttgggtagagtgctggtctgtcacgccagaagtcgcgggttcgaaccccgttttccccgcacgatctgaaactaatagaatagaaggggccataaacaggagagtcttgaccaattcgaatttggtgtagttgaaataacggaattggaagttgttcggtcaagtataggaaattaatataagaatgaataactttctcaatggtttattttttgtcttttatttatcttaatattcattccattcaggccattcgcaagcaagcacgaaaaagcttctatttttaaacggaaacgcccagcccaatacattgaaactcattacccatgggcaaagaaagccagtagaaaaaaaaaaaaaaaaaaggccccta

SEQ ID NO: 95707 - DNA, 1041 bp, Zea mays
  unsure (1)..(1041): unsure at all n locations
  Clone ID: MRT4577_1879C.1
ccgggaaaaaaacaccgaaggttcggactgaatgaagcgaaagcccaaatcccattccccttccccctcttcgtctccgtcggtggcgtcggaccgaacccgagcccggagccctaactaaccctaggaggcaggcggcggcggggatggtgtactacgcgctgttggtgggcgcggagctggatggcctcaccaacctgcagccccgccacggctgcgacgaccccaacttcccctactacctcaaaccaaaggtatcttgcaatcacaacgaacaaaagctctcgatctcaccgacaccgaggaagaagagatcaatggcgtccgagcagggagtcgtgatcgcgtgccacagcaaggctgagtttgacgcccacatgaccaaggcccaggaagccggcaagctggtggtcattgacttcactgccgcctggtgcggtccatgccgcgccatcgccccactgttcgtcgaacacgccaagaagttcactcaggtcgtgttcctgaaggtggacgtggacgaagtgaaggaagtcaccgcggcctacgaggtcgaggcgatgccgaccttccacttcgtcaagaacggcaagacggtcgcgaccatcgtgggtgccaggaaggacgagctcctggcccagatcgagaagcatgctgcgcctgcgcctgcgtctgcgtctgcctaaaggagatcagatcagtcgtcgccgtcaataagggccagcacgtatggctgtaaatgttgtcgttatcagttctggctttgtcgtttgtgggcgattgtgaactagtagtatgtttgtttctatccgagccggaggcgatacttaaccatggatacttgttgtgagttcgtttctgttcgcgtgtgactcttgaattgaatcaaccagctcaccactgcaccaggccgtggtgagtggtgacagtgatttcctgttagcatgaatgatcctatggatggatatagaataatagataaatcacgttgcgctgcaatgggcaagcatacctgccaaaannaaaaaaaaaaaaggccct

SEQ ID NO: 95708 - DNA, 694 bp, Zea mays
  Clone ID: MRT4577_187C.1
ccatagcgttcccccttctgccattacttccgtcatttctcaccaccgccgacgctaccccctttcgacaacaccatgagggagtgcatatcgatccacattgtccaggccggcctccaggtcggaaacgcgtgctggaagctgtactgcctcgagcatggcattcacgctgatggtcagatgcccgatgacaagaccattgggggaggtgatgatgctttcaacaccttcttcagtgagactggcgctgggaagcacgttccccgcgctgtatttggtgaccttgagcccactgtcatccatgaggtgaggactgacacctatcgccagctcttccatcctgagcaggtcatgagtggcaaggatgatgcagccaacaactctcttcgaggacactacaccattggcaaggagattgttgacctgagccttgaccgcatgaagaagcttgcagattatagcactggtctccagggctttctcgtgttcaacgctgttggcggaggaacggactatgagcttggatctctcctcctggagcgcctgtctgacgactatggcaagaagtccaatctcggctgcaccgcgaacccatccccccaggggtccacatgcgaggttgagccatacaacagagtgctgtacacccactctctactacagcacactgatgttgctgtgctgctcgacaatg

SEQ ID NO: 95709 - DNA, 602 bp, Zea mays
  Clone ID: MRT4577_18800C.1
cccacgcgtccgcccacgcgtccgcccacgcgtccgccactcctccgtcctcgtcgactccgaagaggagaagagagcacgaatcgccggaggtggacgccaccggcgagtctcctttgggccacacgtaaggcggcgtagactgtagaggttgtttggttgtaataagcagcgcacgccgcacgcgccattcccgttttggttgccaagtgaagagaggacggtggttgtagttgtggttgtgttgagtggggaaggggacggtgcagctgtggaaagtagcggccgtcgatgacgtttctgttcccggcgaagaaccagcagggtacgatggagggcaggccgtctgcgccggcgagggtgtcgatgttccggaggctgatggtgcgggtgaccccggctgagcggctggctggtgacggcaaggagagggagaaggacgagaggccgccggcgtccgcccccgccgcggcgccagccgcggccggcgacgccttggagctgctgaagggcttggtgcagtgcttgagcacggcggagcggaacctgctcgcggacgcgtcccggatcgcggagcgctgcggctccgggtccggctccgg

SEQ ID NO: 95710 - DNA, 945 bp, Zea mays
  unsure (1)..(945): unsure at all n locations
  Clone ID: MRT4577_18801C.1
ggctcgagcccctgtggaatttggaacacatatctcgctggcgacacagggtattgctggaatgtgcctgccgtgaaatacccggaaatcttggtctgcgagcacgttgtttcgccgcctttttaacacagttgtcgcatgaaaggcaagcatctgcggcatacgatatcccgacagtggatccaatactgggataagaaacgccttgcccttgcttcagaacaaagccgatgccttcgtgtcctccaatctggcctttgggagtcaatgctgggacggcatcgaactggttgaggcagaatccaacatctgtatgacagactccggagtaagatagtcgaataagaatttccccgggtccaggctccggnatcgttgtctcgacgatctcagtgcgaagcgaatttccggggtctgcatagactatagtcttgttcacttggacctcagccatggtcgtagatgtctctgtagctcttctgcgctgccgtacttttgaggtcgatgtaagtgctggatgtcgtatcggttcacgaacgtagcgagtgctgcccagagtagaactcagttgatttcggaaaagtccgtgaacccacgaatttaacgaaagggataactagtaagtgatatccttggccacagtgcgggttagtctaccaaggcagtgtggctcggctaacaggctcgtgtggggaaactcctcaattgacactgacatgacgggcctgactcgaccccagagtaacgaaaaacggcttaggagatcgtgaagggtgtcatggcaaaccctcggcttgactatcctaatttggtcagtctgggttgccccctcaagagcataaagggatgccatttcggcataccacctccaataccaccagaacgtaaacagtgaagttgccaatttcaccatgaatacgctcgacttcaccggacgggtggttg

SEQ ID NO: 95711 - DNA, 576 bp, Zea mays
  Clone ID: MRT4577_18802C.1
atggcattgtgcaccgccaccacgtcttcattagtcgatgtcatagggagccgaggggccataggtggggagaccttcgaggttgggcgattgaagacctttgaaatcaggtacaagagatggaaatatagtggtactttccggcagggtctgcgagggccttcggattggatacaatgccctaaccacacgacaaagtatggtattcgaggcatttttcattgtaaggcttcgcctacgctgtcagatccaccagttgactccaaatgccattgttttcctaagttagagaagccgaaggctagccacaagcgagaggatgatttggatgataaagccttatgtgacaccgcgattgtctgtggggactgggaccttttcgaagagtacctgacctacgaaatatggtcgctgagccatgacaaggtggttggagaggtaggtgcgaagcccccatttgatgttgacttgaaagttaggtcgggcaaagacttcatcaatgagattgaaggcgaagccaccaagcttgttggcctagtgacggaccatgaagctgctaagagtttggagatctaa

SEQ ID NO: 95712 - DNA, 406 bp, Zea mays
  Clone ID: MRT4577_18803C.1
tcgttcgatgttccggaggctgatggtgcgggtgggcccggctgagcggctggctggtgacggcaaggagagggagaaggacgagaggccgccggcgtccggcgccggagcggaggcggaggtcgggtcggtggggctggacaagatggtgctcagcttcatggaggactccgccgcggccgcggagcggccaccgcgtgggcgatgcagcagctgctttaacggcaacaaccaggacggcagcgacgacgaggacttcgacttcctgccgtccgcctccgcccccgccgtggcgccagccgcggccggcgacgccttggagctgctgaagggcttggtgcagtgcgcgagcacgccggagcggaacctgctcgcggacgcgtcccggatcgcggagcgctgcggc

SEQ ID NO: 95713 - DNA, 269 bp, Zea mays
  Clone ID: MRT4577_18804C.1
gcattacacgcgcccgcggacacggaaggacaggggggcattaggggaaaaacccgggaacaaccgacaggggaagggacaaaccaacgcggaagaaggacacaggaccgaaaccaacgcaacacacacggagagaaagggagaaaacgaacaagccaaaaagcgaagaagacgcacgggggcgacccgcagaccacaagacacggggaaacacaaagcaccacgaagggagcaagaacaggcgaaaaaagcaccaacaccggggcggg

SEQ ID NO: 95714 - DNA, 465 bp, Zea mays
  Clone ID: MRT4577_18805C.1
aagggaagggggccaatgggtttgcaaatgaaaagggggtacaaaaaaaaaacccaaccctaaccctaaagaacccggggccaaaaaaggggccccgcccaaacccccccacaaaaaaaggcaaacagtttttaaggggccccccccccctcaccaaacgggatgtaaactttgccccccctacaagcccacaaccaaaatttatccacaaaacccccggcccccaaggctacaaccccacaaacaggactggggacatgtaaatccccaaaaaagcccaaggggtgcccaaagcggagccccacccttagccggggaaacaaccctagggcgttgcttgccacccccacttttaaagggggaaaaggggccccttgaaaaaaacccccctccccccccaaattaacttttggaaaatctggaaaaaaacccaaatggtttttacccaaaaaaatgcccgggccc

SEQ ID NO: 95715 - DNA, 496 bp, Zea mays
  Clone ID: MRT4577_18806C.1
attcggctcgagctgatacccaggagtctccagcttccaagagaggtcgggtcacagccagcagctatgtctgacataaatcttgactgggttgacaggcgtcagttgcagcgcttggaggaaatgctgattgttgtggatgagaatgataaggttattggtgccgacaccaagaggaattgccatctgaacgaaaacattgagaaagggctgctgcaccgagccttcagcgttgtcttgtttaacaccaagaatcgaatcctgatacagcagaggtcggacacgaaagtcacgtttcctgggtattttaccgactcctgtagtagccacccattatacaacccagcagaactggaagaaaaggatgccatcggagtgaggagggcagcccacaggcgtctgctagcagagctgggcaattctggggagcacatttctccagaggacatctgagtcatgacaatctatcaccacatggcaaaatcagacagaattt

SEQ ID NO: 95716 - DNA, 791 bp, Zea mays
  Clone ID: MRT4577_18807C.1
aggggtaccttcaggagcctcatcaccatttggccgggagccgcctgcccctcaattcaccgcccctgccccctgtttgtctcgtcgctgctacccacccatgctccccccaccaccatggcctcgacctcgtccgtctggtcggtgtggatcgccctgtcgctgacgctaacgcttgcctcggcatcaccagctgacgggcaagggggcggaggagcacactgcccgcccgtgctatgcggcggcgtggagatcgccttcccgttcgggatcgtccaggagcaggcgacggccaccaactgcggcgggatcgggttccaggtccgctgcgtcaacggcacgccgtacctcggatacagccggtacgaccactggctccagatcctcagcgtctcctacaccaacgcctccttgctcgtcgccgacacccacaagctcgagacgctcggagcctcggacgtcggcggcggcggcggcgactccgccgtctgccgcatccccgggaacaacagctccaccaaggtcgccctcccgttctccatcagccctctgaaccaggacctcatcctgtacaactgcaccaaggcgccggcgccggcgccggcgccggacgacgaggggcttgtggagatgacgagatgcggcaacggcactttcgcccgcatcggagggcgttacggcgagccggacgacgacggcggatacttcttggacggctgctgtgccactgtcgtgcccgtgcttgtaaaggacgatggcaaggcgaacgcgagcgactacgagcaactcat

SEQ ID NO: 95717 - DNA, 268 bp, Zea mays
  Clone ID: MRT4577_18808C.1
gggggggggtttttatatggtgggtttttttttttttaagaaaacatattagctacaactttattccctaatttgcacacctagacacatataaaagtttgtcagtataaaggggggtcatggcaccttaaattggggttaaatatctgggggttctgttaatgatctttgggtaactaggcatacggattggtacgttcggctatttgcctagcttggggtgagcaaagaatcctatggggcgtcctcggggggggggttaccacct

SEQ ID NO: 95718 - DNA, 228 bp, Zea mays
  Clone ID: MRT4577_18809C.1
ccacgcgtccgcgcgctcttgcttgccaccctccgcttcaactccatcgcaacgcactcaggatagggttcaaagtgtcgctatcgcccgcatctcacctcccatacctcttcaacacaccacctcgcttacactccaaacctgccaccacaaccgcctctttgctctctacctgtccccaccctacccacgcccttcctttgctacgtttccctcccccactaccac

SEQ ID NO: 95719 - DNA, 848 bp, Zea mays
  unsure (1)..(848): unsure at all n locations
  Clone ID: MRT4577_1880C.1
cattgggaccctcgaggccggccgggcaccaaaggtatcttgcaatcacaacgaacaaaagctctcgatctcaccgacaccgaggaagaagagatcaatggcgtccgagcagggagtcgtgatcgcgtgccacagcaaggctgagtttgacgcccacatgaccaaggcccaggaagccggcaagctggtggtcatcgacttcactgccgcctggtgcggtccatgccgcgccatcgccccactgttcgtcgaacacgccaagaagttcactcaggtcgtcttcctgaaggtggacgtggacgaagtgaaggaagtcaccgcggcctacgaggtcgaggcgatgccgaccttccacttcgtcaagaacggcaagacggtcgcgaccatcgtgggtgccaggaaggacgagctcctggccctgatcgagaagcatgccgcgcctgcgcctgcgactgcgtctgcctaaatgagatcagatcagtcgtcgccgtcaataagggccagcacgtatggctgtaaatgttgtcgttatcagttctggctttgtcgtttgtgggcgatttgtgaactagtagtatgtttgtttctatccgagccggaggcgatacttaaccatggatacttgttgtgagttcgtttctgttcgcgtgtgactcttgaattgaatcaaccagctcaccactgcaccaggcgcggggggagtggtgacagtgatttcctgttaaaaaaaaaaaaaaaaactcggcacgcaggcagaggcagcatagcagcagccactccatccatcctctttcccctctcgctcgcttctcggnggatccctcctcctcgaccgtcccgtcccgtcc

SEQ ID NO: 95720 - DNA, 3456 bp, Zea mays
  Clone ID: MRT4577_18810C.1
aaaaaattttaaaatctttttattggatagtttacgtgagtattgttatgagccatcgcaacacacgagcaaccgactagtatataatggtagggcagattgtgcacagattcctgatctcacacgtccctctcgctatggatgttcacttgttctgttctatagacttttctgagttttctcgttgacgcaaagtagaaatgtacaagtttctctactccgaacgcatttcatggcaaacgcgggccgcggcctaccgcgcacacaaaaaaatcacaaatcaaaagcatactatcagcgcaaacgcgggccgctgcctaccgcgcacacaaaaaatcacaaatcaaaagcatactatcagcatagaggcatggttcctggggttcttgattcgaaatctccatctcatcgccatgcacacttccttctgtgcagcatcttcatattaatctcctccaacacagcaacgctatcatcagcgcaggccagcaataggtcagaggatgatcggcaagccctcctttgcttcaagtctggtctctccgggaactctgttggtgtcctaggatcatggagcaacgactcactgaacttctgcaactgggaaggggtcacctgcagcacggccatcccaatccgcgtggcatccttgaagctaaggtcagtgcaactcagaggaaaactgtcaagttgtgtagcaaatcttacttccctagtgcagatggatctctcaaacaattcgatttctggggagatacctgatgaaataggttcactacccctacttcagactttgattctctctgccaataagtttgaaggtagcatccctccatcattgggcatggctgcatctaacaattcattgcttaccactctaatcctctcgaagaaccgcctatcaggggagattccacatttccataagatggcatttctgcaatctcttggccttactggaaatcttctttccggaaacattccaccgtctttgggaaatatttcctccttaacttccatcctactagcagagaatagtttaagaggaccaattccagaaactttggctcaaatccccaagttggacattctagacctaagcaacaacatgttgtcagggaacgtccctgacctgctttacaatgtctcatcactcacatccttcaatataatcaataacggaattggtggaaagataccatctggtattggccgctcacttccaaacctcgtgtcattgatcatgggtggcaacgctttctctggagaggttccagcttcattggccaacatttcaaagctccaactgattgatctctcaagcaattacctaaggagctcagtgccatctctcggatccttgacataccttactcaactgcttctaggaagcaacaagctagaaactgaagactggacgttccttacatccctaacaaattgcagacagttgttaaagatatcactggatgggaatgccttgaatggaagtcttccaaaatcggtcggcaatctttctacaagtatacaattgctaagcttaagaggcaatcaaatttcaggaactataccacctgagataggaaaccttgtgagtctcacaaaacttgccatggaccaaaacatgctttcaggaatcattcccttgactattgggaatttaacaaatttggttgtcctggcactgtccacaaacagattgtcaggtgaaatcccagccacaattggcaatctccctcaactgatccagctttacctggatgacaatatgttatctggacgcataccagcacaactagtgcagtgcacaaggttgactatgttaaatttatcagtcaatagccttgatggatccataccaagtgaaatcctcagtatttcttcgctttctttggggttggacttatcaaacaacaatcttataggaacaataccatcacaaattggaaaactgatcaatcttggcctactgaatgtttccagcaacaagttatctggtgaaataccatctgaacttgggcagtgtgttttattgttatcccttcagatggaaggcaacatgctcgatggggttattccacagtctctcaagacgctgaagggcatacaacacatggatctctctgaaaacaacttatctggtcaaattccagatttcttcgagaacttcagtaccttatattatcttaatctatcatacaacagactagaaggatcaattccaaccagtggcatcttcacaaattcaaatgcagtcatgttagaaggtaacaaggcgttatgtcaacaaattgacatatttgcattgccgatctgccacatcacatctgcaagaaaaagaaaaattaatgaacgcctactgctgataacagttccaccagttattatcgctttgttgtcatttttatgtgttcttaccactgttatgaagggaagaataacccagccatctgaaagctacagagagacaatgaagaaggtgtcttatggagacattcttaaggctaccaattggttttctccagtcaacaggatcagctcaagtcatacagcatcagtctacataggtagatttcagtttgatacagaccttgttgccatcaaggtatttcatcttgacgagcaaggttcgctcaatagctttttggcagagtgtgaagtgctaaaacatacccgccatcgcaatctcattcaagcaattactttgtgctcgacagttgattttgagaacaatgaatttaaagttctagtatacgaattcatggcaaatggtagcttggacatgtggatacacccaaggccacaccaacgtagccctataagggtgttaagtttaggtcaaaggattagtattgctgcagatgtagcttctgctcttgattatatgcacaaccaattgacacctccattgattcactgtgatttgaagcctagcaatgttttgttggattatgacatgacctcgcgcattggggattttgggtcagcaaaatttctctcttcaagtcttaatagtaccccagaagggttggttggagcctcaggaaccattggatatatcgcacctggtaagttgtacgcctcatttgtttatggactattaaacttttcttttactagtttatgaataaataatgttatttactcctgttttgccagaatatgggatgggatgcaaaatctcaaccggtggtgatgtttatggttttggggtattattgctagaaatgctcacagcaaagcgaccaactgacacgctgtttggtaatgacctcagccttcataagtatgtagacttagcattcccaaacaaaattaatgagattttagatcccaaaatgccacatgaggaggatgttgtttctaccctttgcatgcaaagatatatcataccgttggttgaaattggccttatgtgttccatggaatcaccaaaaggtagaccaggaatgcgac

SEQ ID NO: 95721 - DNA, 404 bp, Zea mays
  Clone ID: MRT4577_18811C.1
tactcaggctgctcgcaactcccatcctccccctcccggagtacgaagtaccagagagagaacggctttcctctagcaatggcgggtggccgcgccggcgacgacgacgtggtggtggtgaactgcggcggcagctgcggcggcgaccccggcgcatacgccgcggtgctcaacaggaagctcgacctgtactgcgccgccgtcgctaaatccatggggtggttcctcctcctcctacccctccaaagattagacctttctaggcctacttgcgtattggttgtgtgattgtgccttgtgtgcatcgatctgtcaatttcagctccagcttaatttccagtctcaatggtaagaagtgcatgtctttcagttacttccccccatcatttttgggaggggaattt

SEQ ID NO: 95722 - DNA, 716 bp, Zea mays
  Clone ID: MRT4577_18812C.1
cacctactctcggcaacggatatctcggctctcgcatcgatgaagaacgtagcgaaatgcgatacctggtgtgaattgcagaatcccgcgaaccatcgagtctttgaacgcaagttgcgcccgaggccactcggccgagggcacgcctgcctgggcgtcacgcattttccgagagaagaatcgggagaagcgaccgatggagaaagacacggcggcggcggcgacgagggtctgccggcggtgcaaagcgaagtactcgccgtcgggaaacacgccgcagtcctgcaggttccacccctcatacttcgtctgccgccgccacgacgaccagaagaggtactacgagctcaaggagggcgacccgccgtacgccgccaagttctacgactgctgcggcgccgaggaccccgccaccgcaggctgcgccaccggattccacctctcctacgacgaccccgagtgattagccaaccaactactagtacgcttgcttgttcatctcctctgaagcaaacgcagtgttctgttactttgtacaatcagcagagcaaacaccctgttagtcatctggattgtgtgtataaatcagggttcagaatataatccgaccctgtagtatcagtgttcagaataacatcgtcagaatgaattctggctgcgagcaatatttcgactacgagcggttgcttaattcctaacaaatttggttgtctcca

SEQ ID NO: 95723 - DNA, 433 bp, Zea mays
  Clone ID: MRT4577_18813C.1
caccacaggtcccaggcaaacaatatccatatttactatgaggggcctccttcagcagagccctgacaaacagaaaaaaatagggggccaaacaaaaaagggcactcgatccccccccaacaaaaaaaaactggagggaataaaagggcccaaatttcacgttcactactactcagcagtttgcccaaaacaaatgcaaggggggggtccccttcccctaagggcccccaaaaggggtagacggcccccttggcccaaaatttaaacttttttttacggggtaaaagggttttttttaaaaacactggaggtttaaaaaaccagttacatgagggctggggaggggcctcaaaacgggatgggcttgatcttaaagggagggttgttgagcaaaaacccaaaaccttttaaatcctggacaagggagtaaaaa

SEQ ID NO: 95724 - DNA, 341 bp, Zea mays
  Clone ID: MRT4577_18814C.1
cacaacaaaaaacctccaaaacctttaaaagaaaggaagggcccgggacctacaaagatcccccccccccgaccccccaaaatcctagccctgggggtatataggcgggtccaccataccatcgaacctttccgggccctaagcttcgccccccctagggcccccccgggggtccggccccccgttacagggcccatcactcacgggggagccctcagctcaggggccggttttttacgggccccgggacaacggttgccgccccccacgtcctcgtcgcccccgtttttcccaaaaagcttcacggggccccccagcctcttgcccatcggcggccccgg

SEQ ID NO: 95725 - DNA, 408 bp, Zea mays
  Clone ID: MRT4577_18815C.1
ctcatatcatggaccattatgattgctggatatggcatgcatggttttgggaaacatgccatggccctctttgagcaaatgagaggcagtggtattgagccagatgcggcctctttcagtgccatattgtatgcttgctgccattctggtcttgctgctgagggacggagattcttcaaggctatgcaaaaggaatacaaaatagagcccaagttgaagcactacacctgcattgttgacctgcttagccgtaccggcgacctgaaggaggctcttgagttcatcgagtcaatgccgattgaacctgattcaagcatttgggtatcattgcttcacggatgtagaattcacaagaacgtcaagcttgcggagaaggtagcagacatggtctttaagctggaacctgag

SEQ ID NO: 95726 - DNA, 255 bp, Zea mays
  Clone ID: MRT4577_18816C.1
attcggctcgagctcgtgttctccgtcattttgcaccacgtacgcacgtccaacacggggggctgtattaaaccgactgggggatccataaccaagagcacaaacctctggccacagggctcctgaacagctgcaacatgtagcaccacccattctgactcaagatgctgcaccaagatgcctggccactacatccgatcaaagaccgttacaaagaagcgcatatcccacacggatacgtgcttgtagagtcct

SEQ ID NO: 95727 - DNA, 642 bp, Zea mays
  Clone ID: MRT4577_18817C.1
gtgtttttttttttttttttttttttttttttttttttttttttttttttttttttttttttttttttttttttttttttttttttttttttttttaacagccaaattgttttgccaagaacattggtccccgtttgcgggacaaggaggggtggagtccatcgccttgttcagacttttcagaaaccgggagacagggcagcatttaggcccttttcccccttatgcggggcccgagctggatttccttgggcatgatggggacccttttggcgtggatggcccaaaggttggggtcctaaaagagacccaccaaataccccttgggggccttctgcagcggggggacaggggaggactggaacccaagggcggttttgaagttttgcgcgatctcacccaccagccgttggaagggcagtttccggatgagcagctccgggcttttttggtacttggggatctcgcggaaagcgacggtgccggggcggaacctgtggggttttttcacccccccggtggccggagcccatttgcgcccccccttgggggccaattttttccggggggccttgccgccagttgatttccttgccgtttgttttgtgcgggccattagaaaaagcttcaagagggcgggcg

SEQ ID NO: 95728 - DNA, 464 bp, Zea mays
  Clone ID: MRT4577_18818C.1
tcaaattttgttcactgatgagtagtatttttatacttgtaaaagcgaacacttaaaagtcaaagacaaacaaattatctttagctattcaattattcatcattgttgtggtgagaagcaatgtggctgacaatgctaacaatggtcttttggtgcttgtcagcgaacttgccaacagccttagcaccatcaacgacattgtgccagccgaacatttcaacatctccaccatcttcagctccgtcttcagcaacgtgcatgccgacgctagcaatagtaccggcgtggtgttcagcgaacttaccagcatccttagctccatcaacgatgttgtggattccaaacatttcaacggcatcaccaccatcttgagcaccatccttagcgacgtgttctccaatgctgataatagtgggggcgtgatgaatggcgaatttgccaacatccttagcaccatcaacgat

SEQ ID NO: 95729 - DNA, 575 bp, Zea mays
  unsure (1)..(575): unsure at all n locations
  Clone ID: MRT4577_18819C.1
ccgggnaaaaaaaagcagtccgatagccagcatgcctcgcacgtcggtgggcacgccaccatgcgggggcgtgaccattggggatgccgtgctgaacctggagctgggctctactcaaggctagattcgctttcacgactacttctgctacgggtacggcatcatgttctcacacccagccgacgtcacctcactgtgtgcacaatggtagatggcgtcgacggtggtgaacgccacggagcgcgagaagtgtggagggaagctgctggggatgtcaagcgaacacgtgcagaggtacaggctgtggagcaaggacgtggaggcgctctgcggaaagcatatgctgaggaggcgacgactgccaaggtgacgatgcggatcctggaggtccctgagtgatacagctgtctggctagatgagcatggaggaccgagactagaaggacgcggtggtgcgtatcatgccgttcggggcgctgcagggggtcattccatgcaagggcgtgaagctgaggttactgaatatggtcaccacgaagcgtgacatggacgatgcagctgcgcgctggctaatt

SEQ ID NO: 95730 - DNA, 343 bp, Zea mays
  Clone ID: MRT4577_1881C.1
cgcccgcaggggccggtccggattgaccgacgcgtccgcaaactgccagcgcaccaccaactaaccctaattattccattccccaccggcgaccgcgtgctagcggtccagtgtagcgcaagcggcagccggcaggcgcccagcagcagcattgcaggttgcagcaaagcgagcgagagtgagacagagctcacaagcctaacaccctgtctccacctcccacatgcgctgatgcgccgcaagaagcacttggaccggggtggcgtacctctcgcttaatcatggacaactctcataatcaaccaccaccacctggtgttggaacatggccggagacaccttc

SEQ ID NO: 95731 - DNA, 647 bp, Zea mays
  Clone ID: MRT4577_18820C.1
gtgcggcgctcaggcggcggttccgtgctatccccgccattcgtcaccatccaggtcccggaaccttatcaccaaatcctcacgtcatggcggccgcgctcttctccacctcgctgctgtcgagcaattcaacggttatacatttcaaggaagacctctgagggtgaactgcgggccaccgccacctagagatggatccgcaccaagagcaccaaggggtggtggtggtgggggtggtggcggcagctttgtcgattcagggaacaaggtatacgtggggaaccttgcatggggcgttgacaactcgactctggagaacctattcagtgagcaaggacaggtgctggatgctaaggtcatctacgacagggatagcggcaggtcaagggggtttggtttcgtcacctatggctctgccgaggaggtcaacaatgccatatcaaaccttgatggcatcgacttggatggtagacagatccgagccacggttgcagaatcaaagcccaggcgtgaattttgagattttgttaaggtggttttagaggtcaatagcgtgtgttcacaagttctagtttgtagcgtctattctttcttccgtatgagtaacaagaagatgctgacaaaaaaaaaaaaaaaaaagggcccta

SEQ ID NO: 95732 - DNA, 1037 bp, Zea mays
  Clone ID: MRT4577_18821C.1
attgggtacctcgaggccggccggggtgctatccccgccattcgtcaccagccaggtcccggaaccttatcaccaaatcctcttctccacctcgctctcgccccgcttcctcgccctatcctccccgaagccggccgcgcccgcggcctcggccttcctccccttcacgctgccgctgcgctctgtgtcggcgccggcgccagcgaggcgggtcttcgagcccgttgccgtcgcggtgtcgtcggagtacgggaccgagggcgcggagcagcaggacggggagttctccgaggacctcaagctgttcgtcggtaacctgccgttcagcgtcgacagtgcgcagctggccgggctcttcgagcaggcgggctccgtcgagatggtcgaggttgtatacgatagaatgactgggcggagccgtggatttggattcgtgacaatgtcttcagctgaagaagccggggctgctgtcgagcaattcaacggttatacatttcaaggaagacctctgagggtgaactgcgggccaccgccacctagagatggatccgcaccaagagcaccaaggggtggtgggtggtggcggcggcggcagcagctttgtcgattcagggaacaaggtatacgtggggaaccttgcatggggcgttgacaactcgactctggagaacctattcagtgagcaaggacaggtgctggatgctaaggtcatctacgacagggatagcggcaggtcaagggggtttggtttcgtcacctatggctctgccgaggaggtcaacaatgccatatcaaaccttgatggcatcgacttggatggtagacagatccgagtcacggttgcagaatcaaagcccaggcgtgaattttgagattttgttaaggtggtttagaggtcaatagcgtgtgttcacaagttctagtttgtagcgtctattctttcttccgtatgagtaacaagatgctgaattgctgataatgagagactagaagtgaaaaaaaaaaaaaaaaaaagggcgccgctcgcgatctagaac

SEQ ID NO: 95733 - DNA, 205 bp, Zea mays
  Clone ID: MRT4577_18822C.1
ttcgtactagaatcatgatatttgtattaccagtaggacgtttatttgatctcctctccttgtatgcgactctttgataaaaccagatacgacgtgtgtttcttcacattgctgagtgctgggtgtaatgactctcgatttctggaaagctcggccccttacgaggtacatgattggcgagaatcattattgttggaagggggag

SEQ ID NO: 95734 - DNA, 986 bp, Zea mays
  Clone ID: MRT4577_18823C.1
cattgggtacctcgaggccggccggggtgctatccccgccattcgtcaccagccaggtcccggaaccttatcaccaaatcctcacgtcatggcggcgcgctcttctccacctcgctctcgccccgcttcctcgccctatcctccccgaagccggccgcgcccgcggcctcggccttcctccccttcacgctgccgctgcgctctgtgtcggcgccggcgccagcgaggcgggtcttcgagcccgttgccgtcgcggtgtcgtcggagtacgggaccgagggcgcggagcagcaggacggggagttctccgaggacctcaagctgttcgtcggtaacctgccgttcagcgtcgacagtgcgcagctggccgggctcttcgagcaggcgggctccgtcgagatggtcgaggttgtatacgatagaatgactgggcggagccgtggatttggattcgtgacaatgtcttcagctgaagaagccggggctgctgtcgagcaattcaacggttatacatttcaaggaagacctctgagggtggtggcggcggcggcagcagctttgtcgattcagggaacaaggtatacgtggggagccttgcatggggcgttgacaactcgactctggagaacctattcagtgagcaagggcaagtgctggatgctaaggtcatctacgacagggatagcggcaggtcaagggggtttggtttcgtcacctatggctccgcccaagaggtcaacaatgccatatcaaacctcgatggcatcgacttggatggtagacagatccgagtcacggctgcggagtcaaagccgagacgtcaattttgagattattttcttatgggggtttagaggctgatagtgtgtttcaaaacttttagtttgtagtgtctattctttcctccatatgagtaccaaataaatgcatctttccagcggggaaaagtccgcacgcgtgggcggacgcgtgggcggacaagtaag

SEQ ID NO: 95735 - DNA, 296 bp, Zea mays
  Clone ID: MRT4577_18824C.1
gcacacccctcttggctggcaagcacgcagatctcatggtcatttggggaaagggctcctccggctgctggtgaacttctgtggcgaccacctcctgctcctgacctccctgggagggcgctatcagttctgtcctggccctttcagttttataagttggtttgcagtccccgtgtcctgacttctgtctgccacatgaggtaggaggccctgcctgtgtggtagggtggttactgcgggtggactagtggaggccttctactgattagacaatgcccgcccacatcttggagggc

SEQ ID NO: 95736 - DNA, 1182 bp, Zea mays
  Clone ID: MRT4577_18825C.1
gccggccggttcgaaacctcgagtgccggccgggccgggcccgtgccatcgccattcacctccagccaggctccggaaccttatcaccaaaatcctcgtcccctacccgaggcgagcatcatggcggccgcgctcttctccagctcgctctcgccccgcttcctcgccctatcctccccgaagccggccgcgcccgcggccacagccttcctccccttcaggctgccgccgcgcgctgtctcggcgccgggtaggcgggtcttcgagcccgtggccgtcgcggtgtcgtcggagtacaagacggagggcgcggagcaggagggggaggatggatccgaggagttctccgaggacctgaagctgttcgtcggcaacctaccgttcagcgtcgacagcgcgcagctcgcagggctcttcgagcaggccggctccgtcgagatggtcgaggttgtatatgacagaatgactggacggagccgaggatttggattcgtgacaatgtcttcggccgaagaagccgaatctgctgtcgagcagttcaacggttatgcatttcaaggaagacaactgagggtgaactgcgggccaccgccacctagagatgaatccacaccaagagcaccaaggggtggtggtggcggcggcggcggcggctttgtcgattcagctaacaaggtctacgtggggaaccttgcgtggggcgttgacaactcgactctggagaacctgttcagtgagcaagggcaagtgcttgatgctaaggtcatctacgacagggatagcggcaggtcaagggggtttggtttcgtcacctatggctccgcccaagaggtcaacaatgccatatcaaacctcgatggcatcgacttggatggtagacagatccgagtcacggctgcggagtcaaagccgagacgtcaattttgagattattttcttatgggggtttagaggctgatagtgtgtttcaaaacttttagtttgtagtgtctattctttcctccatatgagtaccaagaagatgataatgagagactggctgtgaaatggctgtatacaggaagacttttccccgctggaaagatgcatttatttgtttcagctgtaccacaaaaaaaaaaaaaaaaaattcccttccatctaaaagagaaaaaaaaaaaacagaaaaacaaagctgggtcg

SEQ ID NO: 95737 - DNA, 1378 bp, Zea mays
  Clone ID: MRT4577_18826C.1
ccagggcggcccggggtcgcgccggccgggacagggtgctatccccgcccattcgtcaccagccaggtcccggaaccttatcaccaaatcctcacgtcatggcggccgcgctcttctccacctcgctctcgccccgcttcctcgccctatcctccccgaagccggccgcgcccgcggcctcggccttcctccccttcacgctgccgctgcgctctgtgtcggcgccggcgccagcgaggcgggtcttcgagcccgttgccgtcgcggtgtcgtcggagtacgggaccgagggcgcggagcagcaggacggggagttctccgaggacctcaagctgttcgtcggtaacctgccgttcagcgtcgacagtgcgcagctggccgggctcttcgagcaggcgggctccgtcgagatggtcgaggttgtatacgatagaatgactgggcggagccgtggatttggattcgtgacaatgtcttcagctgaagaagccggggctgctgtcgagcaattcaacggttatacatttcaaggaagacctctgagggtgaactgcgggccaccgccacctagagatggatccgcaccaagagcaccaaggggtggtggtggtgggggcggcggcggcagctttgtcgattcagggaacaaggtatacgtggggaaccttgcatggggcgttgacaactcgactctggagaacctattcagtgagcaaggacaggtgctggatgctaaggtcatctacgacagggatagcggcaggtcaagggggtttggtttcgtcacctatggctctgccgaggaggtcaacaatgccatatcaaaccttgatggcatcgacttggatggtagacagatccgagtcacggttgcagaatcaaagcccaggcgtgaattttgagattttgttaaggtggttttagaggtcaatagcgtgtgttcacaagttctagtttgtagcgtctattctttcttccgtatgagtaacaagaagatgtgctgataatgagagactggaagtgaaactgctgtccacaggaagatatttttcccaacccttctatactcgtcgcgccttcaaacagaaaaaaaaaaaaaaaaaaaaaggtgccacatgcgtacataacaaacattcaagagcgctttttcctgaaaccccgctggaaagatgcatttatttgtttcagctgttccacaaaattggcagtcaaatttccaaaaaaaaaaaaaaaagccggggttcgtgatgacacgtgtcgtgtatgaatcccgtctctgatagggtaaacagccctttttttttttttttgaagcaaagcaagccaataatgattcattcattcagtaggagaaaggagatgagatctcatacatagt

SEQ ID NO: 95738 - DNA, 184 bp, Zea mays
  Clone ID: MRT4577_18827C.1
ccgagtctcgagcgatcccactcccgatcagcagctgatcgctcacctccttgcagcctcggatcattctttagctgctctagctctagccctagctagtagcctagccactcggtcgtgcagtcatcagccttttttttttttacccatggcccactgtccgaggctacgtgctccaggtacc

SEQ ID NO: 95739 - DNA, 246 bp, Zea mays
  Clone ID: MRT4577_18828C.1
tctccccaatcgcttcctaattgcagcacttgcatatttcacctttgacctatatacatgcggcatggctctatcatcattcttactccatactatatattttactctatcaccagaaatcatgcactcatacatattactttcctaaatgaactctatctcttacaacaacatattttcactcccattcctaactctcctcactatatcaacatgacaattcgaagattctcttacacatttatc

SEQ ID NO: 95740 - DNA, 1142 bp, Zea mays
  Clone ID: MRT4577_18829C.1
tgtatgacaaatgacagcatatataaatattaattaaacacgacacacatatatacaaacacaaagctgctatcaaggaaacaaacacagagctagcggaacgacggtacaacacacacactgcacacacagacaataaagggtacgttcacaaagctagctatatatagctagccaataacaaacactcttacttaattattcttaaccagcagcacgcacgcacgcacgcagcacacatcggatggatggagatcgatgatctcctatcgatcgcgcggtacgtacgtacgtaacgttattattcttcactccgtccatgcatcgacgatcgagctagcagatagatctaagctgttcgatcagaaccagaacgccggcggccccaccatggaatccaccgcggccttgatgtccgcagcaacgctcactgcgtcacgagagatgccagccagtccagccatccccagcccaacgcagtagagcccgttgccgcccttccatggacgactgccctgctgcagccccgccttcttcttcggcatgccattgtcgtctagcaagctcccaccgtccttaagccacgtgttcgcagtgcttctgtatcctgttgcgaacacgagagaatcgaagtccctctccttcccatcctcgaactccactgtgtttcctctgatgcgagatatcgccccaaccaccttgatatcgcccgtctttattaactgggttgtgccaacgtctaggaccgccgaccggccagtcttggccttgagaagaagcgggcccatgtcgggcctgactatgccgtagcgggagaggtcaccgaactggatgtttgccaaggtcaagatgatgaagtccacaagtttcacgggaaggtgccatttcagcagcctcatgcccaagtaaatcagacccttggtcataacatgcaccgggctacggataaccaaggaggtttccactccattgtaggcaagatcatatgcaatctccatgccagagttgccacacccaaccaccaggactctcttcccggcatagttcttccacgatttgtagctcgacgagtgcacgacctcaccagccgggaaatcgcgcaggccagggatatccgggatgacaccctcgcagttctcgcc

SEQ ID NO: 95741 - DNA, 3150 bp, Zea mays
  Clone ID: MRT4577_1882C.1
gccggccggggaaaaaaaaaaaaaaaaaaaaaaaaccaaaggtaccttgcaatcacaacgaacagaagctctcgatctcaccgacaccgaggaagaagagatcaatggcgtccgagcagggagtcgtgatcgcgtgccacagcaaggctgagttcgacgcccacatgaccaaggcccaggaagccggcaagctggtacgcgtccccgtgcctcgtcttcctcgatccccattcccgtgattttgtttggaaagctgtttaggggattccgcggttcaaatcgattcgtctttggtttccttattatgcggtcgcccccctgttcaaatttgctctgaatcgcatctgggatgcttgtgttcgggggtgattagggtgcggcgcgtgtagtgggcaggattttagggattttagcgggtccgtacagtccgtctccgtccagggattatgttgattgatgtagcctgagacgatttgatgtccacggttgtgcacacagatttattatgggtggagtattgatatgtgcatgcaacgaatttattgcacatgcttttcgtggttacttagtaattataggtgtgatttaaattagtttgccctactgctgatctctatgctgaaccggaaacccgtatgagctttgcggcaacatttgtgtgagtaatttgagctggcagttgctctatttggagatctgtatttccactaaatctacgaagtagtagatgcatagataaacttaagctgtcatagaaagtcatttaaaacatgggaagagtttgacgtttagacctctgttaagtgctcatgatgtcatattgaaatttcgtacactctaaggggagtaatttggaattggggaaagaattcaacagctgcagttgagatttgctaggaagtcaagttgaaattgggaaggattcaagggctacagaccacctccgtaccttctcctgtaccttctcctgtgtactgtagagtaactgattttaggtctttttgtttgaggactaatctttagttgtcgtttaggggtagctttggaactttattttttcaaaggatttctatttttttaaaggaaaatgaactaattttcttttgaataattttcttttgaaaaatgagaacctttggaaaaatgggttcacaaactaacctttaacctttttttttgctaaatagaagaactaaagtagatattagtggggtgtttagtttgaagaatgagctagtccatcatcttcacactccacacattttttttggtttgtataatggaataagttgatccatcactatcttaatcctcatatttagttagtactaatataagaaatgatgtcatctcaccaaatttgaagaatgaactcatgatgaactaccttattttggagggaatgatccctcaaaccaaacactctctaattgattttagtgttaagtcgtttaaaggatagctaaaagagattgaagcagatttattcatatctctacccttcatttagtactctctcttcttgatatcctaagcataaagggtatttcagtctttctacagtgttctgaacatgtttattagtccttagaaccaaatagatagggactaaaatttaatctagaactaattttcagtctagaactaataggaagcaaacagagcctaggactgcactccgtatgctctgattcaaccacgagttcttgtccttgtcgttgtcttccgagggcgcacagttgatcggcgttgcattcggacggtcggacctaggactgcactccagtataataccgtcgttttctttccggcagagtagcaactctaccgcctctaacatggagctctgtcaaacttgcgcaacctttcaggtggtcattgacttcactgccgcctggtgcggtccatgccgcgccatcgccccactgttcgtcgaacacgccaagaagttcactcaggtcgtgttcctgaaggtggacgtggacgaagtgaaggaagtcaccgcggcctacgaggtcgaggcgatgccgaccttccacttcgtcaagaacggcaagacggtcgcgaccatcgtgggtgccaggaaggacgagctcctggcccagatcgagaagcatgctgcgcctgcgcctgcgtctgcgtctgcctaaaggagatcagatcagtcgtcgccgtcaataagggccagcacgtatggctgtaaatgttgtcgttatcagttctggctttgtcgtttgtgggcgattgtgaactagtagtatgtttgtttctatccgagccggaggcgatacttaaccatggatacttgttgtgcgttcgtttctgttcgcgtgtgactcttgcattgaatcaaccagctcaccactgcaccaggccgtggtgagtggtgacagtgatttcctgttattatgaatgatcctatggatggatatagaataatagataaatcacgttgcgctgcaatgggcaagcatatctatcatctacagtgcaaaacaatggcccaattaaagatgaaaacggtttcagaatttttcggtattccgtttatcgattttgaaatttttcgatcggattcaccggtaacagtattcttcaaaaccggaatcggttttcagaattttctatcggaatcagtgtgatgttttaccgaccgtttccttcggttatcggtttttgtcggaaattaccggatttgtgtctcggaattttccagcatttgatttttcgtatcgtctatacgtctctgaataaggattacttatttttgtattttttggacgccattttttgggataaatagtgttggaaggcagttgagattaacaatttggtctctcgatcaaattcacccttttctatgcacatgttatatattagtaacatataatgatagagagccgacagtctgtctttttcacacactaaattttagggttttctgtgaggctgtgaaaaaactctttatgtgaggaaaaaatatttcatgagtaaacatgccatgtcagctaaatcgagtggatattgtgaattgtgaactttgtgtctggaaacttgttatactgtaaaacttgttattttgtgaacgtgtgatctttgtaaactttttatattataaatttgtgatccttgtgaacttattatatcatg

SEQ ID NO: 95742 - DNA, 203 bp, Zea mays
  Clone ID: MRT4577_18830C.1
cctctcacaaccatccacctactccatcctcaactaccgcttcaaaccatccaaactcaccctcaccaacaaaatccataccatactatccacacacgctctaaaccttctttcttaaaacgtactccattatctaccttcagttcgtgctcaccattgacttaaacaacaccgtataccatatcaccccgatcccactctta

SEQ ID NO: 95743 - DNA, 171 bp, Zea mays
  Clone ID: MRT4577_18831C.1
tcgaggctctggccgggaaaaatttcgctactactcctactccattccgcgcgcccggcccgcgaccacgaggaggaagcaagatgatgacgatcctggcgacggagaccatggacatcccggagggcgtgacagtgacggtgccgctcaagctggtgacggtggagggcc

SEQ ID NO: 95744 - DNA, 588 bp, Zea mays
  Clone ID: MRT4577_18832C.1
ctcgagtttttttttttttttttttttttttttttttttttttttttttttttttttttttttttttttttggacaaaccgttaaaaccaaaggatggactgggaaaggtatagctgggggcctgctcaactaccggggaaaggggggaccctataaaaaacaaatctccccttgggttaaaccctttggctaaagcataataaaagcccaacgggtttcccctttaaaatgcatattttggctgctcagaaaaaaactggttttcaagtcctgcttgggacccaaaatgaaaaaacccaaggaaggacttttgtttcaccgttttttgaaccaaagggacagggggaggcaaaaaagacaaaacctttgttaaaaagcccttttttaacagccttttgtttttagcacaaattgggggaatgggggtttaaaccccttggggggaaactagctttacagctcaattggggcaggtgccccaagcgcaacacagtatttatggaaaggaccaggttggattataagggtccccataaaggggcccacaaacactattggtttaaccctcatccttgaaaaacccttta

SEQ ID NO: 95745 - DNA, 398 bp, Zea mays
  Clone ID: MRT4577_18833C.1
gtaagacgaacctattacacctaattaggggatgatgcgctcgtgtgatgctacagtaaacatttgttaattatagattaattaggcttaataaatttatcttatcgtttagtcttcaattgtttaattaattttataattagattatatttaatatatttaatggacattcaaacatttagtgtgacaaactttagtctctggaaccaaacactcccagtcataacctatggtctacaatcttagtccaaacagtgtgattctgtgaatctggaggcaagtattgcgaacggcaattattttatgattgacttgttcctttggcatgggattattagtctgtggagtctggagggaatgcagccagagccggtctgaaaaccggggaccaggtcctg

SEQ ID NO: 95746 - DNA, 389 bp, Zea mays
  Clone ID: MRT4577_18834C.1
gggtgggagggggggataacccaaagctttaagggctaaaaaagcatgtaacttttacgggggcccttagttgctatacatattggactgaatggcacacttaccacgaccccaagggaaacggaaaccaatgtttgaatcagggaagcaacaaattaagcccggaaaagtcgatttacacccttacttaggaagaaaccgagcttgactttgcctggttgggggacaacgctttgattttctccacgtcgtcgtaactttcgaggaaaattggggacccgtcggggatcttggttgggaacaaaacaaaaaccccttttttttctttgaaggactggccccccgcctgctccattaggaaccacatggggaaaactttttacaggaaa

SEQ ID NO: 95747 - DNA, 2596 bp, Zea mays
  Clone ID: MRT4577_18835C.1
gaggctcggccgggacgtccgcgctgctggccaatgcggcccattctacacggcttgaacctaggtagccacgagccctcagccccctcactccgtcacccaccagccgccgctacgtgacgaggtctcccgtgtgacacagactgccgtccttcgcctggcgagtggtgacctgcgacctccgtctccggctgccgtcctctgccatggtccgtggaccgtagtccggcagcagcagggctccagcctctgcccgaccgcttgcccgccaccggcttccggcttccgcccgccaccggcgtctgctacctccgcatccggcctctgggcaccggtctcccgtctctgcccccggcgttcatcgtccggtctccgacaccaggccctcagctacagcagtacagcaccagttcccgcaacagcgaggtcatcgacgccgccatctaggacggctcttaagaatcgatggcatactttgaggctttatacatctcactgggcaccagagcgatggcaggagtatgaaccacttttgaattactgtcgtgataatggaataaagcttgttgcatgtgggactccacttgaggtggtaagaactgtgcaaacagaaggaattagaagcctttcaaaagctcaaagaaagctttatgctccttcagctggctcaggcttcatttctggctttacatccatctcaggccgatcattgatagacaaaatttcatcaacttgtggttccccttttggcccaagctcatatttatcagcacaggcaagagtagtcgatgattataccatgtcccagacaataatgaaagaaattggtaatggagatccttcaggaatgctcgttgttgtaactggtgcgagtcatgtaatgtatgggccacgaggaattggcgttcctgctaggatatctaaaaagatgcaaaagaaaaatcaagttgtgatacttcttgatcctgagaggcaaagtataaggagagaaggtgaaatccctgtagctgatttcttatggtactctgctgccaagccatgcagtcggaattgctttgatcgtgctgaaattgctagagttatgaatgctgctggcaggaggcgtgaagctttacctcaggatcttcagaaaggaatagatcttggtgtagtttctcctgagatattgcagaacttctttgacctcgagaaataccctgtcatggctgaactgattcaccgtttccaaggttttcgtgaaaggttgctagcagaccccaagtttctgaatagattagctattgaagaggccatatcaataactaccactcttctagcacaatatgaaaaacgaaaaggacgtttttttgaagagatcgactatgttctcactgatacaattaggggttctgttgttgacttctttacagtgtggcttcctgcacctacaatttcactcttatcttttgccgacgatgggggctgtgagagtgtggagcttctgaaaggaattttaggatcactgccagataatgcatttcaaaagggtattgttgggcagaactggaacattaaccagaggtttgcatcggtgcttatgggtggtctaaaacttgctggagttggattcatttctagtattggagctggagttgcttcagatgtcttatatggtgcccgtcggacttaaaccttctgcaaatatggaagtggggcgcaaaagatctccgatttggaaatcagcagctgtttatagttgcttccttggaacatcagcaaacctgcgatatcaggtcatagctggtctgattgagcatcggctaggggagaatctgatggcctactatgaccagccacttattgctaacctgttgtcctttgtttcaaggacagttaactcatactggggaacacagcaatggatcgatcttgcacgagttacaggcgtgcaaagaactaacaaagatctgccttctcctgaggtttcgagcgcatctgaaatgccactgctagaatgtggcacggcagaggtacagaatgcggacgacagcagtaaccaatcaaatgacttgacataagttatcgcgcagtggccatacaaaacacagagcagcttccttccatggcacaccgtatactagacaaaccgtacatgcatataaatgggactgtcttcttagagccaggctgtgaagcttagccatcgcgtcatgtggagagacgaatctgaaatcctgaagagtaaagcttttgaagactttcgacttgttatgatcacagccatttttacacaccatcatggggtgaataccgtttgtacattcatagaggagacggccgaagaattctttggagcacgtacagcattttacacgtgaaatttgttcagaaaacattactggagattgtcacatggcaaaaaggatcaggatcgttgcttgtgaattgtgatgcaccttgtatgcaatgcacttgaatccagagtgcacgtgtgattttattgtctaaaaaaaaaaaaaaaaaaaaaaaaaaaaaaaaaaaaaaaactcgaaccgggcgacggcctgatgtttcctgtggtattgcttgggtgtgatcaaactagttcctatgtttc

SEQ ID NO: 95748 - DNA, 227 bp, Zea mays
  Clone ID: MRT4577_18836C.1
acgtatattctgctcattacatcaactttacattccacacaatcacaggtcatactagagctcgtaggattcacgcaagaataaccactgagacaagtactcacaaaaagctcacaactaccgcgatactaaagtcaggatgaacgaaccgctagagcaacttatccaaaacaacgacgaccgtcattacttatggtacattacaagcttacaatctcaacaagacc

SEQ ID NO: 95749 - DNA, 134 bp, Zea mays
  Clone ID: MRT4577_18837C.1
gagcaaaccaagagccaagcggctgcagccagctaataattaagcagccagattaagtgcgacgatgccgtccgttggcgccccacttctacgtctccgggaggttgttgatgggccgtcgcgcgccgacgccc

SEQ ID NO: 95750 - DNA, 283 bp, Zea mays
  Clone ID: MRT4577_18838C.1
caacgaggaactcttgatcaagatgcccaaccctgtgatcagaacctccaaatactgctatgagaaactagagggcaggtcttcataaaagccctttgaacccccttactgccctttgttaggagatagggatattggcccctcactgcagctgccagcacttagtcagtcactctcagccatagcaatttgttcactgtcctgtgtcagagcagtgagctccacccttttctgagagttattacagccagaaagtgtaggctgaagatggttggtttcatgt

SEQ ID NO: 95751 - DNA, 538 bp, Zea mays
  Clone ID: MRT4577_18839C.1
atcttaatattctcatccgaatttagattttagtgacaaatataaaaacaacccaaactgtactgtatccatcttctcgcgggcgaaaaaccccacccgctgcacaaagttcgcagcttctgaagctcccaatccccctccgaaggacgcggccccgtcctcgtgcttatcggaggcggaggcatggagctaggcatcatcccgaaaggtcctacttccatatcaatcctccagcgtcgtgaccgaaagtaccaaactgttgcagaagcggtggcagaagaggtggcaacggtggtgcgaatggaccttgcgcttggttcatatgtgctgcttcttgtgtgggcactgctccaacgtgctgctgcagccgtggtgcttgcacagaaaatggaggacgacgccggtcgcctggggttccacctgggcaaggagctgccgcgcgctgcgtccgccttcatgcacaacctctgctctagaggggctcatctcttcggtaacacctccgccagcagcgtatggtgctaaacttatatcgact

SEQ ID NO: 95752 - DNA, 342 bp, Zea mays
  Clone ID: MRT4577_1883C.1
agccttcctggtagctagacttttacctatgctgagaacatcatctggtacgactctgttcatttcaatggttcacgacccatgactgaagctgctcaaagctccattctggatggtgtacatcattacgagctccaatgttgatgtcagtggcctctctttctcgatcttctccatttttactttaccttatctttcttttttaatgaaccacttcttgtgctcctgatttccttttttttttctttgccattactctttttattccattgttagttatggtctcctaaatttaatcgatcttacaaactttctcttttcttttaaaataattttaaataa

SEQ ID NO: 95753 - DNA, 358 bp, Zea mays
  Clone ID: MRT4577_18840C.1
ttcttctccccagtccctaaatccatttgcttgagctggtatgtgccaccccctgtgctggtgaccacgcctgcagttctcccacctcgccatggctcgtacgtcctaatgagttgctagctcgtatgaagcttgttccgtaatcatctcatgtcagtgaagctcacaccatttactgcttgaactctaccactgtctgttgctaggaactaggtgtaaaattcgctcaaaaataggatgtcggatttttgcatcccagatttagtgcagaaggctgaaactaagttctagtgtgttgagctccactttggtgctacataaaatttgttctggatgttatcaacctatgggtactata

SEQ ID NO: 95754 - DNA, 277 bp, Zea mays
  Clone ID: MRT4577_18841C.1
catcttcttgctcatgttatttctcctgggaatgagcagtttgacttctgttcccacgttcctcattctatcagctctagatggattttgcctgcatagctggcttaatatgtctttgtgtatgggtagtctgtagcctgagaatatttacctaaaaagtctaaacagccaccaagaatgtttataggggtataggaatatagttaacagagtgctaatctctcctcaaatgtccttttggaatgcttcccccaaaattgggtcgttggtaggagct

SEQ ID NO: 95755 - DNA, 237 bp, Zea mays
  Clone ID: MRT4577_18842C.1
tcttcttctcttgcggctagggttttagcgcacttgcttctagatctaaggaagatgggtaaggaacaggttcacatcagtattgtggtcattggccatgtcgactctgggagatccactaccactggtcacctgatttacaagcgtggaggcgttgacaagcgtgttattgcgaggtttgagaaggaagctgctgagatgaacaagaggtctttcaagtatgcctgggtgctggac

SEQ ID NO: 95756 - DNA, 676 bp, Zea mays
  Clone ID: MRT4577_18843C.1
cattggtacctcgagccggccgagctcgtctccgcctgtgctctgctgtctactccgtctcttctgcgtgcgcgccgcgcccatgcacgtcgagcgctccgcgcgtctgctcgccaagatgcgccgcgctcagcctcgacttctgtgtgtccgtcttgtccgggaacgtatctctgctgtacctccccggctccttctgccacgcgtgcgaggtcaccacgccgttcttctgcgccggcttcttctagtgaatgaccgtgaagggtcaggcctgtgttacctaccgcaccctcgagaccgacagaacggcagtcctgatcatccgggtggataagacgatgtttcttctgtattgcagtgatcacgagaatattattttctggagtgaggtggatgtggactacattgacagccactctgctgtcttcttatggttacaaaattaattctatgaatctgctgttgtacgtggctcctctctctggaatgttcttgatacctaggactatctttatgctggatcatgtagaggagagatacatttgaacttgcacgtgatgatgtcacgattgataggttgctgtggttaattcctggttgtacgcatcttgtacatatggacgattacttggtgagcattactactatagcactgactctactcgtactctcttgt

SEQ ID NO: 95757 - DNA, 345 bp, Zea mays
  Clone ID: MRT4577_18844C.1
cggctcgagcagctaatttgagcacattatttaatgatttaccatctcttattgatagatattctgccattttgaaatgttcatataaatttgaatcgatcgaatgccaagcaccttataaacatactttacaagagtggaaacatgctcttgattcgaattcgaaaataaatttgccaaaatgggatctaatcaatagtccagctgtttttgatgtgtttgatcaattgcctagtgagcagcaatacaatcaccttgtcttaaagcctgtaattgattatgcaaccgctttaaatgtgaaaaaagttcatttaatgatgagtgatttaaaataatcagatgata

SEQ ID NO: 95758 - DNA, 343 bp, Zea mays
  Clone ID: MRT4577_18845C.1
agagggaggctgcccattattaaccctccctccccacacgcagaatacgacgaccggaagcaaaacagccagccaaccaaccaaccagaccagggatggatggtgcgcaaccgagccaatgatctgcaagaagagaggtaggatttaggcacggcacctatagcccctgacgagagagagggagagagatttggtcttggataagagtggagagactggagacgggtgggtggagtgagagaagtcacttggggagcctccagattctgaatcttccgcaacccgtctcatcgccggagtggagttccaggcgagtgattatcgagccagtaagccatttgca

SEQ ID NO: 95759 - DNA, 1414 bp, Zea mays
  Clone ID: MRT4577_18846C.1
agagggaggctgcccattattaaccctccctccccacacgcagaagacgacgaccggaagcaaaacagccagccaaccaaccaaccagaccagggatggatggtgcgcaaccgagccaatgatctgtaccggtccggaattcccgggtcgacccacgcgtccgttagccagcttaccaaccaaccagaccagggatggatggtgcgcaccaagaaagggggcaccgcaccgagccaatgatctggaagaagagaggtaggatttaggcacggcacctatagcccctgacgagagagagagggagagagatttggtcttggataagagtggagagactggagacgggtgggtggagtgagagaagtcactcggggagcctccagattctgaatctcccgcaacccgtctcatcgccggagtggagttccaggcgagtgattatcgagccagtaagccatttgcaagcactgaactgaaccctcagagcgttgttgcgatggaccaaatcgctacccccgacgaaacagcacatgcctctgcaccttcagttcataagctgtttgatgctaaattaggccaccatagcgtgatggatggcaccttggcatccacgagtcagtcatcaaacatcaagacccagctgatccggtcatcaagcttgtcaaggagcatatcagttaaccttgagaagaggagccctgaatctgatcctgaaagcccacagtctcacgtctcgcatcctaaatttgcagaacccatgttctcgaattcttcgacgttctgcacaagcttgttttcgtcatcttcgacacagagccatgccgtcaaatgggcactttacctttcctgcctcacccccctaagtgtgagcagcaggtttcagctggtcactcatcgagctcctctctgcttttaagtggtgataccggtttagatgtggctgaacagtcagatgatctgaacgacttgctcaatctttcgggagatgcttctgatggcagcttccatggagaaaacaatgccttagcttttgacgaacagatggaatttcagttcctgtctgagcagctagaaattgccatcactgacaatgagaagaatcctcatttagatgacatatacggcacaccaccacagctgtcatcacttccagtatcatcttgctccaatcagaatctagggtcaccagttaaagtccagcttagctcatctcagtcatcttctagctctgcaacagctaacaagtcaagattgaggtggacacttgagcttcatgagcgttttgtggaggccgtgaaaaagcttgaaggtcctgaaaaagcaactcccaaaggtgtgctgaaactaatgaaggtagaaggtctaacaatttatcatgtgaagagccatctgcagaagtatcggcttgcaaaat

SEQ ID NO: 95760 - DNA, 192 bp, Zea mays
  Clone ID: MRT4577_18847C.1
acatgaatgattacacatctgagtagtctatgcaccaaatctaattagctggacgtattcatggacatagatgaccactaggctgaaacttgtggccgttacaattaccgcccaaatacgagcccgaagcattaaagggtaaagccggtggggcttatgggtaaacctaattacatttaatggggttgattc

SEQ ID NO: 95761 - DNA, 370 bp, Zea mays
  Clone ID: MRT4577_18848C.1
ggggacaagggtttgcttcatgggtaaatcccccaagagataaaccaaagggttttgggtatggcctcaaaatcgccctttttggtggttgggggaaaaaagaatggttacggggcagtacaatttgcttggtgtctaccctgggggaattacctccttgccatcggggggaggggggtaaacgttgaatgcaagctcattcttttgacaaattgtcccccggggggggtaattttctaataccagggcctccggggggggctttcgatgacccccaatgctttttgccccggtgatgtgaccctttaagggggggccttttgggcgaaagtttggatgtttttcttgggctttttgttgcccttgggga

SEQ ID NO: 95762 - DNA, 599 bp, Zea mays
  Clone ID: MRT4577_18849C.1
ggtaccctcgggtctcggccgggctccgacacaccgagtgcgagccatgcagcactcgcagcagaaataagacgaagtcgtagacgctgcacgatgaagagagagcatcacgatgatatggcatgcatacctaaatacaccacctgctgtgcgacatcaacagctatcatttcatacccggctccatcaaagacacactattgaagaggcatgactacactccatgatcttactggatataagccttaggagacctctgagatgaaaaggactttgactaacatggtaactgttgaactacctggactttgtgtttgaggtaccatttgcatgactatccatggacaacctggagagcccatccaagaaaagatgggcgcctggaggcaattatatcatgaacacttgattggccttgattatcggtatatatgatgagccaatgactacaagctattgcaatatggagctggacaggatcctttattaccatgatcaccagcactcctatgactgtcataatgctatcatgatcattgaacactcacctatgcacctgatttgttattgcaatatggtggctagagcttgtacttgaa

SEQ ID NO: 95763 - DNA, 193 bp, Zea mays
  Clone ID: MRT4577_1884C.1
tcgtgccccgtgctcggtaaaaaaagaaaatcctcgtgcaaacggattccaacagcatcgccttcgacctcgccattgcatctcgctcggcatcgcctctccgtcgctcggcatcttcgcctagcgctcggaactcaccgtctcccggccgacgcgctctcccaacctcataagccttcccgatctagtttcc

SEQ ID NO: 95764 - DNA, 284 bp, Zea mays
  Clone ID: MRT4577_18850C.1
agcagctgattacagatggaacttgctctactggtcaagcgcactaccaacggataacgtcggatcatagaatcgtatgatacccgacttcatagggagcgtccttaccactatatttactcacatcgcgatgcacaaccaatcaccggatctccagcgcgtcaaatcgcgatgacctgcgtgtgtcctataactagccggacatctttgataaagccatgtgtagaaataatgcaactaaaatactgtgacatacaaatcaaactagaaatcagggccgtcga

SEQ ID NO: 95765 - DNA, 369 bp, Zea mays
  Clone ID: MRT4577_18851C.1
agattgtcgtgatgattatggagataactcaattggaatctagggagagaatcagaaataacactagaagttacaacactgtattttaaagatgccaagtggtagggctattttagcatgtaagttttattgatccttgctcctttctttgtctttgttttactacaattacaataggtattgacactgtaccattccatttattcgttgctgattgctgatgttatctgcgaatatcattttgtttgtttttcattaacagtttagcatgcttagtttactggtagagttgtgagtgagcttccatgctacgccagagccaccactgaccctgctatgtagaagcggggtacaggtggtgataaatca

SEQ ID NO: 95766 - DNA, 421 bp, Zea mays
  Clone ID: MRT4577_18852C.1
gtatggttgaccctggctcaaacaaagtgatggggaagttcgagcttgttggggcactgtgcacacatcatcagctgcatgcaaggccgacactggagcaggcgctgaagatacttgtggctgactcagtaccaagtcctttgaatattcccgagaggccactgcctgatgctgcaaacctgggcgagaacgagagggcagacagcaacagtggatcaggtcagctgtttagcccctctggtttccgaccttatattcatgcatatgaggatgctgatctggtgggtgcaaaggacacatgacgatatacttagacaattccagagatgatatcactataattcactgtgtaccatactgggttttgcttgctcgattttgatacatcggcttacaaactcacggcaaatattgcatatat

SEQ ID NO: 95767 - DNA, 2887 bp, Zea mays
  Clone ID: MRT4577_18854C.1
ccacgcgtccgctgccaataagctgtccaggcttaaggagcaagccgaagagtatgccgccctgattatggaggagcttgatcctgaaggacttggctacattgagttgtggcagttggagacccttctgttgcagaaggatacctacatgaactacagtcaggcgctaagttacacaagccaagcactaagtcagaacctagcaggcttaagggggctgagtccaattcgcaagataagtaccacattgagttactatttggaggataattggaaacgcctatgggtgcccttgagctacacaagccaagcactaagccagaaccttgctggtctaaggaaaagaagtccaatccgaaaaattagcagcacattgaactactatctggaggacaactggaaacgtgtttgggtgcttgcagtatggattggaataatggctggattgtttatttggaagttcattcagtaccgtaaccgttatgtctttgatgtgatgggctactgtgtcacaactgcgaaaggtgctgcagagactctcaaactgaacatggcacttattctcttgcctgtatgccgcaacactatcacctggctgcggaatacgaaagctgcacgggcattgccgtttgatgacaacattaacttccacaagactattgcagcagcaattgtggttggtgttgtccttcatgcagggaaccaccttgtatgtgattttccacggctcattagttcatcagaggtgaagtatgctccgctgcgccaaatcctttggggaaaataaaccaacatatctggactggtaaaagtcaatgccttctggtactctcatcatttattcataattgtgtatttggctctcattgttcatggccagttcctttacctcattcatgtctggtaccgaaaaacgacatggatgtatctggcagtgcctgtttgcctgtatgtaggggagagggtgctgaggttcttcaggtctggcagttattctgtcaggctattgaaggtggccatatatcctggtaatgtgttgacactgcaaatgtccaagcctccggctttccgatacaagagtgggcaatatatgtttgttcaatgtccagcagtgtcaccctttgaatggcatccgttctcaattacttcagcgcctggggatgattatctaagcattcatgttcgacaacttggtgactggacacgagagctcaagagggtttttgcagcagcttgtgaacccccagtgggcggtaaaagtggccttcttagagcagacgagacaaccaagaaagccttaccaaaacttctgattgatggaccttatggttctcctgctcaggattacagcaagtatgatgttcttctacttgttggattagggattggtgcaactccttttatcagcatactgaaagatcttcttaacaatattataaaaatggaggaagaggaagaagcttccactgatctttatcctccagttggtccgaacaagccgcacattgatctcagcacacttatgacggtcacatcaagaccaaagagggttctaaggaccacaaacgcttacttctattgggttacacgtgagcaaggttcttttgattggttcaagggagtcatgaatgaaattgctgaactggaccaaaggaatattattgagatgcacaactaccttacgagtgtttatgaggaaggagatgctcggtcagcgctcatcaccatgcttcaagctttgaaccatgcaaagaatggcgttgacattgtctctggaactaaagtccggacacactttgcaagaccaaattggaaaaaagtcctatctaaaattgcctcgaagcatccatttgctaagataggtgtattctactgtggagctccagttcttgcacaagaactaaacaaactgtgccatgaattcaatgggaaaagcacaacgaaatttgagttccacaaggaacatttctgaattccagtaatacttggtgcgcagaaatgatatattatgtgtgtgtacagcatttttgtcttggtatgttcatctggagttctggacgaacatgagagcaaagtggagaagctaccatcaaatgcttaacagctgacggcctgcactctttgttaactgctcctaaatgaaccagaccaccaagaagtgggatttttgtgtacatatacatgtgatgtccaaacgtccatctgcagattggacccctcaactgtgaagagattcctcccaggtggtcaccaatgtacagagcacacatgaagataaagagtagttgggattgtcggtagcatgctattcgtataggacaggagggataccactagtcacaacacacaaggctatttaattgtatattttcatgcagctgatgccctgcactttctgctgctggccaatgcggcaaggacagaagcattttttctcatttgtaccgcatacagaaaaggcataacaaaaaagaggtgaaagggagaatagcattttagcacacttatgggtcccacgatttacatgaccctgcggtgggctgagcctacgccacaagtttgatctaactttgtactttcacttcagggttgaaaaacaggaagaaggtacattttgtttttgtaagtagcgtaggttggtagtgactgggctcagattgggggccctcaagtttcattaaagcttgttccgttgcctcgttgagtggtaggttgcattttttttaggacagatctggctgattcaagtatatctttactgaaggccatgtttttttttaaaaaggggggaaattttgaaaaattccaaaacgcaaggggggggtgtttaaaatttttttagggggccccatccccccctattggggggggtttaaaaattaggggg

SEQ ID NO: 95768 - DNA, 368 bp, Zea mays
  Clone ID: MRT4577_18855C.1
gccgctgcacacccacctcgctcgcaatccggagcccattgacgagggcctcatattcagcgacattgatggcggaatcaaagtggaggaagatggcgtacggagtttgtgcccttaaggcgacatgaggacgacacccgtgccgcttctggtcttgaggtaggatccgttgaagtacatgatccggtactctgggtccttgattgtgggtggctcctgcgcttcgatccattctgcgatgaagtcggtaagagcctaggatttggtcacagttctagggatgtagttgatgtcgagcccactgaggctgaggggccattttgtcatgcgactggacgcatcccgattattgacgatttcaccaaggg

SEQ ID NO: 95769 - DNA, 264 bp, Zea mays
  Clone ID: MRT4577_18856C.1
attggccccaatgtgccatcacagcttgccatcgacctgaacgctcaaggtctggctcgctatgccataatctgccaggagaatggtctggcgccaatcgttgagcctgatatccttgttgatggccctcatgacattgatcgctgcgcttacgtgactgagacgcgtcttgctgtctgctacaaggcgctcaacgagcaccatgtactcctggagggtaccctcctgatgaccaacatggtgactccaggctccgactgcaag

SEQ ID NO: 95770 - DNA, 616 bp, Zea mays
  Clone ID: MRT4577_18857C.1
ccggccgggaacttagttcaccatcgacggcgaccggtggccaggacttctacgacatctcgccgatcgacggctacaacctgcccatgctccttcctctgcgcgataccgacgtgtatcctcacctgcggtgccccctcagatgtccacacgtctacctgtgtcccaccgacaacaccaatacccatgcctgcaacgcataacagcctctaccacgccaccttctgcccgcgagatctctcgcgtcaggcacgaggcagagtggccgcacgacgatgccatatgcaaaggatgctccagtcatcttctttctttgcatataataagcatgacgtgtggcctatgacggtattagcgtggaaagtagaagaagagacaatccaataagacgatgatgttctccccatagattatgaagcttccaagagcatgatctatatatatgcgcttgcatacctataggatgtgtatgtgactgacaactttccgcctatgcatgtaccactgaaagagaagctctaacttgacgagcgtggacgagactcgatgtctgtcagaatgtctgaaagcttagaacgcctcacgtctcccgcttacgagctgtctcgcgactcac

SEQ ID NO: 95771 - DNA, 461 bp, Zea mays
  unsure (1)..(461): unsure at all n locations
  Clone ID: MRT4577_18858C.1
cggccggccttttttttttttttttttttttttttttttttttttgttttttttnncntttttttttttttttggttgttttacagcacacaagaacgggaattaaataaacaaactgcaaaaactttaaaatacaacatccattttacgtattttatttgtctacaggatgccctcaggggggtttcaaatgtaaaaaccacatttcgtttgagcaaattagtttacaaagtgataaaaccaaaacattttgttggagcaaattagtttacagagtgttaaaaccaaaacaagcttaaggctggcttcttataagggaggctggttttgttgtttgaaacacttaatttttaacagacaattttctccaccttttccaaaaaatcctttatctttgatgggcttaaaactttaaactcacggccaggttaaataattcccatttcaatgttgttggaaga

SEQ ID NO: 95772 - DNA, 203 bp, Zea mays
  Clone ID: MRT4577_18859C.1
acacagacgttctagtaacacatctacagtgttcgcgtctgtgggggttacagcaaggctagtgtcatggcaggttgactgaatctgttacctatattttcgcggttcatgtctttaaaatgacagatcatgttgtctacgtgcttacgtgaagttccgactcaattccactaaattcaactggcacagtccccagttttttg

SEQ ID NO: 95773 - DNA, 463 bp, Zea mays
  Clone ID: MRT4577_1885C.1
ggggcccaaatgatttacttggatataaaacattgcataaaccctggaaaactgtttttaaaagtttttaaacccgggttgatggacagaaacatttgaaagggttttcaaaaaaacccatttcgggggcccaatgcttatgggtttttccacgttaaactacaggggcaagctcaacaggggataatctacctgattcggtggggggcttttttggccaaaaacttttccctggccttggtcttggcctgggatttggaccccatgatgccacctccccacttttttctgactttataaaacttggaattgaagttccctttaatagcctccaaaattttggtgaactcaagcttgccctattttttgacaggggccaaacacaaaactgttgccgtttttttgggaacaaacaatccaaggggagcctttcttttaaaaatgcagtatgggacctccattt

SEQ ID NO: 95774 - DNA, 534 bp, Zea mays
  Clone ID: MRT4577_18860C.1
tggcggcgctcaggcggcggtccgaaagtcgccccgccaaaccctcggcatcgtcatggccgtcactaccaagatctcctcctcccgccgaaagtcgcacaaggcacacttcggtgcgccatcatctgtgcgccgcaagatcatgtccgcatccctggctaaggatctgcgctccaaacacagcgtacgggcgattcccatccgcaaggacgatgaggttcgcattgttcggggcaagtacaagggtcgggagggcaaggtcacccaagtctaccgtaagaagtgggtgatccatgttgagcgtgttgcgcgggacaagtcgaatggcgcgtctgctcccatcggtattcaccccagcaacgttgtcatcaccactcttaagctggacaaggaccgccgtgctatcctcgagcgcaagggccggaagcctgcagaggagaccgtggattaaactgcttgcattctttcctgttctgctcgttcattgccggagcgctctgtattccatgtttcatgcatcttttacctcgtgct

SEQ ID NO: 95775 - DNA, 254 bp, Zea mays
  Clone ID: MRT4577_18861C.1
gcggccgggggttcgtttttttttttctgggcgggtcgccgatacctactcactttttttgggtcatggcggggggaaccggcaccgaagggtcccgggaagcgaaaataaccttgggaggggccggcccccccaggttaaaagtggcccgaggaaccggcacaagggtgccggccccaattaggggggggctttcttaaaagaggggcccttgttcccaaagggggggggggggggggacgggaaaaagcaaa

SEQ ID NO: 95776 - DNA, 265 bp, Zea mays
  Clone ID: MRT4577_18862C.1
gcaaagcaaagcaaaacaaaacaaagcagatcaaaaggacttccggcggagcagaggttcgtgacgatgcttacaggggcgtgtgtccaggccctgctgttggtcaccatctgtgcaggaggacacggagcgcgaggcccaggcggagcacgacgaacctggctgcggcggcccaccgcgtggcgacggtgttgttgcctgttgcctttcggcactcgtcacacgagggttcagatctcaagagtggctccgcactgcgcaagtg

SEQ ID NO: 95777 - DNA, 325 bp, Zea mays
  Clone ID: MRT4577_18863C.1
tttggcgtaactgaatgaaccatattcccggaactcataacgttatgggttagggcgaacgctccctagctcacatctccatggcattattaacattccacctctacacgctggcggacggtgaactattatgccattctaaagcaatgtgactatgacatcaaccagactataatgcactaaagctattacttgccctttttggaacgttcgctgaaactcacactatctcaacttgtacattagagactcccattaagcccattcctttaatatctaacccgaacaaaagatctacttgcaccattttaattgtacgcttgat

SEQ ID NO: 95778 - DNA, 335 bp, Zea mays
  Clone ID: MRT4577_18864C.1
ccctctcttgatctttcgcttccgcggttaagagctgatcgctatggcatctattgcacgaggaagcggagggggtgccttctatcacaaaaagcgatgctacctaaacggtatatgcaccaccaggcattgcgtatagcttttctacagtatttgaagcgactgaatactactaatgaatccggctccgattgtaccgcccatttagagggctatacgacttggaccggcaggttcgttccatcacttcctttggcagtaataagtatctattagaacttactgatgggggtagagtggtcgcacaacggatcctgctttctcaccaggtagga

SEQ ID NO: 95779 - DNA, 345 bp, Zea mays
  Clone ID: MRT4577_18865C.1
gacgggggtttttttttttttttttttttttttggttttttttttttttttttttttgaagcaaagctttttttaaccttttgtctttttcacaggaaagggaaaccagaaccatcggttaaaaccggagcaaggggaaaccaaaatctccggggggggggggaaaaacccttttgtcaaatttcacccaagccctagaatgatacacgggccatgattcccacacctagtgcaaggtgccttgaaggatttgatccccaacccaaacaaggggccccgaaaccaccttttacacagccgaaaaacttggcaccccatccatgcttcgaactggggaaatgacga

SEQ ID NO: 95780 - DNA, 244 bp, Zea mays
  Clone ID: MRT4577_18866C.1
ttttttttttttttttttttttttttttttttttttttttttttttttttttttttttttaggagcaacagcagctagaaaaacattaacttttgcatgcaacttattggtggattacacaacacaacaaattaaccttagttgcccccccttgccgttccttgaacaacatcacctgcagtttttgttggacatgcccccccacacccagggttatacattacacaaggaacacggggaactg

SEQ ID NO: 95781 - DNA, 435 bp, Zea mays
  unsure (1)..(435): unsure at all n locations
  Clone ID: MRT4577_18867C.1
atcacctaaaaattatccgtttcatccagcaatgttctgttgtgtacttctgtcatgggcactattaactgtgccactntacttttacatctggagaatatgactaagaaacgatttttacttgaattttgacttgtagatacctttttttctgtattgtacccgcaatcttttctgctatacatccagttgatgttctgtacctgtatataccttgtccacctaaaacttgtgtgatatttcttttaggaaattgatatatatgataagttgtttaatgctttagagaaatgcacttgaaaaccatagttgtcatatattacaggttatcgacttaaaacatattgtccctttttttgtcacctctaatttgagtacagctggagtattgggcataaatatcgtagcttaaattgaacactaaaagtcaaatac

SEQ ID NO: 95782 - DNA, 754 bp, Zea mays
  Clone ID: MRT4577_18868C.1
aacatgcccgtgcccgcgcgcgacacccgaggccaagaaccggacagcgtcccacgatggggagcccgcgctcgctccctgtgctcctcctcctcctctgctgcctctcatggcagcagccgtggctcctcaacgccctccctctctgcaccgactccagggcgccggcgccgctgaacgggacgctgggcttctgctcctacagcgggagcagctgctgcgatgtcgccgccgacgccgcgctcaagaagctgttcgaggccatgagggtatccgacgccgcctgcgctgccgtcgtcaagtcgctcctctgcgcgaaatgcagtccattttcagctgaattgttcaactcaagctcaaagattcggatggttccacttctgtgcaactatacctcttccagaggttctgctcagtcaaaagattccactcaagattactgcaaactagtctgggagacctgcaaaaatgtgacaatatcgaactcccccttccaaccttccttgcaaggaagtggaagactgcctagttccgcgtcaaagctcaccgatgtctggcagtcagaaaatgacttctgtacatcatttggtggctcatccgatgacaactcggtatgcttcagtggaaatgcagtttcatttaacaccaccaagccatcaccctcccctaaaggggtatgtcttgagagaattggcaatgggtccgacctgaacatggcccctccacctgatggatcaaaagagatttcttgtct

SEQ ID NO: 95783 - DNA, 564 bp, Zea mays
  Clone ID: MRT4577_18869C.1
tctctctcttcgcagacacaaccaaaagaccaagggggaaaaatagtaaagaaacggagcgaggctcctccgatttcttatctatcctgatccaaaccctccgagggggaaacaattcattccgcacggcatccgggaaggtctgcgtcgtcgccatggccaccgaggaagtcgccaagccgtccccgatcccgccctaccccgagatgatcctggcggcgatcgaggacctaggcgacaagagcgggtcgaacaagtcggccatctccaggcacatcgagggcaagtacgacggcgacctgccgcccgcgcacgcgtcgctgctggccgcgcacctggcgcgcatgaaggagtcgggcgagctggtcttcgtcaagaacaactacttccgcgccgacgcgcccgacgcgccgccgaagcgcgggcgcgggcggcccccgaaggcgcgggaccccggcacgccggtgtcgccgccatcggggcgcgggcgcgggcgcccgcccaagcccaaggacccgctggacgccgccgtgaagcaggccaccgcgggcatgcccagggccc

SEQ ID NO: 95784 - DNA, 1720 bp, Zea mays
  Clone ID: MRT4577_1886C.1
tgtgccgttagttggtccggccattgtaattgctacgggcacacagcgaaacgcccggcctttgttactcaaagtcgagaagcgccgtcttccccctttccaacctcaagtctacagtctacaccgaatccatcccccatcgccgccgccgccgccgccgacgacgacgatggcaagcctactccggcgatctgccgtacccgcgcgccagctcctcctcctcccgcgccatttcgccgccgccggctccgcccccgccttgtcccgctcgttctcccgcttcaacccccgagacgacagctctatgttcgatccaccggagccgccggtgaactggggcgtgagcatagttccggagaagaaggcttacgttgtggagagattcgggaagtatctcaagaccctcggctccgggttccacctcctgatccccgccgtcgaccgtattgcctacgtgcactcgctcaaggaagagaccatccctatccctcaccagaacgccatcaccaaggacaacgtcaccatacagattgacagcgtcatctatgtcaagatcatggacccctaccttgcttcctatggtgtggagaatccaatctatgctgtcctacaacttgcacaaacaaccatgagaagtgaactcgggaagataaccttagataagacttttgaggagagagatgcattaaatgagaaaattgtgagtgccatcaatgaagcagccacagattggggcctgaagtgtatccgctatgagatcagggacataaatcctccagcagggattaggcaggctatggagatgcaggctgaggcagaaaggaaaaaacgcgctcaaatccttgagtcagaagggatgaaacaggcccaaatccttgaatcagaagggaaaaagactgcccagatccttgaatctgaaggagctatgttggatctagcaaaccgtgccaagggtgcggctgaagcaattcttgccaagtcagaagctactgctcgtggaatgagattggtttcagatgcgatgacaactgaaggcagtgccaaggctgctagcctgaaacttgcagagcaatacatcgaagcattctcaaatctggcacaaaagacaaatacaatgcttcttccaggtgatagtgccagcccagcatctttcgtggcccaggcaatgaagacgtatgagcaaatccattcccacagccaggcattaaagagccacccccagatagaagagctgaaggaatcaggagagaccagtcctgctccatcttctgaggcgagcaagacaccaccactcattgaggaagcagattctaaccagaccttctcactgcaacgccccaagaacaagcagtgagcttcgctcaagtgtttgaagtccttttttctatctgttgttctgaaacatgagtgccactgagaaacaccactagtaggttttagttttctttagtctgagagagctgatatgtggcggagaagggatagacccctaggcatttggtttctgggagctaaatgcgaccggagagacctagagagattttgattctcgtgaaggttatactttggttccttgttggaatgaagtttgtaaaaaggcaaggttgggttaacgttggttagacaaaatgcataaatgcttaagttatttctttcttgctgagcttgactaaaaaaaaaaaaaaaaaaaaaaaatttttccaaggatttatttctgttt

SEQ ID NO: 95785 - DNA, 157 bp, Zea mays
  unsure (1)..(157): unsure at all n locations
  Clone ID: MRT4577_18870C.1
gttcacggtcttctgcgtgcaagcgtagcattcattggcccagagttaatggcggccatccttggcncgccgctctggcatcagnctttacccttcgtaagtgtgctgtcaaagacctcaaaagctggcgggagacctgcctcgaccgcgttgaccc

SEQ ID NO: 95786 - DNA, 451 bp, Zea mays
  Clone ID: MRT4577_18871C.1
gttcattccagcctctcatatgagcaggtactaacacaacaccaactttggggcaacaaaaccaaggcgcggggcgggaggcctcgaccggcacaccgggccaaacaggcgggggggaaaggggccgccacaactgcggaggaagaaaagcagagggctgagacggataaggccacgcaccaaacaagcccaaaaaaaaatcgggggccatacaatgatacaacaaggcagataagcgggctgacacggagaaattcggagcaacacatggaaaaaggagcattctcttctattagggcctcaccccacgggccaaggctggaaaaaatagcacgggaaatcatctggcaagaaaagatggcacagacagatgggcggtagacagatattgcatatggaggtgccacatctcaattcctcgagaaagttcttgggcacaacaacacaacaa

SEQ ID NO: 95787 - DNA, 603 bp, Zea mays
  Clone ID: MRT4577_18872C.1
ctttttctttcttgttccggtgctgttcttggcgcggattcgtccttgggctggagaggtagctgggttcgggggatgctgccgcgctccatgcgtgctgcatggcggtttctttcgtttccgtttgactaaaaatatatataaaaaagagaattttctctgtggtgggaaacaattcattccgcacggcatccgggaaggtctgcgtcgtcgccatggccaccgaggaagtcgccaagccgtccccgatcccgccctaccccgagtgagctaaccgacggcgcgtcgtgttggttgggcgttccggcagatgatcctggcggcgatcgaggacttaggcgacaagagcgggtcgaacaagtcggccatctccaggtacatcgagggcaagtacgacggcgacctgccgcccgcgcacgcgtcgctgctggccgcgcacctggcgcgcatgaaggagtcgggcgagctggtcttcgtcaagaacaactacttccgcgtcgacgcgcccgacgcgccgccgaagcgcgggcgcgggcggcccccgaaggcgcgggaccccggcgcgccggtgtcgccgccatcggggcgcgggcgcgggcctgt

SEQ ID NO: 95788 - DNA, 429 bp, Zea mays
  Clone ID: MRT4577_18873C.1
gcgcctcaggggaggcatgcagatcttcgtgtagattctgaccgagcaagactatcacccgggagggggtgtctgcagacacgagctacaacttcaaggccaatatccaggacatggagggcattcccccataccagtagtgtatgattttttctgaaatgaatcttgaggactttcttacgctttcctttattcattattcagttggttatcatcatttatttggttttaagttttatagttatgcattcttattttatgtaaaactcttatttgttatttgttttattttttcttatatcttatttttttgtggttgtttttattttttatttttattttatattatatacgtttattagtttattgttaatatctacatcttattttttatttttattttttctttttctactttttttttattat

SEQ ID NO: 95789 - DNA, 227 bp, Zea mays
  unsure (1)..(227): unsure at all n locations
  Clone ID: MRT4577_18874C.1
gtggttggggtttggggggnagggggttggggggttgggggagggggaaacacccacggttaacatttatcatttatttggaagacaactgggatacaatttctatttgtggaggggggtaatttacaattggttggaccaaatttgggaagaacacaaagggttaagacaaacccccccacacaccaaatttttccgaaaaaaaaatattaaagaggttataaagg

SEQ ID NO: 95790 - DNA, 1979 bp, Zea mays
  Clone ID: MRT4577_18875C.1
tagcaaataatcagcctttcttctgtatattctcagggacttgtggtacaggatctctctacagcctctgaggagcaaaagcagcagatcggagctccagagcttgaagcctggaagcggtggaacttctggcacaagggacactttaaggaaagatgaccggtgtcgaagctgccgccatatcttctgtagcatctggaatattaaagattgtggccaacaagttggcaccactggttacaagaaagtatagctcaatagtgggtgtggaaaaagatctccaagagcttcaggtcctagtagaggatataaactattggctagaaagcgccggatatcaagctttagacgatgatgcatcagttagttggttcaagcagttgaaagatgttgcttatgctgttgatgatgttgtcgatgagtaccagctgaaggccgagagaaacgatgcttctggtgatggtgatttcgtgtccagatatatgtgtaaaaaaccagaatcgtttatatttcagtgtaaggcagcaaagaagatcaaggcaatcaagaagagatttgctgcaatcgtgaagcaaagagctgacatcaatataatagctagggtctggatgcgagtggaagctgctgcaactgcctgcagaccaatgcctggggtcctcttcctactccaacttcggccacctgaagacccttcggctgtggggggtgacagagctagggtctggatgtgggtggaagctgctgctacacatgccagaggggttgcggagcctcatatccctccagtcactgactgtgtccgcgtgctcagctcttgtagtgctgcgcgtgtccctgccgaagcttcacatccatatctgtcatggcctgagcagccttccccagtcaatgcggcagttcgcatccctccaggtgcttgccatagatgcatgctacggactccaccggctgcctgaatgcctaggggagctctgctctctacgccagctcagaatcagcgattgcccgaggctggcttgccttccccaatccatgtccggcctcacctcccttcaacaactccagatcatcgagtgccagggcctcgcgtccttaccgagggggatgatgagcagcctcgcctcccttgaaaacctggtcgtcgatggctgcccggggatcaaatccttgcctcaagacacaaagggtctcaccactctgatggggttgcggatccgtaggtgccctgatctggagaggcgttgtgaggcaggacagggggaggactggcacctcatctcccacatccctactttgatgattgggttatcagtggcctgcatcatctggtaccttaaccaagggtaaaacaaacaaaggagcggggaaataccttgctctaatgctgggagaagggggagggattcaacaaaaaaatcccggatttcagccgacgagctgggcgacagagaaggaagaagagaagagggagccgcatgcggctctttatgcatgacatagctgccatgttatccgattgaagcttcctttcaaccatgtccgtgctgagctgcccggccccgggcatggtgcagtggttcgacgaggccaccaagattgaggtcaaggacctcgtcaaccgctatcctcgtcgtcgaccccaggcaccacgagcacaagaagtttgggcggctgtggtgcacggccaggttccagaagtcctaccgttgagtgatggcctgccgaattttgcgaaagatggctgtgcttgttggtggtttcgttttctgtccatggagctgcttacttagctggctggctgttgctttaccttaatgttcagttatgaagactagtaattagtctctggagtatgttttgctgttataggttatagttgcgactggaatggctcctctgctctaattcatatttgataggcctaatacattgttgggaaagaaagatacaaaaagtcagtatcagctgcttacttatct

SEQ ID NO: 95791 - DNA, 702 bp, Zea mays
  Clone ID: MRT4577_18876C.1
gccggccgggccgggatgcaccgctgccgagggtcaagctcacggctcctccggatatccctccccgcctctccactgcacatatccgccatggccccagcatcagcactgtcttcagcactacgttgactacacatcgcttcggctacactgaaagctatcggcgcagctctacaacgctctctaacctcgcccttcaaaggcgacaatggctccaacacatacttcaaggatatcatgtttgccgtcttccgggccaacatgggcaaccttgacctcgtccatgaccgttacttgaacggaggctctacaaccacaaactatgtcaagtatgctgagcagcacaagttcgcgccagacagcataaccctgccaagtggcacacaggcgcattggttgggaaaaagcaatgcatccaaggtcttggtatacttccatggtgggtcaaagtggcggctatgttctccctgctggacctggccatatactctggctcgacgacttccaaaaatctctcggtcccgatgagtctgcattgcttctcgcatacgacgtcgcgcccgaggctaaataccctactcagctcaagcaagccatcgagcttctcaaccatctagtatacaccggaaggccgcaggtccctctgatctcatactggctgccgactccgcttggcgcaatcttatcctcggagccctcccc

SEQ ID NO: 95792 - DNA, 611 bp, Zea mays
  Clone ID: MRT4577_18877C.1
cctcgaggccggccgggccgggagatcccaccatcacccatctagattcccgcaccgtccctccctccacgccgctgcatcctcctcccgacctcgacgatgtcgccaatgctgggtcgtgttcgcgcgcgccatcgcctccacgtcccgtcgccagcagcagcgttgctcaccggcgagtgcctcattgtcttccacttcgcggcccatgtggcgctcgcggcctcggcacacctcgctgcgtcacttttgattctcgtggcggccggccgaccgccctcgtcgtcgagctctcctaggacggctctggctttgcgccgcttcgtcgcttcggggccaggaacatctatggttgtctagagttggcagtggccttttcattcatggttgcctgcactcatcctcggagggttgcagcaatgtcggtctccaggtgtgtggcagaggagatggatgctactattagggaaaacgtgtgtagcggtcatgttaattttaggtatatttttagcagcaacatgttatacaatgtataagttctagcaagtaccactgcaaatgaagattctttttaattccaaaaaaaaaaaaaaaaaagggccctaggggcc

SEQ ID NO: 95793 - DNA, 701 bp, Zea mays
  Clone ID: MRT4577_18878C.1
accgccctcgtcgtcgagctctcctaggacggctctggctttgcgccgcttcgtcgcttcggggccaggtagaaagtgatttaaatctgagaagagctctctgctagaaagtgatttaaatctgaaaagaagtaagagctctctgctttcctcttctatcaagctattttttctattttcggtaattgactgcacaagctgttgtgggagcaaactcaaatatattttaacagctctttgcttcactcacggtgcaagtcagggcatagctcctgcaaactattctatctcagcaccattttttttcttatatacaacttgtgtttagtaacttgtattctgcggtggtttttgacaatcgaagttttccctggtaaaagtgcatttcctgtagtttgagttggttaaacttattcctaataattgtttttttcttattaatgattgttttttcttgccaggaacatctatggttgtctagagttggcagtggccttttcattcatggttgcctgcactcatcctcggagggttgcagcaatgtcggtctccaggtgtgtggcagaggagatggatgctactattagggaaaacgtgtgtagcggtcatgttaattttaggtatatttttagcagcaacatgttatacaatgtataagttctagcaagtaccactgcaaatgaagattctttttaattccg

SEQ ID NO: 95794 - DNA, 271 bp, Zea mays
  Clone ID: MRT4577_18879C.1
attcattccgcacgcttaaaaacatccaaaagcatgactacggcggccatggataggcactggcgccgccttcaagctactccgccgccgctaggcgccgtgcagtactacagagagctaatccactccctagacaccccggtgcaagctgctccgatcatggtggacaccgagccgggccaagccatggctatcgtcggcgccagcagaagcaagtgctaccacctcatcacgccggcgcaggcggcctactactaccgcgtcgtaggcg

SEQ ID NO: 95795 - DNA, 540 bp, Zea mays
  Clone ID: MRT4577_1887C.1
ctggcacgcctgcagggagccgggccggagtaactgtggagttccaccattatatttgaaaaataaagtccctttctaatgtgcatgcaaatgttgtaactattatcatggcttcaggaattgctggcctcggccttagtacatcctatgctactgctagaaatgaggaaaaagtggctgtttttaaagatgaaaggtcgctcattgaggagactgaacagaaatgtatagatcaagtatgagctaatgtttgctggcttgcctctgtgtgggatgcaattaaggcatttatatatcaccaattaggactggagcaacctcaagaaccaacagatgttttattaaaattgattaatgcttttcaagttcttcaccatattggacacctggccttcgtaacctcgatgatctttttatcagagatggttccgaacgagaaagtatctaaggaaactcttgataggagtctggataggcgaaattgcatcagcatgcaatggccaagtttatcgctctttacacgaaacgcaattgagcgat

SEQ ID NO: 95796 - DNA, 438 bp, Zea mays
  Clone ID: MRT4577_18880C.1
ccggccgggcctccgcgcgcgttgggcgggcagccaacttccccaccaaaccctaatcactccggcgccctgcccccgccgccgcgacgcgctctgccgccgccacagagcagccgacgtcaaagcttgtccctccccgtcgcgaccgcccctcccctaccctccccgccgtgctcgcgcccttcccctccaccgttgcgtccgcccccgagattgccacacgccatggccggaggtccgcgtcccgtatcccctcccacctcgagatcgccttcgatctgtcctgctaggaggtccgcaccccaccccacccctagatgctcgcgtgcacgccgtcgattttgcctgcctcacctccccgctggccccatatcttctccgccaagtctcgttctcaacccaggccctcgtacccccagtccaccggccctcgacgca

SEQ ID NO: 95797 - DNA, 543 bp, Zea mays
  Clone ID: MRT4577_18881C.1
ggtaccgggccccctctttcgagtttttttttttttttttttttttttttttttttttttttttttttttttttttttttttttttttttttttttttttttttttttttttaaagcccggccaaagtttgcccccccagatgaaaaacccccgggggccgggttttgaaaaattaaaacccaaaaggggggggaaagcaaaccaccctgggaaaaactccaccagaaaaacaggggcaggaatccaaaaaaaaaacccccccggttttttgcccattttgaagggccgggggaaaaaacttttcccttttaagcgggaaaaggcccttatggtttaaggggttcgaaacccactttggtttttaaaaggagttaagaggtcagggggggtcattttttccccataaaaaaaatatttggccggggagcccccagttcctttcgaaaaaggggttaaacaaaccggggggccctttttttttttttagaagttttattaaaagggccgggttttctctaaggcggggcaaaattgatgggggc

SEQ ID NO: 95798 - DNA, 628 bp, Zea mays
  Clone ID: MRT4577_18882C.1
gaagttcttcaagttttaacagcagcgatccatgatcctgagatccgtcgagtttgtggtgatgtttctactgagcaactacttgagaaaatgtttggtgtattcatggaccatgcaaacctgttgggtgatataagcaccataccagaggtgaacagtccagagttgtcagaatgcaatctttacggctatatccaccaatatatccatttgctcgaaagtgatgtccgagtagatgttcttgaagcactaaacgagaagataagaaagcgtttcaagacacctaaattgacaaatagcaactttgcgaagatctgtaagcatgcttctctgtcatggtgccgttgtatactcatcaaattggcctcaatcaccccgctgcctgaatctatggacacagacaatcagcctgttccattatccaatggccttctgttgtacgttgatctgcaacctgatgagctccttatctcatccccctgatgggcctactcaattcaaaggtcttgacatgaattggtttgagacactcgctagaataaaaacattccgatcagacagacatccgaagataacatggagactgcagttactgtaatgaagagcacttaccacttttatcgggaca

SEQ ID NO: 95799 - DNA, 867 bp, Zea mays
  Clone ID: MRT4577_18883C.1
ccacttccacgtccagggctgctcaggcctttgaccttgtccactatgatctctggacctctctcgtcatcaacctctctggttacaaatactaccttatcattctggattatttctctcactttctttggactttcccgcttcggttgaagtctgataccttgtccaccctcacacacttcttcgcctgggtctccacccagttctgtcgcccaattcgtgcccttcagtgtgacaatggtcgcgagttcgacaactccgactcttgctcctttctctcccacggcgtttagttgcgtctctcgtgcccttacacctctccccagaacggtcaggccaaacgcatcattcgcaccactaccaacatgatttgttgcctgcctcctctttcaggcgtctctccctgctagctattgggcaaaggccctgaacaccactacccatctcctcaaccccccccccctcgaaggcggtgagccaccacactccccacttcgccctgtatagcacagccccctcctacgaccacttccgtgttttcagttgtgcctgctaccccaacacctccaccactgctccccacaagctatctcctcgctcgactcgttgccttttccttggttactctcctgaccacaaggggtaccactgccttgacctcctctctcatcgtgtcatcgtctctcgtcatgtcattctcgacaaagacgtttttcctcttgctggttccaccctgcctcctgatctcgactcactccttgagtatgatcttgatcctccaccaatgattcctccgctcgcgcctctccccacaccgcgcgcgatccaggcaccccaccatacgcggccccgtcgaccccgcctggg

SEQ ID NO: 95800 - DNA, 454 bp, Zea mays
  Clone ID: MRT4577_18884C.1
cgagtacaagcttttttttttttttttttttttttttttttttttttttttttttttttttttttttttttgggaacaaaacccttttcttttcatttaaaaggggcatacagggggttgggcacaccggcacaacccccccggggggggcgggacccatgattaccccaacacccgcgcggaagggcccaacagggtgggaccccgggcgcgaccccgctcagggggacactccgcacactcgcgcgcgtgcctcgaggggccccaccccactccaaggcgggcggacgggtagccacaggatcgggcccgggcgcaagatagaacaggtgaacaaaccgccacccaaaggccccgaaccgaaaaaaggccaagccgggggcgcccctccagaggccccccccacctgacgagcgtgcccctcacgacgcccatgtcagagggggaaaaaccc

SEQ ID NO: 95801 - DNA, 372 bp, Zea mays
  Clone ID: MRT4577_18885C.1
ttatatttatcttttttcttctttttttttttttctcgtgttggggttttggttggaaaaaaaaactccttgcgggggggtggggggccttgattactaaccatttccccctccctttgggtttttgctcaaccctgaattatttttgtcgatatttaccgggattggaatggagccaatctctgaacggggatgggccccccaacatttttacatacaaagcctcaaatgaaaattgttgcggttatggtccatccccaaaagagaactttatccccggttttttttttcttttgggggatggggtgggggttgtttggctttttaaaagaaaaatcttcattccaactttagctcccgacgggacttttt

SEQ ID NO: 95802 - DNA, 365 bp, Zea mays
  Clone ID: MRT4577_18886C.1
gacataaagaatatatgccacgcggcctatgcttaccttgcaagtgctcatacaaaatatatcctgcctgatgacagaaacatactgcatccttctgcccaacaatataagagtcatagccacataaagtatatactgtgctccgatccttacactaagagctgatgaatgtacacaatcaaaacgagcctgtattgcatagcactcatgaaaatttataggtttcaacgtgcacgaacgagagcttcaaccacggatgaatataatctctcgtgcactaagaggttagatgtggctgggtctgaaattaacacccgatcctatagtgatgcatatataatcaacgatcagcttgatgtgaagat

SEQ ID NO: 95803 - DNA, 180 bp, Zea mays
  Clone ID: MRT4577_18887C.1
ggttgaaaaaaaaaaaaaaaaaaaaaaaaaaaaaaacttttccagagcaaccgccgcagattcgcgaactggttcgcaagggaaggcaggccacccccagccattaccatattaccccaaaccactttctatcaggtcgcggtgtgcccacgccgcttctaagccaagaaacaggcccca

SEQ ID NO: 95804 - DNA, 334 bp, Zea mays
  unsure (1)..(334): unsure at all n locations
  Clone ID: MRT4577_18888C.1
cgggcaggcagaagcaacagaacagcccaaacgaggcggcggcgccaagcgggaacagaacaaaggaggagggaaagcggagcgggagaagacganacagangccagagagcaagangcggacccagaagcagccacgacgaggaggagcaggaaggagcaggcgaccgcccacaacaangagnacccaaaggcgaggaagcaggacgangacngcagccccaacgcgggagagaacccangaggaaaacagagccgccaccagcnccgaagacaaaggagggggggaaggagggccgaanganaacacgaaaccgccacgacaaacacgagga

SEQ ID NO: 95805 - DNA, 285 bp, Zea mays
  Clone ID: MRT4577_18889C.1
acgcgttcgtaggacgcgtacgagcaccgtcacagccttcagtacagaaaaaaagtggatggcttattttcttgagacctgggtgtttacagggctcacacacaaaaaaaacttggctagatgtcacacaagaagaaaggatacctgacggtgtggcgatgcacttctgcttggtagactttgtattggaggcctaacacaactgttggtcaggccaccaaggggctgtgctagggggttacatttttttttttaccagcggtgcagcccaatcttgggagaaga

SEQ ID NO: 95806 - DNA, 336 bp, Zea mays
  Clone ID: MRT4577_1888C.1
ccccccgcgggggggaaaaattttatccggggggggcggcccgggcattggggcccaatccaaacaaagcatttgggggggacactacggggagtttttttggggcccacaaagggacaaacctctacccggttcgccaaattctgggctatccttacgggccccaggaagacgattcgccccccaagcgggacgccggggatcccttcgacaaaggccagccttttgaaacccaccctttggacccttttccattggtggtcaggtccactccataaccggggcccctcggcccatagggggcgcgctacctggggcgggggggggggggaacaa

SEQ ID NO: 95807 - DNA, 725 bp, Zea mays
  Clone ID: MRT4577_18890C.1
acctctcatctctctcgactccggccagtcagtctcttcttcttctctagcgagcgagcaagctaggcttggaggtgaccgaaaatgccggtcagcaggatcgccgtggggagccaccgtgaggtgtacgaggtgggcgccctcaaggcggcgctcgccgagttcatctccacgctcatcttcgtcttcgccggccagggctccggcatggccttcagtgagtttcttcctctttcttctcagcgattaattctttacatcaccactcgctcgctcgcatgtggtagcttaattaggagaaattaagctagttaattagcaatttgcatcatcataatggatagctagctagtgagcgtacgacaagacagggaaaaaaacgcctgcttttggttttggacacaagttaaatgaaagaaacactttatgaggcgttaccagtagcctagagaaaattgtctcagaaaggagtagggtttgattggtgcaggctttttaggttgaatgattggcgcagaatgaccagtttgccctcgggattacgtggagaatcccatgtggtgaatcatcagtagcttctgttccgatcgagcctgccaccatgtgctagctagcttctgcccacaagtagcaaaaattgacttcttgccacatttgcaccagaattaacaacccagatttcgctaataattctgtaacacgtatctgactgactggttttcctt

SEQ ID NO: 95808 - DNA, 502 bp, Zea mays
  Clone ID: MRT4577_18891C.1
ggaaaaaaccccgcccccccccatgggttgccccccccttgggcggggggggggcccattttcccaaaaaaaggaggggggggggcccaaacgcccgcccaaattggggtgggtcaattcccccaaaatttaacaccctaggggggtcggcgggcccttctggacagacccgggtacagggttttttttttttcacgtttttccccccccccccccctttttccttgggggttttttactttatgttgaggggcaagggtttgcccccccactccttgggggcctcgagcatgggggccacgagcttgccctgggtgttgcccacaaaaaccttgttggactccccgccggggggcttgggccctttgccgggtaggaacacccaaccgagcttcttgggcccgaagggggacagggggaacccccgggtttccccgatccggtttcccacggggggggggcccttgggaacccccacgcgggggggctccacctttggggg

SEQ ID NO: 95809 - DNA, 734 bp, Zea mays
  Clone ID: MRT4577_18892C.1
gattgaggtttaaagactctatgtcttgtgccgacgacatgaccttcaatcgccgcaacgcgaaaacgcaagaggaacgcgcccactcaccaccagcacccgcgcggatcaaactgcacgatggctcgccctcatgacgatgtcataaacatgtttgaagagatacacagatcgaggaacaggaaggcttcgggtcaccacaagaaggatattcctatgatgaataccacctcccaaacctgcaacctgacgcacatgattgtctatcgtgcgccatccacgctcacagtaccaccaccgcagtacccatcagataccaactctacgcaacacagctgaatgattcaagggcattgaagataagtgatatggaggatcaggaaatcaccgtcctgaggatgaagatgctgatctctgtgatgatgtggtggtgatcgcacataaagttgagtatttctgccgagcttactctattagccatactctgactacagatattcgacgatggaagatgcgcagatggtatatgagagttaccttttagacttacgtctgagcgttctcattcttttttatatgcaactatctcctcaggatcataaaatcacttgcatgatgatgtgcaatggtttatgatcgagcctctttcagaataattgatgaatactcgcattatgcatatatgcaatgaagaacgcctcaatcttaatgttcaagcgatgaccacactgagt

SEQ ID NO: 95810 - DNA, 293 bp, Zea mays
  Clone ID: MRT4577_18893C.1
ttctacacacactggtaggcagcaagcgtctctgctgtttctttaacacgcacacaggatatttcggcagggcaaggcgagctatgatcccgtgggcaagacgcgcctatgtggcatgtgcaccatagcaattagcctgccgccgcccaacgaccagaagaggaaccaccagctccgaaacagcgatcctccccacgccaccgagatcaacgactgcggcagagccgaggacccgaacgactccgggctgccagactgactggcaccgtgacgaccacaacgcccaatactag

SEQ ID NO: 95811 - DNA, 296 bp, Zea mays
  Clone ID: MRT4577_18894C.1
catgcgcgcgcgcgcagtgcgcgggtcctctatagagggcgcgccctttttttcttttttaaatacaaacattagacataaaggggggacatttgtagagcgccgtcgactggacaacccacccaggacaccgaacttgattgggagaccggacatgggaactgaaggcctccatgatcaacctcctgggagggaccaccacctcaatgtcaaccgatgcgtacgcgtccagggctcgattgatcgacttcatacctggggagcgtcgatcttgttctcagaaccctcaacaatgt

SEQ ID NO: 95812 - DNA, 944 bp, Zea mays
  unsure (1)..(944): unsure at all n locations
  Clone ID: MRT4577_18895C.1
gccagtgcctcgaaatgctcattcacattttcgaaggcgcgatatagagcancatctcttgccagaaatccgcaagcacctccaaacactgntcacattccatctcctcgagctgcctcgccaacttcatcccccctctgtaagatggaggtttctgttgatacaggcaaacttctcaaggcttcatacttgtcttccactttctgcagaaactgtgcagcttccactgctactgcatcaaacacaaggctagaatcatagtagttcccaggaagcaacttcggtgctgagaccaccaggtatgcacagtactttgacagtatggttgcgatgtcaagatgtaacttgagtgcccccccaactctaggataaaggcatttcaatgtttgcacctcgcagtaacacgttgcaatgtgccaagtcaaaatgatgtgtgtctgattctccttgtccaggtaacagttggtgcctgggtctgagagcatattgtgcctgcaagcccataagaggtcatgcacctcattgtacactaatgacgattctccattcgctaggacaccctgtgtacgctggagggaatggacaactgcctttttacttctactggtatcttgatagctgcaggtttcacatgtttcttgcggatacgttgtgcgtgaataaagtctttgtttgtcttacaaaggtacccaaagtctggagccactataagactacaatatcgatgcataaacctgtgaaaccataccttacgtggactctgcttgtacttgcaactaatcacttcaagcaaggagtattgcccaagtttattttggtagtagtattcgcttgaccttgaccgggtgataccaatagccatgttaagaataatctccctgaatctcatgcagcaaaactctaaagnnnnnnnnnnnnnnnnnnnnnnnnnnnnnnnnnnnnnn

SEQ ID NO: 95813 - DNA, 360 bp, Zea mays
  Clone ID: MRT4577_18896C.1
cgtccttttttttttattttttttttttttttttggttgggtgaaatttctatacgggacggtttttttttttttttattgggacgggcggcgaaaaagtgggattatcacacacttatctgcccttaacctttacgacatgcatgagaacaaacctacagagggctccacaaacgatgatgatggggatgagatcttctttgccccaagattttttggacactgttttttattcaaaatatgaagagaggaaagaaaaaaaaagaccatttctttttctcctgaagaagggtcttaacgccctacatttcgtatggcccttgggatggataaaaattttaggggaccaaattaacattt

SEQ ID NO: 95814 - DNA, 376 bp, Zea mays
  Clone ID: MRT4577_18897C.1
aactacaggcgttcgcatatcaacatgcgttggaaccactatcctacagaaagatctactctggggaattctgcactgaattaatcacaccctactatctggaacctgttgaaaggtgggaagaaattgctggcacagtctttcagcacttcgaacttgatggccaccgattgatatcagccgatgagttagcacacgaactaaatgtgtcgccgacacattacttcattgtgcatgactggatcacaaaatcggacggcatgcttaacttctttgggttcaccagaattcttcacggtgtcacgatactgggtttaaatacaatacgacactaaacagatgcaaactgtattcacttctaatttgaagactctca

SEQ ID NO: 95815 - DNA, 317 bp, Zea mays
  Clone ID: MRT4577_18898C.1
ataaaaagagcaccctccttttttttaaagttttatataacacttcaggaaccccacttctttattatttatcaagggttatataacattcaaagcccgcggggggtgcaaatttttttttacaaaagcatactttttccttaccaattatacaacaaccccccaatacatttattttttgggcacataaaaaatgacaatggcgcccggctcaaaagggggtaagggcacagggtcagggcctaaaccataatctccagcggccaccggtataactcctgctccggcacgggcaggtcaacggaaacaagggcggg

SEQ ID NO: 95816 - DNA, 245 bp, Zea mays
  unsure (1)..(245): unsure at all n locations
  Clone ID: MRT4577_18899C.1
gctgcgcgctggggaggcggactcggagagggagcgcgccgagtacgcggtggcaaggaacgccgccctgggcggggccgggctggcagagaccggagtgcacgggtggcgccttccgttcgggaggggttcacggagtgtgagccgtgcaatgggcaacgcccgagcactacttctgggacagttgagaccanagcatgcgccgcgcgctcaacttttacgactaccataggctgagggcgtac

SEQ ID NO: 95817 - DNA, 942 bp, Zea mays
  Clone ID: MRT4577_1889C.1
ggccggccgggccgggggaaaaaaaaaaaaatagcacacagccaaagccaccagcgctcgtcacctccaatcaacaaattcccaatccgccgcttcccatcccgcgttcgccgctccatttgatcgaattcccgatggcgcccaaggccgagaagaagcccgcggagaagaagccgacggaggagaaggccgagaagaagcccagggcggagaagcgcgtgccgggcaaggagggcggcgagaagaaggggaagaagaaggccaagaagagcgtcgagacgtacaagatctacatcttcaaggtgctcaagcaggtgcacccggacattggtatctcgtccaaggccatgtccatcatgaactccttcatcaacgacatcttcgagaagctggctgccgaggccgccaagctcgcccgctacaacaagaagcccaccataacctcccgggagatccagacttcggtgcgcctcgtccttcctggcgagctcgccaagcacgccgtctccgagggcaccaaggccgttaccaagtttacttcctcttagatcgccgccgcacggagcgacggctctgtttcgtttcctcgtacttttaggccagtgctaataggttgctcgaggaacaatgtagtgtggaaatttctaatatattccaaattgtgctgatataatttgcttcaaaccttgaggaggcgctgttttaatttggggttgctacagccgtacaatttttggcgccaatatcttgcttcgtattcactggggttcaatcacctgaatcatgtaatttgttcagggggataaataacatttatcaaaggattgtgagatagtacagataacaaatcagctggcagtgctatgcaaaatctggtctgtggcaatgtttgccttgtggccagtttttcataattcatgtaatgtgcgttcatggacttct

SEQ ID NO: 95818 - DNA, 331 bp, Zea mays
  Clone ID: MRT4577_188C.1
agaattttccggacgcatggcgacggtggaagcttctccaggcctccgacgagggctgcggcggcgaggtggtactggcggcggggtcgagaaagggggagaggtggtaggagaagacaggtccagattccacctcttccttgaggtcctcccattcgaaatcgcgcgaatgtctgcccgtcccgaggacgtcgcccagagagctcaagtcgccataaggtgcgccgccgctgccgggagcccgggagggactaggagcgagcagggagcataacctctccccgcagataatctatatctatgtctatgctactatggccctgtttggcac

SEQ ID NO: 95819 - DNA, 261 bp, Zea mays
  Clone ID: MRT4577_18900C.1
aaaacaaagtaaaaccagaggagtgggaacaaaagtgttcagccacaacaccacaactataaagaaaatggaagatcccagaacggacagcaaacgtgaaagaagaacactcctagaccaaaacgagcttaaaccagaaaagagacttagaagaaagcccaagcttgacagtcaaagaaaacatacacaccactaagccaacaaagataaactacttgaaacaaaaaactccagaatataactttcctgacaacaaaacaa

SEQ ID NO: 95820 - DNA, 333 bp, Zea mays
  Clone ID: MRT4577_18901C.1
gggggggggggcaatttttttttttttttaaaaagggtcccgattgtattgatgtccccccccacccacataaataaattgggggattccaaaatgccaaaaggggattttttgtggatcccccaaattgcaaccttttttaaacccccgaggaaaaaaaaaagggggaaagtgttggggtgaaataaaaattgggcaattaaaaaataaaacgggttttttataaacacgccccccctgggggggaataaccctacccctaaaaaccgtacaggggttttttatttttttaaaaaactctatattttggggggccccaagtgttccataaaa

SEQ ID NO: 95821 - DNA, 270 bp, Zea mays
  Clone ID: MRT4577_18902C.1
agcagtggtaacaacgcagagtccggggcatgaactgcttcatcaacgacatctttgagaagcacgccgaggaggctgacaagctacgccgctacaacaagaagtcgaccactcacctgttgagagacacaaacctatgatccactcgttcttaccggtgagctcttcaggcacgcgccctacgaggccaccaagggcgtcactaagttcacatgatcttagatttgaaggaggagctatagaaaggcgccgtgagttgtgtcttcaatg

SEQ ID NO: 95822 - DNA, 818 bp, Zea mays
  unsure (1)..(818): unsure at all n locations
  Clone ID: MRT4577_18903C.1
gactcctatagggcgattgggtcantagcagcgggccgggttgttactgtgctttcactccaaagcgaagcttatgtccagctgcatgtattaatggacttttaatatttccgagtgctatcagcatcatttgttccattctgttgattggacattggttaaccttggacgctaaatttactaagtggtcgcttcagaaggaaatcatcatccgacgcatatgagagggcaacccctccagggacgaccagccaccctcctcccttcgaagtgtgaaccggctgcaccctcacacttgttttgctccttgacaagcatctcttcacctataataaggtacaggcagggaggagagaagacgacatcaagaggggaacggggatgagttgcgggtttacctctgctgtgatatattgtaggtgccactatgtgtattgttcccccctatctactacgtggcataagttgtattctagtatgttgaaagctcatggtgccgtgctgtatcaataaggtgttatgcgcatagagtggctcaggaccagggctgcgtttgcgcgatctagaactataaattgtatgtttcttctgctgctatgccattaggtataacatgtgaagttgtgtggatggcgtcgtgcttgtagtgttagctggatttgaagcggactacatgtaggcttgttcaatgtctagtatctattagctgaaggggtttgcctgtaagttgtaactctctgcgaactgtgatgcgggataatgctaataagaatagatgatcgttggaatcctgtcttttaataagtttcattgaatgt

SEQ ID NO: 95823 - DNA, 784 bp, Zea mays
  Clone ID: MRT4577_18904C.1
atgtttctcgtcatggttttcacacacctgagggcgccaagcttgcaaagaagcaagtaaagatactgggcaggtactttatgttgagctttttcaggggctttttccaatggttcttcagtggtggcgatgactgcggtttcaagaacttcccaacattaggccttgaagcttacaagaataggttctactttgatttctctcctacatatgttggggttggcatgatctgcccacacatcgtgaatgtgtctgttattctaggaggtatcatctcgtggggtataatgtggcctctcattggcaagaaaaaagggagttggtaccctgcttctctcccagaatctagtcttcatgggctgcaggcttacagggtctttatatccattgctttgattcttggggatgggctatataactttgtcaaggtgcttatccgcacaattgccggcttcatatcaatggttcataaaaattcgaaagccatgcttcctgtttcagacaatggcagccccaccgctgaagctatgtcctttgatgatgagcgtcgcactgaactattcctgaaagatcaaatccccatggcagttgcatatggaggctatgccgtagttgcttctatatctatcggcactcttcctcagatcttcccgcagctcaagtggtactacattttagttgcctatgtggtagcacctatcctggccttctgcatggcctacggaagtgggctcactgattggtcccttgcctccacctatggcaagcttgctatcttcgtctt

SEQ ID NO: 95824 - DNA, 353 bp, Zea mays
  Clone ID: MRT4577_18905C.1
ctcacgggtcgacgcaagactctatagtgagtcatattattacgacgtaccaagtggtggcataatacaatcatcatcatctagtggacagatttcagtttttggttctattccaacgctaacgttatactgcattacacactgtttcactcagcctgtcatattcacatggtaaaaacatgtcactgagcagaagaacttttggacgtgcatcacgtgtatacactatctcaacggttgcttcactatctgttcatacaacgtcaatcgaatcatcattcacattacttaagcagcttgacagaactattcggtcacctacatcatcaccactacggctgagactcacatta

SEQ ID NO: 95825 - DNA, 2281 bp, Zea mays
  Clone ID: MRT4577_18906C.1
gcatgaggtggtggtccggagctagtccctgcccggaacacatttccgtcctctggatcagatgtgtgggttctgggggtagcaggactagtattccgcagagcgaggtgctggctgcgggccgaggcagttgggggactaagatgacgagaggtgggcggccgcggcaagttctgggacagcaccgtcgccggtcctggcccttgcgtcaggctcggcgacctgcgcaggccgcctctgcgtcccgcgggcgtcaagctccgtgatccggccggggacgctgcggcgtgcgtgccgcccccgccagcttcggggagcctggagcgggcggagcacttgccgcgccgcagcgctcagcaacggccccgcggcgatctcgctttcgcggcggcgcggggcgtcctgatggccgggtcagctgcgttcgtgaacggcccccctggccgccccttcgacgtcgcgtctctatgagttcaaggtgtctgcctggtactccgcacgccccggtgggggcctccacaagacgccaatctagccggcgccgtgccgtcggtaaacacacctccgggctaaccgtagagacaccattatctacagcagccgttaatgaaggtggagatgaagcgcgccaaagccggcgacgggggcttcagccgcgggtaggctttcagctcccgcgctaaaaattagtcacattatatagtcctggtctttgtatgctatccgggttagccggtggataagactagcaccagtgatgcgcatggttcttgtgtttgcttgcctcttgcctttgtgtaggtcgcctctggtgcagcgttggaggctagctttgacatggctggaatgttagctggggttgtggtgaaagaggtgagaacttgtcttcagagagtgcgtagcgagtagtcaagggtgtgtggatgatctgtttcatatatatgttcgtaatgtcgccgggtttgaggcttcggcagccagagtggtcttcgctccattctaatatctctagtaagtgaagggatatgactcagctggcgtgtcgtagtggctgtggccgtttgtgctgcattcaagggtttcgtctcagatcttgatctcaaaatatatggtatatcgtttaataagagtactttccagtgtggggatagaaatggagaataatcaagttagagcgcgcatcaagtaggcatctgatgatccgtaggtacagacttgattgtctcctctatatatcccttttcatttcatgttctctctctttttcctattttttcttcctggaccccttcaactcgccagtagagagctcgttgtgcctctccaatcccatgtttgcgtatgtctgctcaacaacatgtttttaccatggagaacaagttcaccagctgttagctctatctacaggtagcgaggagacgccggtgaaggtgacgcgcagcatcatgatcaagcgtcccgcggggtacccgtcttcgccgaggagcgcggcaagcacgccgccggcctctccactagggactaccccgcccatctcgccgtttgccggcgctggtggtcgattcagaaggaaatcatcatccgacgcatatgagagggcaacccctccagggacgaccagccaccctcctcccttcgaagtgtgaaccggctgcaccctcacacttgttttgctccttgacaagcatctcttcacctataataaggtagaggcagggaggagagaagacgacatcaagaggggaacggggatgagttgcgggtttacctctgctgtgatatattgtaggtgccactatgtgtattgttcccccctatctactacgtggcataggttgtattctagtatgttgaaagctcatggtgccgtgctgtatcaataaggtgttatgcgcatagagtggctcaggaccagggctgcgtttgcgctttgccactggctgtgttgtatgtttcttctgctgctatgccattagggtttagggatggtgtgtggatggcgtcgtgcttgtagtgttagctgggtttgaagcggactacatgtaggtttgttcaatgtctggtatctattagctgaaggtgtttgcctgtaagttgtaactctctgtgaactgtgatgcgggataatgctaagaagaatagatgatcgttggagtctgtctttcgattgtgctgtgtaatgtaagctgccttaggctatctccagggctgtaggtttttttcctaaaagactcctctatatctcacttttcacaaaaaaaaaaaaaaaaaaggggcggcc

SEQ ID NO: 95826 - DNA, 429 bp, Zea mays
  Clone ID: MRT4577_18907C.1
ggggggtctaaggggaagggggaaacaagtgaaaagggttggtttttataaaaagccccgaagggggggaatacagaattttataaagggaaccgggggttccccccggtgaaaaaaaacaagggggacaggaataacattaaaaagggggttttttaaaaaagcctctttttttttggggggggatctgaaaaaaaaaaaacccgtgtggggagcaaaaaaatgtttggtaatatgcgcgccccgaagggaagcccccaaacaaaaccgggaaaacctcacacaaaaaaaccgggaaaaatgggggggcaaattaaagttacacagggggggccaaactagggggatttggcccaaaggaattttagatccgcccaaaaaaaaggggaaaggcggggggccccccccttgggaaaaaaaccaaaaggg

SEQ ID NO: 95827 - DNA, 587 bp, Zea mays
  unsure (1)..(587): unsure at all n locations
  Clone ID: MRT4577_18908C.1
gagcgcgggngaaaaaaaaaaaggaaaaaaaaaaaaaaaaaaaaaaaaaaaaaaaaaaaaaaaaaaaaaaaaaaaaaaaaaaaaaaaaaaaaaaaaaaaaaggtaaaaaaaaaaaaaaaaaaaaaaaaaaaaaggtaaaaaaaaaacccccaaaaaaagggggggggggaaaaagttttctgttttccccccccccctagggccaatttttgaaaatttccatccccctggggccccttcaaccttccttttaagggccccatttccccctttagggggccttttaacattccccggcccggcttttaccaccgcggggccgggaaaacccctggcgtcccccactttatcccctttgaaacaaacccccttttccccagttggggtattaccaaaaggcccccccccgatcccctttcccaaaatttcccccccctaatgggcaaagggcccccccctttacccgccctttaacccgggggggtgggggggctccccccacggtaccctctccttttccccgccccttaccccccgctcctttcgttttctccccttcctttcccccccgtttccccggtttcccc

SEQ ID NO: 95828 - DNA, 282 bp, Zea mays
  Clone ID: MRT4577_18909C.1
acacgcaatactcctcgacgctgatcacatcttcgaataagttaaagcatttccggctggttcacagtctaaaaacacacaacatggcctgaacatgcttgaggccttaaacctctctaggtaaaagatgacacgttgggtaaactaatgcgccaaggaagcacacggtaacctgtgaaaccgcaggtgatgcttactatatagacactctcttgggccaacctcacttagacgtcctaactgctctgttccacacaacatttatgatggtttgaatcctgc

SEQ ID NO: 95829 - DNA, 352 bp, Zea mays
  Clone ID: MRT4577_1890C.1
ggccgcccttttttttttttttttggtgggttttttttaaacatgcgggggttccgattccattgtttgaaaaagcaggttggcccccgcagcctgggtactgggacttgggatgggtttagtttaccaaggtccctgcgggctgcttgcatagcggggaatttgctgagttgttaatggatcccctgcccgttggcacgctgagcacaaaacttggtgcccttggcaataatgaccccagaatggttgcttggggccatccagggttcaaggctcaggaccaactctggctagttcgctggacttggccgatatccaccaggacctggagatgggcgccttcttacatttt

SEQ ID NO: 95830 - DNA, 624 bp, Zea mays
  Clone ID: MRT4577_18910C.1
ccggccgggatccagtcgcatctccctctccgaaatcaaggtagcgtacaccgctgcagtttctagagccctctctgccactcgtgatcccactagtcacaatgcctgccctcgccaagcccgcctcccgcaccgccaagcccgccgcggctccgaagccgaagcctgccgccgccaagccgaaggcggccaccgctggtgcctcccacccgccttacttcgagatgatcaaggaggctatcacggcgctcaaggagaggaccggctccagctcgcaagcgatcgccaagtatgtgggggacaagcacggcgcgtctctgccggccaacttcaagaagatgctttccatccaacttcaagaagtcccaagccgaagaccgtgaagtcccctgcctccaagaaggcacggaaggcctccgcatgagatgggttgctttaggtctaagctctgattgtggttggtgtcagttaggtactgtacaaactaagtgtgtgcccaaagtgtctcaggcggtgtgttatgtgcttagcaagttctatctatcagagtgttttagtttaacaatggttttacctctggcttttgtagtcaggtttctgaaaaaaaaaaaaaaaaaagcggcc

SEQ ID NO: 95831 - DNA, 801 bp, Zea mays
  Clone ID: MRT4577_18911C.1
cacctccctctccgaaataaggtagcatacaccgctgcagtttctagagccctctctgccactcgtgatcccactagtcacgatgcctgccctcgccaagcccgcctcccgcaccgccaagcccgccgcggctccgaagccgaagcctgccgccgccaagccgaaggcggccaccgctggtgcctcccacccgccttacttcgagatgatcaaggaggctatcacggcgctaaaggagaggaccggctccagctcgcaagcgatcgccaagtatgtgggggacaagcacggcgcgtctctgccggccaacttcaagaagatgcttacaacgcagcgcggggggtccgcagccaagggcaagctcgtgaaggtcaaggcttcgtacaagctctcggacgccgccaagaaggcatcccccaagaccaaggctaagccggcaaaggccgccgctgccaagaccaccgcccccaagcgcaaagtgcccgagaagaaggtcgtggcgaagccgaagaagtcccccgccgccaaggccaaggccaagccgaagaccgtgaagtcccctgcctccaagaaggcacggaaggcctccgcatgagatgggttgctttaggtctaagctctgattgtggttggtgtcagttaggtactgtacaaactaagtgtgtgcccaaagtgtctcaggcggtgtgttatgtgcttagcaagttctatctatcagagtgttttagtttaacaatggttttcccataaaaaaaaaaaaaaaaaaaaaaaaaaaaaagtactctgcgttgttaccactgc

SEQ ID NO: 95832 - DNA, 748 bp, Zea mays
  Clone ID: MRT4577_18912C.1
atccagtcgcacctccctctccgaaatcaaggtagcatacaccgctgcagtttctagagccctctctgccactcgtgatcccactagtcacgatgcctgccctcgccaagcccgcctcccgcaccgccaagcccgccgcggctccgaagccgaagcctgccgccgccaagccgaaggcggccaccgctggtgcctcccacccgccttacttcgagatgatcaaggaggctatcacggcgctaaaggagaggaccggctccagctccgtgggtccgcagccaagggcaagctcgtgaaggtcaaggcttcgtacaagctctcggacgccgccaagaaggcatcccccaagaccaaggctaagccggcaaaggccgccgctgccaagaccaccgcccccaagccggccaaggccgccgccgccaagtcaaagaaggcagcggctgccatgccaaagaaggccgctgctgctgggaccaagcgcaaagtgcccgagaagaaggtcgtggcgaagccgaagaagtcccccgccgccaaggccaaggccaagccgaagaccttgaagtcccctgcctccaagaaggcacggaaggcctccgcatgagatgggttgctttaggtctaagctctgattgtggttggtgtcagttaggtactgtacaaactaagtgtgtgcccaaagtgtctcaggcggtgtgttatgtgcttagcaagttctatctatcagagtgttttagtttaacaatggttt

SEQ ID NO: 95833 - DNA, 813 bp, Zea mays
  unsure (1)..(813): unsure at all n locations
  Clone ID: MRT4577_18913C.1
acagnaagatcggtcacacgtcattttctgctttacaggtatcactttcttggataattggattggattggcacattgtgttgtgcctttgctgacttgtcctgcactattttcctgttggaattctgttcacggtccccttagtatatagtaccttaaattgccattcacctggatgcctcatgatatgctctgatgctccatgtttgttcttttctttgagtacccgacaaaactagtggtgctggtaagctgggaacctatgctccggtgcacgaatgaaatatgtttgttgctcataagctccaactcaactagactaattcaaaggaatagaatcttctttctgcatttgatggtggcctctcaattttatcttgtcttctgcaggtgagcgacacgccaaagccgcgaggtccgaacgccaaccggaagaggaacggccggaaacagaagctgttccccaagcactacgttacatccgaagatgatacggccggttcctagcatcagcagcacggtagcagtttgaccgttggctttggtgatgtcagcagtagggagggcacatcatgtcgcctctgccagctgctgtgatctgaagaggcgtttagctcatcatatgcctttagtcttttgagaggtctttagggttgaaaggtacttcgaaaaccgaaccagcgtctacaggcctaagagggatttccattgaaactcgtcgatgatactacagttttctttccccatctgtgccggttgtgttgtactaccactaccagtgacagtgagtgacttctaagctattcatttttt

SEQ ID NO: 95834 - DNA, 975 bp, Zea mays
  Clone ID: MRT4577_18914C.1
gccggccgggtcgggatccagtcgcatctccctctccgaaatcaaggtagcatacaccgctgcagtttctagagccctctctgccactcgtgatcccactagtcacgatgcctgccctcgccaagcccgcctcccgcaccgccaagcccgccgcggctccgaagccgaagcctgccgccgccaagccgaaggcggccaccgctggtgcctcccacccgccttacttcgaggtgagccttgtcgacctgcgttcggtttttattgattgatattggtttccgtcggaattggtgttgatggaatctcatgtttcgtcgttcagatgatcaaggaggctatcacggcgctaaaggagaggaccggctccagctcgcaagcgatcgccaagtatgtgggggacaagcacggcgcgtctctgccggccaacttcaagaagatgctttccatccagctccgtgggtccgcagccaagggcaagctcgtgaaggtcaaggcttcgtacaagctctcggacgccgccaagaaggcatcccccaagaccaaggccgccgccgccaagtcaaagaaggcagcggctgccaagccaaagaagaccgctgctgctgggaccaagcgcaaagtgtccgagaagaaggtcgtggcgaagccgaagaagtcccccgccgccaaggccaaggccaagccgaagaccgtgaagtcccctgcctctaagaaggcacggaaggcctccgcatgagatgggttgctttaggtctaagctctgattgtggttggtgtcagttaggtactgtacaaactaagtgtgcccaaagtgtctcaggcggtgtgttatgtgcttagcaagttctatctatcagagtgttttagtttaacaatggttttacgtctggcttttgtagtcaggtttcggaaatccctgttgtcgcgcagtctaaatttttgaattctagagcccccccatcgtttcgatcaaaa

SEQ ID NO: 95835 - DNA, 1008 bp, Zea mays
  Clone ID: MRT4577_18915C.1
tctatccttgtgatgtgatgtctcatggtgcatgtcattttggttgcagattgtgtcattttgggtggtagcagtgctttaattctttattatgagttcattaccagtttggcatgtgaacagatagatcggtcacacgtcatttttttgttttggggtatcactttcttggataattggattggattggcacattgtgttgtgcctttgctgacttgtcctgcactattttcctgttggaattctgttcacggtccccttagtatatagtaccttaaattgccattcacctggatgcctctgatgctccatgtttgttcttttctttgagtacccgacaaaactagtggtgctggtgagcgacacgccaaagccgcgaggtccgaacgccaaccggaagaggaacggccggaaacagaagctgttccccaagcactacgttacatccgaagatgatacggccggttcctagcatcagcagcacggtagcagtttgaccgttggctttggtgatgtcagcagtagggagggcacatcatgtcgcctctgccagctgctgtgatctgaagaggcgtttagctcatcatatgcctttagtcttttgagaggtctttagggttgaaaggtacttcgaaaaccgaaccagcgtctacaggcctaagagggatttccattgaaactcgtcgatgatactacagttttctttccccatctgtgccggttgtgttgtactaccactaccagtgacagtgagtgacttctaagctattcatttttttaactggagaagttgataccatgataattaaaaaaaattgggtgtgtattgaactattaccaagaaaatagtacttggattgtgatgttctgaacattatgttttgtaggcaatcgtgacttgaattttttaacggtataagttgataccatgataattaaaaaaaattgggtgtgtattgaactattaccaagaaaatagtacttggattgtgatgttctggccccccc

SEQ ID NO: 95836 - DNA, 250 bp, Zea mays
  unsure (1)..(250): unsure at all n locations
  Clone ID: MRT4577_18916C.1
ggccggccggggtatgccaccgcagccanaccacacggggccgccggcacaggtctgccctacataaatctatcaataccgcaaacaggctcatgacgcccctgcatggcgtcccgcgtcgcctcggtgctgctcttggacgcgggcgtcctcgtggcctccgcggcggcccatgagtgcgtggcacccgagccggcgccggcgccggaaccgcgcgctggcgcggtcggcgctccgggctgcgctgcgc

SEQ ID NO: 95837 - DNA, 1658 bp, Zea mays
  Clone ID: MRT4577_18917C.1
tgggtccctcgggctcggccggaacagccttctattatctattgtcttttagttatacgtgtgcttgggagtccttgcaatttgaataaagctgcgaccattgggtccctcgaggccggccgggatccagtcgcatctccctctccgaaatcaaggtagcgtacaccgctgcagtttctagagccctctctgccactcgtgatcccactagtcacaatgcctgccctcgccaagcccgcctcccgcaccgccaagcccgccgcggctccgaagccgaagcctgccgccgccaagccgaaggcggccaccgctggtgcctcccacccgccttacttcgagatgatcaaggaggctatcacggcgctcaaggagaggaccggctccagctcgcaagcgatcgccaagtatgtgggggacaagcacggcgcgtctctgccggccaacttcaagaagatgctttccatccagctccgtgggtccgcagccaagggcaagctcgtgaaggtcaaggcttcgtacaagctctcggacgccgccaagaaggcatcccccaagaccaaggctaagccggcaaaggccgccgctgccaagaccaccgcccccaagccggccaaggccgccgccgccaagtcaaagaaggcagcggctgccaagccaaagaaggccgctgctgctgggaccaagcgcaaagtgcccgagaagaaggtcgtggcgaagccgaagaagtcccccgccgccaaggccaaggccaagccgaagaccgtgaagtcccctgcctccaagaaggcacggaaggcctccgcatgagatgggttgctttaggtctaagctctgattgtggttggtgtcagttaggtactgtacaaactaagtgtgtgcccaaagtgtctcaggcggtgtgttatgtgcttagcaagttctatctatcagagtgttttagtttaaaaaaaaaaaaaaaaaaacaaaaaaaaaaaaaaaaaagcggccgaaagatacttttccttttttctgttgattcaatgacacatacaaaatactcatcggtctgcatctgccgaaaactcgcgcaaggcacgttgccaagcttttgacctccatgctctgccttgagtagggctcgctctcgagggagacaacctccatcaataagacctactgcccgctcccgccactagaataacgacagatgcaactctaaaggtgaatattgctaaaacttatacatgttattcgcattctactatttttcaatctttgaatacttattagttaactctgattcaccatttacaaatgtagttgatcatcaggctgcaaacagcctcctatgtatagtacaactgacaggctaaactggagttctcacatgtgttggtccaatgctaatcaggacaagattgttgtctagaaataggacattatgttcgctaaccagtttttttattacttctaggttttggttgagagaatgggtctgcctaaaggaaataatggactataattgttgcaaacaatcgcttaagtatatggttttgaggttggtctttaattagcaaatcctcaatatcttggtagtgacaattcttgggctacttataatgattacactgttcatacatgagctgcagttttatttcaacacatacaccatgcatcag

SEQ ID NO: 95838 - DNA, 1573 bp, Zea mays
  Clone ID: MRT4577_18918C.1
cccacgcgtccgcccacgcgtccgcccacgcgtccgctggttgaaatcatctaagaatcaatgtgtcactccaaaggttgttgtaagcatgatcgttcattctttagtacttattaacaactatattctatgctttatattcttacagtagaagattatctgtgttcaaccaaatggacataattagtgctgttttgcaaaagcattttggattttccagtctcaaagcattccaaaaggaagtcttggatgcttggtttgctcatgaggattgtgttctcctagcagccataggatcaggtgcgttttctgtaatgctcctctttatcttctgtaatttattactaccgctgatgtgactttgctttttatatgggctgtaagtgtcagtaatcttttttcataatttctatcattattgaatacttatattttgtatcctttttttcgctgaaccttcttgccttatgtctgaacatgcaacattttgattggggtaggaggtaccaaaggaaatgagcaaaacatagcatacgtcttcagattctgcagtaacacctcagagtaattgtaattccatttcctgtgagctcaccaagagcgagtccctccttcacgtaacagaaatttccaactttaatcccaaacagccgcttgttaagagcaagcaacttactggcttgcaccttgaatacagttacctgctgtgtagtaacagcacgcttatcctttgtacctgcaaacccaaatgaccgtggctgaagtcctagcatttttcctattactcctaatgcttcttgggtgtccttgttctctttgtacaggtgaaacctcaggaacttcccaacattatctggccaattacttgaccctctactatcaaatggcctaccatctctccaatcagaactacccatgttcttccgtttccttcctctcccacggccgccagcaccccttccgacacctgcttctgacccgaaccgcaccctgatgcacttctggaccccatcactgtgttccaccgtgtccgtgaccaggaacttgaaggtcttcttaaagaagttatgcacctccgaacggtgtgctttgtcggcatcaggcgatagaatgacaggcgagacatcaccgccaccctcgcccgacaccttctccaggagacccctcaatgcgttgcaatcggcatcgccgcagagcgaacggaacgactcgagggcctgcgagtgatccgcttcagccgacggcgccgccttgtcctcttcgttcacaccaacgctctcggtggggaggtcgaacgaggtgagctggacgagagcgccatcgcgggcaacctcatggacgatgaagtcggcatagcggtgcttgaggacgccgcggaatccagggagggaggaggcaaagcaggagatgcccgcctccgcctcggagagtgaggtcgagcgcgccatgggatctgggtggctggtggaagcagcgctagggttttgggagggaaagcgaggaacgcgggctggagagggtttagcaagtgaaggcgggaaacgccgcgagaaaaccaatgaacccggccggc

SEQ ID NO: 95839 - DNA, 717 bp, Zea mays
  Clone ID: MRT4577_18919C.1
ccggccgggatcccactattaagcaccactttcagctttttttttcttctcctcaacctcactcctttctcctcaagaccctcgatttcttgtcaataccgccaaaatgtccgcccccaacgacaacgagcatgagatgaccttcgactccgccgatgccggcgcgtctctcacctaccctatgcagtgctctgctctgcgtaagaacggtttcgtcgtcatcaagaaccgcccttgcaagatcgtcgacatgtccacctccaagactggaaagcacggtcacgccaaggtccatcttgtcgctaccgacattttcactggcaagaagtacgaggatctctctccctctactcacaacatggacgtccccaacgtcagccgccgagagtaccagcttctcgacatctccgacgatggtttcctctccctcatgaccgacgacggtgacaccaaggacgatgttccccttcccgacaacgaggttggccagaagatcaccaagctcttcaaggaagaggagaaggacaccaacgtcattgtcctcacctctatgggcgaggagtgcgctatggaggccaaggaggctcctaaccagggctaaatcatttaacccttgatacacgccctaccttaatggcacttggcccctggggatctacatcaaaagatgatctggatcaggggatctttttttgttttgatggacatttggcgcat

SEQ ID NO: 95840 - DNA, 842 bp, Zea mays
  Clone ID: MRT4577_1891C.1
tccccctctcttctctcgcatcgggctcatcgcccgagacacagagcacgcacacccacgctgtccttccacttccactcacaaattttatcacgtcgccgccggcgaaactctccgctgcctcgtgcgccgcccgtctgtttgcccgccggcgctgcgctatgaagaaggtggtgctgaagctggacgtgcacgacgacaggcagaagcagaaggcgctcaaggccgtctccgctctccacggcatcgacaacatgggcgtggacgtgaaggaccagaagatgacggtggtcggcagcatggaccccgttgacgtcgtcgccaagctgcgcaaggtcttccccggggtggacatcgtctccgtcggcccggccaaggaggacaagaaggacgacaagaaggacggcgacaagaaagacggcggcggcgacaagaaggacggcgacaaggacaagaaggacgagagcaagcaggtggtgtacccgcctcactactggtacccgccgccgccgccgcagcaccaccacccgcacccgtactacttcgtccgcagcgccgaggaggaccccaactcatgcgtcatctgctgatcgcctcatccccatggcaccgccctgtacatgtacatttctagctgggctgccggcgtgcggctcaccggcggtcaccggtcgcgacctgctccggtggtggttggtggttgctccactcgtcagcctacctgcgacagcgatcgcgatatatatgatccgtagatgatgttgttttgtcttgctttttcgctttgggggggataaagtagacgcatctgccgagtttgtgatgcgcagatgtggaacccc

SEQ ID NO: 95841 - DNA, 458 bp, Zea mays
  unsure (1)..(458): unsure at all n locations
  Clone ID: MRT4577_18920C.1
gatcgatcgatcaaaaatccatcggcggcggccctaacccggccggtcccgtgtcaatcgtccgaattgaatgacaacgacaacaagctaggacggcagcagcaatgccggcccccggcgctgttctattttgatcccaggcccagcgatgcattggtacggtcaccaccgactgctattggtacggtcaccaccaccacagcagcaacagcatcgccctgtcgtcgtcgtccctgtccctccccgcctgcagcagcactagcagcatcacctactcctgccacctgcagcagcagcggcatcgtcgcaccatgggcggtcaccagctgcacctgtcgtccncgaccgcggtgctgggccacgtcaccccggcgctgcgcgacctctacgccgtggggcgcaagctcgggcaggggcagttcggcaccacgtacctgtgcacggagcttgtccacggc

SEQ ID NO: 95842 - DNA, 307 bp, Zea mays
  Clone ID: MRT4577_18921C.1
gtaggattgcattgtcgtgtatagaaatgccacatcgtacaagaggccatgctagccagcattttacaggtattaacatttaccctgcaacaaccatatgctatattgcaacaggcatccttagtgcatgtgtatctacaaagaatcgctggacaacaactacaacaactgttgctgccaacaatcaatcaagctgtttgcgcgaaccttgctgcctacctccatgaacaacagttttttccattgaatcaactagatggtgtgtaccctgctatctactttgatgcacaacatctactaccattta

SEQ ID NO: 95843 - DNA, 235 bp, Zea mays
  unsure (1)..(235): unsure at all n locations
  Clone ID: MRT4577_18922C.1
gggcctgaattaacgcctgggccgacttgtctactagccggcggcccgctctttgattgggtnggggttatttagaagcttttttggggtttttcaccccagaacgacaccacacgtgacggcctcccagggccacggcaacagcaccgaggaacgagatggcaaaaaagaacacgcatggcacccgggctcaacaacaaggatagacatgcccttgaaaaagaggacgacaccc

SEQ ID NO: 95844 - DNA, 239 bp, Zea mays
  Clone ID: MRT4577_18923C.1
cttgtgtctcttcccggtacgagcagttatccccccacaaagtggcccatcccaggttctttattatgatttcaaggaggtagactagtcccgggggcaactttgtttcactcacgaaccaaacgaaaggtttacacaagggctgggcgggactcacaccttcttatgggtgagaggacgaactagcaggatcagggggaccaccatggccccctcaacatctgaaaacatgaccggcc

SEQ ID NO: 95845 - DNA, 326 bp, Zea mays
  Clone ID: MRT4577_18924C.1
agcccaccatttccccgggccaaagccaagacaaaagaaaacggaacaattccatgtgacaccataagggggaagccaacccatttgaccgggaactagggccaaactgataattagggactaacaacgggaaagtcggacataaaggctgcacattaaagcaacaacacactaataccaaggacagctaccacatcaggtttagactaaaaaccaccgcactgcaccaggtgtggacacaggccgggtgcaccacctaaatagccaaacggtggcaaggccaacacacttttttcgttcccagacgccacgaactattgacgcat

SEQ ID NO: 95846 - DNA, 357 bp, Zea mays
  Clone ID: MRT4577_18925C.1
aaaaaaaaaacaaggctcatttcaaaatttcatgaaataacccttggcaaaaaacgcatacctaaggggactctaaaattaaactaaaatacaactggtgggactaagggtaagcctaactttttttgaatgcaagtctccccacttttgggaccaccaaaattggactggcaaggtttggaaagtgcaaaggtgttaaaccattgggagacactggtgtttttaacccaaaaaatattcgggattattttcaaaaaaggggccaatatattggccaaatactggtgtagggaaatttggaagaactttactaatttctggaggggccctttttttaacagagatagttccatgtct

SEQ ID NO: 95847 - DNA, 312 bp, Zea mays
  Clone ID: MRT4577_18926C.1
cataaaggtgaacaagggaccattaagctagaactatcacaataaccaaatgagatgggagagctagtaggtcatgatatttagttgtttttagcttgtatgtaacaccctgaatttgggggtataaaatttctttcttattatcatccaaattcaagtgttactcttctctatctctccctagtttctctctctctctctctctagcttctctctctctctttctcttttggttagggttagcttaattagtgagggattatttattttattttggacaaaacatatgagtcatgaaatgttgcattatgt

SEQ ID NO: 95848 - DNA, 305 bp, Zea mays
  Clone ID: MRT4577_18927C.1
ggccggcttgtccttcttgtatatcatgttggcgcccttcttgcccttctccgtcctgttttacttctactcggcgccaccctccccccctgtagtgtcttccatggaggaggtggccgaaccgcgagagcagtgctgacgtctcttcctgcgcgtggctgaggacggcggtgagtccactcccccgcccgcctcgcttttcgtgtccctgaaggaggtctctactatgcttgctccgtccatgaatatttttaagagaagcccaaagaattacagtagccgtgcccccactctcactcctaaat

SEQ ID NO: 95849 - DNA, 637 bp, Zea mays
  Clone ID: MRT4577_18928C.1
gcgcggggaatttaccggataccccttttgcctcttcatgggattacatccccagttcttgtgactaatatatataaacacagaggttatggacgggaatattctcgcatttattgctacagcattgatcattctagatcctactgcctttttacttattattcatgttaaaacagccagtccaatagattaatccgtactccactatatcatcggagaaaagaatatgggattaaagaaaattataaattcgagtcttaattgatacggtctgcatgaaatcataaagtgcggtataaagaactacatatagttctttctaccacactttagattctttctattatattatcttgaatctacgtagaatcgattagaagattgaaatattattctaattcaacttctttttttcactgcatacacttaatttctatcaaaacataatcaaaacattctatgataattcttcattgatagaatccaaggagggggagaaaaataatacgagattagacttgactatattatagtaaaagagagaggtattctgatttatcctacgactctttcatgcttaacaaaggtgcgagatgctacaatcgtatatccttcaaataagactatatcgtatcta

SEQ ID NO: 95850 - DNA, 373 bp, Zea mays
  Clone ID: MRT4577_18929C.1
ctcgtgggtcgacgcaagcctctaaactgacgtcgtgttacgcgtccggcatcgcacgtccgccgagagttagctcactcgtctgcgtccagctcagctacaccacattcgcaccaagttgccagcaagttgcgagcaaggacgacgaacgggtcaatagcgagtctctcgtcatgcagtcgtctgagtagcggcagaggcgccgcagcgatccagcggcaaccggccggtactggagccgtcctcgacctctcctgcacgtggagcgccggcggaactgttcgcgcagcatccgctgcgaaggcggtggcaccggcggcggtagagctgcagtacaacggggtgtcactggggacttgcgcggaatttgagc

SEQ ID NO: 95851 - DNA, 465 bp, Zea mays
  Clone ID: MRT4577_1892C.1
ttcgcccgcgttatttccgtacgtccgagtgagctagttcgtgagggggttttataagataatccacggccacccacgcccaatggttggctagcaaggagaggacatagctctggagattagtacacgagcatggcggaactggatgtgaggacaagcctggacccactgtcaagtgaaatatggaagacttgagcgaagaagggggtgatgtgactcctccaccagaataagatcatgattgagcagaatctgaagaggactgatatttgtgttagatcttgcaacacctgtctaagggaaaaaaaccccctagtatagaaagctgattttggttgataaataaagagcgtgagttgtcactaactccaccttgaaatgacataggaattgatgattgggcattgtttggctgcaaggcgaaagtaaaaagctactttaaagatagagatgcttacttgaatg

SEQ ID NO: 95852 - DNA, 263 bp, Zea mays
  Clone ID: MRT4577_18930C.1
tcccgttcacagcttgtaaggagggagggagccatggttgtcagcacattcactgtctccgggattgagatcgggttcggggtcggctgcttctgcggggtacctttacaattcacatgaatgcctcttaacacgttcggctaggttatctgctgcaactgcaaagtcaagtctctcactatctattgcctcaatgaaatgctctaggttccaagtctcaatcttcaagatcactattccacagctttgcacttccataatac

SEQ ID NO: 95853 - DNA, 467 bp, Zea mays
  Clone ID: MRT4577_18931C.1
tggcagaagatgcccagatgtcgccgcccaccgtccacacgtcgccggccgcttcgactatttacagccgtcgtccgtaggctccctgcagcggcttaccatggtagcgctcgcgggatagcagcgcgctcacgcccatctccaagaccgcggtcgggtcccctgccatggcgtgcacagcctcgcgcatctctccacgacccttggagatggcgtgctattcgtgcctgaagaagcgtggtgcctatctgaatcgctcaataaatgaagagtgaagcgtctgtatcacgctcttgtttgcagctgatggcattggaggccaatacctatagaaagttgtttgtttagagtctctgtagattgctcatgtggagcttgtgtagattgcattggaggcgtgagttctgttggctcatgtgaagcctgtaaccctgagatatgaaaggaggaataaagtacagcttgtt

SEQ ID NO: 95854 - DNA, 288 bp, Zea mays
  Clone ID: MRT4577_18932C.1
cggacgcgtgggcggacgctttgttcaccactgcccatgccacttaggggcggctcgcagccttgcttatcctccacaagctaccgccatggcggcgctgcctcaccctctgagctagacacggcgctatgtctaccctgcactataactatccatcctgcgcacacagataaaactcctgacttggtcggaagcgtctgacgaacaaaagaaaacatcgggcctggagcgactcctgaagccactctgagtatatctacatgggactgggtgcctaactagaccaca

SEQ ID NO: 95855 - DNA, 325 bp, Zea mays
  Clone ID: MRT4577_18933C.1
gggccacgcgtgcgccaggctctcctctggcaccaacgaaaacgtgctcgcccctagagcccaagctgtccgggcgccccttgctcccatccccgtggaggtctccccgtcgcagtgcgcggtggccgcgccatgcgcgagtcaaagcgacttctggcagcacctggaccgaggcaacggcgcgagagcataaagagcggaaaaaggtgcagagatgcgggggctcttaccgagacgaggggaacaaccgagcgcctgggcgcttcatgggcacgtgacaagggagaaagggctggtcttcctgaacgcggcgcaccaagggatt

SEQ ID NO: 95856 - DNA, 415 bp, Zea mays
  unsure (1)..(415): unsure at all n locations
  Clone ID: MRT4577_18934C.1
cgggagatcgctgaattccggatcaacagacccatatatgagcggctaccggctgctacaatacagctcaatggcgaccaatatatttttcctccttatgcttcttgctctttctgcatgtgttgctaacgcgacattattccctcaatgcatacaagctcctatagcttcccttcttcccccataccttccatcaatgatagctagagtatgcgaaaacccagctcttcaaccctataggctccaacaaggcatagcagaaagcaacataccttgatcacccttaggtnaacaatcgacaggcctatctttggngcaggcattgggacaaaccatgaggncacagcagnctgnagtaactcgngctaccctgtattaaccaaaaaggtctggtacactctttctgcctactctc

SEQ ID NO: 95857 - DNA, 355 bp, Zea mays
  unsure (1)..(355): unsure at all n locations
  Clone ID: MRT4577_18935C.1
ancggatacacgtgacctctaaccacgagggcctgcctttgtcctgtgcttcctacaacaggggaagacgggctctgctgaaccaaactcccaagctgctcggctctctaggggaggctgcctacaactcaaacaagcattattaccccttaatcgaccgaacatagattgaacaaacactatatcttccggacccctaatagctgccctaggaccctgcagcccgataaccgtctgcacctggttgtcagcagatacctgctgcggaccgacccatctacgccccagacaggccactccaccctagacagaccgcctagccgaaaccaccccaagaggatcctgaccccatcac

SEQ ID NO: 95858 - DNA, 603 bp, Zea mays
  unsure (1)..(603): unsure at all n locations
  Clone ID: MRT4577_18936C.1
acaaatactacattttctggnttacaataatgtataggtgcatgaaaaaacttgattccaatgtgtgacaaagtgtgaagatgaaagtgcactttcacgctgtcataacgcggatttgttttccttgctcatggaatgtgcatttgtgtgtttgcgtctactgtgcggctacaggcaaggaaacaggatctgtcacggaaggtatgtacacattacagtaaacgttgttcgtagaacatgcactttgtggagtggtctttgaatgagatgcgtttagaattaccttttcatgcagatctcttgttcagaacctggttgcttagtccattcttgttttgggttgctactacaaaaaagcggcaatgctttatatgaatcgcctcttactaatatccagggtcaaatggtggtccttcagtgaccagactaatatttgagcattaatcttatttgtttcacagtcatttcttgtttatcaatatgaatgctatttttctgcgagtggacttgttaactaataagctcatagatatttgaacaaaaaatagtngttttgttctaaaactgtcataaagagtgcatacatcatagctatggtttcaa

SEQ ID NO: 95859 - DNA, 227 bp, Zea mays
  unsure (1)..(227): unsure at all n locations
  Clone ID: MRT4577_18937C.1
tccgagnccgtcgggttcngaggcggtggntgtcgggagggggacgcacggaggnggcggcccttcgcggagctggccaacggctgcgncgccatcatgggccgtgcacggcgcccggnctngacctacatnggtttcnctgctccagnggcggggtgggggtntcaggggggtgctcgttgggnagggctggaggttcggggcncggatacctcccgagncccgcc

SEQ ID NO: 95860 - DNA, 731 bp, Zea mays
  Clone ID: MRT4577_18939C.1
ccggccgggagttcacgagctcattttccctgtcaccagagttcctaatttcgtttttttcctcctagctttgtgcaacaggcttcgttcttcccctgcgctatcaccaccctctccatccacgccgccagtcgccgctctgctcggccacctgcttcagctcgcgcccagggcctctgctcgctggtgccctcgactctggctcccttcaccgccctcccctggtctgcgctctagaccctcccgtcctgatcctctcggccagctgctcgcgtgcgctgcgcgacatcgggtctaagacgggcacgcaagaaagacacgaagaagacgctgcatgtgcttgtgttgagctccacagcaccttgtcgtgcctccatcgcacctgcagtgtgtttacagcgctgtcgagtctacgtgtgagcttgctgtcaggctacgctatcgcatgatcgctgtgctgtcgtgctctggccgcgcaacatatgcttgctcggtctcttctccagcgacactctcttggtgctcgacaaagtgcctgaacccgagttgcatcgacgttcgtacaattatcgtgtcgattcggtcatggtacgctggtttattatttatgttatttgggtttatgagtggattaattagatatatagtaatcatgatgattctcatattttttttacaagagcggtacgggatgatttaaatcgcgtcgtctaatattgtcagtgtgtatg

SEQ ID NO: 95861 - DNA, 362 bp, Zea mays
  unsure (1)..(362): unsure at all n locations
  Clone ID: MRT4577_1893C.1
aaaattaaaaaaaaaaaaaaaaagctactattgacaggccgnccgaaaaccaggccgaccgagcgtccgaaaagctccaagctccaggggaccaaacacctgaaatagaccgaaaatctacaggagcgcatgaggggggaagcccccagacctgaacttatccaaagggttttgctgtcaagttctacaccagacagggtaacatggacctcgcgggtaacaacatgcctgtggtagtaatacgagatggaatgaatattcctgacatgggccacactttaaagcctaatccaaagaccaatttgcaggaaaacatgaaaaatattaaaatttttttttttaaccactcaagagagcctaca

SEQ ID NO: 95862 - DNA, 1125 bp, Zea mays
  Clone ID: MRT4577_18940C.1
gacccctccctccccgtcccgtctccccttggcagcatgggccggtaacgcacgcctctgctgccccagctgaatcctccctccggctcctagtagattcctacccccctcccccgatcccggcctgacacccggtccacggcagaatcccattccgattcctccctccccgtcccgtctcccctctcgccctaggggccggggggctagggttcgcttcaccgccggcctccccctccgacgcggcaccggcccccgcgcaccgggcccggatgctatgctgctgagctgcaggaccctctccacctgggtgcgccgcctcgtcgcttgcatgggagggttgctttggatgctgtgctaagccaactccaataatagcagtagacgagccttccaagcggttgaggatccaggggcgatcagtaaggaaggctagcctctcggaggacttttggagcacgagtgcgcatgagatggagaacagcgggatccaatcgcagaggagcatgtcttcgatcagcacgttggctcagtccagcgatcagcatgcgtcaggaagttgcagcaacccgaatgagtttatgaatcaaggtcttatgctctggaaccagaccagacaacagtgggttggaagcaaaaaacgccactctagatctcaacagcctcgagaaccaaagttgagttggaacacaacgtatgaaagtctgctaggaagcaataagccattctcccaaccgatacctcttggcgaaatggtagatttgcttgtggacgcttgggagcaagaaggcctttatgattaggcctgtggagttcattatttgactcggattaatcgcttaatgcagaagctctaggttctcaagcgttatattttctgagcacaatggtgtaccatggatgtatcatgaaacatggcagcatccttatattaagcaattgtaatatattattcctgtcaagcttatgagaacattggatgacattgtacctggtgtttttatatgaaaactttgggtgatctaggcaactggattaaaacaaaaaaaaaaaaaggccggccgccaccggagccatgggaagtgaaattaattgaaaacagaagaaatgtgaggttattgcccg

SEQ ID NO: 95863 - DNA, 101 bp, Zea mays
  Clone ID: MRT4577_18941C.1
gcgacagcgtccgaatttaaaacattgaagctggctatgaactgatggttctgacctaacacatacatggacagtgaagtcactgcagtacgacccctgat

SEQ ID NO: 95864 - DNA, 360 bp, Zea mays
  Clone ID: MRT4577_18942C.1
cgagtgggctgtgcgttgagaaagacgtgttgggcaggttggactgcttccagagtcatccgaacctacgtccgagcctatattatcatttggtttgaatcgcggaacgatgtcgtccgtcactacgttgttctaataatatactaacacgtgggatcagctcactccgcaagaaagtgcaagaccacttcgtccggagccaggccacgatggatgagccaaaccatcaaaccaaacacgctgtaaatgtcaagtacagcgggccacaatgagctgggtaaccacgagtgggctgtgcgttgagaaagacgtgttgtgcatgcgctgaccggtcgtctatagtacttaagcaacaatcag

SEQ ID NO: 95865 - DNA, 169 bp, Zea mays
  Clone ID: MRT4577_18943C.1
gcggggctaactacttctggtgccgcttcaagcgcgggcttgaccgtttggatcgcggagcatgacgccgtgcagctgcggccatcctgggctgcgagggcctgaagcccttctgcgccatctactggactctcctgcagcgcgggtaccacacagggcctgcacgacg

SEQ ID NO: 95866 - DNA, 721 bp, Zea mays
  Clone ID: MRT4577_18944C.1
acctcgaggccggccgggccgggactagtactagaaaaatggccaaggcagccgccaccgcgaatgccatcttgctcttggctctcttcttcgccggcgctcacgcgaatgtcccatgcatactccccgtatgcaagacggtgggtggcgggagccggttcttcgacgtgcagttctgcctggcggcactcggctccgatggccggagcgtcgaccactgcctcgactaccaggtctactccgccattgccgctgacctcctcgcggccaacctcaccgctacggcggccaagatcaacggcctgctccggaagagcggcggctccgccgacgaggccacgacgcgctgtctccggtcctgtcaagcgttgtacggcgacatggaacggaggcagactggctgcgcggctgccgtccggggcgtcaggaagggtgaggccaccaggtgcttggaggaagtcgcgtcagctgctgaggagtgcgaggacgggttccagaggagcaaggtggcgtcgccggtgatggcggagaaccagcaagtgttcaagctcgccaagctcgctgtcgcgctgctgcgcacggtgtatgctagatgaataggcttcttcgtgcagtatgtaggcagaaaatgttgttgtactggcagtctggaactgcctttttcagaataataataataataacaaactaaaaatggtgtgacattctatctcctagggcc

SEQ ID NO: 95867 - DNA, 532 bp, Zea mays
  Clone ID: MRT4577_18945C.1
ccggccggggccatcaccgaaggggagagagatgaggaccgccgcaccaggatctcgtccatgccgatttttttagcgacgccacagttcccctcgaatccataagtcgagcagtcgagggtcgcaggaatccacactgagagcaccaccaattccacgtgaagaacccgggcgcagtgcaaatttcttgccgtagctgccgcgccgccgggcaatcgcctcgcttcgtggactgccttcttcgcccttctatccaccgtgcggtcatgaggatccgaagagtcaccctaataactggaatctcaagtgccaggtcaagaacaggtaccacaggatgaggcacatgaaggatgctgtgacgagttcgtgagaggtctaggtcgtcgtctccaagtcaactttgggttgatggaccgttgtctccttataatgtaattatttatttattttgtacaggactcctattatatagtaaagatgtgacatttgatcctatgccatgatcgataaaaaaaaaaaaaaaaaagcggcc

SEQ ID NO: 95868 - DNA, 434 bp, Zea mays
  Clone ID: MRT4577_18946C.1
gtcgatcgcgtcgcgaccagtccatgtttccatgcatgaataacaagggtgtgctcggtctgggataaacaaatgtatgatcagagcgtccacaacccttccatctgcgcactagtagtgaaagtctaaccattgtactcccgttctaactacaatctggcatctgcatacatcatttcagccattatactatagacacattgtatcacgtccaagacctacatactactctctcagaaatttcaacgatttggtcattgctgagagcgaccacgacagatccaacgactagatgtgactgcatcaatcgtcgatctgacctcagtaaattagtattacacttactaatggtactaagtaactatattacacgttatactatgatgtgagctctaaatctctaattatgtgaaaatttactgaccgatcctata

SEQ ID NO: 95869 - DNA, 1856 bp, Zea mays
  unsure (1)..(1856): unsure at all n locations
  Clone ID: MRT4577_18947C.1
gcagttccacggcgccaaggagctattcctctccgaccatttcgacctgcagagcgcccacacaattgaggggaagtgtgttgtccactctttcaagaactataccaggcttgacaatgttgggcctgaggacttcttctgccgattcgagtacaaggcggccaccggttcgttcacccctgaccgcgtggcagtgtatgaagctcctcaacccttccattgctggctgtcccttttactgtgcatgcatttttagcttgcttgtgatgatttcggcgcctggtttctctcaaggtattgcaaatgtgagatgccgtacaaccccgatgacctcatggtgcagtgcgatgcttgcaagcactggtacatttgttacaatgatttgcaatttacatttcactgatatttgcctttgttccccgtctattatgtgactgtacaaagcatgttttaaatctcctgatattgagtttagcggcatcatcaccgagctgctaacacagtgccaaacgcaccacccagagtcccagacctacctcttcagtccttgtccacgagttctcgctgacgctcacaccttttatctgttttcttgcccaactctgtcttgcctgcactctgccactctaactttccaatactcactctgctgcaaaacggcttctgctgcattgctgctggggaggactttgcgcccaacagcacacacgtttgtggctgcgcttggggagagtgtcgtggatgagatggccatgattcagcagggctcagtgctcctatcctagatcgaggaggagctcaagcacacatcacaggggctcaaggacactgaggtggtgggccagaaagcgccgagcagagggcaagagtcacacagccagtagtcagggcacctcgccgactggagctaggtgcttctgtgtgcagaggggggggggagccggcatcaagtggagctgttgcttcttctattggtgcgctgaggtggagagctggaattggacgatgctcgacaaggaggtactcttgtaactgcggcaggcagtagagaaggtctcagcctgctgctggcagtgttccgacgggtgttctgcgaggaacagcaagtctcaacaatgtaagcggtagcgcggtactaaatcacatcttgattagcagatttcgcgcactaaatccggctattagtgctaaaagtcaactatcccagccgctgttctgtgcagctcggcacgatagttgtagcgtccactatagctggagatttagaacttcggtacaaaggcaggaatttcacgtcagttttatctgcttcacagcccaagaggcttcgctggcccagtgcccttgtttcaagcccagtggattgtttagctggagtataagtagaagtagccgtgtaggagactccaacaattgtatcgaaatgtttaactcataatcatttaactgttatgttgtcgttctcttctgtccccttctttccgaaggctaccgtcacaatttgtatcagattcatggatcctagatctgttcccgctgctgcattaccattcaccagattccagggagcctgcggtgcgatgggcttgctcagagcttcactgagcatggtgccaagttggagtgttgcttcgtcgatttggtgcgctcccatgacgactcttatgccgccttgagcaatgataggttgattaggagaacaaccgctccgaacacgtcaacaccaagtgtgatgactgatgattgtgtctccaccttagaagctgctgccacanatctcagcacctgatgcctggaagtggaggccgctatcgatatctaaagctgaacaagttgacaaagcattggtgggactg

SEQ ID NO: 95870 - DNA, 308 bp, Zea mays
  Clone ID: MRT4577_18948C.1
tttgaaggcccaaagcggtcccaccaaaggatccaagattacttaggcttgcttgccacgttggactttctgcatgtgctgatactagagaccattttctgacagtgcgtcacacgctgctatagctggcattactccgccgtacctcaaccaacggggcttgcagaaagtgaaaacccaacagttgaccctataggatacaacaggcaatcgatagtggtatcataccttgatcacccttgatgctccaacgatcatcacccttattacaggcattacgcgcggtgcatgtagtggctacaaacatc

SEQ ID NO: 95871 - DNA, 1370 bp, Zea mays
  Clone ID: MRT4577_18949C.1
tcactctcccctgaaatatcaagtcgagctgtcagtttgggggaaaggaaatatctttatctctctgttgttctccaatttgtgcacacactgagataagtttggggtggacaacaaagggtctcgagctccagttcctgcagcagaaaatatcaactttggatccactagtgcctgtattcagagttcttatctgacccttttccctgtctatgttactagactaagttcagtgtctagggggctgattggttgcatgtgtgcgctcgtgcagggcccattagatacaagtttttgacagtacagtgtgtttggttgcttgaacaaatatctaggccagactacgctcgtgcaaaataaccatctcatccaggcccatcacaaacggccaaaatcgggttttcttcggagccaggctccactcattccctgtcgtcgcagctcagagcacgcgcagccgcctcgcctcgcctggagctcacgcagccgcctcgcctggagctcgcgcagccgcctcgccttgcctggagcttgcgcagccacctcgtctggatctcgtgctagggttggagccagggtcctctcacagccgcctctatcctcgcctggagctcgcgctagggttcctctcgcagccgccgctgttgaggtgctacttgcaaaagcgtgtactgaacagctcaaaaggccctgctatatgtgcactgcgtgctcagcctgataagagagagtatgcaatagagatgaagaacagtgtggaaagcacagaaaatcttttcattagagaagcaatggctacagaggttttaattggaaaaaatggacaccattgagggtgtttgcactttcttcagcatggactttatgcaccatctgttgtacttagcaccagaacattcatgagtgtttctggggccaagctgctcggctcctggggcgtggacctccccatcaggccgctgcacacgctccacctctactggcgcgtgaagcccggccaggagcagactgtctcgacgagcgccgggttcccgaccttctccagctacggcgacccgcccgtgtacggcgcgccgtcgctggagctcccggggctcatcaagatcagctgcattagatcttagagtacactgttttacacaatttggagttgttactactatcaagctttagactttagactttggagtacactgtttttacactgtattaagctttagccttttatgctacagtgtgtaaaaaagcaagctttagacagttaggctaatctatagacagtgtaaagcttgattttttgacaatcccgttcaaattcttagaacaatgcggtctgaaagtttaatacagttctgacaatagagttgagt

SEQ ID NO: 95872 - DNA, 221 bp, Zea mays
  Clone ID: MRT4577_1894C.1
cgtccagaatggcctagggccctcctcctactgccagtgatgcggacattaggggcaaggggaataactagtatacaagaatttgactaaatgccctcgatacagacacacccatcgcagagttttcccatagagggcaaccggtatcggaaaggatgggagagatactatttccccaggaggtaagttcattatcgggctaatagaacaaccccggacaa

SEQ ID NO: 95873 - DNA, 866 bp, Zea mays
  Clone ID: MRT4577_18950C.1
tcgaggccttccgggcgagctggcacacacagggtcggccggtttctgatgttgggttgggaagagaagagatagctcctcctcagcatccgccttcctcctcggcggccatgctgctccgcctccgcccgccgcggcacccgtccaccgcggcggccacaaccctctcttccttcctcccctctacttccttccgccgactcatccccttgccgcgctggcgcccccctccgcgccgccgcctctccgccgccgccaaggattcgagcggccggttggatccgcgccaggagcggtacgacgtcattgtggtcggaggcggccatgccggatgcgaggccgcccttgcttcggctcgcctcggcgcgcgcaccctgcttcttacgctcaacattgaccggattgcgtggcagccttgtaaccctgctgttggtggccctgcaaagtctcaacttgtccatgaggtagatgcccttggtggtgaaattggaaaaattactgataggtgctacttgcaaaagcgtgtactgaacagctcaaaaggccctgctgtacgtgcactgcgtgctcagactgataagagagagtatgcaatagagatgaagaacagtgtggaaagcacagaaaatcttttcattagagaagcaatggctacagaggttttaattggaaaaaatgacagcattgagggtgttcgcactttcttcggcatggacttttatgcaccatctgttgtacttaccaccggaacattcatgagtggaaaggaattggggttggtaggacatcaatgccctgctggcgagctggagagtcagcttctcatggactaactgaaaactggcaggttctggggttttgaaact

SEQ ID NO: 95874 - DNA, 314 bp, Zea mays
  Clone ID: MRT4577_18951C.1
gaaaactccacgcttacatgaactgcgctcaaaggaaacccaagcagtccgtgcgcccgctctgaaattacacactgcgactcacagagttttatagggggagagatggatgggcattattttgcgccggtgggctcctgctccttgggcgtgtccaaaacaacgtcagaggtggggtaagcatggggggtgagggcgggggcgtttggctaatctgtccttcgtcaagggagctttggtcggactggtacacggagccggagacgaccttgccggcacaggaggagcaggaccccgggcgggatgagtgggga

SEQ ID NO: 95875 - DNA, 450 bp, Zea mays
  unsure (1)..(450): unsure at all n locations
  Clone ID: MRT4577_18952C.1
cccgggncgaccccgcgnccgcccggctcccggccgccacgcggaccacaccggcgncccncgnggnnggccccggcccgcgcggcgccggcgcggggcccancngcgcgnccccggccaggncccccnccaacccgccctacgaccngncggccgnccggggcagccccancaaggagnccagcgngncccgcgggaggaccgggcgctcangacggacangancaccnacgccgacaccgacgncgncnncgngggcgccggctccgcggggctgnccngcgcgnccgagcncgccaagggccccgccgngngcatncgccccgnggagcagncggngncgccgggcggcggcgcggggcngggcgggcagcnnggcncggccccgggggggcgcaagccggcgcnccnnggccgggacgagcngggcggggcgggccgacgggccgg

SEQ ID NO: 95876 - DNA, 444 bp, Zea mays
  Clone ID: MRT4577_18953C.1
cttgctcgctgcgccgtcgcctccgacatcgttccttcggccccacgagcaaccgataatccgccggcgttgagatgttggcttagtcaggatctcctatctggcgactagctcctgtcggattcattcacctacaaggagatctagaacggcgtccctgtgggcaggtccagaggaaagtggttcacccaaggccctagatgatgcggacattgggggcaatccatccgccgagggagtggaggacgagagcgttgatgacagcagctgtgaaggcggatgatattgctgacacattccagtctacaggaacagcctccttttgacaagaaatgcatattgtgccttacgtcaaacaatacgtcaagaatctcactgctgtgttggaggcagagaaagtgaatgatctctaatcggatgtcgaggctgcagccgagcttctcc

SEQ ID NO: 95877 - DNA, 291 bp, Zea mays
  Clone ID: MRT4577_18954C.1
tctctctctacgaactccacctcgcgaacagccgctgcttgcctgccgtgttggagagaacggaagattagcgagcgagggagagggacagcaactccctcggtcgctttcgacggcctggatctccccgcacgcgggatcgtacgaccggcacgctgttctcgctttccaccgcatagtaaattgccaaggctgttgtaatgggggtcaacggtcatcacgaacctcgcagtagatgtaatggcaccgtctgccatggtagtgtaagatcactagatcattttggtgatg

SEQ ID NO: 95878 - DNA, 397 bp, Zea mays
  unsure (1)..(397): unsure at all n locations
  Clone ID: MRT4577_18955C.1
gcggccaaagcgaaactcatggaaatcaacaaggagcagtccaagcgtggcaagtanccagggggacggggatnaaacgggtgggggaaaccactccacaaactaaaaaaaaataccctaagctggcaaactggcctatgactaacccacaagggggagggcggggctcactgggggctgctctttccgcacgaagggagactagagcggatgtggtcttcacggtttggtctatgccagatactagcgtcatgaactggctttaggtaagattttccataacttggtctccatcagctatatggcgcatggtggctacttccaaacttatatctggttttgggtcgggatcggggtgaactaattggctcttcgaatttatatcatgatgggggcg

SEQ ID NO: 95879 - DNA, 258 bp, Zea mays
  unsure (1)..(258): unsure at all n locations
  Clone ID: MRT4577_18956C.1
gacgntggcgantgggnaacgaancgaagactcgggtgcaagcncgcgcgcggntcggatttcgncaancgtggtggcgttggcnggcgcgggcctcgccgtcttgctttnagtagtagactccgactnttcttcctggcctcanttagtcacgncgntgttgtcaccccctccgcgtgcctnganttnctgctngctngatttcagtttcatcttttttttttcctttggngttgttatttaattttaccggcccta

SEQ ID NO: 95880 - DNA, 701 bp, Zea mays
  Clone ID: MRT4577_18957C.1
tatcagtggccgatcatcgcattagcttgtcgtatgaaagtgtccagcatgtcttgtctccgcatccttctcctggtaccgctgttcctctcgtcgggaatgtccggctgcttggcgtcctcatcgtcagcttcatcaggatgtagctgcggcgacagcacggcccacgatttatcttccttcaccagtgactctgctgctgagctggtgctcctcaaggacgccgggatcagcaatggcgtcctccatctcacggcagacagctcgaggaaccgcaacaggtccggtgccgcgctcatgccaggtccggtgacgctgtggtgccaagaccccgacgacgacgcggaggcgaagcaagacgcgtcctttgaagcctccttcaccatgggcatcgtcagcaatccatcaccggacgaggaaggtgccgtgcagaggaaaggagatgccggcggcggcggcggcggcctcgcgctcgtcatggttgcctccctcaacagcccagcgctcggcatcctcggcctcagcaacaacccttccgatcaggtgtcctcttcctccgccagcagcggctttgtcaccttcacgttcaacacggtgaagctgaagcaatccaatggtgaccccgacgacagcaacggcaccgtcatcaacctagacgttgttggctccgtctccggcgccgtttttgcgcgctcaccacc

SEQ ID NO: 95881 - DNA, 490 bp, Zea mays
  unsure (1)..(490): unsure at all n locations
  Clone ID: MRT4577_18958C.1
aattataaacaaaatcctagccttacaaataattaaaaagtgcggngggnnnnncanngancaccacncacaccaaccacacnaaacctaacccacccnnnncaacaaccacccnccaaccaaaggaatacacatgaannagnnnannnnnannctctctcgtttttactacacctcatcacctnnnaacagggagcactcatcataaatcctcttcagagatattgntatgcttctcattctcatcttttaacctgcttttttagctttaaactagttcctcttaagctgtattttgatcctgccactcggcaatagaaactaaccaactatacataacgagtgccccaaatgaaacaattgctcatcttagtaactgatctaatattcttgccttttacataaactgaaacccataaacaataatgaaaacggcgctaaccctttctggtctaaacatgtacaaaaattgcatgcaagtaatctaaaa

SEQ ID NO: 95882 - DNA, 209 bp, Zea mays
  Clone ID: MRT4577_18959C.1
aaaaattgctaaaaaaaacaccctaaattttttttttaaaaatggttttaaaaaaaactaccaaatatttttgaaaatatgcataggccaaaatttaaacggcctctgcttatttgaagttgtttgcttattccaaacggttttttacatggcctgaaacctggggtactttgaaaccaaactaaaagcccggaaaatacccaggtttt

SEQ ID NO: 95883 - DNA, 391 bp, Zea mays
  unsure (1)..(391): unsure at all n locations
  Clone ID: MRT4577_1895C.1
gcttcattaccacccgcaccgaggcgacaagaccgggggatatatgatngagggcgcggcgacgcacaaggacggctagggccagcgaggcaccatcaaggcaggcgacgagcagaggatgacgggccgccgaggaatagtgcagcacgagacgcccgccaggcccctgcaccgcacaggggcaccgaagataggggcaacctttacaacatgaacagaaggacagcacccgaccaccaagagacccagagcaaggacaaagggagcacccaacacggctaccagagcggaacggtgcgcatgatcgacgagcaaaccatgggcgtgcgctcacagtgcacacgcagactgcgaccacagtactaggactgacagcgcgcccacacagagc

SEQ ID NO: 95884 - DNA, 543 bp, Zea mays
  Clone ID: MRT4577_18960C.1
gcatccaccttttcctcccccaaaccatggacttctccaccggcgggagcgtgaggkgggcggcggaggcgccacsacggccccgcgcaggcgagcgctggctggagatcgccgagaagctcctcgsggcgcgcgacctcgtcggctgcaagcrcttcgcggasgtcggtggaggcgaacccgctcctcgccggcgttgagsaactcctcgccgtcgccgacgtcctcctcgcktcccagttcatgggcacctcgggccagccggacycgctcgccatcctccagctgccgcccggagtcagccccgaccaggccgccgtgtcccgcgccttccgccgcctcgcgctcctcctcggtcccagcaacccgsacccgggagccgagatggcgctccgcctcgtcaacgacgcctacgccttcctctcggatcybtctcgccgccccccgccgcccgccgatcccgccactkgtacyccttactcctcccagtatcccgccgcsgccgctcccgcctccgacaccccggagttctggacggcgtgc

SEQ ID NO: 95885 - DNA, 614 bp, Zea mays
  Clone ID: MRT4577_18961C.1
aattcctttcgccttcccctctctccccctcccctgtttctccctctaccagtctcccctacggatacatcgccgacgacccaagcaagcaagccgccagcagcaacaaaccaacccaacccaatccctgccggccaaactccaaacttccaaagccatgggcacctacaagtgctgcctcgtcttcaagcgccggtaccgctggacggacgcgccgccgccggacgacgtgcgggcgctcttcgccgtgcactccggcggggcagccaccatgggcgccgacggcctgcgccgctacctcgagtcctccgaccccgacgccgccgacgacgccgagggcgaggcggaccgcctgctggaccagatccgcctgcagggacaccagcaccagcgcgccggcccgcgcctcccgcgcctcggccgcggccagctgctcggcctcgacgacttccaccgcttcctcttctccgccgacctcaacccgcccgtccgccggccccaggtccaccacgacatgtcccagcccctctcccactactacgtctacacgggccacaactcgtacctcaccggcaaccagctcagcagcgactgcagcgacgtccccatcatca

SEQ ID NO: 95886 - DNA, 433 bp, Zea mays
  unsure (1)..(433): unsure at all n locations
  Clone ID: MRT4577_18962C.1
ccgcggcagaccggccgganttccggggcgccgaaagcgcgggcacagaccncccccgcancacgagagagggcgaagaggagcacgcgcccccgaagccagaaagagggcaaccagacgangagaggcgcgcagaccacacaccacccagaacccggctttttaccgggggggaaacaccccgacacgaccagagaacacccacccccacgggagggcacggacccccagcatcagcgcnnccaggngaggganaggaggcgacacacacaagggagcgccagaggacgcccacggcgcaaaggccancggcncnaggagcnagccaagaccgcagcaccaaaaagcgccacccgcgcgggcagagagccccacaacacgcgcggaggagaagaaaggcaagccagacagaacccaggcgacagcaccggga

SEQ ID NO: 95887 - DNA, 441 bp, Zea mays
  unsure (1)..(441): unsure at all n locations
  Clone ID: MRT4577_18963C.1
accctgggcaatacagtttccgggctcaataagaacaaaactagtttgttgttacaggcaggaggctggccatgcctgaatcatgaccgatgcaaccctttagggtccttttcaacacccatgcattttgctttccacagaaaacaactgggggggggggcagcgggttttctgatgcaccaacgttttagtggaacttgaggctggggagcaccttgttgttgacggggtcgggggggggggccagccggttttggaacgggccaaccccggtgacgagcccctggatgaaataacccagggtggggagcatggggagcctgccgttcttgatctccttgggcttgagcttattcatttcctttttggtcttgcccaagcccagcgggttgaagaggggcccnccggggtaggacgggtcgccggagcccgcgaggaact

SEQ ID NO: 95888 - DNA, 186 bp, Zea mays
  Clone ID: MRT4577_18964C.1
agtcccgttgttgtcccggcggctatcagcatcgcgctagctgtgggggcagtcttggcttcggggttgtttgggctggggggtctaggctcggtctcaggggtcctgggcgtactcggtgggactagtggtactgtgggggggggggtgggcgacgctaagcgccgtgtggctgacgcattaggc

SEQ ID NO: 95889 - DNA, 159 bp, Zea mays
  Clone ID: MRT4577_18965C.1
aagacgaatacaaacatgacatttttgattaacaccctccgataaacctgacctgttcaatttggcggggaaacaaaagagctcttgtactacggtcttaaaatagcccaacttttttatccgggttgggcgaacaacaagggccgtagcccagcaccc

SEQ ID NO: 95890 - DNA, 361 bp, Zea mays
  unsure (1)..(361): unsure at all n locations
  Clone ID: MRT4577_18966C.1
cctactttgggnnnnnaaaaaaaaccaaaaggggggagccaagaaaagnccccccaaacaacccgggcaacacccnnaacacaaaggagcaggacaacgggccngaaaacagcacaaanaaggaagccncccacaaaggggaacggaacaaaaaggccaaaaaaccacaggacgggacanngcccacaccaangcnnagaaccgacacaggncacnaanggcacgcaaacaaaaancccgggaaacccaacggaaggggcaacgccccgcagaagcgaaggaacgcgagccgaacgaaaggcacgagcacgcaaaaaccgggcaacgggccggccgaccgaaagaagacacgacccccgca

SEQ ID NO: 95891 - DNA, 206 bp, Zea mays
  Clone ID: MRT4577_18967C.1
gcacataaaagcccatagtgtccaacatgcagccaaaaatttgcttcttagctcttggcttttgcagtgtgtaccgaccatttccacatgtacagctctatgttccttttcccataccttacaggggtttaatgggaaaccaatgtaacctcagaccaacagaatgaacagatttacattataccttgtctcaaaccgtagcctat

SEQ ID NO: 95892 - DNA, 2997 bp, Zea mays
  Clone ID: MRT4577_18968C.1
caggccggccgggccgggactgcgttaccgaaatttcttcattgcaagcgtctactttctctctctctctctctctctctcgttgcccccgcatactctctgtctctggtggcggcgagtagcatactctctgtcttgggcgctctgtctctggtggcgacgactcgccgccgccgccgccgcgataggccacgcctcctggtcgccatttccggatccttaccgacgacgcgcacccaccaccccatctttttccgttcctgctgtgcgacacacaaaccctagctgtatcgggtgggctgtgaaatggaccaagctgcagattcctctgaactgcttcgtcgcatcgaggagctccagcgcgaaaaggatgaaaaacagaattctttggaactattgttaagacggattgaagggctacaatatgaaatggatgaaaaagtagatcttgttgaagtgttaactcgtcaagttgaaaatctgcagcgagagcgtgatgagctcagaaaagatattgagcaattatgtatgcaacaagctgggcctggttatgtttctgttgcaactcgaatgcttactcagaggacagcagctttggaacaggatattgagaacctccagaaaaagttaggtggttgcttaagagagaatcaaaatttgcaagaggagcttgctgaagcttatcgaattaagagccagcttgctgagttacatggtgctgcactatcaaagaacaaggatcttgaaaagcaagtaagatttttccagagcagtgtcgctcaagcgtttgctgaacgggacagttcattaatggagtgtgagaaagcaaaagagcgggaagaagcagtgtcaagaaagtttgctgattttgaggaaaggatgagagaatatcaatcagagattgatgaacagaaacacttaaatgatgacttgcagagagaactgacagaactgaaggcacatacagaattgtccttgaaagttattctaaaattctatgaccttcgttgcagagactctggatgttcttcaagccttactattgaagagaagtgttcaatccttcttggtgattctgctgacaattggagttttagctctgatggcggaacctcaactttgaagtacattgtaaaccacccttatccattataaagaatgattcatatttaagtatgcgatctgtttttttttttgcatttgtattgcaagatacaaattctctgtggcactaaacatcatctggcgcagagccagaaaattatagatatggggacgaaatgctaaaaaataaattattagaaggcaaaatcagcattttcattgaattttatgtgcataagaggaacttatctatcataacagagtgcttgatcctccctccttccgcccctgaacatgttaatgcattgttggctaattggcttgttcagttttattctgggaactaaatgaatgcagaaggtaggaaatgatgaaactttgctggcatctgtttcaggacttatgcagttatgctttgttcccagtttctcattcaacatactgctcaatacatggatagaaaacatccgtattattgatggaagtcataaatttagtgctaatcttctcatttgtcctattcagtaagttatagttcagtatgattgtcatgttctatttgacctaattgtgtcatgtacttgagtaatacaacatgacttgcaggccctaatttgttttcaagaactgtttattgatttttttttccagttgatttggtcctaaaccaaagtgctttgcatagttaaggcgagtgtttgacccccgccttaccttcgaagcggtaaagtgtaaggcgagacaacaccttaatcatatataaatataggaaaatatagaaaattagtcttgaatagaagtacgaaagtaccaaacagaagcctataagttcaatataagcaaacataataggctaaaagtccaacataagtaggttctgatactctcatctctcaagttctgatacatcatcaaactcatcaaaaatgggaggattactgtcttcttcgcgttctctcccaccggatatatcatcatcttcactcacattcaagtcatctttcgcatgattggttgccgcgtcctacccgcccagactcgcggcatgcgttggccgggcgcgagcgagtgtttggttgccgcacccacgccctccggactgcatgtgcgcatgcagtttagtgttttttttcgccgttctgcctgcaagcgtggagaagccggaaattaccttcgctgggggaccaggcccgcacgaggcaggcacgtgacagaccggcaaccaatcagcccccttgtggatctggctcaaagtcttcgtccatggcacctccctcttcttcttacggcctcattcttgcatgctttctctatgtaaggccagaactttgtctctgactagcttgccttggaaggttgtgccctcgaagcgactccgatgctctagtagcaacatcaacatgatccatcatgtgaggtcaacaatattatcattgtccctgctggggtgtaccactgatgagtatccactcgttgtcccaatcaaaatcctcaataattaatgggtcatagcttgtgccggctttctccctcatttgaaacctacttcgcatcttttgattgtatgaaacatagaccaagtcattcaaccttttatgcaacaacaagtttctcttctttgtatgtatagtaagtaacaaacccaacctaaataagtagcaagaaatagattgaagctagtaaacataagcgaagtagcaaaaaatggacttacaaattcaaatgtgcttcaattcctctcacaaccggatgaggaagcacaaagtctaaccagtaaccacacgcttggcaaacctttgaaattcatatgctcggccgccatatgaacgttatcaatcaactacgcagatgcaaacagcgacacggtcacacacataggtatacaacagcagg

SEQ ID NO: 95893 - DNA, 909 bp, Zea mays
  unsure (1)..(909): unsure at all n locations
  Clone ID: MRT4577_18969C.1
tctatgcgtcctccgccgccgcttcgcgcgcccacaatccgctcgacgtaatgcgggaccgccccgccgcgggctgcatcgtgcaccccgcggctctcgcaggcttcgtccgtgcgcgcgccgctgggactgcatccgcgtcgtgtcggttctcttacggcaaagcgctggccgcctgtgccaccgcctccgcgccgttcgccttcgcggagcagcgggggtgcgcagcctgtttttatggactctcgcgggacgcgtacatctgcagcaccatggtggacctgctcgccaagcacggccgcctgggcgacgcgctgcgggcgtttgaggacggggaatatcgcggaagcgtggtctgctggaatacggctatctccggggcggtgcgcaacggtgaacacgctctcggagtcgagatgttcctcgacatggtgaggggttctacctgcgagcccaattcgttcacgtattctggggtgctcagcgcgtgcgcggctggtgaagagttgggggttggaagggcggtgcatgggatggtgctccggcgtgattccgaatacgatgtcttcgttggaacatccatcgttaacatgtatgtgaaatgtggtcagatgggcgctgccatgaatgagttctggaggatgccaatccggaatgtggtttcttggacaactgcgattgctggttttgtgcaacaggaggacccagtaaatgcaatgctgctgcttacagaaatgttgcggagtggtgtggcaattaacaagtacacggctacgagcatattgctcgcctgctctcaaacgtccatgatacgggaggctaatcangtgcacggcatgattataaagagcgagctgtacttggatcatgtngtcaaggangctttgatttncacatatgccaatgctg

SEQ ID NO: 95894 - DNA, 501 bp, Zea mays
  unsure (1)..(501): unsure at all n locations
  Clone ID: MRT4577_1896C.1
tggagcggccgccggggcgaggggcggtaataatgtaatggagccgctggctagctacctagctcgctagtttactcatttagcggcgatgagtagcgtagtgtcacccatcaccatgggtggcagtgtgagcaatgacctgaatgaaccacttgaaatgggaaagggagtggagtgtataagggaaaaaagaggattgggaaaaaaaaaaaaaaaaaaaaaaaaaaaaaaaaaaaaaaaaacctaaaaacaaaaacaaaactaaggaaaagtcacaacacaatcaaactgccttcctagtgtatccgagcccagtcccaaacttagcttaatcatggccataggctgggctctgtgcgaagtgggaatccgctcacggttccacaccacataccatccagacccctaactntaaaagcctaggctgcctaaccagtggggtaacttaccttaaattcattgcgctgagtgaactgtctcctttccggaaacctaacctgc

SEQ ID NO: 95895 - DNA, 258 bp, Zea mays
  Clone ID: MRT4577_18970C.1
gagaaacactcattcattgatacctttgtttatttactcggccacaacagaccatgggggtgctttgacgagagagggcggctcaccaagcatgtacacggtatatgcactgtccccttgatgtaccatgcccgcggcatacatcagttcggtcagcagagacactccaccatacacaactcgaacgatcaagtggacgtggatgcactgctgctctgacatcataatctgatactgcgaattatgagatggctgcac

SEQ ID NO: 95896 - DNA, 376 bp, Zea mays
  Clone ID: MRT4577_18971C.1
caaaaacccggcctccaaaacccaggggaaaaaccttggtaaaacaaaaaccctttgaaaaaaaaaacttgttaagcacaaaacacaccgccggaaacctttggggcccccccttagtttgtccggtccctaactgaccccacccacaatcagggtttaaacctaaagcaccccttttaatgcgggggccttccgggccttttgggaggcggggaacttaacggttttgggtttggccttgcccttggggggggggaactttttcggtttccccacaacctttttttggggccttttgggctgggtttattaaaatggcagggcctcccaacccccctttttaccttaaaaaaaaatagatattaaaaggtttgtt

SEQ ID NO: 95897 - DNA, 196 bp, Zea mays
  Clone ID: MRT4577_18972C.1
cagacacgtaggtacacacttgaacttataagtcaacagtgtagcatcacaggtgagcgcgatattgttatgctttatgctccttgcgcatgttgtatgtgtctgctaaatcgtcaattatagctcaatgctcacatgcttctattgctttccttcttaccctatacttttcatcaatgatagctttagtatgtga

SEQ ID NO: 95898 - DNA, 1212 bp, Zea mays
  Clone ID: MRT4577_18973C.1
ccggccggcgcagcgtccaagccccgcccgtccggacgccgcgccacgccgtccgggccgtgggccaccaatggcgacccccaccgccaccgcactcacctgctcctgccgcccttcgtcgccctcctcatcatccgccgccttccgccggctgaacatcttcgcccccgtctcgggcgcccattctcctcctcgacgccgcctccgtctcgcgccattgcacgtcgtcgacgactccaagaacccccccgaggagaggtctgagacggataagatggtcgacggcatggacttcggggagctctgcagcgacttcgagtgcataagcagcccctacgtggagtcgacggcgaggcaggtcgcgcgggacatcctggagctccgcgaggacaaccgcgcattcaactgctacgcggtctccgtcaagtacaaggacccactcaggacatttgttgggcgtgagaagtacaggaggccgttgtggatcaccaaggcgttggaaaaccctgtagtgacagtccaggaaatgtcaatgcagtcgacgagcaacctgaccatcagatgggcgttgagagggaagcctaagaacccgttgttcgcgagcgtcggaggagacgtcatcgtccgcgtcgagtcacggttcgtcctgaaccagataagcgggcaggtgctggagcaggccgagtcctgggacctctccgcctcgtccctccctgcccaggcctacttctggctgtcccgaagggtctactccgccgtggagtccgggaaggacgcgatcgaagccgccaagagcgcggcgtcgtctgggctgacgaccaagggagaccagaatctcgaggcctatccggatccttctgctgatcctacaaagttctttcagaggccggatgatgggttcagccaagacgtgtaccagatcggccttctcctggccgtgatctacttcattgtacagtttctgaaggcgaccctgtgaccggctgcagcctgtcgaagaatgtagcctgtgtgcagtatacatgtatgtaactatgcctagcaacattataaaatacgggcatatatcatcctgccatctgacctgcgacagatttgtgacctttcaccactgctgtcggtgatattagtttggcacgcaagttgccatataaataaaaaaaaaaaataaaatatattaaatattaatattaaattaaaaaaatataaaaa

SEQ ID NO: 95899 - DNA, 251 bp, Zea mays
  Clone ID: MRT4577_18974C.1
gtgtgatgtagcagtatgtgtgttatcgagtagctgtgtatggaatatttcatgggcagatgatctaggagatcttgtcttggtgcaagtgcgctacacagtggagaaagatactgggctactgagttccggtgcttggagagttgctgcgatagatgatcttgaccaatcttcacaagctctacaagtatcagctagagtgatccaagacatgggaattaaacaccaattccgatcattgtgaagctgag

SEQ ID NO: 95900 - DNA, 948 bp, Zea mays
  Clone ID: MRT4577_18975C.1
ccggccgggcatcacctctcaacgattggccagctcgaggccggccggggcaaacccctcccagccttcatccaacatccatcgaggacccggccgtcaccactaacgacaatcaagatggtcaacctgcgaactcagaagcgcctggcctcagcggtcatcggctgtggcgagcgcaagatctggctcgaccccaacgagcagagcgagatctccaacgccaactctcgccagaccatccgaaagctcatctccgatggccttatcatccgaaagcccgtcacccagcactcgcgatcgcgcgcccgcgagctgaacctcgcccgacgagagggccgacaccgtggttacggtaagcgtaagggtaccgccgatgcccgtatgcccagccaggtcctctggatgcgccgcctccgagtcctccgccgtcttttggtcaagtaccgtgccagcggaaagatcgacaagcacctctaccacgagctgtaccacagcagcaagggtaacgccttcaagcacaagcgtgccctagttgagcacattcaccgtgccaaggctgagaaggcccgcgagaccgccctccaggaggagatggatgccaagcgtgcgaagaacaaggctgcccgtgagcgcaagcaggagcgtgcggcggcgaagcgaaatgccctccttgccgaggaataaatgtaagcctagtggacaacgacaacatttcggtcttaagaggaggctgcatacggagtctacgggttgggtctttttttatgcccttctggtttctacacttgtaccggcggggttcaggcatgtagcattgaaaatggaatcgatgatgctcggatgcttggatgtttcaccatttacgaccttctcgtgagcacttgttccgctcatcacgacttaagtaccaccagcgttttaaaaaataatgtgcgcggtctggcttat

SEQ ID NO: 95901 - DNA, 463 bp, Zea mays
  Clone ID: MRT4577_18976C.1
gtgataaacaacaactccggacttcaacgtcaagttccacataactatagatagccacacgcaacataattatttgttccgtacaaacccaggcacagaaatttaacggcggacaaaatttaaatgtgacaacagctgacaacacaacgcttggtgacagaaacggctgggcgcccttcacttaaccaccgaggcttgggaactgagcttgatcttcaatggctggagcagcagcagctgggccactactgtatccccctccgcatccgcctctaaaaccaccacgatccccacggcccatttcactggcacggtcggcgtcataccttactacttcaggaggcttaaggaactcgctgatgctcaccgacttattggtacgctcataacgctcagcattaaacttattcttatacttgtcagaacccaccttaatgaaaacttcatcacactctttcttgct

SEQ ID NO: 95902 - DNA, 315 bp, Zea mays
  unsure (1)..(315): unsure at all n locations
  Clone ID: MRT4577_18977C.1
ctttccggccgctcgagacggcggncggggcgtcgtcacggggaagaaagacaaaaattactaaagaagcgaggccggccatggagatgggcggcgacgagatgatgatgactttgggcgccacgggccggatcgtgcccgtcttccgctccgtgatgtcccgccgcgcgctgctccgcctcgccgtcgcgctccactcgctcttcctctggctcctcctcctcgtcggacgccgccgccgccccgacgccgcgagcccggaggagcccggccgcctgttgaatgccaggaggaggagcagggacgaagaaggag

SEQ ID NO: 95903 - DNA, 265 bp, Zea mays
  unsure (1)..(265): unsure at all n locations
  Clone ID: MRT4577_18978C.1
gnctaataccctctccaacacccccncatcaagaggcgctattgactcatcgacggggttaggatacaacccnggcatctcatataaacgcttagcctagggccccaccgcatcattaatggattgatgccctgcgttcttcacttgggcgtccccctctctaaattgctcgcccccgccttcccagcancgcacggggagggtctctacgacactagcctcctccacggagcggcacgcacgcccgaataacacgagcttcttc

SEQ ID NO: 95904 - DNA, 274 bp, Zea mays
  Clone ID: MRT4577_18979C.1
ggccatgttcttctccgcggcgctccgggcccgggcggctggcctcaccgcccactggggaagacatgtaaggaatttgcataagacagctatgcaaaatggagctggaggagctttatttgtgcacagagatactcctgagaataaccctgagactccatttgatttcacaccagaaaactataagaggatagaggcaattgtaaaaaactatccagaaggccataaagcagcagctgttcttccagtcctggatttagcccaaaggcagaat

SEQ ID NO: 95905 - DNA, 375 bp, Zea mays
  Clone ID: MRT4577_1897C.1
ggggcccaaaaaaggcgggggggattccgggaaaaaaaagaaccccaaacggggttaaacgggaataaggggccaaaacacccaaagccggacaaattcacacagggggggaagcagggggtttccaaaacaaaaaaggaaaaaagggggggagaagggggactaaaacgttaaaaaactacaggtaggacgggtttttaagggggaaaaaaaaagaaaaaaaacccgcattgccttttaaaaaagggaggcccggggggggttcctccttaaattcccgggggggaaaaaaccgttacccaagggtttactcacttggccaaaaaaaccttaaaaaactccttgtagtggacctgaccatcgccatcgacgggg

SEQ ID NO: 95906 - DNA, 396 bp, Zea mays
  Clone ID: MRT4577_18980C.1
gcaaaagcgccaagtcaacaataaaggtgtatggcaaagttcacatgacattgatagagcgcgtgatatgtttcaagcttccaggcaagtatgctgaaagttgaaaccaaaaacaagatcaacaattttcagcagatcaaagtgtcagtcacaccagagttgcccatacagattatatactatcaactagagaccaggaccaagcaccatccttcaaggaaggtgtgacttaacgtgggtgttgattcatatcaagtaccttactaccaatctagtgcttcttatccttgaggccctttggaatcttcgataggcacttctcatcgaagatggcataatactttttcagttcttgggagctgttgcaacttcctgacactgttctatattgggttt

SEQ ID NO: 95907 - DNA, 344 bp, Zea mays
  Clone ID: MRT4577_18981C.1
gtggcaaagttaacatgacattgatagagcgcgtgatatgtttcaagcttccaggcaagtatgctgaaagttgaaaccaaaaacaagatcaacaattttcagcatatcaaattgttagttacaccatagttgcccatacagattatatattatcaacttgagaccaggaccaatcaccattctttaaggaaggggtgacttaacgtgggtgttgattcatataaaggaccttactaccaatctagtgctttttatacttgagggcctttggaatcttagataggcacttttcattgaagatggcataatactttttgagttagataatagacttcttaccaaaa

SEQ ID NO: 95908 - DNA, 457 bp, Zea mays
  unsure (1)..(457): unsure at all n locations
  Clone ID: MRT4577_18982C.1
ttccactcctgaagcatctttctctccagaaagatgtcagacctgtattgcatgaaagggttcatatgccagaatggttccaaaagcatgggatcccccaaactaatcagtctgttttaactggcaggatcatcgacgagcggaggaggaggttgaagtctgatgtggttgagatgttgacatgcattaaaaattgggaggatgctgaagcaaggatgcaacacatggtggatgacaaagagcttgaagaaacatttgaaaatgtttatcttgattagtctctttgtgaccatttgtgcaatgggactgtaatattatgcacctgaactttgtttattgtaaggacagtgaactctttaatgagttgcgttgtactctntttttctgtctaaggtttctcacaagggtgagctttacctagacaggtttttaacgaggcagccattgcactacagct

SEQ ID NO: 95909 - DNA, 159 bp, Zea mays
  Clone ID: MRT4577_18983C.1
cctagttctggttatcgcgagcctcgacacgctctagggcgtcgcctgttggtaggtgcacatcatattgtcgcagccttgctggttatatatgagagagagacacagagacaacacgagcgacactgaattattcagagcggtgctatgtgttgatag

SEQ ID NO: 95910 - DNA, 693 bp, Zea mays
  Clone ID: MRT4577_18984C.1
gggtacctcgaggccggccgggtggccacagtggaacactattaccaggctcataagtttgttggtgttgacaatcctcaagcaagagacattgttcaagaaataaagctagcaaagagtcctgaagaggctgctagaataggaaggacccgacaaaaagggttccctgaactgatggtttgatttgctggtgtatgcgggttcaaaccggaggacggcaacatggcctgtcacaccgatgctgcagtccagggctcggacagggttggtgccctcagtctcttcagtgctcgctgcatctgctccacctgcaccatgcacgatgacgaggtcagctgcctccatgctgtcgtggccgcaggggcactggtgaacctgattccgctgttgtggaggtggtcagtggcaggcccagggagacaaccggcactgccatggcggtttggctggttcaaaccacggttttactcaacccgtaccgaagccacagattcggtttcaacaggctggttttacgagttgcactggtttgcaataaacggtgaacagccgtaattacattctatttttaactgattgtagtgggaagggatgaagggaccttgctttctggtacctaacaaagtatgatatcatccttctgatgaaagatattctagaagaggaatctatatatctagtataggctttgcc

SEQ ID NO: 95911 - DNA, 1568 bp, Zea mays
  Clone ID: MRT4577_18985C.1
ggtaccctcggagccgcggggggcccacaaaaacaccacgtgtacacgggcgcggcgcggagaccgaccaccacctcttcctccggttgcctccgccctcgggcctcgccttcgctccatcgtccccgtctccatcctccaggaccggcaaccccacgtagcgcgacagctcgtcgccgtagtccatggcggctacggaggtgtactcgccgaccacggcggcggcagcgcagcagcagcgggggaaggcggcatcgcaggcgtggcgagcggtggtagggtggatcggcttcttcctccaagtcctgcttcagatcctccggggcacgccctcctgcgcacagctcctgtccttcgttggtttccgctatccgctcctctccggacctgcggcctcggagccgttgccggaggtggccttcatgccgctccactccgagatccctgctgacgcggcgcctgccccgaaacctgcgtctgagcccctgggccgcctcacggtagtgcttgacttggatgagactttagtttctgcatatgaatcatctagtcttcctgccattgtgcgcacacaagctgttgaagcaggattacattgctttgatatggaatgtatatcgtctgataaggatgttgaaggcaaacaaaaggtgaatcatgtgactgtttttgagcgccctggtttgcatgagttcttgcggaaaactagtgaatttgcagatcttatcctttttacagcaggtttagaaggttatgctagacctttagttgaccgaatagatgttcacaatagattcagacttcgtctctatcgcccatcaactgttaccacggaatatagagaacatgtgaaagatcttactcgcgtgtcaaaagattttggcaggattgtcattgtcgacaacaatccgttcagtttcattcttcagcctttgaatggaataccttgtgttccattttcagctggacaacattctgatgatcagctcatgacggttatatttccactcctgaagcatctttccctccagaaagacgtcagacccgtattgcgtgaaagatttcatatgccagaatggttccaaaaccatgggatcccccaagttagtcaggctgtgtaagttttgctgccgcacaatggaattgttttgatgaaggctggagtgcctactatgctataagcccttaaggccatgttcgttcaatccctatggattagcacaaaacgaacagggcctaagggagagcacttgtacattattatcaatattcacttagggttcttgataaaaccgagtcgctgttcatatggagttgtcacacccgaagataagaagattgtaatctagcatgacctcaaatttaaatctgtgtagtggagcattttatatccattaggaactgttgtaaatcccccctcgctgtaaaacccgattgtttccagttaaaaaaggttaatgaaaaggtcgtggcccccccaaaaaaaaaaaaaaaaaaaaaaaaaaaaaaaaaaaaaaaaaaaaaaaaaaaaaaaaaaaaaaaaaaaaactcgagaagggggcccggta

SEQ ID NO: 95912 - DNA, 629 bp, Zea mays
  unsure (1)..(629): unsure at all n locations
  Clone ID: MRT4577_18986C.1
agcctttgaatggaatacctggttccttttcagctggcaacattctgatgatcagctcatgacggttatatttccactcctgaagcatctttccctccagaaagacgtcagacccgtattgcgtgaaagatttcatatgccagaatggttccaaaaccatgggatcccccaaattagtcaggctgtgtaagttttgctgccgcacaatggaattgttttgatgaaggctggagtgcctactatgctataagccccttaaggtcatgttcgtttgatcccaaaaccatagggattgagggggattggaagggattggagaggattttgacttataggggatttaatccccctcagtccctatggattagtacaaaacgaacagggcttaagggagagcacttgtacattattatcaatattcacttagggttcttgataaaaccgagtcgctgttcatatggagttgtcacacccgaagataagaagattgtaatctagcatgacctcagatttaaatctgtgtagtggagcattttatatcaattaattgttgtatatcagcctctgttgtaaaattttattgttgacaagatagtctaatgaatagttcgtgatccnnnnntgggatg

SEQ ID NO: 95913 - DNA, 2052 bp, Zea mays
  Clone ID: MRT4577_18987C.1
cgttgctgtcggtcatcaatacccccaccatcgcacgcccgcaaaactgcgcgggcgcgggcgcggagaccgaccaccacggcaccacctccacctcctccggttgccttcggcctcgcctcccctccgtcctccccgtctccagcctccgggaccggaagctccacgtggcgcggcagctcgtacccggcgtctatggcggcggcagaagtgtactcgccgaccgcggcggcggcggcgcagcagcagcgggagaaggcggcgtcgcaggcgtggcggacggtggtagggtggatcggcttccttgttcaggttctgctccagatccttcgaggcacgccgtcctgcgcccagctcttatccttcgtcggcgtccgctacccgctcctctccgggcccacagcgttgaatccttcctcagctctctcctttctcccgtctcgcttcgtcctcctccctcctccggcgtcatctgcgcttcttcggagatcccgcctcgccggcttgctccgtggaggagaccgggacgaccggggtccttctgcatggcaatggtcttgtcatcggaactactttccgtaccctaggctgtgtgacgcagtcggccattgctttgatatggaatgcatatcatctgataaggatgctgaaggaaaacagaaggtgaatcatgtgactgttttcgagcgtcctggtttgcatgagttcttgcagaaaactagtgaatttgcagaccttatcctttttacagcaggtttagaaggttatgctagacctttagttgatcgaatagatgttcacaatagattcagacttcgtctctatcgcccatcaactgttaccacggaatacagagaacatgtgaaagatctttcttgcgtgtcaaaagatttcggcaggattgtcattgtcgacaacaatccgttcagtttcattcttcagcctttgaatggaataccttgtgttccattttcagctggacaacattctgatgaccagctcatgatggttatatttccactcctgaagcatctttctctccagaaagatgtcagacctgtattgcatgaaaggtttcatatgccagaatggttccaaaagcatgggatcccccaaactaatcagtctgtgtaagttttgctgcccttgttttgatgaaggctgtgcctattatgctataagccccttaagggagagcacttgtatattattatcaatattcatttagggttcttgataaaaccgagtcactgtttatatggagttgtcacatccaaagatacggaaattgtaatctagcataatgtcagatttgtatctgtgtagtggagcattttatatcaattagtaactgttgtatatcaccatctgctgtaaaactcgattgttgacagttaagatagtctaatgaatagttcatgaacagaaatatggatctgttagattgaacagggttgtccctcctaacttgtctggtaagaaacggtctgcttgggatgaaatttatgatgatgctgatgatgtgggtacttctgttggtatgcattcttttgcttctactctaaacattgctagagatacctctgcaactgctctactgcatgctgcaagctcttcagcttctactgcttctgaactcatttcttacttagattgtgacactgtcaaccaattaactgatgatttcaatatcttgcactggtggcatcagcacaaactcacttatccagtactatcaattatggctaaagatattttaactgttcctgtgtctaccatctcttcagaatccacttttagtttaactggcaggatcatcgacgagcggaggaggagattgaagtctgatgtggttgagatgttgacatgcattaaagattgggaggatgctgaagcaaggatgcaacacatggtggatgacaaagagcttgaagaaacatttgaagatctttatcttgattagtcttactctctttctgaccatttctgtaatgggactgtaatattatgcacctggacactggactgaaaaaaaaaaaaaaaaaagcggcc

SEQ ID NO: 95914 - DNA, 480 bp, Zea mays
  Clone ID: MRT4577_18988C.1
cggccgccaccgaggtgaacacaaatactgaaggattagcgtgagatccttttgttctgcacttaaagagctgttttccaacgaatacaccactggttctggtggtggtgtgaccagcggatgatgacctaccaactatttttccgaagaccgctgggtactgaagacggcagataccagattgtgctcaagggccagcgcttaacggagggttatatcacacatctcaacattgaagcggatcgaccaacacgctaacggatatacctacagcttcatgctatgacaaacgcctggctcacggatcgaagaaagtggcacaggttttggcacagcaggagggacaggacagcaaatcccacgatggcacttgctaagcgtaacgcctgatatgtttactagtaactgatggtataggcgacttttacttgaacaactgttctagaaatgctggggatttgagcaaagccatatataaaa

SEQ ID NO: 95915 - DNA, 197 bp, Zea mays
  Clone ID: MRT4577_18989C.1
ttattaatctagagcagcccatctacatggtccagggttactttctattgcttgcgatcctatatcttttttctaccgtcacttaaactaactttatttgacggcacttttcatcactactgctgtcataaccttccatttacccaacttttcagtactgtattacataccatatgtttcccttttcgttatttcga

SEQ ID NO: 95916 - DNA, 218 bp, Zea mays
  Clone ID: MRT4577_1898C.1
ggaccggaagccctttaaagggccccccaaatagggggcaaccacgggcgtgtaaagaaaacccaccaaacgtctccctttggcagaccgagggttcggtgggggaggccctaaccgtggtttccttcctcccgcgcctcccggggggggggccctaatccggcttttggcgccccgggcgcctttcttttcgtggtttttcccgccgctggcggggg

SEQ ID NO: 95917 - DNA, 364 bp, Zea mays
  Clone ID: MRT4577_18990C.1
gcaaaatcctaccctcggtaacagccacgttgatcgagtgtctatagactgacactctgttaactatgttctgtcgagggtcaaaatatgacactccgttaaacattctttgcctagtgcctgccgagtaacatctctcatcgtatttaaaaaaaataaaacaatctttgtgaagtgcttatcatattgcactccgctaagacagctttggcgattgtcacttccaggtcactcggatatgcctagtttcaaaataaaatatcacttcgactactgctagatcgctacgcgcgtcatttgatggcatacatttgtgtactgcaccctcgagatggtgagattagatatcttttttcctccccgg

SEQ ID NO: 95918 - DNA, 669 bp, Zea mays
  Clone ID: MRT4577_18991C.1
ctggccgggaggatcctcccgactccgacgctgcgtaggactccccgactccgacggacagcgccctagttgggtgccatgcccacgcaacccgggtcgccgcgaggaaagaacgccgattgctttctcttcctgtacgattagattaacagtctcgagttcgtgccttgcgcatacgccaggcccatgggcgggagcatgcagaacagttggaggcctgaccaaaccctacgacttgagctgcatcccacggttgggcgtctgcttaccattgcggcggatagaacgctgcgaggagctatggagaactgcagcgccaatccatcttgtacggctcgcactgctgtggccactctcattagagcaccagcacagaaggcctccggaggccgtcgacttagggagtacgcaacctgagcagcaacactacttgccaggtgcagcaccgtccacttcaacctgagcggaagcgcaacccgtgccaagttgaagcccaaggcaggcgcgacatgctcagaacagacacgctcctacacaggcagagcactctaaaggagatgaactgggaccccttgaacatcaacttaacggcaggcgccggctcagacaccaactacatggcacaggtcatgtacagatactgcgtctacaggcaccagagcgccgagg

SEQ ID NO: 95919 - DNA, 1338 bp, Zea mays
  Clone ID: MRT4577_18992C.1
ttccggtttcggcttccgcggggtgggaatttggatagcgcggcgcaggaaaaatggcggcttccgctctccacctccgcctccacccctcgccgccggcgggtgtgaagcttcagcagcggcaactgcgctcgaaaatacagaggcagggtggcctatctcgaagattttcaaaagttgtgtcctattacggtctcacaaccccgccatataaactggatgctctggaaccttatatgagcaagaggacagttgaacttcactggggtaagcaccatcaagattacgtggatggcttgaataatcagctggctaccagccctctgtatggatacactctggaggatctgataaaagaagcttataacaatggcaatccattaccagagtataacaacgcagcacaggtctggaaccatcacttcttctgggaatcaatgcaaccagaaggtggtggcttacctgagggaggtgtgctgcagcagattgaaaaggattttggctcgtttactaattttagggaagagtttatccgctcagccttacagctgttagggtctggttgggtttggcttgtctgtgagtttctttctattttttctgaagtacaggcaccactgattcaagctactgatttcctgaattgctctttctatagcaagtttataagttcagtttatattccattgaatatttgttgcagtgaagagaaatgagagaaagctttcggttgttcatacacgaaatgctatctccccacttgcttttggtgacattccaatcatcagcttagacttgtgggagcacgcttactacttagactacaagagtcttttgtgaaccttggtgagccaaatatcccagaggcttgagctacagatacaccctagttatcatcatgaggcattcttcggatacatcggatcaaatcctgctggaggaaccagagagttggaaaatctcatgtctcacaagaaatgcttatcaccccaatgtcatacacgccaagataagctgctaggatttcaccattgcccttggatattgctacaaggaaatcactagtcagcatccagtttgaagacatgcaacaaaacagctctagaagctatggagctggtagattctggagttggcagtgaggcagtgatccaacttgggctttgaagccatggtactttctctagacggctattatgtccgtagtgttgttagaataatcctggttctgtgttttcataacttcatcatgctagtgttctgttgtagcggaacgcagaatggaacggaacgatattcttgttttactggttgagaaacatgttagttttggactgc

SEQ ID NO: 95920 - DNA, 232 bp, Zea mays
  unsure (1)..(232): unsure at all n locations
  Clone ID: MRT4577_18993C.1
tttctcgttcgacaacggcacaaaaanaaggggcaggtttaaatacacatgcgggcggctccataaatattctatagnatcaccaaaatttaattcactctcctacgctttacaacttcaaaactggaaaaaccacgctcccacccaactttatctccttgcaacacatttccttttcaccagtttgcattataccaaacatccccctaacaatcacccatcccaacaaaat

SEQ ID NO: 95921 - DNA, 1295 bp, Zea mays
  Clone ID: MRT4577_18994C.1
ctcctcccaacatcgccgtcgtcgcccactcgcccccgtccctgcagtcgcccgtgctccgcccgctccaccagggcgcctcgccctaggggatggtctccgaccacctcccttcaccgccgccacgtgctcagtgacgcctaggtcatcggcgctgaagtttggaggccctgtacgtgcttcacagagatcgccgaccatgggctacgcagagatcgccatccgcccctctgggagcggcaagaaaatacagaggcagggtggcctatctcgaagattttcaaatgtgtcctattacggtctcacaaccccgccatataaactggatgctctggaaccttatatgagcaagaggacagttgaacttcactggggtaagcaccatcaagattacatggatggcttgaataatcagctggctaccagccctctgtatggatacactctggaggatctgataaaagaagcttataacaatgacaatccattaccagaatataacaacacagcacaggatgataagctaacatatgtcacaaacttcatggaccatcttgtctcttggcatactgtcactctacgcatgatgcgtgcagagtcttttgtgaaccttggtgagccaaatatcctagaggcttgagctacagatacaccctagttatcataatgaggcattcttcggatacatcggatcaaatcctactggaggagccagagagttggaaaatctcatgtctcacaagaaatgcttatcaccccaatgtcatatacgccaagataagctgctgggatttcaccattgcccttggatattgctacaaggaaatcactagtcagcatccagtttgaagacatgcaacaaaacaactctagaagctatggagctggtagattctggagttggcagtaaggcagtgatccaacttgggctttgaagccatggtgctttctctagacggctattatgtctgtagtgttgttagaataatcctggttctgtgttttcataacttcatcatgctagtgttctgttgtagcggaacacagaatggaacggaacgatattcttgttttactggttgagcactacacgacgattgtttttctagggtgttctggacaaagaaagcttgtaccttaaaacaggaggatacaagaagctggagtggttgtctgaaggcttttgaactgcttgaagcattaggttagctctggagattttgtgaatgatctagctagctatctgtaaatgatctagttgtgaatgatattataattctgatgcttttgtgaat

SEQ ID NO: 95922 - DNA, 1422 bp, Zea mays
  Clone ID: MRT4577_18995C.1
cgccgtcgtcgcccattcgcccccgtccctgcagtcgcccgtgctccgcctgctccaccagggcgcctcgccctaggggatggtctccgaccacctcccttcaccgccaccacgtgctcagtgacgcctaggtcatcggcgctgaagtttggaggccctgtacgtgcttcacagagatcgccgaccatgggctacgcagagatcgccatccgcccctctgggagcggcaagaaaatacagaggcagggtggcctatctcgaagattttcaaatgtgtcctattacggtctcacaaccccgccatataaactggatgctctggaaccttatatgagcaagaggacagttgaacttcactggggtaagcaccatcaagattacatggatggcttgaataatcagctggctaccagccctctgtatggatacactctggaggatctgataaaaaaagcttataacaatgacaatccattaccagagtataacaacacagcacagtgaagagaaatgagagaaagcttttggttgttcatacacgaaatgctatctccccacttgcttttggtgacattcacgcttactacttagactacaaggatgataagctaacatatgtcacaaacttcatggaccatcttgtctcttggcatactgtcactctacgcatgatgcgtgcagagtcttttgtgaaccttggtgagccaaatatcctagaggcttgagctacagatacaccctagttatcatcatgaggcattcttcggatacatcggatcaaatcctgctggaggagccagagagttggaaaatctcatgtctcacaagaaatgcttatcaccccaatgtcatatacgccaagataagctgctgggatttcaccattgcccttggatattcctacaaggaaatcactagtcagcatccagtttgaagacatgcaacaaaacaactctagaagctatggagctggtagattctggagttggcagtaaggcagtgatccaacttgggctttgaagccatggtgctttctctagacagctattatgtctgtagtgttgttagaataatcctggttctgtgttttcataacttcatcatgctagtgttctgctgtagcggaacacagaatggaacggaacgatattcttgttttactggttgagcactacacgacgattgtttttctagggtgttctggacaaagaaagcttgtaccttaaaacaggaggatacaagaagctggagtggttgtctgaaggcttttgaactgcttgaagcattaggttagctctggagattttgtgaatgatctagctagctatctgtaaatgatctagttgtgaatgatattataattctgatgcttttgtgaatatataattgtgtttgtgcaaaaaaaaaaaaaaaaaagcggcc

SEQ ID NO: 95923 - DNA, 207 bp, Zea mays
  unsure (1)..(207): unsure at all n locations
  Clone ID: MRT4577_18996C.1
tgcggcgctcganngcgcggnccgactcaccccncctcttggccgccaccccctttttctcccccttggctggacgccccctccccctatggcagccatcctccattgcttcctcccccaagatctccccctacgcacaaaggatcaataaaaggaggggaacgatgaattgaagaggaacaaaggataaaggatatgttacttcaa

SEQ ID NO: 95924 - DNA, 919 bp, Zea mays
  Clone ID: MRT4577_18997C.1
gcagcggcaactgcgctcgaaaatacagaggcagggtggcctatctcgaagattttcaaaagttgtgtcctattacggtctcacaaccccgccatataaactggatgctctggaaccttatatgagcaagaggacagttgaacttcactggggtaagcaccatcaagattacgtggatggcttgaataatcagctggctaccagccctctgtatggatacactctggaggatctgataaaagaagcttataacaatggcaatccattaccagagtataacaacgcagcacagccaatcatcagcctagacttgtgggagcacgcttactacttagactacaaggatgataagctaacatatgtcacaaactttatggaccatcttgtctcttggcatactgtcactctacgcatgatgcgtgcagagtcttttgtgaaccttggtgagccaaatatcccagaggcttgagctacaaatacaccctagttatcatcatgaggcatttttcggatacatcggatcaaatcctgctggaggaaccagagagttggaaaatctcatgtctcacaagaaatgcttatcaccccaatgtcatacacgccaagataagctgctaggatttcaccattgcccttggatattgctacaaggaaatcactagtcagcatccagtttgaagacatgcaacaaaacagctctagaagctatggagctggtagattctggagttggcagtgaggcagtgatccaacttgggctttgaagccatggtgctttctctagacggctattatgtccgtagtgttgacgtgttgttagaataatcctggttctgtgttttcataacttcatcatgctagtgttctgttgtagcggaacacagaatggaacggaacgatattcttgttttactggttg

SEQ ID NO: 95925 - DNA, 1856 bp, Zea mays
  Clone ID: MRT4577_18998C.1
tttgttttgcaatgacagaactaggccatggaagcagtgtgcgaggaatagaaacaatagcaacttatgattcagaaacaagagagttcatcataaatactccatgtgaatcagctcagaagtactggattggtggagctgccaatcatgcaacacatacaatagtcttttgtcaacttcatataaatgggagaaatgaaggagttcatgcttttgtagctcaaattagggatgaagatggaactgtgttgcctaatatccatatagctgactgtggccataagattggactgaatggcgttgataatgggcggatttggtttcagaatatacgtgttcctcgtgagaacttgcttaatttggttgctgatgttttgccagatgggcgatatgttagcatgatagataatccagatcagaggtttgcagctttcctatctccgcttacacttggtcgagtaaacattgcagttaactcagtctacatttcaaaggtcagcctagcaattgctgtgagatacagtttgtcaaggagagccttttcaattgcaccagatgcccctgaaatgttgttgcttgactatcccagtcaccagcgacgccttctaccacttctagcaaaagtatgtctgatgagcagtgctggcaattttatgaaaaatatgtatgtaaagagaactcctgaaatgagcaaagacatacacatttactctagtgctctgaaggcgacactaacttggcagaatatgattacgattcaggagtgtcgcgaggcctgtggaggtcaaggtctaaagactgagaaccgcataggaattttcaaatctgaatttgatgtccagtccacatttgagggtgataacaatgtgctaatgcagcaggtaagcaaagcgctttatgctgaatttttgggtgcacaaaagaagcagcagccattcaagggattgggtttggaacacttaaatggctcgagccctgttattcctgataagctgacaagtagcatattaaggagctccaagttccagatggacctgttctgcttaagggagagagatttactgaagcagtttgtagaggaggtttctctccatcttgcacaaggcgaaagcagagaaaaggctttgatgctgagttatcaagttgctgaagacttggctagagcgtttactgagcgtacgatcctccaaatatttttggaggatgagatgaatgttccttctggttccctaaaggaggtactgggcttgctgagatctctatatgtcatggtgaacatagatgaatccacatcttttctaagatacgggcatttatcacgtgacaatgtagcccttgtgcggaaagaagtcctgaaactgtgcagtgaactcaggccccatgcgcttgctgttgtcagttctttcggaatccctgatgccttccttagtccacttgcttttgactggattgaggcaaatgcactgtcaaccgggagccactgatctcaggtttccacatacgagccaggttatcctgtgaaagtactgaatattgatggcggagcatagataccgataccgtataactacaggagcacttgttgcctcggaacaaattgttgtgaatcctgttttgtataatagttttcttgaatataagcgaacgtagcctaacaggccaaagtccatgtaatggggtttacaacagtaataacttgcagagtgatgtaagcgagttgttgagcagtaaataaaatactcttgtccccaaaaaaaaaaaaaaaaaaaaaaagcccctaaaaaaaaaaaaaaaaaaaaaaaaaaaaaaaaattccattctaataatagtaatttatgcatggggggggggctttt

SEQ ID NO: 95926 - DNA, 632 bp, Zea mays
  Clone ID: MRT4577_18999C.1
taaattcagtgtctgatataataattcagtgtctgatataattaagtataataacttagctgtagatattcactaaaattcacttgcacacattaccagagttttggctcgtttactaataaccagccctctgtatggatacactctggaggatctgataaaagaagcttataacaatggcaatccattaccagagttttggctcgtttactaattttagggaagagtttatccgctcagccttacaactattagggtctggttgggtatggcttgtctgtgagtttctttctattttttctgaagtacaggcaccactgattcaagctactgacttcctgaattgctctttctatagcaagtttataagttcagtttatattccattgaatatttgttgcagtgaatagaaatgaaagaaagctttcggttgttcatacacgaaatgctatctccccacttgcttttggtgacattgtatgtttactagactccctttttcctctttttgtgttttctaaaatgtttagagtacaaactttgcaatgacatcccatattctctaattgcagccaatcatcagcctagacttgtgggaggtaaggacatggactatgcgttcgacagcaacg

SEQ ID NO: 95927 - DNA, 345 bp, Zea mays
  Clone ID: MRT4577_1899C.1
cccgtcccgacccactcttcctacaactctttctaacaactaaattttctttcaaaacactataaccaattctataagatagctttatatcctaggactggaatccaataactatctcatctctaacatcactataataaaaataacctatctcactacaatcttaaaacatctcatacacacctattttcaactaaaacaattccaacactttccacatacttctttacaattatacgatgattccccatctatagatcaaaaaacaacttctctatcaacacttatctacctcacaccaaatatcccttttgtaacattactaacacctctatcttcccactc

SEQ ID NO: 95928 - DNA, 315 bp, Zea mays
  Clone ID: MRT4577_189C.1
aattgagacttttgtacagaaggaggttctgcaacagacctgtgtttctttacaaaaggcaatgggagaagagattcatcttctggagtcacaattagaccagtcaaagatacattttgctcatttattgaatcagactcaggaaaaggaacagcttattgggaagcttaaaaatgaagagttaaatgttttgttaagactgatgtcagaagttctaaagacaaacagtactgtacgtgagcttcgaattggattcaatacattgcagtcaagcctttatatgagcctgaagtgatcgctgtcaaattcagattg

SEQ ID NO: 95929 - DNA, 681 bp, Zea mays
  Clone ID: MRT4577_18C.1
tcgaggccggccgggaagacttctcgtcctccttctcatcaccttcgttcgagccccattcccatccaggcctgagtccacaacgtcatacatacagcagtacgatccgacgctagatcttcgatatccacatccacttggacgcacaacaatggacaactttcgaaagatcgacatcgaccagtacgacgaagacgtcatctcgaacgatgagctggtagaaccgtatccgaaggcgtcggagcaggcgttggcggatgcaaaggccaagtcgaccgaggtgaggagtttgattggaaggagcgatacggctggagcactggcgctggtgctctccgactacccgtacggacccaatgtcgaggaagcaaagcacgtcacgctccaatcgctcctcgagatcgtcaacagcaccaaatcgagcgacattcccgcagcagtcaagagcatctcgatcgaccagcgcgatgcactcatgaagtacctctacaagggcctcgagttgggtggagagggcgaagggatcaactgcgccgtgcttttgggatggcatgagcggctgaccgaggtcgcaggtacaggttgtatcgtcagggtcatgtccgacaggcgtaccgtgtaagatgtgcgcatagcaattcaatcaattcatccggcaaaaaaaaaaaaaaaaaagcggcc

SEQ ID NO: 95930 - DNA, 418 bp, Zea mays
  Clone ID: MRT4577_19000C.1
gccgaatggtcggttacggcacgcgcgaccatggacagatacactacgcgagctaggggtggggcggccaatccatagcgttgctcatcacactaccgtcaatgaacaccagccgcgaaacgcgttggcacttgtaatacctatcttgggggggacggtacactttctctatatcaggatgtacagaggccatatgatgatcaccgagggaggagtaagcacaagggcggggccaacgagcgtgggtcttgctggacgcgatagagattgcaaagctctcagctacaggcttacacactaaatagctaaggagatagatgcgatacggcatgtaggatgcttttcaacacgccagtgggccatatgttgagattactacttcaaatggtgtttatggatcatgaagaggcatttatga

SEQ ID NO: 95931 - DNA, 900 bp, Zea mays
  Clone ID: MRT4577_19001C.1
ggaaacttaatggctcgagccctgttattcctgataagctgacaagtagcatattaaggagctccaagttccagatggacctgttctgcttaagggagagagatttactgaagcagtttgtagaggaggtttctctccatcttgcacaaggcgaaagcagagaaaaggctttgatgctggtaaaattcagatttcactgtgcactatttttcgctgttctatagtttctttgtttgtcattgatacaagtgacattttcccagagttatcaagttgctgaagacttggctagagcgtttactgagcgtacgatcctccaaatatttttggaggatgagatgaatgttccttctggttccctaaaggaggtactgggcttgctgagatctctatatgtcatggtgaacatagatgaatccacatcttttctaagatacgggcatttatcacgtgacaatgtagcccttgtgcggaaagaagtcctgaaactgtgcagtgaactcaggccccatgcgcttgctgttgttagttctttcggaatccctgatgccttccttagtccacttgcttttgactggattgaggcaaatgcactgtcaaccgggagccactgatctcaggtttccacatacgagccaggttatcctgtgaaagtactgaatattgatggcggggcatagataccgtataactacaggagcacttgttgtctcggaacaaattgttgtgaatcctgttttgtataatagttttcttgaatataagcgaacgtagcctaacaggccaaagtccatgtaatggggtttacaacagtaataacttgcagagtgatgtaagcgagttgttgagcagtaaataaaatactcttgtcccaaaaaaaaaaaaaaaaaacccgcggcc

SEQ ID NO: 95932 - DNA, 1395 bp, Zea mays
  Clone ID: MRT4577_19002C.1
ggggcggtgaaactccggtttcggcttccgcggggtgggaatttggatagcgcggcgcaggaaaaatggcggcttccgctctccacctccgcctccacccctcgccgccggcgggtgtgaagcttcagcagcggcaactgcgctcgaaaatacagaggcagggtggcctatctcgaagattttcaaaagttgtgtcctattacggtctcacaaccccgccatataaactggatgctctggaaccttatatgagcaagaggacagttgaacttcactggggtaagcaccatcaagattacgtggatggcttgaataatcagctggctaccagccctctgtatggatacactctggaggatctgataaaagaagcttataacaatggcaatccattaccagagtataacaacgcagcacaggtctggaaccatcacttcttctgggaatcaatgcaaccagaaggtggtggcttacctgagggaggtgtgctgcagcagattgaaaaggattttggctcgtttactaattttagggaagagtttatccgctcagccttacagctgttagggtctggttgggtttggcttgtcttgaagagaaatgagagaaagctttcggttgttcatacacgaaatgctatctccccacttgcttttggtgacattccaatcatcagcctagacttgtgggagcacgcttactacttagactacaaggatgataagctaacatatgtcacaaactttatggaccatcttgtctcttggcatactgtcactctacgcatgatgcgtgcagagtcttttgtgaaccttggtgagccaaatatcccagaggcttgagctacaaatacaccctagttatcatcatgaggcatttttcggatacatcggatcaaatcctgctggaggaaccagagagttggaaaatctcatgtctcacaagaaatgcttatcaccccaatgtcatacacgccaagataagctgctaggatttcaccattgcccttggatattgctacaaggaaatcactagtcagcatccagtttgaagacatgcaacaaaacagctctagaagctatggagctggtagattctggagttggcagtgaggcagtgatccaacttgggctttgaagccatggtgctttctctagacggctattatgtccgtagtgttgacgtgttgttagaataatcctggttctgtgttttcataacttcatcatgctagtgttctgttgtagcggaacacagaatggaacggaacgatattcttgttttactggttgaggaacctgttagttttggactgcaggtaaatcttttacttgtatcagacgctgcaagcatgaactttttttgtctggaaggaagttgaaacttctgaacttg

SEQ ID NO: 95933 - DNA, 1390 bp, Zea mays
  Clone ID: MRT4577_19003C.1
cggccgggccgggaatttggatagcgcggcgcaggaaaaatggcggcttccgctctccacctccgcctccacccctcgccgccggcgggtgtgaagcttcagcagcggaaactgcgctcgaaaatacagaggcagggtggcctatctcgaagattttcaaaagttgtgtcctattacggtctcacaaccccaccatataaactggatgctctggaaccttatatgagcaagaggacagttgaacttcactggggtaagcaccatcaagattacgtggatggcttgaataagcagttggctaccagccctctgtatggatacactctggaggatctgataaaagaagcttataacaatggcaatccattaccagagtataacaacgcagcacaggtctggaaccatcacttcttctgggaatcaatgcaaccagaaggtggtggcttacctgagggaggtgtgctgcagcagattgaaaaggattttggctcgtttactaattttagggaagagtttatccgctcagccttacagctgttagggtctggttgggtttggcttgtcttgaagagaaatgagagaaagctttcggttgttcatacacgaaatgctatctccccacttgcttttggtgacattccaatcatcagcctagacttgtgggagcacgcttactacttagactacaaggatgataagctaacatatgtcacaaactttatggaccatcttgtctcttggcatactgtcactctacgcatgatgcgtgcagagtcttttgtgaaccttggtgagccaaatatcccagaggcttgagctacagatacaccctagttatcatcgtgaggcattcttcggatacatcggatcaaatcctgctggaggaaccagagagttggaaaatctcatgtctcacaagaaatgcttatcaccccaatgtcatacacgccaagataagctgctgggatttcaccattgcccttggatattgctacaaggaaatcactagtcagcatccagtttgaagacatgcaacaaaacagctctagaagctatggagctggtagattctggagttggcagtgaggcagtgatccaacttgggctttgaagccatggtgctttctctagacggctattatttccatagtgttgttagaataatcctggttctgtgttttcataacttcatcatgctagggttctgttgtagcgtaacgcagaatggaacggaacaatattcttgttttactggttgagaaacctgttagttttggactgcagggaaatcttttacttgtatcagacgctgcaagcatggactttttttgtctggaaggaagttgaaacttctgaacttgaatgcaatactatagccatccaattccaa

SEQ ID NO: 95934 - DNA, 750 bp, Zea mays
  unsure (1)..(750): unsure at all n locations
  Clone ID: MRT4577_19004C.1
cctcgaggccggccgggccgggaatttggatagcgcggcgcaggaaaaatggcggcttccgctctccacctccgcctccacccctcgccgccggcgggtgtgaagcttcagcagcggaaactgcgctcgaaaatacagaggcagggtggcctatctcgaagattttcaaaagttgtgtcctattacggtctcacaaccccaccatataaactggatgctctggaaccttatatgagcaagaggacagttgaacttcactggggtaagcaccatcaagattacgtggatggcttgaataagcagttggctaccagccctctgtatggatacactctggaggatctgataaaagaagcttataacaatggcaatccattaccagagtataacgacgcagcacaggtctggaaccatcacttcttctgggaatcaatgcaaccagaaggtggtggcttacctngagggaggtgtgctgcagcagattgaaaaggattttggctttactaattttagggaagagtttatccgctcagccttacagctgttagggtctggttgggtttggcttgtctgtgagtttctttctattttttctgaagtacaggcaccactgattcaagctactgatttcctgaattgctctttctaaagcaagtttataagttcagtttatattccattgaatatttgttgcagggaagagaaatgagagaaagctttcggctgttcatacacgagatgctatctccc

SEQ ID NO: 95935 - DNA, 296 bp, Zea mays
  unsure (1)..(296): unsure at all n locations
  Clone ID: MRT4577_19005C.1
ggaagatgctttgcgacgtttgatcnaacggggtaggccagctaatgatgtgttggttcattcattaaacaccgttgagttttagttcaaaaatgaagtagcgagcgacaaatattcgagaacagagttagtaggcagatttagagggttgctgattgatgcatctgtggcggtgcttctgcttggttgattgacagaaacaaaaaggaaagagagcagcaagggatggttgggtgcctacaaaaaaatacggccgaggtgactatggtctctacatgtagactgacctgaaaccc

SEQ ID NO: 95936 - DNA, 451 bp, Zea mays
  Clone ID: MRT4577_19006C.1
atgttgttgtgaggagtgctagaggaggctagtgtgttcaaacaccatagggaggggagggcaggcgaaggagcgaggaaaaaaccccataaaggagacccggaaaagataaagaagagggggaaggaacaagggcgcttggaggcggagaaaaaccttcgggcgtgggagctcgagcggggtctggaggccggaggaaaccaggggggcgccaaaaaaagcgggggggggcgatcctagcccctttggggctaatccaaacccccaattggaacacaaaattgtgggaaaaaacccctctgttgctgggacaacccacccgtgtcaaagaaatttttgaccacgaaaaaaaaaaagagttggggagctgcaacagggcctctaaaattgttaaacacccccccagggtgaaatgaccgggtcccctcaagcctgtattttttcccccaaa

SEQ ID NO: 95937 - DNA, 658 bp, Zea mays
  unsure (1)..(658): unsure at all n locations
  Clone ID: MRT4577_19007C.1
cccacgcgtccgctggaaacgcgtcgcccacacatccatccacaacggtaaagccgccgcggcgatgtcttccgcacccccgcctccgccgtcgctgaaccccgaagcgcccccgcgcatcgtccgcgcccccccgcgccggcctcctccgcgcgcgcccggtccgccgccttgggcggagcgtcggcctgccgtgtccgtcgacctcgaccgcggccgtcgctcggtccgcaccgaggtggacggcgtccgcaccgcgtcgctccctgcgcgacaccgcctccgcgtggagggcaaccggtggcagcgggactggaaggtgtccgaggtcgtcgcgcgcttgctcgcgctgcctcgtgccgacgcggacgccgtcgacgccgtgctcaactgctgggccggtcgcttcgcacgccgcaacttcccgctgctcatcagagaaattgcaatttctggatccttgaaacatgctgtgcatgtgttccgctggatgaaaaatcaggagaactactgtgctcgcaatgacatttatggcatgatgattaggttacatgctagacacaatcaggttgatcaagcacgtggcctgttctttgagatgcaagaatggcggtgcaagcctaatactgatacatacaactnctttgatccatgctca

SEQ ID NO: 95938 - DNA, 248 bp, Zea mays
  Clone ID: MRT4577_19008C.1
gttctataccttaaaaaacgaacaaaagggggggttttttttggaggggcacttgcagtttcccggccaaaattggagggagggtacagagacccgtgggcaaaagttcatttcttgaacagaatggaactggaccctggaggcatgtaccaagggcctaggatatatatacatgaacctatgcaatggacacgggaaaccattacaggggctgcagtggggccaccaggtgatcagggaacattttt

SEQ ID NO: 95939 - DNA, 283 bp, Zea mays
  Clone ID: MRT4577_19009C.1
gaggggaactggcggccgggttaatacgcaggggcgggaaagcgatcacccaggctgacaacgacactaatagccacgctgcgatgagatcacgcagctggccatacagtctatacagtagtacacgtgggacacacgcccagtgcaggcttggcacagggctcagcttgagaagcctaacactgacacgaagtagggctcgatcttgcccactgaggcaccgtaagcctgcactgacgagagtcctacgaggtagaacagtgggggcactcagctggaaagg

SEQ ID NO: 95940 - DNA, 136 bp, Zea mays
  Clone ID: MRT4577_1900C.1
ggaattcccggctggaccgactcgtccgtggtatgcgtacacggtctccctctttctggctttagtagagtgagagtgattcatgtattagtagacaaggggaaatggtgaatgttgctcaagggatcgatgcggc

SEQ ID NO: 95941 - DNA, 424 bp, Zea mays
  Clone ID: MRT4577_19010C.1
gccgccgggtccctccagtgccccggcatctccgctttccgtcttcccgcgaaccgacgccattcttcgccccggttccacggctcgaatcgcatgaccgcatccgatcccgcccggcccctcctctatacactggaccgatcgcctgggccgctgatggagggagggacgcccgcgacggcggcggcggaggcgatggaggccacggggaaagccaagaacgacggggtggtcaaggaggtgatacggctcgagcgcgagtccgtcatccccatcatcaagcccaagctcgtcatgaagctagcttacctcatcggtatctctatatgatcgcccatccattgccgcgcgccggcctgcctgcatgctgcttcttggtttcgctggattggttaaatcgccgccgtctttcatggcaagagcc

SEQ ID NO: 95942 - DNA, 421 bp, Zea mays
  Clone ID: MRT4577_19011C.1
aggagcagtacagtacaggagcaccctaaactaatccatgacgtcaatacggagaccctctgacctgtatacgagacgagactacacaacagtctggaaaaaacaaaacactcgtgtgcgtcattgcaaacgagcgtgctttgacctgttttgatgttcaccgctctgctacgtgccgtggctgaaccggtcgcacgcagcagcactactctcgccagtcgctagagagggggcagcaccgcgctggtcactggatttggatgcatgcgtgctcgcttgcgttcgctgaaacgcaaggcgtcatctgatctggccgatcgaccgatcacgcagcccgcagcccgcagcccgctaaactaaacacagatgcatgcacccagctccagcggtccgtgtatgggatccgtacgctggccttttg

SEQ ID NO: 95943 - DNA, 425 bp, Zea mays
  unsure (1)..(425): unsure at all n locations
  Clone ID: MRT4577_19012C.1
agcatctagtcggcggccgccctctttttcaggggggtagttttaaaggtgtttggcgccagggctacagggacgcctaaaagcaagggcacgttcagggcctggagtctgtcatgggtcaacagcgtatgatgggcccaatctacaccgccaaagtgacactcagcctgggctcacgagaaacttatcttgttcagagcgagcgcatcgacggcgaatgactcatgagacccgtctctacctaccgctgcaaacggctacacgaccaccgcaagtggcaggcattgttactggttcactcgaggaggagcgtcttcttggggagcaggatcagatccgtgagggtgtagtgcctctgagtactcatgaggaagacgatcagcnacgcgctgcggaacatgcttaagaactgcggcgcccccttc

SEQ ID NO: 95944 - DNA, 295 bp, Zea mays
  Clone ID: MRT4577_19013C.1
caaaaaaaaaacccggggcggttggccggacccaaagtgggcggccccagatcctttttttggctaaggaaagagggccctaaaccggttaaaacccaaaaaagccgatggccaccggtttaaaaggggcttttaaaggcaggcaaaagggggtttttaaatgttggggggggttggaccaccgggcttccaaacaaaaattttggagggggggggccttttcccttttaaaaactttaaacccaaattgggccattgggggccggtttttattggcccgccccctaaattaggg

SEQ ID NO: 95945 - DNA, 396 bp, Zea mays
  Clone ID: MRT4577_19014C.1
acgcctagatcgcagttcggacgctcgaatatctgatactaagtatttacaatatgccagtccgaacacaagcgctgctgggtctgtatatgttctcatgtaggatgatatattggacttttgatctgtgaacagagctgcgtgatacaaaccgtgaaatcagactatatgaggcacctggctgctcgagcctgctacgtgatccaatcaaactggtgcctgcgacaatggcatgcgacgttcgtgcagctgcctcacctggctaatcatccgactgtccttaaactgtagccttatgacctaattagcatcgctgcagtgtgtactctgatatcgtcactatatgcgggacaggctgtgcaacgagtctagatactgccgttagatggtccacac

SEQ ID NO: 95946 - DNA, 192 bp, Zea mays
  Clone ID: MRT4577_19015C.1
cacatccccaatgggaactggccacccagtactttgctgacagggacatgttctgtacttgccgaagtacctgaggaggatctgaagaggaaatgatggcctgtggaggctcaatccagaccagtgtgaatgctctgtcagcagatgtgctatgtcgatgccaggtgtttgaagagacccagattggaggcg

SEQ ID NO: 95947 - DNA, 558 bp, Zea mays
  Clone ID: MRT4577_19016C.1
cattgggtacctcgaggccggccgggtttgatagctccatctgtggcattattgctttttgctttggtattgtagtctactaccagcctgcatatgacatcttacttgtcagaccattttttggccatgacggacgccttggtcgctttcttgtggacccgcagcacttcttaccaaatcatgaacttcctatgggctctttctgaaaaagagatggaaagtgtatgccattctctaaggaacccactgactggacttaaggatgataccattgatgacatctcctatccccaatgaattccccactgtcttcagatcacataccgacacctgcttccaagctggttgatacgctgttttgtgcctcgtccacgactatctcaagcctcctcccaatatcaaatcctaccaccgcttcatcaagaatggacttgctactaagggttctagatgacacgatgaatggcgacaatgctagagacacagaggcctcatctgcggtgcatggaaccgcaaggatagtgacaactttcatgagaccatcagctcctctattac

SEQ ID NO: 95948 - DNA, 264 bp, Zea mays
  Clone ID: MRT4577_19017C.1
tcatagtacattacgtcactctaaagtgagtcgtattatgcctgaccagagctagctgagtggactacggcatcagcaggtggtctgactgacatcccgaacgacatcaatgcatagggacccgtcgcgggcgaattcgcctaacggagactacaacggccgaccaacgggcctgcaactctgggccgaataacgcacacattaatcgccatatcgaacgaaaaatgcggacttcacaccatcgctacgcgtcctctacaccgc

SEQ ID NO: 95949 - DNA, 354 bp, Zea mays
  Clone ID: MRT4577_19018C.1
cgcgtacgtaatgctcggaattcggctcgaggtccgcccagatcctagatgctcctggcaatgcctgcagcaagggaaggacgccgagtctgcggttggctgccaaaaggatctggctcaagattctcccttgccttggaacttgccctaggatccaaggccattctctgtcagtagtttacgattgacctctggggtgcgcataattacacacacagtgctcaaggccctacagtacactcctctcactacaaagggaatggaaagggcacctaatacactggaaaacgcttcataagggcttgcaagaactcggaaagaaggagatctttacgaccatgaccttctttcttg

SEQ ID NO: 95950 - DNA, 567 bp, Zea mays
  Clone ID: MRT4577_1901C.1
gtgggtgggtgggggttttaccaaagaacccgggccgtgatttggaaatagaacagccaaataaactaagcaactgacacgactcgactcaaacatacgatgaatcacattgcctcgactcgactcggattcgcatgacgaattacggtgtgggggggggactggcggcaacaatacaatcctgattaattgaaaaaacagacaaaccaatgcaatgcatttttattgttcaggccagccttccagccgccgccgcctttcctgccatggctcggatcagtagccttgaatccaccgctgcccttcctgccggggctcagggttgccgtcagagcatcggacccggcgtggttggcggcggcaccctgagccgcagccttctgccaaagcaggaagttccggcacccgttgaagctgatcctctcgtcttctccgagtgcgccggatcctccgttggcggtggagaggacgaagccggccgggtcggtgccgagcagcggcatgcggccctcgcgggcgtagcagcgcagcgcgccgcggatgagcgcggcgaccgtgtcgccctca

SEQ ID NO: 95951 - DNA, 490 bp, Zea mays
  Clone ID: MRT4577_19020C.1
ggggaaaaagggccggcccggttttgctttaacaggggcttttcctggggggggccccctttggtttccaaagttttccggggggtacattccccttcccaaggtccatggggggggggggccccctgggggtttacccctcgatttcctgggggtgggggtgcccaaccccctgggtttttactttcttgggggccttggccccggggggggggggggggggttgcccccttttaaaaacccccgtgaccttgccggggtccggggtgtttttggggaccctcaacctgattttcccggggggggagggggggtttttaatgttctcctttggggggtcttccttttaactttttcccccgggggggagggccgaggggtttttctaccgggggggagcccccccggcccttgggggcgagggaggggggacccccttatcttggccccaggaaggggccccccaaaatttttgggttttccggggggg

SEQ ID NO: 95952 - DNA, 188 bp, Zea mays
  Clone ID: MRT4577_19021C.1
agtgagtcgtattaaggcgtcgccgccgccgcgtcgtccgccgcgtccgctcttcccagcgacatgtgcaagcccggcgcgtactcgctcggctcgcgcgtcgccaggatcatgtccaacggcgcgaccttctcggtggtcggattcgcggtcgggctcaccggagccgcgatctcgatgcgggctga

SEQ ID NO: 95953 - DNA, 747 bp, Zea mays
  Clone ID: MRT4577_19022C.1
attctcccgactcctctgccaccgctggcgccgcccagtcctcgctcgcgccgccgcgattcgccgcactcgccagcaccgtccgcgccgccggccagcgccgcacctccgtccacgccgtccgcccgcgccgcccctccgtctgcgccgccacccgtccgcgtcctccaatcgtcgtcggcacctccgtccgcgccacccgcgccaccgacttcctccatcgcagagacaccgacgaggaggcctacgccgtgctccgcgaatgcgacatggctcccaacgagacggcgcagaagctgctcctccaaggagcccaaaatgcatgggatatgctgtctgaggagcaatcacagaaacacatcactactggctctggtgacctgaacggcatacttggtggagggattcattgtaaagaagttactgagataggtggggttcctggaattggtaaaactcaactggggattcagctagcaatcaacgtccaaattcccgtggactatggtggccttggcggcaaagcaatttatattgatacagagggcagtttcatggttgaacgcgtctatcaaattgctgaagggtgtatcagtgacataatggagtattttccatgccaccatgacaagtcgtcatctggccaagaaaatctgcagcccgagagtttcctggcaggaatctactacttccgaatatgcagctacactgaacagattgcggtgataaactatctggagaaattcc

SEQ ID NO: 95954 - DNA, 565 bp, Zea mays
  Clone ID: MRT4577_19023C.1
gacacaggaacgctttgtccgttatgtcactagctagttgctctactaaagggcgggcatagaggtgccctgaatccgccgctaacaatggatgaactgaagcgacgatgacgtcccttgcttctgtctttatgacggcggccacggcctgcttgtaactagaaggcaccgaacacggcggcaacttataacaggacacagagaagacctggcgcgaaggccacggaaaggtattggaccgcgagcgcgggctgaacctgacgctggaccgcacgtccggctccgggatccaccccaagaacgagtacctgttcggcaagatctacatgcagatcaccctggtgccagacaacttcgatcgcacgctcaccaccttctacctgttgttccatggcgacacccacgacgagatcgacatctagatcctgtgcaacgaccggcggggatccctacactctgctcactaacggtgtcacacgcgcacagggccatcggaaagcaccaaaatcctgctctgggtcgaccctaccagtgacttccacacctactccattctgtggaaccc

SEQ ID NO: 95955 - DNA, 422 bp, Zea mays
  Clone ID: MRT4577_19024C.1
aaaaaacacacatgcttatcatcagatattattcaaccaaccttccggcaccaaattgaaggaagatcgaaacaaatgggggtgaaacacccatctggtttattcccggcctaaggggcggtggacccagcggcacgttttcctgatctcgcccttgctgtgcggcggtatggccagccggttagagcttgaggagcccgtcgaaaaattcctcgtccaaaagggtgccgttctcggggtactccttgacgtgcccaagcgcctccttctccgtagagcattgccattcggagtagaaggagacaatccttgccaggttgtgtgggtaatacctgttgcacaaaaagtccttggccttgcacatcttccagagagaagagacgggaagcgccgccgaacggcgcgcgggtctctttcgcaca

SEQ ID NO: 95956 - DNA, 1546 bp, Zea mays
  Clone ID: MRT4577_19025C.1
gggtacctcgaggccggccgggaaataggcagtcggcagaccacgggccccttcgtcacctccggccgagcagtgccgactgccgccacctctgaaaaaccctagcaaaaaaaaaaaaaaaaacattgcccaatccaaatccccattccctccactcccaaaatttcgaactccgaatcgaagctatcatgtgcgagcgctcacctaccccacgttgactagaagaaccgtccgacttcaacttcccaattttgcctccaaaaaattcaaaatattattcgaccccgccgccatcccgtccgccctacaaatcccgccagcatgcgctccatgttcgccactaggtcgcttctcgccgctgccgcctccgcccccaccgtcctccgcgccagcgctttcccatcgcgttcgctgctcctctctctgcctttccctcggggtcgtgctgccagaaatatgcttggcgcggcgaggtcgatctcttcggccgccccgtcgcgagtcggaggccgtgcggctatggaggtccgggcggctcagtccggcgagatccatgtcatcgtgggccccatgttcgccggcaagaccaccgcgctcctccgccgggtccaggccgaggccggcaacggggaggagcgtggcactaataaagtccgacaaagacaaccgctatggattggattctgttgtgactcatgacggtacaaagatggcgtgctgggccttgtcagaactgtcaagttttcatgacaaattaggaattgaggcctataataaggtagatgttataggtatcgatgaggcccaattcttcgacgatctttatgatttctgctgcaaagctgcagatcgtgatggaaaaattgtagttgttgctggcctagatggtgactacaaacggagaaagttcggttcaattcttgatattgttcctctggctgactcggtcaccaagctaacagcacgctgtgagctatgtggtcgccgggcgttctttacactgaggaagacgcaggaaaccaagactgaactaattggaggagcagatgtgtatatgcctgtgtgcaggcagcactacatggatgggcagattgttattgaggccacaaggattgtgttggaccttgacagatccaccgtgacggcgaaagccttgaaataggccaatacctgacttctgcatgcagatttgcagtgtgtaacgatttatttatgatgacattggttgctgtcgagtgttgaagacgcacaccagttggtgaaaagctgttggcattgagatgctgccaccagcgagggaagccaaatgagttgatcccccaaagtactgttgagaagtttgtaaatatctaacagtgtttggattttaaatgtggacatgtatcgcttttcttatgcaattggcattgtcatttttattaagcaatcagatgcttggaatcagctgtacgaatttgtaccacaaaggaattgcattcaagtttgaaagtaaactaaggctatctccatcatgtaaatggatgtgtaaagcactgtttttcactgt

SEQ ID NO: 95957 - DNA, 194 bp, Zea mays
  Clone ID: MRT4577_19026C.1
atcaaggcccccgggcgggtatttatgacataaggggggcaggaattaccacaacaaactataactcggaaactaaattacagacaggcagacagaggtccacccgcgggcttattatttggaattattaactagaccccaaagcaaatgaaaggacccaatctgaaacgcacccaggaaactagagcctgaaa

SEQ ID NO: 95958 - DNA, 738 bp, Zea mays
  unsure (1)..(738): unsure at all n locations
  Clone ID: MRT4577_19027C.1
gccggccgggtacagataggctctccanctcttctcttctcncggggcgcctcgccgacgccgacgccgccattcccgctcaagcagccgccagcagctccggccgcgcgcgccccgccgcagctcttcagctggccgggccaccagccgccgcagcagctcccgtcgccgctcttcccgcccggcccgggcgcgttccacccgtcctccgcgcgcccaatgccgccgttcccaggcggcaaggacgagggccacatgttccacctcccgccagcggcgcaccacggcaccaacaagccgccgccgccgcacatggacgagcaccaccagcagcagcagcagccgatggtgggggccggcggcgacgcgcccgacggcgacctccggtggcccaacgggctgtccttcttcaccgcgctcaccgggcgcgcggacgacgcgaagctgctcttcggcggccccggcgctggcgctggcgctgcggacgacgacgacaaggcggcgccggacgcgcacggcggggccgagaacgtggaggagtacctcagcctggagagccactcgaacaaggccaggaaggtggagagccccgcggcccagagcaccaacaagttcaagaggagcttcacgttgcccgcgcggatgagctcgtcctcgtccacgtcagcgttcccgtccgtgtcggccttcacgccgccgccgccgcagcagccagcgatgggagagtatcgagggccg

SEQ ID NO: 95959 - DNA, 201 bp, Zea mays
  Clone ID: MRT4577_19028C.1
tcttttacaaatgacaccacgggaacagcatttacttgcaaaagagagagcgagcgaacaaaaggaacgcaacaaatggggggggaataagaattttccggccaggggcggccgtttcctttggggttgcccttgaccttgttgttgttcttcctcctgggctgttccggaacttggggggaatggagaacgtccggggag

SEQ ID NO: 95960 - DNA, 1561 bp, Zea mays
  Clone ID: MRT4577_19029C.1
ctgtcatgtttctcaggagcgatgtgcttgttgtctcgcacattggggactcttgcgaatggcacgaggttgctgagcccgcgcgtgccgcggctgccgccctccaccttcacctccgttgccggtgcccggtgctttggccctgccgcgaggtgccaggcgacggcggcgggcggcgtggcggccgcggggcccccgtcgtcggagctggaggccatacggtggggcagcgccaagctgcagggcgctcgcgacgagatggaggatgaggtcttgctccgcccgggctccctcctcgatggcttctccttcgccgccgtcttggatggacacgccggcttctccgccgtccagttcctcagggatgagctgtacaaggagtgcgcagctgcgttggacggcggcgcggtgctcagcactaagaatctcgacgctatcacggcctccatccagcgtgccttcgccgctgtcgacgccaagctctccacctggctcgagcaaacggacaaggacgactctggtgcgacggccactgtcatgtttctcaggagcgatgtgcttgttgtctcgcacattggggactcttgcttgcgggtgatatcacgtggtggaagatctgaagctttgactggctctcatcgaccgtatgggaacaacaaaacgtcccttgaagaggtcaagaggatcagagcagcaggtggatggattgttgatgggcgcatatgtggagacatatctgtatctcgtgcttttggggacataagatttaagacacgaaaggcgaatgaaatgctggagaaaagaacacgggtgagagttaaacaaggaaggtggactgataagttcatctcacgaatacaatttaaagatgatatagtaatctcgtcacctgatgtatctctggtagagcttggaccagacgtggaatttgttctgttagcaactgatggtctttgggattacataaaaagctctgaagctgtagcttttgtcagagaacaactccgtcagcatggtgatgtccagttggcctgcgaggcacttggtcagaaagctctggatcaacggtcccaagacaatattagcatagtcatagctgacttggggaggacaaactggaaggcgttgcccgatgaaagaccgaacttgttcttggaactaagtcaagcagtcgcgactgtaggggttgtctcaataggaatttgggtttcgtcgttccttgggttacagtagaactagctactccgtccggatgtgtatattacctactgagtttacatctttctgctagcagtagcagctgcaaaatatatgtatattcgtatatagtgtgtgaattgatagggtaatctgtttgggtaatactgagtgaacgtgtgaagtactgatgaagatcgtgtagttgagctcctggtgagtcatgagtcatgacagctgagtggcttttgagtaatcctcatgtcaaaaaaaaccaagcaaaagaagaagaagaaaaagatcttctcatcagttgctaattgctacaaaaaaaaaaacaaataaaaaagtattgaataatggc

SEQ ID NO: 95961 - DNA, 1642 bp, Zea mays
  Clone ID: MRT4577_1902C.1
gtacttaataatccagcggtttgtataagccataaaccaaacaaacaggcacggggccgtcaacgccgcgtgatcatccgattaattagctaatcggccaaacagggccttgtgatcacgaagagagtgttttttttttttttttagaccagcacgcacaaatggattattgaatgaagaacctttaacaagagatcagaggaacccgatccgatgatttggaaatagaacagccaaataaactaagcaactgacacgactcgactcaaacatacgatgaatcacattgcctcgactcgactcggattcgcatgacgaattacacttcgccatctcactggcggcaacaaacaatcctgattaattgaaaaaacagacaaaccaatgcaatgcatttttattgttgcgcggtgcctcgacaccaagaaacgccccccttctctcgtccacgtatggatcacaccttgatgctgaagctgaggaggaacttgttcagtccagccttccagccgccgccgcctttcctgccagggctcggatcagtagccttgaatccaccgctgcccttcctgccggggctcagggttgccgtcagagcatcggacccggcgtggttggcggcggcaccctgagccgcagccttctgccaaagcaggaagttccggcacccgttgaagctgatcctctcgtcttctccgagtgcgccggatccgccgttggcggtggagaggacgaagccggcagggtcggtgccgagcagcggcatgcggccctcgcgggcgtagcagcgcagcgcgccgcggatgagcgcggcgaccgtgtcgccctcgaggacgatgaagcgcaacgggccggcgctcccgaggacggtcaccgtcaccaggacgcgcagggggtcgtcgggccccgcggcggcggccttgccgcgggtctccaccctccagagcttcatcggcaccgcgacggccatcggcggcggcgctcagcgagcgatcggcttgcttcctgcttcctatgagaagagaagggggcgaatctcgcgcgctgccgcgctctcgcgcaacagatccaggacgggaggggcaccgaacgaaccgaatgaaatcaaatcaaagaagcaagtggcggcggggttcaggggtcgagaccgatgcagcggtggtaccagccctgcatgcagtaaccgaagccgcggaaggaggcctcctccggctgcggctgcgaggcgacggacgtcgcgcgggctcccaccattcacgaggggctcgtcgtcttcaccggtgcgcgcggcggggccgggagggagatccgcggtgcgctcgctcgcttcttgccctcaggcggcggcggcggcggcgagcgggaggaataaagagagtcgtcggcgaattcgatttggttgttggcttggtgagcgaggaatcgaaaatcccggcctcccagcaccctcgaggggctcgccgtcttcaccggtgcggggggcggggcagggatggagatgcgcggtgcgctcgctggcttcttgccctcaggcggcggcggcagcggcagcggcgagcgggaggaataaagagaggcgtcggcggagtcgattaggcggcgtgggcgtgggggagcggggccgcgggggcggaggcgcggg

SEQ ID NO: 95962 - DNA, 355 bp, Zea mays
  Clone ID: MRT4577_19030C.1
aacaaaaagtatgcctgtggacattaatgcgcaaggtcaaacccgggctttgcggcactcagcttcattcgtgctcctacagggtacaaatgcgcatgcttacctgtacgatcacccgcatccttcaaaacactggtcttcctcgagataaaacattccggagagaacagcctcacatcttaactctagtgtgccactcactggccgtcagcgaaagatgggtctatgacacaagacatgcttacctggctgttatcatgtacccgcacgtgaaccagctcctggatcaggtggaccaggtccagaggctggtgcaccctgctggctgtctagtggctgcccaatctgcacgact

SEQ ID NO: 95963 - DNA, 1234 bp, Zea mays
  Clone ID: MRT4577_19031C.1
ctcgaggccggccggggcttgtttggttgcttgtctctgtgtacttgcaacagcagcaaccaccagcagcagcagcaagccaagcgatccactagctagcttttcacttgagcgggcctcgctgctcgtcgtaggttgtactcgcacttgcagctagcgttccagtggtggtggtggtggtgctcgattgatcgatatctcgctaggcgaccggcggcggcggcggaggcggagaccgacgacagcatgagctatgggggcagctcttctggcgggcgaggtgggcgccgtgtggagtacgggcggacgtacgtggtgaggcccaaggggaggcaccaggccaccattgtgtggctccatggcatcggcgacaatggcggcagctggtcccagctcctggattctcttccactgcccaatgtcaaatggatttgccctactgcaccaacgcggcctgtcgcggctttcggtggattcccttgcactgcatggttcgatgtggacgagacttcactggacggccacgctgacatcgaaggcatggacgcttcagccgcgcatgtggcgaacctgctgtcctccgagccatctgatgtgagccttgggataggagggttcagcatgggcgctgccgctgcgctccactccgccgcgtgctacgctcacggcagattcaccaacggtgtcgcctatccgatcaacctcagggtcgtcgtcggtttgagtggctggcttcctagctccaggaccctaaggagcaagatcgagagctcgcagctcgcgcttcgaaaagcttccggcttgccaatcctgctcagccatggaatggccgatgaggttgtcacctacaggaacggcgagaggtcagctgagattctacggagctcgggattccagtacacctacttcaaaccctacaacgggcttggtcactacactatccctgaagagatggacgacgtcagcaaggggctgaggtcaacgatgggactctgagcggcctatctcgtggtcgtggctaatctgaaagtcaaatacgttggcatacatagagagagagagaggtattggtaggctatgtgaattgtgagttgactgtcatggcttggtaggctgtaactccacgctcttaatttcctcactgatacatatacataccatgttagtttaccggtaatgtaccctgttactaccactgaagaggatgcctgtaatgcagtatttgtattgctcg

SEQ ID NO: 95964 - DNA, 393 bp, Zea mays
  Clone ID: MRT4577_19032C.1
cgcgcacgtacgtcccaaacgaaaccatgtccgggagagctcttgtcctgacgaccgcgacgctgctcctgatggtcgccgctgcgcgtgcgggggaggcgatcgccggcggctggagcccgagcaggaacctcaacgacccgagacatacaggagctcggcggctgggcggcgacagagcacgttaggcgggccaacgacgggctgatggccggcgaggtgacggacatgcaggagcatgtggtgtgcgggatgaactacaagctcgacctagacgccactgacgccgacggcaaggtcgtggggtacgggcacttagtgtaccagcagccctggaccaacaccctggagctcgggtacttcgcgccggccagctgaccaccagctggacgt

SEQ ID NO: 95965 - DNA, 1059 bp, Zea mays
  Clone ID: MRT4577_19033C.1
atgaagaaagtggtctactacgagaccaactcttcgtcgccatccacatccagctctgatgcgacgtccgtcacttctaagcactatgagcgcaagaagtatagtaagatgccacttcgttattcccgtatttctaagcgcactccattactttctgttccattaggcaagccaccatgttttgatggtgaagattattctatgtggagtgataaaatgaggcatcaactaacctcactccatgcaagcatatgggacattgttgagtttggagcgcaggagtataataaggtgcaagggttaaaaagtgccaaagaaatttgggacatcctaaagaccacacacgaaggagatgaggtgaccaagatcacgaagcgggagacgatcgagggggagctcggtcgattcgtcctcaaccaaggagaggagccacaagcgatgtacaaccggctcaagaccttggtcaatcaagtgcgcaacctcgggagtacaaaatgggatgaccatgaaatggtcaaggaagtgataggaaagtttgtgagctttgaactaatgatcaaaggatccaaacacatcgtcgacttggagcaaggcggcacctccacacccgaggtgcaacccatcgcattcaaagcgacagaagagaagaaagaagagtctacatcaagtagactccccatcgacgcctccaagctcgacaatgaggaaatgtcgcttatcatcaaaagctttcgccaaatcctcaagcgaagaagggagaaggactacaaacccctctccaagagggtgctaaaggttcaacacaaaccattaaaaagatccaagttagggttcaaaagaaagaagcaaaagaaaccaaagagaaccctggtctggcgcaccggactgtctggtgcaccaggggccgtacagactgaactcttcaccttcgggtttctagagagccgctccgctataatgcatcggactattcggtgcaccaagcggagcaatgactatcagcgcaacggtcgtctgcaaaagcatgaacaatgcgcgcagaagtcagagcaggcataa

SEQ ID NO: 95966 - DNA, 2025 bp, Zea mays
  Clone ID: MRT4577_19034C.1
atgtcgggaaaatccgctaagagggagatggaaaccggcaagaaggccacaagccacgggaaggctccatcaagggagtccagcaccaaagccaaggagggatcccctccctgcgtcaagtcgcatcggagaggcgacaagaagaagaagatgaagagagtggtctactacgagatcgactcttcgttaccctttagatctgactctaacgcgacgtccatcacttctaagcgccaagagcgcaagaagtatagtaagatgccacttcgttatccccgtatttctaagcgcactccattactttccgttccattaggcaagccaccatgttttgatggtgaagactattctatgtggagtgataaaatgaggcatcatctaacctcactccacgaaagcatatggaacattgttgagtttggagtgcaggtacctaaggtaggggacgacggctacgactcggatgaggtcgcccaaatccgacactttaactcccaagcaactactatactccttgcctccttatgtcgagaggagtctaataaggtgcaagggttaaaaagtgccaagaagatttgggacgtcctaaagaccgcgcacgaaggagatgaggtgaccaagatcactaagcgggagacgatcgagggggagctcggtcgattcatcctcaaccaaggagaggagccacaaacgatgtacaactggctcaagaccttggtcaatcaagtgcgcaacctcgggagcacaaaatgggatgaccatgaaatgctcaaggttattcatagatccctcacattttgtaatcccactcaagttcaattaatatgtggtgatcctagatataagctaatgtctctcgaggaggtaattggaaaatttgtgagctttgaattaatgatcaaaaactccaaacacatcgtcaacttggagcaaggcgccacctcaacgcccaaggtgcaacccgtcgcattcaaagcgacagaagagaagaaagaagagtctacatcaagtaggctccccatcgacgcctctaagctcgacaatgaggagatggcgctcatcatcaagagcttccgtcaaatcctcaagcaaaggagggggaaggattacaaaccccgctccaagagggtgtgctacaaatgtggtaaacccggtcattttattgctaaatgtcctatgtctggtgatagtgacaggggcgacgacaagagggggaagaagaaggagaagaagagatactacaagaagaagggcagcgatgcccacgtatgtcgggaatgggactccgatgagagctccattgactcctccgacgaggatgccgccaacattgttgtcaacaagggacttctcttccccaacgtcggccacaaatgcttcatggcaaaggatggcaaaaagaagaaggtacaaactagaaccacccccaagtatactacatctagtgatgagggtagttctagtgaagatgaagatgacttgcttactctttttgctaaccttaacatgcaacaaaaagaaaagttaaatgaattgataggagctattcatgataaggatgaacttttggatagccaagaggaattccttattaaagaaaacaaaaggcatgttaaatttaaaaatgcttatgctcaggaagtagagaaatgtgaaaaattatctaaggagcttagcatttgccatgaatcaatttctaaccttagaactgagaatgctaatttaattgctaatgttgaaaagttaaatgtttgtaatgattcaatttccaatcttagaaaagaaaatgctagtctaattgctaagattgacgaattgaatgtttgcaaaaaatctatttcctgtcttaaaaatgagaatgccacattacatgctaagatagaagaactaaatgtttgcaaaccatctacatctactattgatcattgttggggacttgttctcaaatgctgtgaattaagaataaggcaacacaaaatgttaaagtttaaagcccttcgtcctttgaagcattatttcccttag

SEQ ID NO: 95967 - DNA, 430 bp, Zea mays
  Clone ID: MRT4577_19035C.1
aaaaaaaaaaaaaaaaaaaaaaaaaaaaaaaaaaaaaaaaaaaaaaaaaaaaaaaaaaaaaggaaaaaaaaaaaaaaaaaggggggccgaaataaaaaaaaaaaaaaaaaaaaaaaaaataaaaaaaggggggggcctttttaaaagtgccaagttaacttcactccacgtggcggggctttaaaatctttttgggtgcacaaaaattataatttctacgggaccttatttttccaaggtcggaatgggaaaaacccggggggccccaaattaaaaaagtttgaaacaaatccccttttccaaaggtggctaaaaatgaaagaggcccggaccgttcccctttccaaacatttagccaccctaaatgggaaagggaccccccccttaaccgctacattaaccgcggggggggggggggttccccccagtg

SEQ ID NO: 95968 - DNA, 345 bp, Zea mays
  Clone ID: MRT4577_19036C.1
acgcaccaacggggggagccgagagccaacaaagacaaagccccggggacgcccagcaggggcagcgacggggaccacaaacccacaaagcacacaagagcccaaagcggccccagggcccacgaacccacaaccaacggcaccagccagcaagagagaaacccaagagggggaaccccagaaaacccaacaggcacaccaagcaggcacggcacccgcagcacaccagcgaaaccaacaggcacaagaccaacgacagcaccaaccaagaagacaaagacgggcacagcaccaggggcaacaacaccaacaagaacaggggcaaccagaccgggcgaaccccgc

SEQ ID NO: 95969 - DNA, 370 bp, Zea mays
  Clone ID: MRT4577_19037C.1
gaattcgggcacgaggggttgtacagggtggcggtgccgatccacacatgggtgctgatctccaacttgagagttgacgtacaacatgctgcggcgggccgacggcaccttcgaccgcgacctcggcgagttgcttgaccggcaggtgccgggggacgcactggctcacaaggctgatttgggggctcaggatcgcgtgcgggagcgtcatgagcagcgagggcgccaggccgaggggcaggtgggggtgcgcctgcgtttgggccagagccatcgtgagtgggtgtaaggaaagcacggggggggcaggactcgacggtgggtcagggggggagcggggcgatggccaggccggcagagggggcagccg

SEQ ID NO: 95970 - DNA, 486 bp, Zea mays
  unsure (1)..(486): unsure at all n locations
  Clone ID: MRT4577_19038C.1
agtttatcacctctaagttgtgatttttcatgggagactcactgaagcagatgcacacagatactttcagtagcttatcgacggtgttgatttttgtcacaagaaaaggagtctaccattgagacttaaaggatgcttagtgggtcaactgtagggatctttccttctacatacgacctatgggactcgctttttggtaggtgcccgtgcgatgccacggaacataaattgcgaacctccaatggacttcatttgagacaagtgatgcccaagaaaatgggggtaaactgacacagctatcacttgcattacttgccctatgctcggaagaatctgacacagctatcacccatgaacatttccggttaacttgtggaaccagacttcatttgagacaagacaacaataccagtgttgagcttgccactcngccatggcacacgcgagaacacaggatgatcaagtaagaactgaacagaatgcact

SEQ ID NO: 95971 - DNA, 590 bp, Zea mays
  unsure (1)..(590): unsure at all n locations
  Clone ID: MRT4577_19039C.1
ccggccgggccngggatttcagtgaagttgttgagcttagaactcaacgtatctcgccttcatctttcaaattcattcatcatgtcagaccttaaggcttccgttgtcgagaccaagaacggcttccatgtcgagggatacgagaagatcgagtacgacttctctttcctcgacggagtgttcgaccccaagaacaacaacctggccagcatcaaggtcgccgtcaactacggcaactacaagaaccgactgggcgcttatcacgcaccgatgcacaccttcctcgacttttctttcttgaagacactccccgaagcacaagtcagaaatggctttgcagagctgatttagatcnttactcgcgcccacacgccaacattcgagcttctcgacaagtactgcgagaagctcatcacatctcgatttggtcgtgacaacgtcgaccccgaggtacgaaaggctgcggatgagataaatcgcgccggtattttcgagatgttgaagcttgagacacccaacctccacgagattggtcttgaccgtgttattgcgtatggccatacttggagtcctcttcacggagtcgcacc

SEQ ID NO: 95972 - DNA, 423 bp, Zea mays
  Clone ID: MRT4577_19040C.1
ggccgcttttttttttttttttttcttttttttttttttttttaaatctgtttttccggtaaaaaaaagcccgtgtgaccctccgtaaagaagagcatcagagccttcttcaggacaaaaagaatcgcttatttcagggagagctccaaagaggatgatttgcctatctccctgctgactggggggcagttaccattgaggaaaaggcccccacaacaaagggagatcctacctcttttttgccttgagggattacattatgttcagggaaggagccattctcacgctgatcgaaccaccgtttaacccattcacctgggcacagggatagatattgcttggcgaacttatcacactgaggcgctgcctaacttttatgagccacacaccctgtggcattaaacatagcctgggaaacagtgc

SEQ ID NO: 95973 - DNA, 334 bp, Zea mays
  Clone ID: MRT4577_19041C.1
gggaccaaagggcacacatttttttactgttaaaaagacaaatccccaaaaagggaacccccggaggtcactaacggccgcagggaaaaaaaaattgcttccaataacaaaagggttaaaaaaaaaaaaagggaactggttttatgggcccaaagctttggggggacagtttttaacagcaacgggggaaaaagaccttttgggacgtgtaaagagcaactttaacttccaacttctcccttgggggcacaatttccaaaaaataacccttttggctagaacaaccaaagtcaaaaagatttttgcaaaagcccttaccgaaaggggggacttt

SEQ ID NO: 95974 - DNA, 243 bp, Zea mays
  Clone ID: MRT4577_19042C.1
gacatgattattcattattctgtccacctttttttttgctacaaggttcccttaactgttttcatttgtgagtttgcaacgatgatgtattccattgaccgttgattttaaaaatcgactgacagggagatggtgaacaacgacgaacttaacgacgaccgtgctttcgttacacaaaggacgcctcctataccaacgcgaaatacgcaccggtcgggccggccttcggcagcagtagcacct

SEQ ID NO: 95975 - DNA, 826 bp, Zea mays
  unsure (1)..(826): unsure at all n locations
  Clone ID: MRT4577_19043C.1
ctaattggaagcaccaccctagcaatatcaaccattaaccttccntctacantttatcatgcngcncgattctaattctncngactantcctagnaatcgctgtcgccttaatccaagcctacgttttcacacttctagtaagcctctacctgcacgacaacacataatgacccaccaatcacatgcctatcatatagtaaaacccagcccatgacccctaacaggggccctctcagccctcctaatgacctccggcctagccatgtgatttcacttccactccataacgctcctcatactaggcctactaaccaacacactaaccatataccaatgatggcgcgatgtaacacgagaaagcacataccaaggccaccacacaccacctgtccaaaaaggccttcgatacgggataatcctatttattacctcagaagtttttttcttcgcaggatttttctgagccttttaccactccagcctagcccctaccccccaattaggagggcactggcccccaacaggcatcaccccgctaaatcccctagaagtcccactcctaaacacatccgtattactcgcatcaggagtatcaatcacctgagctcaccatagtctaatagaaaacaaccgaaaccaaataattcaagcactgcttattacaattttactgggtctctattttaccctcctacaagcctcagagtacttcgagtctcccttcaccatttccgacggcatctacggctccaacattttttgtagccacaggcttccacggacttcacgtcattattggctcaactttcctcactatctgcttca

SEQ ID NO: 95976 - DNA, 387 bp, Zea mays
  Clone ID: MRT4577_19044C.1
accaattttaaaaagcttcttcatcatctataagggaaggccgaagttgacataataagaggcaacaaaagacgattggaatgcatccaaatatttagctttgaatatgaatgcattgaaaatatgctgaatctcaagttctcaacttttgtttttgttgccttgcgtctatcccaacttgctttcttgttgttgttggtgttgttgtttctggttaccatttgactacaatcgtgatcactagatgctatgaatgaaatgcctttgctagctttgttgcatatggcatcttggtcctgttttgaagctgggaatggaatctaaatttgtactccctccatcccacaatactattcattttaactttggttgttttatctatactca

SEQ ID NO: 95977 - DNA, 120 bp, Zea mays
  Clone ID: MRT4577_19045C.1
cccactcgtgcgagctcttcatctgtatcaacgaggaccatcgtagccatttgcgattcaggtgacaacaagataacgatttgaatgcgaatatcatctaccgctactggtaactgctct

SEQ ID NO: 95978 - DNA, 379 bp, Zea mays
  Clone ID: MRT4577_19046C.1
gggcagggttaaaacatactgttttttaaagcacatcgacaccgttgacgctggtagatttttacaggccaaggggagcagcacaaaccccttagggcaatccagcccaggggtggggccgtagcagttttcaggtccaagcttttcccattatgggaacttccaactggacctacataacaaactttgttttggttactgggctccaataataagccgggtgtatgaaatgctgggttcacagatcacaaagcgcagggcccaaatggaatttccaatttagcttccacaccccaggcacttttcccgggtgttaaaaaaaacaaaccatttgggccatttaagggttacgttttcttccgggggctttcattgtaac

SEQ ID NO: 95979 - DNA, 569 bp, Zea mays
  Clone ID: MRT4577_19047C.1
gctcgaattccgttgctgtcgggatcccgtcctgggcggggcgcccacggctcccctcccctgtcgttgcgccacaggctctgccccacgcgactggactcgctgccccctgcagtcgcgacaccagccatgggcctcgcggcttctctccccaaccccagatccgggctgcccgagtccgcgccgccgccgcgtacagggctggtcgtcgccgccggtcctcatgttggccgtctgctccgctgcctctcttgctgtgagggcctccttcccctcggccgctctcgcacctgcgcgcctctcccctgtgccggtatctctgcctgtgcagccccctgtcatcgcgctagccacctcctaattgctcgcgctatcgccccggcagcgcctcccacttcgagcttctcctgtcaccggtgccgtcaacaccccttgccagggccggcgcaggcccctgcccggctggacacgccctgccgcccaccccctttctttgccttcgctggatccgtcgctgccgcggccttcccggccggatccacgttgttgcgacctttctggctcgatcc

SEQ ID NO: 95980 - DNA, 176 bp, Zea mays
  Clone ID: MRT4577_19048C.1
aatatcccaaagcgggggctttaaagggagggggctatacttattcattaaatacacttactaattataatattacaaaaagagggtttgacctcattagttacttcatacaacgagacttacgatcgacgatggatatctcatataatatgaaacccaagtgcatgagcagctat

SEQ ID NO: 95981 - DNA, 677 bp, Zea mays
  Clone ID: MRT4577_19049C.1
gccggccggttcgggtgccctatgatgtttacaactgcctagtacatatgatgatttttaaaaaactgagggcatatgcatgtgtcagccagtttggttcatttcatggtgaaccaaaaacttgcgcaagcactcagatatgccatgtctcaaatgagtgatacggctaagaaacttcaagaaactgcctctttgtgctacacagatgaagatgttgtagacggtttcaagctgactcaagtagctcgttcaatggacgagatagctgaaatgcttgaagtaactgcaattgactgccaggtctcgatgatggatccaacaagtatgttagaagctggctatgctagtgaagatactgctgtgtgggaggacgtattccgtgaccgagaaataatgaatcaaccattagaagccgagacacttgctgagcactgtgctaagtgggggcttaattacaatgagatctgggatagatcagtgtaactttggcttgtgtagttcttttgtaatgagttcactaagatgaactagatcagtgtagcaatggctatggtattgtaatgcgtgatttccaaattataagacatcttgaactacttgtgggtacttttcttctatgaaatgaaatgaagtgcctgttatcttctatgaaaaaaaaaaaaaaaaaaaggccccta

SEQ ID NO: 95982 - DNA, 390 bp, Zea mays
  Clone ID: MRT4577_1904C.1
cccaaactcacggtggagtcagtatacaccgtgcacaacctaatgttctgcaccgtcaagatgatcaagacagctctgcagtgtgacgcttgactgtggcgtgtcgccatgccggtgctgatcgttgatgacaagccttactcaacaacgtacctcgtaccataaagaaacctatgctaggtgatacggatccagctcgcacggatcttttgcacggagtgatgtaggaggatcgcatattgactctgactctgtaatctgcttcttcttcatggaccatgtcaacctgttgtctgatacgggatctagaatagtgattggacaatgatgtggttagatggttaaaagcttttgtttcagtcccattgtttcatgacggtatgaaacttt

SEQ ID NO: 95983 - DNA, 900 bp, Zea mays
  Clone ID: MRT4577_19050C.1
atggaaacaattcaaggaaggtttctagtgctattaggtggtcatgtgagaaagaagttgccagttagcagtgttgactggaggctagtggatggtgagaagaagtatgaagtctggactgacctaaaggcccatccaaagttgaaggaaagaacaattcaagaatgggatgcatttgttgttgtttgtggagagaaagagccaagaggatgtgtccgagttttgggtctaggactaactccccaaaatattagtacccagggcctaagaagttacacacccacaagactccaaatggaagtactagcccgcaaaaaggctgaacgtgagaaagctgctctagaacaatgcatagcagaaatggaggagaaaatgcaggagcaaaggatggctcatgaaatgagagatgtggaaatcatctcgcatgatggttctaatacacgaaaccatctagacacgaggtctggacaacatgttgatgaaacacataacattgctcagtttcatgaagacgaagcttatgtggaggatgaactctctgatggcggtgaaaacttgtttggcagcaatcatgatagtgttacccctgcagtacatccatctcaaggcaaccctatgaatgttcatcttgaaaagaatgtgatcttatatgcaatgttgagagatcaatcgatggctaagggaacaattatttcaactaatcctagcaccgtgcttggaggagttgctctaggaaagcaatattgtgaggttgttgtgaatgttgtgctaaaaagggacgcccttctacctcacccatacggttatttggagaagatgggtgatattgatcggatgtcgatcgcatggccgtacaagagagtaataagctatctccttattctttttcatatatggtga

SEQ ID NO: 95984 - DNA, 877 bp, Zea mays
  Clone ID: MRT4577_19051C.1
gcttattgtacttaccttttttccaaaaattattattttctctctgctagcttccaactttgcacttttcttgagaaatatgttttccatctgaggatattatagtttcctaaacaaataattctcctctgttgtttagaaacttcccagtataagtatttttcagtttatataaaaacacattaggtattaagaatgttattttaattgagaaaaaagttcttattatttaaagttaagagggtcgggcatgagcatgatgtcattaagccttcaagttgattatctctataacaaatcagataaattttgatattttccaattgctactgctttaaaagcctccatgctatattaaactgccatgctgatcttgtttatgttggagtttcaagagacctactgaaccttactactttgtacaaactattttaatatcctgctctaactatgattttaccttttccatattttacagtgactcaagtgactcagatgatgaatatttggatacatgcatatgctcaatcatgtaaatacatcttgcacaggtggattctatcatgtgtataaagagctgtatctcagtattcctgtcttcggcttggccctaacagtacagtgacaatcatgcatgcatgcatagttcgttccaacagactccgaactggtgataatcagcgggtggatatttagctggccttaactgggagttacatcaaagacctagaaaatgatcaccggattcagtaggtagacatgattgaagaagccgagaaagaatgccttctttggtttaattttggataccaacaccatcctgagtttttggcagagtaatgattcatgtgataatgcaaatgctattagaatcgaa

SEQ ID NO: 95985 - DNA, 1538 bp, Zea mays
  Clone ID: MRT4577_19052C.1
aaaaaaagttcttattatttaaagttaaaagggtcgggcatgagcatgatgtcattaagccttcaagttgattatctctataacaaatcagataaattttgatattttccaattgctactgctttaaaagcctccatgctatattaaactgccatgctgatcttgtttatgttggagtttcaaaagacctactgaaccttactactttgtacaaactattttaatatcctgctctaactatgattttaccttttccatattttacccctttctgaaatccggattgggcctttttaatcgcgaagggcaaggcaaaagctcgccccacccccaaggccccaacctgcctatacggccagacctgctcgcctgattcgctctcccgcgattccacccccacaaatcctccgacccaacccaatccagcgtctcaaaattcacgcaacttcgcgtcgcgtcggctccaaatttgcccccttcgatccacaaatcccttcccccacccccgattttgcgccgaattcggttagcttattactctccgagcttatcgccaaccgtctgtcccgacctcgagatccggctcatttttttcaccctcttacgtattcggatcgagcccgagctgccaattcgaggagctccgaacgcgggccgcataaagcgaatcgaatgaatcaagcttgcgcgacgggcagttgatgccacccggcgatggatcgccgcatcctcaggacctcgtcgtgcaacggcagcggtaagaacccgtccccttcctctcccgcggcggtctcacggcctgcgtcctccgggggcatcggctccaaggacgacgccgctgccggcgagcgcaaggcgctgctgccgcggcagcctcctggcggcatggcgcggaagggccgcaaggggtccaaccgccgcgtgcagtggaaagataagcatggcagcaagctcaccgatgtcagggagttccagcctagtgactcaagtgactcagatgatgaatatttggatacatgcatatgctcaatcatgtaaatatatcttgcacaggtggattctatcatgtgtataaggagctggatctcagtattactgtcttcggcttggccctaacagtacagtgacaatcatgcatgcatggcatagttcgttccaacagactccgaactggtgataatcagctggcccttaactggggagttacatcaaagacctagaaaatgatcaccggattcagtaggtagacatgattaaagaagccgagaaagaatgcctttctttggtttaattttggataccaacagcatcctgagtttttggcagagtaatgattcatgtgataatgcaaatgctattagaatcgaacattactaattcctgtgcatgattcagatcgattttgtcaaataggatttgatgtattaacatggtatgtttcttttaaaaagaatccttgctaccatcatttgttacttaaaagaggcagtgcccagatttgtgctgaacactattaacaaactgatctgtgcaatttc

SEQ ID NO: 95986 - DNA, 314 bp, Zea mays
  unsure (1)..(314): unsure at all n locations
  Clone ID: MRT4577_19053C.1
aaacccancncnncaaccananangcnacaacaagcaancgcagcaagcaacanaccnnnancgcccnnnnggggncaacaancgccagcccnancggnggggcaggcagnggnacaaaccancagggcacaacagcngcagcaacgcgggcgaccgcggancaaccaaggagcgcgggcaaaccgnncncccnacgcgcagcaacaacaanggncngccaggcaaccaacgggcnacacggaacccggcngcgnannngcagcaacaacgangaccangnagccagcgagcgaccgccnacccncagcaacaa

SEQ ID NO: 95987 - DNA, 455 bp, Zea mays
  Clone ID: MRT4577_19054C.1
ggggaaaacccccaacccgggggggtcccttgggaaacggggggcccccaaaaggcggttttgccccccccctttccaattaaaaccccccgggaaaaccatgcgggggggtaaaaggcggggggaaaggaaaccccccccccaaacccccaatgggaaaggggccccttccaaaaatgctatcagggggggctgggccaaaatcgagggccgggcaaaagcccaaggggggaaaaaggctccttttaaacatcgggggtattttaaaacaaaatttttaagcagcccgtttccaaaaaaggggggcctttacaagcaaagcccccaaggttgggaaaggggaatattccccgggcaggaaacattgggggggtttccaacgggtttaagggcccctacccaatttaggggcccaggggcaggggaaggggctcccattttacatttccaattcc

SEQ ID NO: 95988 - DNA, 890 bp, Zea mays
  unsure (1)..(890): unsure at all n locations
  Clone ID: MRT4577_19055C.1
tgatgattgttctcaagttgaaccctagtgtaactgataaaactcgtgaaaccaagggtatgcaactctggaactcaaacgttctactcgaggattgatggttcacataaatgtgggaacacgtaggaaaaactatgcatcttcgatttaggttgcaaaagagggagcttgaactcattacctgagccatcacaactttcttctctgcaacttggttaaattcggcaccagtgctaaagggataatgcaaagatccctacaacaccaattagaattggggaagacgaacctcctcctcagtctcctagcttgttcgttgctctcacctgggatctgcgcctgggatcacctttgcaacatcagttgaactaaagatttggactggacatggttcagttgtttttgaacggtgatctgtgatatgtaaactttgtgttgtttaaaacatatatcagttgtttttgaactgcgacctgagctatacaataagcctgacttttttacagagtacgcaaatgccaggtttttcctgtttgggcacaaatggaaacaaaaaagttggactcagcctatcgtgaagctacgaaggaagagcactgtcccattattctgttttttcggtaattaaagcatcatctccattcttgggttggttcccatttttctgttatttactnaagtagtttttctggctaatgttaaaaactggaagaagaccatgtttctagcatgaacatgccaacatggtgccatcaacaacttccctgttagctcacggtacacncatgctccagtctgcccccctggttatcactaanttcaatcatctgtggtgcccgantggtgttcccaagaatgcactgaatagagcagatcaaatgaggatgaag

SEQ ID NO: 95989 - DNA, 199 bp, Zea mays
  Clone ID: MRT4577_19056C.1
aggaaaaacccaaatccttccaacaaaacagcataagggggcaaggcttagctttgaattcttgggcggggagggaacaaaacaaaagggctggggcctttaacttggtcaaaacaaggggaaaagctgaatgaacatcgcccccgaacccttgggagactacaaagccgggtaacagctcatttcagaggaataaaac

SEQ ID NO: 95990 - DNA, 264 bp, Zea mays
  Clone ID: MRT4577_19057C.1
gacagcccagcacggcggcgatggcgacccgcgcacccttttttagctgaatcggcggccccgtcttaagtttaatccccaaccgccccgcgcgcccaattattcgatcgtcggcctccagtctaccgacgcgccgtgcgctggtcggcgacagcgtgcctggacactccggccggtcgccggggccccccaaggtctggaccgagccgacgaaggaaggaacggcctgcagccagtcagtactccagtagcacgaaacggaac

SEQ ID NO: 95991 - DNA, 827 bp, Zea mays
  Clone ID: MRT4577_19058C.1
gggtctttgtagtatagtggtgagtattcccgcctgacgcagcatctgcacacagactaagtctcgaatcttccaatcccaacacggcaatgacgatggcaacgagcatctcggcggtggcgctgctctgtgcggccatcgtggcctccttcgtcccgctatcgtccgccggcgtctccctcgtctccctgacctgccgcaggacggcccacgagcgcctctgcatctccatcctcgcgcccgacagacggagcgacgccgccgagtcggtccagcagctcgccgtcatcgcgctggcggttgccaggaactccacgcgggacgccctgtggcgcacgacggtcctgggcggccgggctccgacgccgctggagcgtgacctcctggcgcagtgccgtgccctgtactcggagtgcctccgcgagacgacgaagacgatagccttggtgaccgctgcgagctacgacgccgcggcccgcgcctcgagcaccctccactggtacccggagaagtgcgagagcctcctgtacatgcagagggtggagtcggccatgaagcaaacaaacaagcaggtggaggaggagatgatcgcctcatcggatatcgttcacttgctgcttgctaggcgcggagcagacaaattgaacctagaataaattacctaccgtgttgcaccgtgctcgcgttgcttacacaaataaatgcatgtgattttttcctaaagaaaaaatttcactgctctacctttttcatctttccagcccatctacaatatttcactctctaacatctgcatctcacgctttaaataaaaagtgttgcctggg

SEQ ID NO: 95992 - DNA, 287 bp, Zea mays
  Clone ID: MRT4577_19059C.1
gatggcatcgaacccttgctgactcacatagtccatgagtagagctcgctgcacactttttttttttcgcatgagccgttcgtgtcttttcaaactgcgtgagagactgctcaaacgacagtactttttggtcatggtttggatcgctccgcactgttcatggtggctccgctctcgcgcacctggaccttgatcactttctgccgcttggcaccagtactacatcaacctgttctctatcgacggctttataacgtgggatcaatgcctggaggtgacccttttct

SEQ ID NO: 95993 - DNA, 586 bp, Zea mays
  Clone ID: MRT4577_1905C.1
ttttgtttttttttttttttttttttttttttttttttttttttttttttttttttttttttttttttttttttttttttttttttttttttttttttttttttgggcacacataagggggggtttccattggtgacaacaaaggggggggggggggtggggacattggtgattaggaaaccatttctttcaaaagacccggccatttgtacaaacttccgagaagagactgggccacgggctttccgggcgggcgggcccttaggggccctccccggggatgcggggggcaaactggatttccttgggcataaaggggacccccttgggggggatgggccaaaggttggggtcctcaaacaggcccacaagggaagccttgggggccttctggaacgggggaacgggggaggactggaagcgggggtcggttttaaagtcctgggcaattttggggaccaggggctggaagggcaatttggggataaacaactcccggcttttttgggacttggggatctcgccccccgccacggggcccggggggaaggggggcggtttcttcacccccccgggcgaaggggcc

SEQ ID NO: 95994 - DNA, 415 bp, Zea mays
  Clone ID: MRT4577_19060C.1
gaagatggcaatgcataggcagaagaagttgaggatgtcaagtttacttttgctgacacgggaagtacagaggggaaagagtgaggaaccaaaggacctgaagccacccgtccattgattaaggttttatatttccttggcccggttattccgatggaccccattaaatcccggtggccaggccaccgcccccacctttattttttgcttgctggtgatattcctttaattccttttcccttgtttattaggggtgaagggattccctttgggttaatgggtcctttgggtccatccttaattggccaatggtaagtattttttgtaaaaatacctgtgtgaataaaaaacctaaaattggtttgatccaaccggttgtaattttacccccttaaataattggatattaattttt

SEQ ID NO: 95995 - DNA, 167 bp, Zea mays
  Clone ID: MRT4577_19061C.1
gagcgcctgccgggatcatactatatgctcgctccagccttttctagggtttaccagcggctggcgcgcgctgtacgtgatgcaagatggtgaaggatctgcatgaccgcaagcggaagagctatgacagcgaatgcctgccacacgcggaccgggtagacccctta

SEQ ID NO: 95996 - DNA, 269 bp, Zea mays
  Clone ID: MRT4577_19062C.1
ggatatttaaaatatttgatctttaatatcctacaacttaaatctaaaagtaagtagaatgggggcggcgggcacaagttgcaggtgaggacatcatttcgaaacttgaaaggtgcatgcatcatcttaacatgaagctccactcattttagattaattgttggtgacctgatgctccaacttgaatatgttgaaccaaacaatgtcagaatacatcaatccaaacattcccagtacatcaaggaattgctggtgccacctgcacttat

SEQ ID NO: 95997 - DNA, 1735 bp, Zea mays
  Clone ID: MRT4577_19063C.1
cattgggtacctcgaggccggccgggaccgcacacgcacagtccgtctcgtctgccaacgccgctactcggcgcaccttggcttgctatttcgccaacaacctcctccctctttaccgcggcgtgccgcgtgcggcgggcgcggatggcaacggccacctccgcctccgcctcccccggcgcgttcggcgccaaaacccctgccccagcccgtgggctgagcacgcacccggtcctgaccccgagccccgcattcgcgaggccttcgccgcgcacccccgcctgcggcaggtcccgcgccagcctccacatcggcggcctgggctcgaccagcagcagcagcgccgccgccgccggcaacggaaccgggctccacgtgccccccacggtcgcgccgctcgccgtgcctaagatggccggctccatgaagacccataagaacgtcctgctcttctactgcgaggagatgcgggacctcgcgcagcaggtggtcgcccggaacgatgacatcgaactgcgatccatctcatggaggacatttccggacggatacccgaatctgttcatctcgaatgcccataacattcgtgggcagcatgttgcctttttggcttcgtttagctcgcccagcgtcatatttgagcaactatctgtcatatataatctgccaaagttgtttatttcttcgtttactcttatactcccgtttttcccaaccgggacttctgagcgcatggaagatgagggagatgttgcaaccgcctttacacttgccagatttttgtcaaatataccaatatcacgaggcgggccatcgagtttagtaattttcgatatccatgctttgcaggagagattctactttggagactcagtcttaccatgttttgagagtggcatccccttgctgaaaagtaagcttcaggagctacctgattcccataatataactatagcatttccagatgacggtgcatggaaacgcttctataagcagcttcaacattttcctatggttatatgtaacaaagttagagaaggggagcagagaattgtacggataaaggagggagatcctagaggccgtcatgttgttatagtggatgacttggtccagtctggcagtactttgattgagtgccagaaagtactggctgctcatggagctgcaaaggtcagtgcatatgtgacacatggcattttccccaatagctcatgggagaaatttcagcatgacaatggagagggtccggagcatggcctgagccacttttggcttactgattcatgcccccttactgtcaaggcggtgaagggcagacggccatttgaaattctaagtctggccggacctattgcttctgctctccagatttaggcaaatctggtctgctcgatccttcgggatattgtgactattcagttagttcttctttcctttgttgctgttgaggaatttggtgttttcctttgtacagctattgagtgtctcgcaatgtatttactagaaaaccataaaatggcagatcttcactgcagggtctgcttggcagaaagcattcgtagtcgtagtattagctgttaataatttgactgagcaagtcaagcgttgatctgtgttctagtataaataaaactctcgaataagtttcagtaatttgcaaaaataaaaaaaaatataaaaaaagtttcagtaaaaaaaaaaaaaaaaaaaaaaaaaaaaaaaaaaaaaaaaa

SEQ ID NO: 95998 - DNA, 1463 bp, Zea mays
  Clone ID: MRT4577_19064C.1
tgctgagtccaacatcagggcttcgcctattaatacagatgcttcgttctcgccgtatgttgggcacatggcattctcaccattcccttcaccaggtggttactccccatcgtcagggggatacagcccatcttctccggttttcaccccagagaaaggatatagccctctctctccatcatatagccctgcatcaccaagctatagtcccacctcaccgtcttacactcctggctctcccacctacagtccaacaagcccgaattactccccaaccagcccgacgtactcgcctaccagcccatcgtactcacccacatctccgagctacagcccaacatcaccaagctacagccctacatcaccaagctacagccctacatctcctagctatagtcctacatcaccaagctacagccccacctcaccagtttatagcccaacctcaccagcatacagccccacatcacccgcttacagccccacatcgccatcctacagtccaacttcaccatcttatagccctacatcaccttcatacagccctacgtccccttcatacagccctacctccccctcatacagccctacctctccctcctacagcccgacatcacctgcttacagcccgacatcaccaggatacagcccaacgtcaccgagctacagccctacatctccgagctacagtcctacatctccgagctacaatccttcatcagccaagtacagcccttcacatgcatactctccaagcagccccaggatgagtccatacagccagacttctccaagctacagtccaacgtcaccgacttactctcctacatcaccatcatattcacaaccaagtccatcgtacagcccaacgagcccgttcaacacctctggaggacccagcccagactacagcccgacctctccaaattacagccctagcggaagctactcccccactgcaccgggctactccccgtcgtccacaggccagggtaatgacaaggatgataagagcgctcgttgaagaggcacaggagaacaaggcgctctagagcactcgatgaaggcactcggtgatggccacatgggaagatcgaggcacttttttttcccttgagtttttgtatggttgatgaactctgagagcaaacttgtatttttccgagctgctaatagcagaaatagttgtttatgtatgatactagaactaaggactggactgtgctgcgacttgataagtggttaaccgcgtggtcgcccctcagagagtaacacatgtagtaatgtttaatgataatatcgtgactgtacttggtactactatgctatggtgtactagtgtattgcatgcgcgcgtggagcaaaaaaatctgcgtgtgtctagtgtagtgtgatggtgattaaatagaaaacttagttatacagtagataaatggtgtggtatatattgtaatgcaaattta

SEQ ID NO: 95999 - DNA, 308 bp, Zea mays
  Clone ID: MRT4577_19065C.1
ctcactccgagttcctaaaagcagccagcaacttgagggataactaccgatttgcacatacgaatgttgagttcctggtgaacgagtatgatgataatggagagggtatcatcttatttcgtccttcacatctcactaacaagtttgaggacaagactgtggcatatacagagcaaaaaatgaccagtggcaaaattaaaaagtttatccaggaaaacatttgtggtatctgccctcacatgacaggagacaataaagatttgatacagggcaaggacttacttattgcttactatgatgtggactat

SEQ ID NO: 96000 - DNA, 415 bp, Zea mays
  Clone ID: MRT4577_19066C.1
attgatcaaacaggaacgtggttgttcatgccctacggcttttcccaggtgctgtgccatcagcataacaggggacctcatcaggtttgcaacaacttacattgctgtggccacacttgaaccttgaaggagggcagacaggttggcctaagtgcttccaaactacttattccctgattgaacacaacagacacctggtctcacatggatgtcctgaaagggatcaccttgtgtgtcataagcctgtactcaaaccttactgacatcccaatggttgatggtcatccacttaactcctccagctaatgctacagccactaggtgggccggatatcaatccatgagatcaactgtgtgaattagggtccaaggtctcttgtaaccgtaaacatatttgcttgtggcaacgctgact

SEQ ID NO: 96001 - DNA, 1769 bp, Zea mays
  Clone ID: MRT4577_19067C.1
gactactcgagtgatctccgctcttatctcaaatactgcaaggaagttgtttttgctggaattacatcttcagatgaacagactcatctaatagagatcttttgggatatgtacaaagccagggaggtcatgatgcaatgcaaatgctcaagtcagagatgcaagatcatggatttcattatttgccacctaggaaaccaaggaaatcagatggttatcttcgttataggcggcggcggctaagtggtggctttatttttgttgcacatgctgattattacttgttgctacgtgcttttgcaaagcttgcagaaattgatattcgtatcatgcatattagtgtgttgaaacttgagaagagactcgcatgtattgaggagcgaattgaaagaagcttgaacaccttacataacttttctactggaacagtagatgagctaagatctgtatctgactgaagttcctagtgtagtctcatactctgctagcatggaataccccctccattccttctggaaaaaaaacatgtggtgccattgcgtgactgtggttttgaaggatatacgtagcttgatacctcaggaattgagggcttctttctgtggcctcttggcattggtaagcaacctgagcacaacaaggtcagggcaggatgtgggtctgtatttgctgaagcaatatgtaccaagaattatgccccccttctttagaacgggcataattatatcagggtcctaatcagtactgtggtagattcagcaacagttccagtagtagacctcagtgcttggcagcaatggcactggggatctgcaatcatgaggcagtttcagtttgggaactggagtggcaagaggaaaaaggctggaacctgggctttttaaagaggctaatcagtactgtggtggattcagcaacagttccagtagtagacctcactgcgtggcagcaatggcactaggggatctgggttctgcaatcatgtggcagtttcagtttgggaactggagtggcaagaggaaaaagcatggaatttaggctttttaaagaaatgctatcaatattgtggtggattcagcaacagttccagtagtggattcagcaacagttcgaggtcagtacaattggtcttgtcaaagctgccgacagaactaaaaaaatatccagctgagtgaattgatgtactgccgacatttatttcgttccagcttccgcagcaagagctgatcgtttcaaaggtgacgagaaattggtcgtactagagatgtactgtctattcgctgtattcgcaagtttaaaccaattatttgaactactgcagctgtaatccggagacaatataatatagaaaaaatagaagtcggtggattaaagccgtaacaaacatgctaacaaaaaaaaaaaaaaaaaaaaaaaaaaaaactcggggcctcactgcttgatagccatgatgtacaaaaattaaaagtaaaatatgtctttaatataggcatttacgtataaagaatgagatatagagaatgttatttgagagggagtagatatataggaaaaaaaacttttagaggagactgtaaagaatgaatatagatgatgaatttagataatgttgttgctggaggtcctaggtcttaggttggaatctggatcactggttgtgggacaaacggcaccgagaatgggtggacctgacaagggaatttgacctattcccgagttatgttgcaaaatcaaatttcaacattattttgaagaccatggtgtttact

SEQ ID NO: 96002 - DNA, 251 bp, Zea mays
  Clone ID: MRT4577_19068C.1
acgcaaaaacgtactttttgagaccggccggccggagactcttgtctttattacacacatgcgctgtgtgtcgttcaacggtgtgacttgggacaaaaaaaagaatttatttgacacgcaggttataacgacgcagcataagcagcacgcgctggcgttttacacacacacacacacacacacacgagttcacgtcacgagcacggacggacacgaacacactttcgttagcatcgcatgttatctatgac

SEQ ID NO: 96003 - DNA, 2403 bp, Zea mays
  Clone ID: MRT4577_19069C.1
gtaaatgcctctccgtgtttctcgcgcgaaacttgtttacgagttaaggcagtatgcgcatcaagctttgttaaatcaggaaaaggtcgagttagcttggtgttgattttgttttaatcttgtcgcatcagttttgttacaattgttgcttagtcatggtaacgactcatcaagtgcttgttcttgtgtggtttattagtttatttgtatggttatggttgattgatatgatattttagctggctgaattaggagtctgccgtgcagcagtattcttgccgccttggcgatactggtatcaacaacgaaagaagagtagttttacctcaaacagaatttctacaagggagtatctttgagatttttagcactgtagtttatgattttagtagattctggatactgcaaagcttcagatcagcaatgaagatattccttagcaagagttcaaatatgaagttgaatgtctcactgtggtctagtatctgccatttgtgtgaaaattatcaaagaacatcatgcatttcctgatagtttgtcccttgattttttccagaggagacctctgaactttctgacctcaagtcctcgattttgtcatagatcagacaaataatggaagagttacaagattgcaactcaagaagcctggttgcccttccgggctctttggttctgcgtctctttaggctgtttggccagcaggatcagagttcatggcagaagtacatactagcttactttctgttggtcaggaatgagtacttctctggggagtcgaagaaacactcagatgtgttctgtgatatttcagaattagatttctttctatatgctacagatttggatagtgaagaacttgaactgaaggagcagaaacccattacgaaggctcaatcaggaggtgattcaagtggcaacagatcgaatgattgctacttccccggccttcatgatgatctgtctcaagactgccttgcttgggcaagcagatcagactacccttccctttcttggctcgacaaaagattcaatttgttaattaacagtggatatttgtacagactgcgaaggaaatatgacattgttgagcactgggtctatcttgcttgtagcttgatgccctgggaagcatttgatccttcacgaaagcgctggatgaggctaccgagaatgccatgcgacgagtgcttctcctgtgcagacaaggaatcacttgccgtcggaacacagctgcttgtcttcggccgtgaatatactggccttgctatttggatgtacaacttactgactcgcagttggtccccatgcactccaatgaatctgccccgctgcctttttgcctcgggaagctcaggtgagattgctattgttgctggtggatgtgataagaatggacaggtgctgaggtctgctgaattgtacaattcagagattgggcactgggagactatcccagacatgaacctgcccaggcggctctcttcaggtttcttcatggatggcaagttttatgtcattgggggcgtgtccagtcagagggattcattaacttgtggagaggaatataaccttgaaacaaggacctggagaagaatacttgatatgtaccctggtggaaccagtgcatctcaatcgcctcctcttgttgctgttgtgaataaccagctctacgccgctgaccagtcgacaaatgtggtcaagaagtatgacaaggcaaacaatgcctggaacatactgaagccattgcctgttagagctgactcatccaatggttggggtctagctttcaaagcttgtggcgatcgattgctggtaatcgggggccatagaggacctcgtggcgaggtaatattgctgcattcctggtgccctgaaggtggggaagatggtgctgactgggaggttctctcggtgaaggaacgtgcaggcgtcttcgtttacaactgtgcaataatggggtgctgagttacctttgcttcagtacatgccactggtttagcaagccaaccatttcttgctgccatttagctgccctttataatgacttgtaattcagaaatgacaccccctcccctcatttcgcggagctctcaattgattgaatgttttgtagagagcaaagagcattcagttcagtttacctggaactacttttttttcttcttctgttaaactcgttcagaattctttgttcttgtccagtacgaattttatgcagtattcgttattcatcatattgcaaccatttagctgccctttataatgacttgtaattcagaaatgacaccccctcccctcatttcgcggagctctcaattgattgaatgttttgtagagagcaaagagcattcagttcagtttacctggaactacttttttttctaaaaaaaaaaaaaaaaa

SEQ ID NO: 96004 - DNA, 291 bp, Zea mays
  Clone ID: MRT4577_1906C.1
cgagcttcctcggcgccgtcaaccacaggctcaaaccaagcatcgttgtcgtgatggagcaggacgctgaccacaaacgcccggcggtctccggccggcttggttgaggcgttcggctactacgcagcgctcttcggacggctcgacgccgtggcggctgccactgccactgccagtgccgccggcgaccgggcgcaggtggagaggatgtgcctgggggaggagatcaagaacgtgctgctctgcgaaggagccggccggctcgagcggcacgagaggctcagccagtgg

SEQ ID NO: 96005 - DNA, 461 bp, Zea mays
  Clone ID: MRT4577_19070C.1
gctcaaacttcagatgtcattcatttgaacaaacgcgtccgcccacgcgtccggtttagaccagaagttttagtgtgtttttttcaaacaaacaaaaaaaaactccagaacgcatgtgcatcattgtacaatgatcaggattcatggtcctatcatcctctgcaaatctcggtgaggtcatcaaggccgtcggactcggcggcgatcttggacgccgcggccgacaggaagcggaagccggcgtcgctggcgctcttcctgacggaggcaagctgctgggacttcttgcagtaggcgatgaacccctggatggggttctccacctcggagctggcgctgctgctcctcctgagcgccggccccgcgcagtcggactcgctcgaggacggcggcggcgggagcggcggcggcagcgcagggactggggacgtcttgttcgacgaggagtaccggacgatgac

SEQ ID NO: 96006 - DNA, 453 bp, Zea mays
  unsure (1)..(453): unsure at all n locations
  Clone ID: MRT4577_19071C.1
acccagaaccaaacaaccnaanngggggggcncancncancccggccnancacacagaaacaccacanagcaccnccggcacgcaaagggggggggggggcanncagcaaaaanacggcccgggcgcacaaaaacagaagggcagacgcaccaaagaagannacaggcanannncncnagcgggcccacaggacccncacagcgggagcggaagggcacgagaanacaaaagggagagcncagggggagggannngggnnggcngcnccnanggacaaanccnggggaaaaacgggngacggcaagcanagcnnaaaggaccncagggccanggacanccnggggnncaaanacagcnccancgggaaccnccaacnncacnccagacngggcggggangggcaccnngcccnggagcggaannccagaaccaaaccagacancaccagaaac

SEQ ID NO: 96007 - DNA, 505 bp, Zea mays
  unsure (1)..(505): unsure at all n locations
  Clone ID: MRT4577_19072C.1
gaagaaaacaggggcgaaatgcattttattttgacagtggggggaatacacatgcaccctaaaaacccttttttggacacccgggccgggggggttcacgacatgaaaaaaacaagtcctgtaatcgcaaaaaaaaaccgagggggagagggtttgttttttaaaaaaccagccgggcttttaagggggccattatcatcacaactgcagggctcccggggaaaaaagtagccggggggggccttggattccacctttaattcggggaccagggttacttgtccatttttggggacctcacaaatgccatatgggtccaaaaacctttggggggcaacctttttgtcaagatctccagtaagctgaagcgttactggggggttaaaaacataaaaaggttttggtgggaagatttcagcaatttctaggattttttttcgggccgcngggttgacagaacccttaaaaagcttaatttccttttctccaaaaggggagggggtaa

SEQ ID NO: 96008 - DNA, 143 bp, Zea mays
  Clone ID: MRT4577_19073C.1
gcccgacccacgcgttcgtttgccgggaacccgtcgaccgcatgatgtctaaattttgcccacgaggacggggtgggggcatttccatctgtttgaacggcctccactcaaccctgtctctggtctcacctgcctgattatga

SEQ ID NO: 96009 - DNA, 305 bp, Zea mays
  Clone ID: MRT4577_19074C.1
ccactcgtcctcccacgcgttctcccactcttgctcctacatattctcagatggcatgcatattgatcaacagtcgggttctattctaacgaagcttgtcaacaatatacctgctatcctctagtgttacagatggcaaagatttccccttaatgaatgaggaataatagtccgtgctctactcgtcttcaaagttcttagctgatcaacttctactttcttcttcgtagtcatgttgcaactgttgatgcttagcacattctttatcttcaattattgtaacaaacattcttgctccaattaca

SEQ ID NO: 96010 - DNA, 202 bp, Zea mays
  Clone ID: MRT4577_19075C.1
ctgaactactcatgcgatggccatgagagctctcccgctttctttttccaggagctgctcgtttggagctgaggataccatgcccagctgcgggggccccagatcattgagagcttattcgaagggatactaagacggctacaagcagtccctcttcagaagcatcaccgaggcgctatacttctcataggtccggtcggag

SEQ ID NO: 96011 - DNA, 572 bp, Zea mays
  Clone ID: MRT4577_19076C.1
aggagcaaaaaaccatactcgttgtaaaacgggaaaaaaacaccaaggaagttacaccttgttttttaccgaggccatcaaggtacataaaccctacttcggggggggggggaaaaaaaaccccgggggggtaccccccgctctttacaaagccaaccaaagcttgagccttaaggttgggcgaggggggaattcaggggcatgaggggccggcccccccaaaaaaaatttccccgggggttggttgaacaaggccaggcgtgggttaaatgacttatgactaccaaccaagcggcgtagaccatttttccctgggggcccagggaaaaaaccacgttttttgcttgaatgagagatacacacaaagaagccttgttaaaggctggaactttcgaccgccggggataaatgaggggctcgcctccatgagcaggcaagatgatccgtgcgcctgcaaacggcggaaaaaaaacctgccgggtattgggggggcccgcccctgtgcgtgaaaaaaagaaaaacctcggccatgcctgcgcgggggataaaccatccggatctgtgggcccccc

SEQ ID NO: 96012 - DNA, 276 bp, Zea mays
  Clone ID: MRT4577_19077C.1
gaactctgctacttatctgcaacaacttcaacttccattcaggcatctaactgctagctaccgtgatcatgtaattgcattcaaccatatgacagcattgaactctgctgcatatgtacagacacaacatctactaacattcactccgatagcttgtgctagcaaagctaccttcttaatacaaccacaatcattgccgttctaccaacacactgctcctaacgcattgcaccttttaacaactgcaacaactgctgtcattcaaccaacttgctt

SEQ ID NO: 96013 - DNA, 872 bp, Zea mays
  Clone ID: MRT4577_19078C.1
ggtgaatgcacttaaatattcagaatgagtatcaactcacaagttattgatcagacatgtcgtcacgaacagcaaacccatgcttccacatcatgccaattatagtgttggcttcagtcctcctaccacaactaacatatgccttgtacatgatccaaaatgtcttctttgttcgatcaaacttcaaacattccatctcatcgagcaccccatgcatctcttccaaccgatagtgcttcccatacatcaccatcttgcagtggtacaaactccggcacagcttccaaccagcatcttcggcccgtcggacaaaaagtgcaagtctgtcaaccgcgtcatactgaaaatagttacatatgatggaccgcatcacctttactgcggtaacaatggtattgcgttccaatgcctcagaaatatacagctccatcccctcggtcaacccctcctgagcatacaccttaattaagaggacatttagccatggcctgtaatcatcaggacccaacttcttgagcaaatcctcaatcttttggattctacctacatggtaaaacttgcagtatgcgcacagcattgcacgtatatgcaaaatgtcaacctttatgccaagcttgcaagcacgctcataagcttgctccattttacagatcatcccggcatgtgcatatcctcttaacatcaacttatgcgtagtagcatctggagcaacatggaacgacaccatctcctgaaacgacgcttccattttgtcccacatccatgcggtgaggtaaccagagatgattgcattgtaagtaccaatagtgcggggttggccagaagcgtccagcgactggagcgtgcgctccatgtggtcaacgaggatggag

SEQ ID NO: 96014 - DNA, 132 bp, Zea mays
  unsure (1)..(132): unsure at all n locations
  Clone ID: MRT4577_1907C.1
ttatgggggatcgcccgataactgaatnatgcgtgcctggattttgtcagggactacttttgaacgggctttatgatattcttggaaaaggaactgaatatggcaggaatgggtgaaactgaggaaagtaaa

SEQ ID NO: 96015 - DNA, 347 bp, Zea mays
  Clone ID: MRT4577_19080C.1
acgcgtccgaaaagcattcggaacaacaagaccaagggtatatgcaccaacgcccaagggaagaacaaagggtggctccaaggggcttgaagggtttaaaaacccccctgaatgggaccaccccccccagtaaaaatttttccccgccctgtgaattgccccaaaaaggggtccactggggagccccacacattaacgccaaaaaacccccagccaaataagttctaccgggggagaacccccaatttttggggggaaaattaatttcccaaaaacaaccaaaatcaaggggtgaaaaaacaaaaaaaaaaagaaaaaaaaaaggggggcgccccaaaagattcaaa

SEQ ID NO: 96016 - DNA, 394 bp, Zea mays
  Clone ID: MRT4577_19081C.1
agatttgttgggacgacccacccgtccggtcaccattcacaaccacagggagttgcacaatggcatataggctgtattcttcctccgttacatcaaggatgtagttgaggacctccaggaggtgtgctagcttgacatataaagttacttaccattgctttcccgtcgactgttttgtgctttgtggaaatagtaccatgcacattcttgactgatgaataagaattgcttgctcgcaaagacgaattctgcgctgaggatacagtgaggtttttctactataatcggagaagagagcagaagactcaacttaatgtgaggtcatgtcccatttggggatataagatgctgcatttcggtatgctgttgctagcgctcataaaaaatacataag

SEQ ID NO: 96017 - DNA, 374 bp, Zea mays
  Clone ID: MRT4577_19082C.1
aaaaaaaaaaaaaaaaaaaaaaaaaaaaaaaaaaaaaaaaaaaaaaaaaaaaataaagggaaagaaaatatttttaatattaaaaaaaaaaaaaaaaaataataaaaaaaataaaaaatttaggggggccctttttaaagaatccaagttttttttcccgtgtttacaaatttatatttttttttttttgcccccaaaattaaatccccgtgccggctttttaaatagtgttgactggaaaaaccttggttttccccaatttaattgcttttacaaaattccctttttccaaattgatgtaatagcaaaagtgcctcatccatattcctttttaaaaaattgctcactctttattgtatatggaaccccccttt

SEQ ID NO: 96018 - DNA, 199 bp, Zea mays
  unsure (1)..(199): unsure at all n locations
  Clone ID: MRT4577_19083C.1
gctaaatcgctagatctaccattatcacagatcattcacaggggggggggggttacgtggtggggctagactaganagatatagggggatatatggtaaacatttggtttctggtgacggagcaatttttcaagaaggttgatcgatgcgccccctgctaagacatcctcgtcgggggctaatataagaggaacttctg

SEQ ID NO: 96019 - DNA, 2382 bp, Zea mays
  Clone ID: MRT4577_19084C.1
cattgggtacctcgaggccggccgggatcgcctattccttccctccctcgcattccggcagggctccgcaaacgtccgtgcgcccccgcgtcgccgcttcctccgtcccttccgttctcggcgaatcgaatccgctagcccccgacatttatggctgccggcgttaactcgcctccgatccgccgtcgagcggctcgggccttcccgcgcccgcgccttctcatcagccgctgctgagggccggggctgcgggaccgtgcagcgactctagggctttcgccgcggcctcggtggcccgccggctcaggtctcgggatctggctgctgtcctcgaacccgcagccactcacagagtccggccaggcggaggatgccgccaccgcgggaggtggaggcaacagggccttctccgcagctttcggcggtgtcggagccaccggggagcgggagggcatgtttctgttcggagattcatatcgccgaagggtgttcttcaagtacgagaagaggattaggacgcgcagccctccagagaagatctttgagtacttcgcatccgtccacagcccagagggtgagatgtacatgttacctaccgacctgatgagggcggttgttcctgttttcccctcatctgagtccaaaaatgtcagggaagggagattgaagggggagcgccaccctggcgagctacaatgtgctccatctgagtttttcatgctattcgatacaaatggtgatggtgtcatctccttttctgagtatatcttctttgtaacattacttagtatccctgaatcaagcttccatgtggcttttaagatgtttgaccttgaccacaatggggaaattgacaaagacgagtttaggaaagtgatgacactgatgcgatcctataatagacaaggagctgcccatagggatggtttacgctttggacgcaaggttggtcagccagtggaaaatggtggactggtcgaatacttctttggcaaggatgggaatgaacatctacactatgataagttctctagttttttgaagaaattgcatgatgagattgtccgcttggagtttagtcactacgatgtgaaatcatccaacacaatacctgttaaggactttgcgttatccatggttgcttctgctgatatgatttacatagacaagttactggatagagttgaggatttggacgacaatcttgacctcaaggatctgcgtattacctttgaggagttcaaggcatttgctgatcttcgaagaaggttggaaccatttagaatggctatcttcagctacggcaaagtaaatggtctgttgacgaagcaggatctaaaacgtgccgcatcacatgtttgtggagtggacttgactgataaagtagtagacataattttccatgtgtttgatgctaactgtgatggtaacctgagttcagaggagttcctgaggtcattacaaagaagagaaagtgatattcgccagccagcaacgtcaggtttcctaggggtgatcgcctgttggctgaactgtacaaagtgttctcttcaacagatgctgtcccagtagattcttttttgacgctcatgacagtcttcagttgcccttggttgctctgtgcttattgagctggagaacgtcatcggggagttctgaagtgtgaagaggatttttgttgtaaatattaccctgcggcccctgcttagtagctcctacgttaccacgtagcagctgtaacctgtaaggaattccttccgttctcgttcaagggcttcgatgacatacatcttctcccctgacattaaatctccgtcgacttagctggagccttgctacctatcttgcttttagctcatccctgatgctaatattctgtggattgtggttgaacaatcacacttgtaagactagcttgggaatactatttttctaagagattttcatttttccaaggaaaaataaactaattttctttggaaatttcaaatgaaaatactatgagaaaatgtggttcccaaaccagcctgtaatgattaatcgatgctttttttctgaataagtgaatggtaatgggatccgctggaaacattatattatgtaaaaaacttgtgacataactgataggtggcctactttgccccctggggcgtccctttcttaaatctctgtttcattaaaaaaagacgaggagattaagaaagcaatctggagaggaacaggaaaggacaaggactccaaattcagaatcgttccccgctgagagcaggattttgcgccttgtccgggagtacaagcggcccttgaagctcccacccacctggaagtaccactcggccacaggtgattactctgccggcctaagcgatatcctctgacgga

SEQ ID NO: 96020 - DNA, 350 bp, Zea mays
  Clone ID: MRT4577_19085C.1
gccgacaggctgggagcctcctgagcggccgccccccttttttttttttttttttttttttttttttttttttggtttttttttttttttttggggaaaaaaaacgggcatccgggttggactatttttatccccaaaaagaaacaggtgcggcaaattttgccctacagttttattcagggaccctcaacccaaagccaaggcccttcgaaattggtcccgccccacaatcgaaacgaaacagggggggccttgggcctttttaacaaaattttaccctggaaaacctacccgcgatttacaaagcctctggaacaaaggaaaagggggttgagggggggtacctgatt

SEQ ID NO: 96021 - DNA, 343 bp, Zea mays
  Clone ID: MRT4577_19086C.1
cgtccgcacatatccggtcgagtggactggcacttgcgtccgtgttggccgcggcgctcgccgtgtccgctcgagctgcgcagtgcggcgatggcgccgacgggaagctctgcccggactgcctctgctgcagcaagtggggctactgtggctccacctccgactactgcggagacggttgccagagtcagtgcgacggctgcggcgggggcggcacccctccccctcctcctccttctccttctccccctcctccccctcccacccccacccccacccctgtcccccctagcggctgcggcgaggcgtccattatcacagaagatctcttcgagaggatgct

SEQ ID NO: 96022 - DNA, 152 bp, Zea mays
  Clone ID: MRT4577_19087C.1
gttgaaatctttgaacatcatcgccatcatcaagagactgggaaaatttgccagacctgcaggacaacagttctggcaaattttcccagtctcttgatgatggagagttgaaatctttgaacaatgatacatgattgttgcattttactggt

SEQ ID NO: 96023 - DNA, 829 bp, Zea mays
  Clone ID: MRT4577_19088C.1
cggacgcgtgggtgacggtggactcctccaacaccacggcgctgaacacggcggcgacgcaggggcacatggacgtggtgaggctcctgctggaggtggacgggagcctggcgctgatcgcgcgcagcaacggcaagacggcgctgcactcggcggcgcgcaacggccacgtggaggtggtgcgcgcgctgctggaggcggagcccagcatcgcgctgcgcacggacaagaagggccagaccgcgctgcacatggccgccaagggcaccaggctggacctcgtcgacgcgctcctggccgccgagccggcgctgctcaaccagacggacagcaagggcaacaccgcgctgcacatcgcggcgcgcaaggcgcggcacgagatcatcaggcggctggtcacgatgcccgacacggacgtcagggcgatcaaccggtcccgcgagaccccgctggacacggcggagaagatgggcaacacggacgcggcggaactcttggcggagcacggcgtgcagtcggcgcgcgccatcagccccggcggcggcggcgggggcggcaacaagcaggcgcgcgagctgaagcagcaggtgagcgacatcaagcacgaggtgcactcgcagctggagcagacgcggcagacgcgcgtgcgcatgcagggcatcgccaagcgcatcaacaagctgcacgaggaagggctcaacaacgccatcaactccacgacggtggtggccgtgctgatcgccacggtggcgttcgcggccatcttcacggtgcccggggagtacgtgcaggacccgggcagcctggcgcccgggcacgatctgggcga

SEQ ID NO: 96024 - DNA, 312 bp, Zea mays
  Clone ID: MRT4577_19089C.1
atgtggggccaccggacagtccggtggtgcaccggacaggtcctgttcactgtccggtgcgccttctgcgcctgctctgacttctgcgcgcgcagtcgcgcacagttgatcactgttcgccttttgcagacgaccgttggcgctgttagccgttactccgcttggcacaccggacagtccggtgctacaccggacagtccgggtcacgcatggcttgcactcggccatgccagcgtgctcgaggaggtcgacagtgtactaccgttggtgaaggaacatgccctggggcctgcgctcgacggtgacccctag

SEQ ID NO: 96025 - DNA, 116 bp, Zea mays
  Clone ID: MRT4577_1908C.1
cgtaagcttggattctctagatttgacccacgcggagcctgcctccctacttgcttccttccccgccactgagcagagcgagtgctgtgacagccagtgacacacttccactccct

SEQ ID NO: 96026 - DNA, 837 bp, Zea mays
  Clone ID: MRT4577_19090C.1
cattgggtacctcgaggccggctggagcaaatcggaggcccaagcgctcccaatctctccgggtccttcctctccgcattctccgtcatggctgagccgacgccgtcgcagtcgccagcgcagacgccgcccccgccgccgacgcagcagactcccgcggcgggtgggctcgaggacatgctggcgtgtgtggcggcgctggaggccgcgctgctgccgtgcctccccgcgcgcgagctccaggccgtcgaccgctccctccagtcctcccaccagattgatgttgagaggcacgcaagggatttcatggaggctgccaagaagctccagtcttatttcatcagcctgcagcgtgaggaaccgccatctgcagaagagatgcttcgaaaggagattacgacaatggaggaagagttgaagagcaagtctgagctcattgccaagcacaagaagttgattgaagggtggcaaaaggaactgaaggagcagctgagcaagcacatcacggagcttgaaagggtgtgaggagtgcgattctgcggtttaccttgtagtgatcatgaacctctaggtgaccaaatgttatgttatgccctataaaactgtgtacatgtgcttagaatctgacgccatggttagcaatcgccttttgttggtttcttaaggttggaagccacgaacaaagcccactttatctatgtttgattgtgtacctttacaaaaaaaaaaaaaaaaaaaaaaaaaaaaaaaaaaaaaaaaaaaaaaaaaaaaaaaagggcggccgccgactagtgagctcgtcgacccgggaattaattccggaccggtacctgcagg

SEQ ID NO: 96027 - DNA, 715 bp, Zea mays
  Clone ID: MRT4577_19091C.1
ctctctgggtccctttctccccgcattctccgtcatggctgagccgacgccgtcgcagtcgccagcgcagacgccgcccccaccgccgacgcagcagactcccgcggcgggtgggctcgaggacatgctggcgtgtgtggcggcgctggaggccgcgctgctgccgtgcctccccgcgcgcgggctccaggccgtcgaccggtccctccagtcctcccaccagaggtatctaagtgttgtggtctctactaaattgggcagttgatgttgagaggcacgcgagggatttcatggaggctgccaagaagctccagtcttatttcatcagcctgcagcgtgaggaaccgccatctgcagaagagatgcttcgaaaggagattacgacaatggaggaagagttgaagagcaagtctgagctcattgccaagcacaagaagttgattgaagggtggcaaaaggaactgaaggagcagctgagcaagcacatcacggagcttgaaagggtgtgaggagtgcgattctgcggtttaccttgtagtgatcatgaacctctaggtgaccaaatgttatgttatgccctataaaactgtgtacatgtgcttagaatctgacgccatggttagcaatcgccttttgttggtttcttaaggttggaagccacgaacaaagcccactttatctatgtttgattgtgtaccaaaaaaaaaaaaaaaaa

SEQ ID NO: 96028 - DNA, 298 bp, Zea mays
  Clone ID: MRT4577_19092C.1
tttttacgtacgctaaccatacaagcaagctgagctgtgtaacctcactcaggccacgaatggatataatcgatgcgggcaggagagtcaagaactggtgctaacagtaccacgtgccgatgacgatggcagttgctactgactacaacgagcgtagacatagtcgcagccatgacatcagcggttatccgaggggtactgtcttccaccagcgtatccgcaagggacacacataccatcctccaagaagaagtcgcatgccacatctcaccatgaatgactgacacagtggccacac

SEQ ID NO: 96029 - DNA, 180 bp, Zea mays
  Clone ID: MRT4577_19093C.1
ctctgaagctcccctttcatatctgagaagaaaaatgtgcaaaaccctacatggcacactgctcctactggccatctttgtgctgtttctgaatttcagccatgcaactgcaaaacgtaccaggagaggtatggacattttggagaaaacttcatagacaaaaacaactggagggtgtat

SEQ ID NO: 96030 - DNA, 220 bp, Zea mays
  Clone ID: MRT4577_19094C.1
ctcgcagatgatcgtcaaaatgcagaattaaaggtagtatctagcatagttcggactgtcagcatgtgtaacttcgagagtctgtgagtatctacgtgaggcgtacggacagctctaagatctagagacgaatagactgctcaatatctgcatgtgatcaatctgcagtgatctctgagagtgtgtgttgatcagctcgaaagtgacgtatagctgagac

SEQ ID NO: 96031 - DNA, 1615 bp, Zea mays
  Clone ID: MRT4577_19095C.1
cgcctccgccgaggccatcaaggacgccttccgcatcgagtttggcgacgagtaccgggtcttcgtcaaggatctgtgcaaggaccacgccggctggccgctcaacaacatggagagctcctacaagttcatggtcaagcacgtgcagctctggaaggtggccttccacagcacctcgcctagatgggtccataacttctacctcgccgctctcgcctcattctacgccaagaaggtggaggctggactgaagaagtacaagccagacatcataattagtgtccatcccctcatgcaacacattcctctgtgggttctcaaatggcaaggcctacagaacagggtagtctttgtaactgtgatcacagacctcaacacatgccaccctacatggtttcatgctgatgtgaatagatgttactgtccttcagaagaagttgccaagcgggcagcactggatgatctacaaccatctcaaatccgcgtgttcggtcttccgattcgaccatctttctgtcgtgcagttcttgttaaggatgatttgaggagggaacttgaattggatcctgagcttcctgcagtactgctcatgggaggtggagagggcatgggtcctgtcaaaaagactgccagagccctaggagaatcattgtttgacaaagagcttggaaaaccaattgggcagcttattgtcatttgtggccggaacaaaacgctaagctcctcactgcaggcagttgaatggaaaataccagtaaaggttaggggatttgaaacccaaatggagaagtggatgggagcttgtgattgcattataacaaaggctggaccaggtaccattgctgaagccttgataaggggtcttcctataatccttaatgacttcatacctggacaggaagttggcaacgtaccttatgttgtggacaatggtgcaggtgtgttctcgaaaagccccaaggaaactgctagtcttgttgcccgctggtttggtccagattcagaggaattgaaaaaaatgtcagaaaaggcactgaaattggcccaaccagaagctgtctttgacattgtcaaagacatgcatgagctctcccaggagcaaggtgtcatatcacagatatctagttccttgacttcatccttcttcttaccatcgcctgaaagcacccctctccaacttatctgaaaccatcaagctaggattgatattgttgacatcgtgaacttggcattctccctacagtgtgggcgtgctttcggctgatccgctcacatggtagttatgggcagggtcgtttgactgacaggttctcgcgtgtgatgatgtttgccttcatgttaacttttgtaaaaaaaaaacattcattcatattatgtttctggctcccttcgtcatcaaaggggaattggtggtggtggtggcttgtaaaatacactcaaattttgtgcatggacatgagacccttatcatgtatactagctgatgtgatccgttcatgtaagttgaagatgtgtataatatgattacagattgttggagttgaagtttctctctctgtgtgtgtttttagtggtgtataatatggtcggctgctgtacgagtattttggtggtg

SEQ ID NO: 96032 - DNA, 377 bp, Zea mays
  unsure (1)..(377): unsure at all n locations
  Clone ID: MRT4577_19096C.1
aagttcaaatatcaaactgcatgaggattcaagccatactgcttcataaaagtttttggtacaacacataggacacaacatgtccattaaaccaaccaagccacaaccacgattcatgacacacaaaccacagatgtttattngtngatttctttcatattgacgttcacctagaggcaccagacgactcagatacccatgtacagcatcatcttaaattaaccatggcttacttaccaccgcggaggcggagcaccacgttgagagtgctctccttctggatgttgtagtctgctatggtgcggccatcctccagctgcttgccgtcgaagatcatacacttctagtctctggggatgccctctatgtcctggatc

SEQ ID NO: 96033 - DNA, 223 bp, Zea mays
  Clone ID: MRT4577_19097C.1
tttgtatgaaaatggactgagtcgcgtggaattcatattcaatttatacgaaaactggacgtttcaaggtgatctagttaacatatccaacattaggtttcagacggttcggtgtggatggcatatgaatatgatccggtgtttgtgcaatccgacatctgaaggacacagcacatggcatcgttaagttcgttcagtaactttccgagccggaaccggacag

SEQ ID NO: 96034 - DNA, 246 bp, Zea mays
  Clone ID: MRT4577_19098C.1
gtgttcatcgccgcaacgggggcccaggggctctaaccacactgtggtgcagtttcccaccccccccaaaagactatcacctgcggcgtgataccggctgaggatatatattcgctgcgaagatgagatgcttggggcgccgccaacccataggagcgggggggccatgcattttttttttccacccggattctgggcgagaggcgctcttgcgcccgctcggcctggcagggcccccccggtggg

SEQ ID NO: 96035 - DNA, 448 bp, Zea mays
  Clone ID: MRT4577_19099C.1
ctcctctcgctcgcgtccgcacaaatcccgtgctcccccgtctgaaaccctccccacctccggcggcggcggcggcgctggcgaccgggtgtcttctccggcgagtctcccccctagtaacaagaaaatatggatgtacctgttgatgaccctgtggagaacctcactggaagtcctagtacccttggcaatgaggaagaagccactacttatgctaatgtgcaagatcagtccaaggaagctggggtgaagcagcatgatgctacagttccagatgacaagaaatggcctgggtggcctggagagagtgtgttccgtatactggttcctaccacaaaggtgggtgccgtcattgggcgcaaaggggatttcatcaagaaaatgtgtgaggaatcaagagcccgtatcaaggttcttgagggaccaccagctgtgccagaaagagctg

SEQ ID NO: 96036 - DNA, 396 bp, Zea mays
  Clone ID: MRT4577_1909C.1
gccgggtggaggcccgcggcgtccggtgcctttgccggtgccggtgccggcgaggccccgggggtccgccgcgtcctcaggatccaccacaacccgcgcgcgctggcccgcttcgaggagtaccgcgacctggtccgcgcccgggccgcccggcgctgcggcggcgagggcgccgtggtggaggagcgctgcatcgcggacggcaacgagcgcctgcgcttccactgctccaccatgctctgctccctgggcggcggcgtgtgcgggagcccctactgctgcgtgtgcagcaccctgcggcaccggcgacgacgtcgagctgctggtgtacaaccccagagcagtgctcccgtgctttgtcatcctctacagcagcagctagtcggtggcatgaca

SEQ ID NO: 96037 - DNA, 546 bp, Zea mays
  Clone ID: MRT4577_190C.1
cggccggctaaatcgagcatcgccgggttaggcgatcttcgtactcgcctacctccgcggctcaaaccttttcccccttcctcccaattccccatccgtgctgcctgtctgctccatccgccgcacgcactacccactacatgcagtggcagtagcactttctgagtctcacatagtgccagtgccggcatccaggacggaaacgcgtgctgggagctgtactgccttgagcaaggcattcaggctgacggtcagccgcccggtgacaagaccattgggggaggtgatgatgctttcaacaccttcttcagtgagactggtgctgggaagcacgtgccccgtgctgtttttgtcgaccttgaacccactgtcatcgatgaggtgaggactggcacctactgccagctcttccaccctgagcagctcatcagtgggaaggaggatgccgccaacaactttgcccgcggtcactacaccatcggcaaggagattgttgacctgtaccttgatcgcatcaggaagctcgccgacaactgcactggtctc

SEQ ID NO: 96038 - DNA, 1974 bp, Zea mays
  Clone ID: MRT4577_19100C.1
cattgggtacctcgaggcattgggtacctcgaggccggccgggctctcctctcgctcgcgtccgcacaaatcccgtgctcccccgtctgaaaaccctccccacctccggcggcggcggcggcgctggcgaccgggtgtcttctccggcgagtctcccccctagtaacaagaaaatatggatgtacctgttgatgaccctgtggagaacctcactggaagtcctagtacccttggcaatgaggaagaagccactacttatgctaatgtgcaagatcagtccaaggaagaaccagaaaagctttacgaggaacccaaagacccaatgcaagacgagttgggtaaccaagggcatgtgagcatgaacaatgaagatgtgggaggccagaacaaagtggaccaagctacccccacagagcacggcgaggaagctggggtgaagcagcatgatgctacagttcctgatgacaagaaatggcctgggtggcctggagagagtgtgttccgtatactggttcctaccacaaaggtgggtgccgtcattgggcgcaaaggggatttcatcaagaaaatgtgtgaggaatcaagagcccgcatcaaggttcttgagggaccaccagctgtgccagaaagagctgtaatgatttcagcaaaggatgaaccagacacagagctacctccagctgttgatgggttgcttagagttcatagaaggataacagatggtttagaaactgaaactgatcagcctcaacgagctactgtcaacactgggccgacaaggctactggttccagcttcccaagctggcagcctaattgggaagcaaggagcaactattaagtcaatacaggatgcttcaaagtgcgttctccggattgttgagaatgttccacctgttgcattaaacgatgacagagttgtagagatacagggtgaacctcatgattctcacaaagccgtagaactgattgcaagtcatttaagaaaatttcttgttgaccgcagtgtcctccctttgtttgaaacacagattaaagcacacaatatgcacagagagcaacctatgcctcctccacaggcatggggcccccctcctccgtcaccctggggtcatccaccaccaaaccttcctcctggtggcccaggttatgttgggaacccacactacatgcctccacggccacaagagaactattatcctcctcccgatgtgccccctgtagaaaagcagccacactatggaatttcttcatatggacgagatgcacctccaagtgctcccccagggaatcaaaaccaagcacatgggtcatctcaggtgacacacagcatgcaagttcctctttcctatgctgatgctgtgataggggcagctggtgccagtatcagctacatccgcaggcatagtggagcaactataagtattcaagaaggcgctcctggcgagatgacagtggagattacaggaagtgcttcacaagtacagactgctcaacagctaatcaagaatttcatggctgaagcttctccccagggaccaccagccccaggtccacacggtcaaccagtggacacgggttacggctcgtacccaccttacggtggagcatcctatgggtctcctccaggtgctccagctccagcgcctcacaacggtggaagttatggtgctgcaccatactcgtcgagctatggatactaatccggagcaagagcttgcctcagacttagggaaggagggttatcgttatggttttgtttgctagtctattcatctgttgagaactcaagattgttattgttaggacgtgtgaactttggtgttctaggctgctttcagacgccagtgtcgatatactctctttgctttattgttgcggaatttatcgtaatatgttattttaatgttcaagaaaaaaccaacaaaaaaaaacatctataattccaatgctatttttttctgtgcggacattg

SEQ ID NO: 96039 - DNA, 606 bp, Zea mays
  unsure (1)..(606): unsure at all n locations
  Clone ID: MRT4577_19101C.1
aaaaatggnccaagctacccccacatagcacggcgaggaagctggggtgaagcagcatgatgctacagttcctgatgacaagaaaggcctgggtggcctggagagagtgtgttccgtatactggttcctaccacaaaggtgggtgccgtcattgggcgcaaaggggatttcatcaagaaaatgtgtgaggaatcaagagcccgcatcaaggttcttgagggaccaccagctgtgccagaaagagctgttcttactgctgtctaaggcctcaagttgagtcatttgtgtatccaaatcccaaaatagatgtacaatcatggttaccaaagtacagtcttgtgctcctctgctgcacatgtggtttaagccttatgaatattggatgaagatccctgtgaagaagctgcactttttgtctggtaatgatttcagcaaaggatgaaccagacacagagctacctccagctgttgatgggttgcttagagttcatagaaggataacagatggtttagaaactgaaactgatcagcctcaacgagctactgtcaacactgggccgacaaggctactggttccagcttcccaagctggcagcctaattggga

SEQ ID NO: 96040 - DNA, 786 bp, Zea mays
  Clone ID: MRT4577_19102C.1
actttcccctctgtcgcccccctcgacgcggcggccgccgccgggatgaccgccttctagcacaccacaaccgatctcccgcggagtcccccgcccgccctgcgtcgcgccgacggagatccgggccctcttcggactgcagatgcacaaaacatagtgtaccagctcttcctcactcaacatgtggagttttgcatcaaatgccatagctggaagcataaagaaaaaggtacaaccatcaaaaggcagcctatccaatcctgattgctctgatgacgatggttcttcatgtgcaagtcgagaggaaggccttgaatgcccaatatgctgcgaatccttcaacatcgtagagaacgttccttatgtcttgtggtgtggtcacacaatgtgcaagaactgcatcttgggccttcagtgggctgttgtcaagttcccaacccttcctatccagctgcctctctttgtctcgtgtccttggtgcaacctattatctttccggctggtgtacaagggcaacctcaagttcccacgcaagaactactttctgctgtggatggttgagagcatgaatggtgacagagcaaagttccattcctctggtcatgaagagcgccaatcagtatgtccgtccagtggtggcaccagttccagtcaacaccaccgaagaacccccacggcacgagcagagacctcctcgtctgccagagatagaaatgccgctgccaacacccccaacactgccagcgtgtctctccaaaagctcatggtgtgcttcgtgcagctgac

SEQ ID NO: 96041 - DNA, 1332 bp, Zea mays
  Clone ID: MRT4577_19103C.1
ttttttttttttttttttttttttttgcaaaagcgccactaatttaacgcaagcatttgtgacacgagaacgtcatagtagtacataacagttagaaacatccaaacgtgaggaaatttagtcctcccccaactagtttacccaataaactaatgctaatcaccgcagccggatccatgctcacagcagggcacctcatccggttaaggttgcgatggtgagtcgtgagccgaacgacatgatgacaagattagtcaccgctggcacaacccctgcagccgcagtggacacattctatcacctgctcctccctcagatgcttggggacgcggcagacgcatgtcgttgcgaagttgtgatcacgtgtctgtatgcaccggaggcagcaaaggcgctcgtaacctggctttttccactttgcaatcaggttacggtctgcataaccctggtctaggcagaactcataaagctcctgtgatatctccttccttctgtagtaaagatcgtatatgtagcggctcctttgatgagaaatgcggaaaataggccagagagcttcacactttctcttcccatcatgtggatcattttcagcttctctcattttggcatccaactcacggattgttggttcaataagctcccatccttcaggatacttgacacggcttgtctttatcttaggcatgctgcctcaatgaatggagcactccaatgaatgtccaaagacaggaggactcgatccaagtccgggcggatctccaatctgcaccaggccacaatatgcgaggagctggacaacgacgtaaagggacaaagtccttcgagctcgaggcaggggcgcagggcaacgccgagctttcaatttgcggaacggaagtggaagcggaagaagatctgaagatggcagtcgatgggattatataggaaggggaataaagggaagtccgaatgggcgcctgtggggctgtgacctcctcaggcttgggccgcgaccgccagcggcgcaaagaaaccaaactctgcttttttcccaaccgttcgatctcatctggacggccagaaaaggcctcgcacaacggccgttgcgcgagggtcccagacgaatccgaacggacatgaaaaatctccccatcaccacccgtccccgccgccgagaaccctataccggtaccgcaccgtggtcgccgtgcgggcacgaccggggtcgaagccgaagatcttgcggctgtagacggcgcagctacgccgtcgacgtaggagaatggggctctccggcgcagcaccaactgcatccacttcctcaactcgccgccgtagccaccacaagca

SEQ ID NO: 96042 - DNA, 753 bp, Zea mays
  Clone ID: MRT4577_19104C.1
ggccgcttttttttttttttttttcttaaagaaagagagtatatcgacaccggcgtctgaaagcagcctagaacaccaaagttcacacgtcctaacaataacaatcttgagttctcaacagatgaatagactagcaaacaaaaccataacgataaccctccttccctaagtctgaggcaagctcttgctccggattagtatccatagctcgacgagtatggtgcagcaccataacttccaccgttgtgaggcgctggagctggagcacctggaggagacccataggatgctccaccgtaaggtgggtacgagccgtaacccgtgtccactggttgaccgtgtggacctggggctggtggtccctggggagaagcttcagccatgaaattcttgattagctgttgagcagtctgtacttgtgaagcacttcctgtaatctccactgtcatctcgccaggagcaccttcttgaatacttatagttgctccactatgcctgcggatgtagctgatactggcaccagctgcccctatcacagcatcagcataggaaagaggaacttgcatgctgtgtgtcacctgagatgacccatgtgcttggttttgattccctgggggagcacttggaggtgcatctcgtccatatgaagaaattccatagtgtggctgcttttctacagggggcacatcgggaggaggataatagttctcttgtggccgtggaggcatgtagtgtgggttcccaacataacct

SEQ ID NO: 96043 - DNA, 236 bp, Zea mays
  unsure (1)..(236): unsure at all n locations
  Clone ID: MRT4577_19106C.1
cttcgtcataacctatatttagcaacacaacataaactctcattgattcattcatctaaaggatagaaaatgggcgtctctcacaagcttttgtggtcctntcctgctcgttgttacaccgggacgcaaggcgggccggtgctatggtgtcggcgaggaagtgcgagtcgcaaagcttccgctttaagggggggggggggagggacgccaactgcgcaaacgtctgcctgaccgaa

SEQ ID NO: 96044 - DNA, 609 bp, Zea mays
  Clone ID: MRT4577_19107C.1
gccggccgttccgggtccgattctgcccgggaaaccaacgcgatgcaatagcccaactgacaccgagccaagcgcccaacaacctttccatccaaatataatgtagtcctggcacatctgaacccgaggcaaaactcagccgccggcacataaatccatcttgagttggccagacgcgttcctccggcgttgtgtcgatggcaccgtcggcgacgtgctggtgcggccactgcggcgctgtccgccgcctccgggcggagggcgagttcgcgtcctgcgcggtgtgcggcagggtgctcctggacctgcaggacgacgcggtggcggctccaccaccacggcagctgcggcgacgtcagaggagggctcgtgacggcgcggcggctcgtgacatcggcgcgaggcccgaacgcggagatatatcggacgctgaatccaccgtcaccagtaccggagaggatcgatggattgacgagaagtagcagcagcagattctctcaaacgcaatcgatcgattatatcgcttctactctcgtctgttaaaaaaacttgttttagtcttgttttacaatctataagtcatttttttttgcaattcaaaaaaaaaaa

SEQ ID NO: 96045 - DNA, 172 bp, Zea mays
  Clone ID: MRT4577_19108C.1
ctcccaaacatcttttttccttatatattatcccttcccatttcaagggttaattcaggtaattgctcacactgccccccagggagatgggtgacactacgtttctcatcgccgttaaatgaagaaactagcgagttaggtacctaggcagcggctcctttactttattact

SEQ ID NO: 96046 - DNA, 451 bp, Zea mays
  Clone ID: MRT4577_19109C.1
cagtaatcccagctccctcaaggaagctggaaactagatatgtttctgcttgcttataggagagccctttatagattatttatagtttacaaaagtatggtatcaagaaacagtaattttatgagctaaaaacgtgcaaaaaccatggtttagaaaagacgtctcaaatggagtttcttgaaactccaaaaagactataattctgaccatttcatggttttaaaaactaatggttcggaaaaccaaagtattatgcagaactgtggtattttcccaatatttcacatccaaatttatgattttcaattcggaattgagattccttttggttaactttacattgatattgcattagatcggttcacttctgttcatgcttgagataccatatgcatgtttggcacatattcttggtttcgttttttagtcaaactcctggtgcacacttttt

SEQ ID NO: 96047 - DNA, 464 bp, Zea mays
  Clone ID: MRT4577_1910C.1
ttccccccccccccccccccccccccccccccccccccccccccccccccctccccccctttttttttttttgggctaacagttaaaacaggggttcaggggggcaaaaaacaaaacacacgggtaacagtgggaaaaaaaaaaaaaaaaaaaaggggttttcaggaacaacaaccccccagcattggtcaaattaggcgagcgcgaacagggcacaaaccaactcccttttttatttttaaataacttttggggagggggggttttttgccgccgttttcgccttttccgccgccgccgccgccgccggagaactttttttttgggtgccccgtttttttttttaaaatttgggggagcgggtttttttttttttggaagggggacacccgttgtttcagcttcgaattggggagcttcaggcccttggccttggcctccaacttcggaagggaccccttttt

SEQ ID NO: 96048 - DNA, 237 bp, Zea mays
  unsure (1)..(237): unsure at all n locations
  Clone ID: MRT4577_19110C.1
cctctgtttccccccccnaagnanaaanccggggggttggctgaaaaaaccggacgtccaaaaaccaggcggggagccccangcaacacaggaannccnnnnaaaccaggaggccaannnaanacccggggaagccaaaagcccaaacggacaggnaaggccagcgacccgaccacccgaccggccccaanacccccaaagggaaaaaanncacaagaaccccgagaaggaagaccc

SEQ ID NO: 96049 - DNA, 285 bp, Zea mays
  Clone ID: MRT4577_19111C.1
tgttaactgctttggaaactttatcattttcctgggaaaggtgctggtggtgtgcttcagcgttttcgggggcctgatggcgtttaactacaaccgtgcgctccaggtatgggccatccctctgctgctggttgcctttttcgcctacttagcagctcacagtttcttatctgtgttagaaactgtgctggatacacttttcctgtgctttgctgtcgacctggaaacaaatgatggatcgtcggagaaaccgtactttatggacccagggtttttgagttttga

SEQ ID NO: 96050 - DNA, 172 bp, Zea mays
  Clone ID: MRT4577_19112C.1
agcccaaatcagtcaaagtcgcttctacaccagaagaataaaacgagataaggatcattgttgtccctggttgtcaaagagagccactattgaagaacgtggacgacaaacggcgaacaggctagagagcgcccaacaccggccatgtctccctacgtgaaaaaacacccta

SEQ ID NO: 96051 - DNA, 761 bp, Zea mays
  Clone ID: MRT4577_19113C.1
ccggccgggacgaataagcaatggcgcgcaccatggcagccatcgcgatcttgctcgctgccttcttcgtcctcgctccggatctggccaccgcaggggcagcggcagcggcgcagagcgccatctcggccgtgttcgcgttcggggactccacgctggacccgggcaacaacaacggcctggccactctggtgcgcgccgaccacgcgccctacggccgcggcttcccgggcggcgcggccacgggccgcttctcggacggcaagctcatcaccgactacatcgtcgagtcgctcggcatcaaggacctcctaccggcgtaccgcggcagcggcctcaccgtggcggaggcgtccacgggggtcagcttcgcgtcgggcgggtccggcctcgacgacctgaccgcgcagaccgccatggtgtccacgttcggctcgcagatcaccgacttccaggccctgctcggcaggatcggcatgcccaaggccgccgggatcgccaacaggtcgctctacgtggtctccgccggcaccaacgacgtcaccatgaactacttcgtcctgccggtccggaccatcagcttccccaccgtcgaccagtacagtgcctacctcatcggcaggctccagggatacatccagagcttgtacaagctgggagcccggaacttcatggtatccggcctgccgccggtggggtgcctgccgatcacgaagagcctccacagtctcgggtcgggaggttgcgtcgccgaccagaac

SEQ ID NO: 96052 - DNA, 454 bp, Zea mays
  Clone ID: MRT4577_19114C.1
aaagtcccctctatcgtagaacctccccgaattttcttgtcttcaccgtttatccattgaatgacttcatctggatttccatgaataaatttctgctcggaggaatatgctccaactttagaaaagttgttctttagatttttagagcattccatggatatttcataacatttttccttggtggcacgaagctcatcgacattcttctatgctcttcatctttcaatttcgcatatttcgtgcttctccacttcagcattaaagttctcggttgcttcggcaactttcttctttagctcttgtacctcggcttcatgagctttagcttgagcggaaagcctagctttgctagattgtaatctttccactaaagagagtaggattttatccttctcaagagcttcgtttcttaatgtaatgaccttcgagcgaaggtttccaagcgctattcggc

SEQ ID NO: 96053 - DNA, 214 bp, Zea mays
  Clone ID: MRT4577_19115C.1
ggggagtcaaccatgtacttgtcaaacattttatacgccaagcaacaaaaaaatctggggagactgaaacgttggcgtttctgactgagttttttgtttacagggaggtttatacactttccaaaggcctaccctttgtttgggaaatcttgtttccaccctcccaaaagtgggggggctgtataaaggggagggttttgtccttagcatggcc

SEQ ID NO: 96054 - DNA, 411 bp, Zea mays
  unsure (1)..(411): unsure at all n locations
  Clone ID: MRT4577_19116C.1
aaaaaaaaaacagaaaaaaaataataaataaaaacaaaaaaaaaaaaaataatgggaaggagttgtttgagagccaggtttacggccaaacataagcgcctgatgcgcgctcgtttcttgtaccttaaaatgtactaacagctcctggtagtctacggcgtggcttagcaaaccctttaggtaaccaccttatttaccctcgtagacactcctccttagagcggtcattgttatacctactgggattgcactgatgtccgttccaatcagtttatccatttgtttgacaattggaacgccccctgcatcggccctttatgcacatcattaattgtggtttctctaaaggtcaccgctaaactttccagtagcctaccccccggcctttnggctttttttttttctttcttg

SEQ ID NO: 96055 - DNA, 446 bp, Zea mays
  Clone ID: MRT4577_19117C.1
gaacaaaaggccggcaaatttggatttatggttcctggaagctgggccccagcctttaaattccccccgacctggaccccaaggtttcttcattaaaataaaacccccctggtttacccatttcaaaaaaaggtgggacccgacttgaactttttctttcccttggacttgaatttgagggccgcccttaagaaggggacttttttttggttggggagggcccggccccccaggaaattggaggggaaccgggaacttgccaaactcaatggggaagccccccccaaagttgcaacccttgggggccacccttttttggcggtcaacttcttggtaaccctggttttggcgagggacctcgcaaaaaacctaaccttgggttaacccgcccgggggggggggaacggggggaaaaacggccgcaagcccaacaagggggggggggg

SEQ ID NO: 96056 - DNA, 533 bp, Zea mays
  Clone ID: MRT4577_19118C.1
ttgtttttgatgctgacctcatttaggggtcgataatccacacacattcgtaaagtttgatccttcttcttgacgaatatggctggacaaccccactgtgatgagcttggccggatgaatcctttttctaggaggtcttgtaattgaatcttcaattctgccaactcatttggaggcatacggtacgatcttcgagaaatgggagccgtaccgggctttaactcaattacaaactctacatccctttcaggtggcaatcccgacaaatcctcgggaaagacatcaggaaactcgcatactaccggaatatccttgatttccggtaccataacttcataaactctgccattaattttgtttggaatagggatgggcaaaagaatttcttcttgattatgactcaacctgatggttctttgatcagattgagtgttgctttatgcttggccaaccaattcatacccaaaacaacatctatgtcttggcctttcaggacgatcatattggtagaaaagtcccgtccggccaatgat

SEQ ID NO: 96057 - DNA, 245 bp, Zea mays
  Clone ID: MRT4577_19119C.1
tccgatccttcaagggtggccacaccctctatctcagctgctactctaaagcaagtctagtctctaaagatggcgtctgttgctgaggtcatcaactttgaccacctgatccatatcgttgcgtacgtacacatgttctgcagcacgtctatcactacctatagccggctcctcatttggacctagcttaactatactcgcactctgtctaccacgcgtacattccttactatataataacacta

SEQ ID NO: 96058 - DNA, 3951 bp, Zea mays
  Clone ID: MRT4577_1911C.1
atggatcctaagggaaaggggatggtggtcgacaacaatgagaaggagtctatcttcaacgagccgaagaatgacaagtctaccgacttgggctcaagccacaagcgcaaagatgggaagaagaagaagacaaggcgcatcaaggagatcgtctactacgacagcgacgaatcctcttcttcccaaaaggatgatgacaacgactacaggaagacggtcaattcaaacttttcatttgattattctcgtattccacatagttcgaattcgcatttgctttccattcctcttggtaaacctccacactttgatggggaggactacggattttggagtcacaaaatgcgtagtcatttattctctctccatccaagcatatgggagattgtagagaatggaatgaaatttgatagctcggatagccctatgtttattaatgaacagattcataaaaatgcacaagccactactgtgttgctagcctctttgtgcagggacgagtacaacaaggtgagcggcttggataatgccaagcagatatgggacaccctcaagatttctcacgaggggaacgacatcaccatgctcactaaaatggagttggtggagggcgaacttggaaggtttgcaatgataaggggcgaggagccaacccaaacatacaaccggctcaagacccttatcaacaaaataaggagctatggaagcacgcgatggacggaccatgatgtcgtccgactattactaaggtcctttaccattcttgatcctcatttggtgaataatattcgtgagaatcccaggtacatcaaaatgtcgcccgaagaagtcctaggaaaattcgtcagcgggcgaatgatgattaaggaagcaaggtacgtggacgacgccttgaatggaccgaccaacgagccgcaacctcttgctctcaaagcaacaagaagcaaggaggcgctacctagcaaggtggcacaaattgaggcgactggacttaatgatgaagagatggctctcatcatcaaacgcttcaagtcggtgctaaagggtcacaaggggcagccaagcaagaccaagacaaaggggaagcgctcatgcttcaaatgcggtaagattggtcattttattgctaactgtcccgaaaatgaaagtgaccaggaacacgggagcaagagggaaaagaagaaaaattacaagaaggctaagggcgaggcacatctaggaaaggagtgggactcggattgctcctcctccgactctgacaatgaaggactcgccgccaccgccttcaacaagtcatccctcttcccaaacgagcgtcacacatgcctcatggcaaaggagaagaaggtatgtactcgagacggtactacttatgattcctctagtgatgatgaatctagtgatgaggaaatagactactctagcttgttcaagggattggatagaaataaaattgataaaatcaatgaattgattgatgcattgaatgagaaggataaactcctagagaaacaagaagatttattgtatgaagagcatgataaatttgtagaagctcaaagatctcatgctctagaagttaaaagaaatgaaatgctttcttgtgaattatcttcttgccatgagacaatttctaaatttaggagcattaatgatgatatgaatgctaagttagagattgctaataaatccaattcttgtgaagaacatgttgcaatttgtactaggtgtaaagattttgacattaatgcttgtagtgaacacctagtttcaatttccaagcttaatgatgaattggctagtcttaatgctcaacttaagactagcaagaatgaatttgacaagctaaaatttgcaagggatgcctacactattggtagacacccctcaattaaggatggacttggcaacaagagggaagccaagaacttgacaagccataaggctcccatctccgccaaggaaaaagggaaggcccctatggctagtagtgtgcaaaagaaccatgcctttatgtaccatgatagaagacaacctagaaatgcttataggagttgtaatgcatataatgtctttgattctcatgacatggttgcttctagttcttcttatatgcatgatagaaatgttggtaggagaaatgttattcataatatgcctaggaaaaatgttgttaatgttcctaggaaagtaaatggaccttctacaatttattgtgctttaaatgcttcctttgctatttgtagaaaggataggaaaatagttgctaggaagttaggggcaaaatgcaagggagacaaaacttgcatttgggtccctaaggatatttgcactaaccttgtaggacccaacaagagttgggtttatgcatccggaggttcaagctggattattgatagcggatgcacaaaccatatgacgggggaaaagaagatgttcacctcctacgtcaagaataaggattcccaagattcaattatattcggtgatgggaatcaaggcaaggataagtctgaaacccaagggaccctcaagcgcttcctcaggagagctcaaaatgagtttgagctcaacgtgaagaagataaggagcgacaacgggtccgagttcaagaaccttcaagtggaggagttccttgaggaggaagggatcaagcacgagttctccgctccctacacaccacagcaaaatggagtggtagagaggaaaaacaggacgagcacggggtggttgtaccaaatggatgtgaagagcgcgttcctcaacgggccgatcaaggaggaggtgtacgtagagcaaccccctggcttcgaggatgaacggtaccccgaccacgtgtgtaagctctctaaggcgctctatggacttaagcaagccccaagagcatggtatgaatgccttagagactttttaattgctaacactttcaaggttgggaaagccgatccaactctttttactaagacatgtgatggtgatttgtttgtgtgccaaatttatgtcgatgacataatatttggttctactaaccaaaagtcttgtgaagagtttagcagggtgatgacgcagaaattcgagatgtcgatgatgggcgagttgaactactttcttgggttccaagcgaagcaactcaaggatggcaccttcatctcccaaacgaagtacacgcaagatctgctaaagcggtttgggatgaaggacgccaagcccgcaaagactccgatgggaaccgacggacacaccgacctcaacaaaggaggtaagtccattgatcaaaaagcataccggtcaatgatagggtctttactttatttatgtgctagtagaccggatattatgcttagcgtatgcatgtgtgctagatttcaatccgatcctaaggagtgtcacttagtggcggtgaagcgaattctaagatatttggttgctacgccttgcttcgggctctggtatccaaaggggtctacctttgacttggttggatactcagattccaactatgctggatgtaaggtcgataggaagagtacatcagggacgtgccaattcttaggaaggtccctggtgtcgtggaactctaagaaacaaatctccgttgccctatccaccgctgaggccgagtatgttgccgcaggacagtgttgcgcgcaactactttggatgaggcaaaccctccgggactttggctacaatctgagcaaagttccactcctatgtgataatgagagtgctatccgcatggcggaaaatcctgttgaacacagccgcacaaagcacatagacatccggcatcactttttgagagaccaccagcaaaagggagatatcgaagtgtttcatgttagcaccgaaaaccagctagccgatatctttaccaagcctctagatgagaagaccttttgcaggttgcgtagtgagctaaatgtcttagattcgcggaacctggattga

SEQ ID NO: 96059 - DNA, 334 bp, Zea mays
  Clone ID: MRT4577_19120C.1
gcgcttgcttctaactgaatccagcctaccgctgatcgcacgtctacatggacgcgggctattctgacgagaaggcgctacgtgacttcgcaaggacagcgtccgcctcgacaagcgctgccagaagtcagaccgcacggagttgaccaaggttacggctcgtacggagatcgggttcgtctacatgggcttcatcggattcttcgggaagctcatcttgatttccatctacaacattaatagtcagttcctgctaggctcagggcgagacttgcatgggcgtagtacgatactatggagagcaacggatatccaggaacttgccctttggaat

SEQ ID NO: 96060 - DNA, 293 bp, Zea mays
  Clone ID: MRT4577_19121C.1
ttcttttattctgttcgtttcgtctgttttttggatctggaacctggctcaaatctgttttggcaggcacaaagacgaatctgaagcggtcttaatccaacatagtgactaactaaccaggctgtgctttctggccgaaatgccgttccggtagagcttatacggttattttaccaacctggtctaatatcatgccctggacgcgacgaataatggggacggcgcgccggaggccaatccagcgtccgcgaagacttcgggcaccaacgaccgcgtgatgctaaacaagcggt

SEQ ID NO: 96061 - DNA, 433 bp, Zea mays
  unsure (1)..(433): unsure at all n locations
  Clone ID: MRT4577_19122C.1
ctttttgcataaatcaccatataattcttcatatgagtaaactatanaaatttggcaagagccatctaagtggtaggtgacaaatatattttcataacttgcaaagctctcaacattgttagtcaagcggtgaattcccaagtttttaaatctataacaggaatttgttttctacagtagagtgttattccagtaagcctgtcatatatgactaacttcaattatttcatcagggatctctcattcaactacttcttgggagcatttgcctttatttatatgaacaattagtttgtttcttgactaccttctggtaaataatagttgctaagccgtaagagcactgccctcttaatttcttgatggccaaaaatagtaggacatatgctttcaactatcttaattaataaattaggagtggtcctcatcttaa

SEQ ID NO: 96062 - DNA, 1998 bp, Zea mays
  Clone ID: MRT4577_19123C.1
atggccagagtacgttctaccgctagggttgagcatgaggggggcgaaactgaaggttcggagactgttcccatctccgaagcgatgcaaagatccggactggtaactttggaaaagatccccagtgatgatgcggaacaagcagaacaagcagttgccgaagcagaagaagaagatattgaggaaactgatcccgaagatgattatcgcattgccatgccaagcaagcccagccacttggacttcggaaagtctactgtttcgaaggctgatctctccaagatggtaaagtcgggcttttttaatgaaaatcagaagaagctattacgcttcgggggagaagagactaccccaaagccggagaaggatgaaattgttattttcaaaagctttctgaaggctggattaagattccctcttcatggaattattgcagaggtactgaagaggttcggtatctattttcatcagttgactcctaatgctattgttaggcttagtgtttatatctgggcactccgaagccaagcagtggagccatttgcgaacagtttttgccgggttcacgagctgcattatcagacgaaggctagaaaggatggattgcacgacaatttcggttgctataacttcgcctaccggaaaaccacaaagtttcctgtaatcagttaccggagcaaatgggcagcaggctggaagtcggagtggttctatgtcaaggttgatgacgataaggagaagcttgtgcaaagtccactcgaactaatcttcggagaaacccgacctcgctgcaacatgacacccgaaggtccaacacaacaagcactgaatgaattcagaattgttgcagagcatatcagtacaggagacctggttcaggagtttttggctttcaaagtttttcctagtttgaaagaatgggaaatgccgaagctaaagggggagaagaaagaaggtgaacttgtgcgtttaccttactatttcaagtttaagaaatactttaaaacaccttgccaagagtggctggatacaattgaagtgatgtgtaatgaaatacttggcaactactccaaaaaagaagatcaattgatgactgcagccttcggcacccgtccgaagcgaagactgaaccgagtgctggacgccttgggttttgaataccctgactatgaaaatctgaacaaaggtgccggaggccagaaaaggaaaaggataaccgaagccttaaatgaagatgaaaaagaaacaccaaagaagaaaattccgaagaagaggaaagcgtcttctccgaagcgaaaaatatccgacgaagaagaaacccccgcatcaccctctgccactgatgtggaggcaattttgaaggtaatgactgaatccctgcctgcgaagctaagtccattgaggcctcaactgacaaagttttttcagaaggaaaaggagcccaaaaaaatgaagaaaacaactaaagtaaagagacagagaatcatcggtgtgacagaggtcattgacaaaacaccgccaagagcttcagctcagaagacaccagcggctgaagaaaggacagatattgaaatcacaccttcggaggttgcagctgccgaagctgcctcagttgaagatttgaatctggagagtacaattgaacatattgagggtgaaattgacgagctcgacgaagttatagccgggcacggtgacttctgtgcctgggtagcttctcggggcactgctgcagctttcctaaaagctggctgcgatcatggaaaggttgtcaataggcccaatttcactttatcaccatcaatcctagatgacattcctgatctcgcccgaagtatttccaatagatttgtaaaaatgatatggacaaaaggcgggcgagaaaaagctggagacgaagctcggagtcatcttgaaccagtaagaaatcataccttgtgcttacctctatcttcaagctcaattttgacttacaataacttaattcatgtaggatga

SEQ ID NO: 96063 - DNA, 2799 bp, Zea mays
  Clone ID: MRT4577_19124C.1
atggcgggcggaaatacgctcgccggagctaaggaacggtggctggccgatgagggtgagtgcggggcgaagagaggaagtaatggctcttggtgtggctttttaagagaaaccctaggtgacactggggtgtcacagatggtaactacagaagaaaaccctactgctgaaacagaacaaacaaccgccgtagaagaagaagaagaaaatactgaagaaactgatcttgaagatgattctcatattgccgcaccaagcaagcccagccatttggactttggcaagtcaactgtttccaaggctgacttccccaagatggtgaagtcgggctattttactgaaaatgagaagaagttacttcgctttgggggggaagaaactaccccgaagccagaaaaggatgaaatagtcattttcaagagcttcttaaaggctggattaagatttcctttgaataggataatttctggcgtactagataaatttggtatctactttcaccagctgactcccaatgcgattgtcaggcttagcgtatacatctgggctctccgaagccaggcgatggaaccatttgccgacagcttttgtcgagttcatgaactacattaccaaacaaaagccagaaaagacggattgcatgaaaattttggttgctataactttgcttatcggaaaaccacgaagtttcccgtgattagctaccgaagcaagtggccggcaggctggaaatcagagtggttttacgtcaaggttgacgaagataaagagaagctggttcagagtcctcttgaattaactttcggagaaacaagacctcggtgcaaaatgacattaggtggcccaagtttggccgcggtgagcgaattcaagattattgcagaacatattggaactagggatctagtgcaagaattcctatccttcagggtttttcctacctcaaaagaatgggaaatgccgaagctacagggagagaagaagaaaggggaacttgtacggttgccctactattataagttcaagaaatactttaaaaaaccttgccaagagtggctggatacgatcgaagtgatgtgcaatgagatacttggcaattattccaagaaagaagatcaattgatgaccgcagcctttggcacccgtccgaaacgaaggctaaatcgagtgttggacgccttgggtttcgaataccctgattacaaaaatctgaacaaaggtgccggaggccaaaaaaggaaaagggtaactgaagccttagatgaaggtgaaaaagagccaataaagaagaaaattccgaagaagaggaaagcttctcctccgaagcaacaattatccgaagcagaagaaaccccggcatcaccttctgctgccgtagttgaggaaattctgaaggtaatgactgaatccttacctgcgaagctaagtccactgggtcctcaactgacaaagttttttcagaaggacaaggagcccgagaaatcgaagaaaacaatcaaggcaaagaaacaaagaattatcactgtgacagaggtaattgacaagacgccgccaagagcttcggcccaaaaaacacaagtggctgcagagggagcagatactgaaattgtaccttcggaggccgcagctgccgaagctgcctcagctgaagatgtgaatttggagagcacaattgaacatattgaccaaatactgctagacatggctgcagaagaagctaccactgctgccgaagaggccatgaccgcagcgtcaaagaaagaaaaagaagttgctgaagaagcttcagaagacgaagccttcgtgttccaaaacttagttggaggacacctatcaaaaactgaaatagaagagcttaaagaatatgccaaatcctgtggatacaaacctggggcactcctcttcagaggcgttgatgatgaaaaaatagattgcattcgagatcaaacaggagccaaagttatcagtactttgtccaagagtatcggattcccgaagctagaaacagatatcagccgctaccgacgacaacatgtcgttggtagtttattttattccaactttaagagtatgctgctgagcaaagccttgcaaatgcaacaagatgttgaagataaaaagcatgaagttataattggaaatttagaaagcaaaataaaggagcaatcagatgctttcgagaagaagaactttgagctccaggcaaccgaaggtttattggcggaagctgaagcaaaaatatcagaactgaacacgaagcttctccgccagtctgagcagttcgaacgagaaaaacaagatcttaatgcaaaacttgaagccgaagctcagcaaaattcagatttgagaaagctactgacaggtcttcaagaaaaatgcctggaatttagcaacaagtgcattcaacgattaagaaagattttttactcagttggagccagcagcgaaaaatttaccccctcagctgaagatctaccaaaaaccttcgaacacattgagggggagattgacgagctcgacgaagtcatagctgggcatggtgacttctgtgcctgggtggcttctcgagggactgctgcagccttcctgaaggctggctgtgatcatgggaagattgtcaatagaccaaatttcactttatcaccatcaatcctggatgacatccctgatcttgcccgaagtatctcgaatcgatttataaaaatgatatggacaaaaggtggtcgagagaaggctggagacgaagctcgtagccaccttgatccagatgacgaagccgaagctgatgatcaaaaataa

SEQ ID NO: 96064 - DNA, 1987 bp, Zea mays
  Clone ID: MRT4577_19125C.1
cctcgaggccggccgggcacccctcgcgcgcgtctctcgctgatcacccccacgtgtaacacttcccatataaattctgggggccccgggccgggccggcaacaccaagccacagccactggtcaccggtacactctgatccgaacaatggacgcgacgcaactgaaccgatcgatggacgccacgccgacgcggctcttccttggcgcgctcctcctcctcgtccccgccgcgctcctcctcctgctccgcgcgcggggcaggcgccgcctccccccgggcccgccgtccctgccgctgctcggcagcgtggtgtggctcaccaactcgcccgccgagatcgagcccctgctgcggcgcctcttcgagcgttacggccccgtcgtggcgctccgcgtcggggcgcgcttgtccgtcttcgtcgcggaccgccgcatcgcgcacgaggcgctcgttgaccgcggcgcgacgctggcggaccgcccggcgctcgcgtcggtcaagttcctcgacgagagcgacaacaccatcacccgcgccagctacgggcccgtgtggcgcctgctgcgccgcaacctcgtcgccgagacgctgcacccgtcgcgggtgaagctcttcgcgccggcccgtgcatgggtgcgccgcgtgctcgtcgagaagctcggggaggccgggcccgacgccgcgccgccccgcgtagtggagacgttccagtacgcgatgttctgcctcctcgtgctcatgtgcttcggcgagcgccttgacgagcccgccgtgcgcgcgatcgcttctgcgcagcgggaggcactcatctaccgctccaagaacatgcaggtcttcgccttcctccctgtcgtcaccaagcacctcttccgcgctcggctcgaaaaagcgcgggcgctgcggcggcgcgtcaaggagctcttcgttccgcttatcaacgcgcgccgggagtacaagaagcggggaggggaaccgagaagggaaaccacgttcgagcactcgtacgtggacacgctgctcgacatcaagcttcacgaggacggcgatcgcccgctcaccaacgatgagattatcctcctatgctccgagttcctcgacgccggtacggacaccacgtccacagggctgcagtggatcatggccgagcttgtgaaaaacccagccatccaggagaagctctacagcgagatcaaggccgccacagacgacaacaaggaaggggtctcagaggaggacgtccacagtatgccatacctcaaggcggtgatcctcgagggtctccggaagcacccgccggcccacttcgtgctgccgcacaaggcggcggaggaaatggagatcggcgggtacctgatccccaagggcacagttgtgaacttcatggtggccgagatgggccgggacgagcaggagtggaagaacccgatgcagttctcgccagagcggttcctccccggcggcgatggcgagggcgtggacgtgacgggcaccaaggcgatcaggatgatgccattcggcgtgggccggaggatctgcgcggggcttggcatcgccatgctgcacctggagtacttcgttgccaacatggtgcgggagtacgagtggaaggaggtgcccggcgacgaggtggacttcgccgagaagaacgagttcactgtcgtcatgaagaagccgctgcgcccgcgccttgtgcctaggaggtctcacttgaactagaaatactttacgtaccattttctatcctacgttttcctcgttttgtgatgtatataaacatctcatagctataaaaaaaattacggttctacaataataaaaaaaaaaaaactgtaacgttcattcggtagtttcatcttcctgtcgatcgtggatggcttgtgaatatggaaaaatgattagcaaaacgatgctaattataaataacagtgctgctcttctgaaaacttaaactgttgatgcatctgtcttcagatgctcttggttc

SEQ ID NO: 96065 - DNA, 2570 bp, Zea mays
  Clone ID: MRT4577_19126C.1
aaacaatttccaattccgttcctggaggacgtctgcacggggaccttcccagcgggcgacggccggctgcatccatggcggtggccttcctgctgctgggattgggtttcctccttggcctcctctccctggcgatcgcggaggggctggcgctcctttgggccatccgaagcctcacgcgccgcacatcggcctcacgcagcacgccgccgccatcactccccatccacccgacgccggcgcggtctgtgtctcgccacagcctcaaccgacaggacacctcatttcatccatccactgatgcagtattccacacgttcacgacctgtaccttaacacctttcccattctatctacgcgcccacagcccgccttatggatgcttgagcaacccaaggatagcagcatcaattgctctagcccagggatcagagacaggaagctcctcgtcgaggttttccctgtaaaaatgtctgctacgcttcaaggacactccctcaccttgtctggacccgatgatgcctcgcagctaaccattgacctgctcggttgcacagttgctgctgtttctgcatccaatctgccctcacgtaaatgggccaagaggtatccgataaaactggaaagcaaggaatctggtatttgcagggggagcaaggtatgctatgtttatgcagacacctcttgggagaaggaatcatggtgtaaagcactccgtcttgcttctactacggacaaggacaaactcaaatcccatgaaatgctgacccaagagttccgcagttacatgtcctctctgaaagctggatacccttcctttctgggaccctcgacactctccagtcaggaacatgtgcttgtggacaacactgtgaagaatgatggaccttcaaaactccgaggttttctcaaacgattggtgggaaagaaggcatctgccaaggcttctcaggagagcaaaacaggtccggcgccatctaaacaagatacaagccaacccagtactcctagctccactatgagtttcaacagccagctaccagcttcccccagtgcaaaggtggatgaaaagcttgccgatgacggtacactttgttggaacctcctaatctcccggttgttttttgatgctaaaatgaatgatgagatgaacaaagccatcagagcacgtattcagcgaacattgtcgaacaccagaactccagcctacattggtgagatcacgcttactgacctcaaccttggcaagctcccaccatctctgcacagaatgagagtcctcccactggatttggacgaatcgtgggctttcgaagttgacttcgagtgttctagtggaatactgctgcatatcgaaacaagacttgaggttcaggcgccagagctggaaaaggacattatgaagactgatattagaggcaatcctaatggggacgcgagttcagatttccttgatagtattgagcaatatggtaaccaattcgggccttcagaagtttcggattttgcagcagaggtcaacgatgaagcagataccttaaggaaatcaaagagcgctgggtgggcatcaacatatatgtcaaggtggagaagtatcttgaattcaatagcggaccaggtttcacaggtgccgctatcattggcgattaaaatttcttcagttcgtggaacgatgcggatacatctaaagcctcctccgggtgatcgagtttggtatgggtttacgtccatgccggagatagagtgggagttggaatcatcggttggggataggaagataagcagcagttacatcgcctcgcttatcggcaacaggatcaaggcttcggttcgtcagatcttggtgatgcccaactgtgaaagctttcctatttcctggatgatagcagatacggatgactgggtgccccgcagaattgcaccttttatatggctgaaccgtgagcccgctgataggcgtgctgcagacacaactagagagatgatgccaggggaagcttccacatccaaggccattgcaaagaacaagtcgagtccgctgccgtctacaaaaagaatcaccaacggttcctggaacaagacaaagatacgtgttgatgggcaagagcaagagcaggcagaagcatcaacgagctcgcagtcttggctggtttcagcaaatggtgatgcaacaagggaacagctgaggatgccactgctgagcagcagcggagacgagagagcaggccctgtggaggagcagcaagcatcaccttctgctgctgaggaggagggagatgcgaagaagaggaagaggcgtgcacgggtgatggatctaggaaggaggatgggcgacaagctggaagagaagggcaagcgtttcgtcgggaagatgcgggagaacgcgaggaacaaccgcttgctattgccggacttggagcaggccaccacccctcctgctcctgctcctagttaggcattttaaggatgttactcgacaaaatgaaaattaatcagttgcagcgcctagcaacagctcctaattaggagcacttgtattatgtaaaagaaagaaagaaaaagcttatgag

SEQ ID NO: 96066 - DNA, 152 bp, Zea mays
  Clone ID: MRT4577_19127C.1
ttgaattcggcacgagggcgcggtggaggccccctttctgggctggtggttatgatcacgccgggaggcttaaacttgctgtgcgccgtgggttccaagggtggtctgtttctttggcttgagcttctttttggttgcggcggtcgttggtt

SEQ ID NO: 96067 - DNA, 2532 bp, Zea mays
  Clone ID: MRT4577_19128C.1
ggacttcggaaagtcgactgtctccaaggctgatctctccaagatggtgaagtcgggttattttagtgagaatgagaagaagctacttcgcttcgggggggaagaaactaccccgaagccaggaaaggatgaaatagtcattttcaagagcttcctaaaagctgggttgcgatacatcgatgaactgaagatggaaattgatggcgttgctttctctagtttgtcaaacaaacaagcagataacgcgatggatgccaacagcgatactcagtcagatcgtgaggaggatgccagtaaacaagagaaggatgatgatgatattggtactgctctcatgtctcgcaagcagagaggcctttataaggctatgaagatgggcaaagaaaagaaaaaggagaaagttgagctactcaagaagagaaaaaagaacgcggattctggcgcttcttccaagaagcggcactgatgtgtcacaaatcttcatcgcattggtgtggcatctctagtagaaatgttaccacgaccggggagaaactattcaaggaactattatttagtcaatttgtttcttttggagaaactttgcacagttgagggatataacttagtttttcaagcctgtccatctccagcagatggtttagttgggaaagaatcttatgctcaggtacaaattggtaggcaaattctaggcaaaggagttgggttaacatgggaagaggccaagctctagttatacatggttgttcagatgtgacagcaatgactaatgggacaaatgtcgagataggtccaaaaggccaagaaccaccatcaattagctctggcaatattagttttgttgttcgtgtattggctaagttattgcagatggcgcttgccttttgcttcagctgatcaagatctagaattcgaattgggccatgtgaagcatttcacatttcacgatctgcaaagtgcaacggacaattttaattccaagaatatattaggtcaaggaggttttggaattgtgtataaaggctgtttgagaaatggaactttagtggcagtgaagagattaaaagatcctgatgttaccggtgaagtccagtttcaaacagaagttgagttgattggccttgctgtgcacaggaatctcttgcgtttgtatgaattttgcatgacctctaaagaacgattgcttgtatatccatatatgctaaatggcagtgttgctgaccgcttgagaggaagctatgcattctaaagggtgtctttccacgtcagccaaagaagaaggtggaagggaaccacaagacctactaccacacaaaggatattgcattcctcgctcatgaccctttgatcgagaagttcagggagattaaggtccatcgaaggaaggttaaaaaggctgttgctaagaaaaacagggatcttgcagacaggctgttgaatcggccaccaacttacaagcttgataggcttgtccttgaaaggtatccaacattcgttgatgctcttcgtgacttggatgactgccttacaatggtgcatctgtttgcggcattacctgctgttgacggtgaacgtgttgaggtcaaacgaatccataactgccgcaggttaagccatgaatgcttgacatttatttccgtgaagggcatatattatcaggctgaagtcaaggacaaaagatcacctggctaactccgcatgctcttcagcaagtattaactgatgatgttgatttcaatgtgatgctttcttttctagaattctatgagactcttctaggatttgtgaacttcaaaatctatcattcaataaatgtaaattatcctcctattctggatccacgtctggaagctttagctgttgagctctatgcattgtgccgatacatgtctgctggttccagaagaatgattgggaattcacaaactgacgaagtaatggaagataaggatgagaaaagtaaagctgaggaagtaattgaggaagagaaggttgtgaagaataaagcaagctcaaaagcagatgaatctgagttcagattagcacagcttcaacatcagctcccaaccaatgaacctggtgcactgatgaatcttgtagaagaatcaactgccgatgatgcagatgatgatgatactaaagattgtaaaggtttatttaagaacttaaagttctacttgagtcgagaggtgcctagggagtccctgttatttataattccagcatttggagggactgtttcatgggaaggagaaggagctccatttaaagaaatagacgaagatatcactcaccaggttgattccatttgcaataatttattacaccaaagtttaactatatagacggagacattgtgtaccatccctaaagtaagatgccactctaagtaccacgacagcaatgccatactagggcaatagttactacaatacaatttttgtatgtggctaactgttcatattttacactctaccatcatatgatcatatctagcgaagtaaaataaaatggcctgtggatttttttatg

SEQ ID NO: 96068 - DNA, 478 bp, Zea mays
  Clone ID: MRT4577_19129C.1
ccggccgggatccaccatcacacacagcaatccacacaagcacttcgacgtcacacgtggcgctgcacacagacacaccaagcgtcggcaccaatggcttactaccaggaggtggactactgctcggaggaggtgaggtcggtgaccccggtcggcttcgtccaccacttcgctccccacaacgatggccaccaatggaggaatctctcccagaaaaagatcaacaacacccacttccccatgtcttactacacatgccctctacaaggacaacattacctgcccgtccactaatcatgtgcgccataagtaccacaccgaccctccattgttcgcgctcacgtactactacgaccactcgtgctacatcgccttcctcccgctctccccctcccagttcctgctgcacacctcgtccgtgaaggtcgtctccatctgcttcgactcctcatccgctactttggctctggtggcgaac

SEQ ID NO: 96069 - DNA, 1275 bp, Zea mays
  Clone ID: MRT4577_1912C.1
atggatcctaaagggaaggggatggtgatcgacgacaaggagaaggaatccttcatcaatgagccaaaagacgacaagcccactgactcgggctcaagtcaaaagaagaaggatggaaagaagaagaggcgcatcaagaagattgtctactacgacagcgacgaatcttcctcttctcaaaaggacgacggatacaaggagaaaaagaaaacggttaactcgaacttttctttcgattattctcgtattccgcataattccaatgctcatttgctctccattccacatggtaaacctccacactttgatggagaggactatggattttggagtcacaaaatgcgtagccacttgttttctcttcatccaagtatatgggagatagtagaaaatgggatgcgatttgatagttcggataactccatgtttatcaatgaacaaatccataaaaatgcacaagctactactgttcttttagcatccttgtgcagggaagagtacaataaggtgagcggcttggacaacgccaagcagatttgggacaccctcaagatctcgcatgaggggaatgacgtcaccatgctcaccaagatggagttggtggaaggcgaactaggaaggttcgcaatgatcaggggagaggagccaactcaaacgtacaataggctcaagaccctggtcaacaagataagaagctatggaagcacgagatggacggaccacgacgtcgtccgacttatgctaaggtccttcactgtccttgatcctcatcttgtaaactctattcgtgagaatcctaggtacatcaagatgacgcccaaggaaatactcagaaaatttgtaagcgggcgaatgatgatcaaggaggcgagatacgttgatgaggcgttgaatggcccaatctacgagcctcaaactgttgctctcaaagcaacaagtaacagggagacgctacctagcaagcgcttcaagacggcgctcaaaggtcgcaaggagcaccccaacaagagcaagacgaaggggaagcgctcttgcttcaagtgtggtaaggttggtcactttattgctaactgtcctgataatgatagtgaccaagatcaagaaaagaagagggaaaagaagaagacttacaagaaagcgaaaggcgaggcacaccttggcaaagagtgggactcggattgctcttcaaacgacaatgaaggacttgccacctcggccttcaacaaatcatccctcttccccaacgagcatcacacctgcctcatggcaaagtaa

SEQ ID NO: 96070 - DNA, 310 bp, Zea mays
  unsure (1)..(310): unsure at all n locations
  Clone ID: MRT4577_19130C.1
tggccggttgtgggtcgcgcgcttatcgccatccattttcggggctagtttattcncaggtgagttgtggcgcactccataacaggattacnacttccatgaccacaggactgctgtggtatgattgacacaacaccctttgcgggtactagggtagcacacagtttggcgcccgaaatgcgggttggggtcatcccccatcccagttttgtttaccaaaaatggtccacccggcgcttccgatttcgagaaacggctcaccgaggcagccgagccagcctacctatttaaagtttgagaatatgtggag

SEQ ID NO: 96071 - DNA, 2099 bp, Zea mays
  Clone ID: MRT4577_19131C.1
taaaaatcctggcgtttagctttcttacatacagcactatataaacagacaagtaggtgtgaagttaccacagtattcattgctatttgcactgttttgctgccaaaatttttaacagtcgcagaagcttgtctgtcggaatcgaaagaagctccagtttgaaacttgcttcggaggaagaaagtattaaagttccacaagttcataattaaatggccagagtgcgttctaccgcctgggttgaacgtgaggggaacgaaactgaagcttcggagactgtccccatctccgaagccatgcaacgatccgggctattgacttcggaagaggttcctaatgatgatgcagaacaagcaatcgctgaagcagaggaagaagatattgaggaaactgatcccgaagatgattatcgcattgccatgccgagcaaacccagccacttggacttcgggaaatctactgtttcgaaggctgatctgtccaagatggtaaaatctggcttttttactgaaaaccagaagaagctattgcgcttcggaggagaagagactaccccaaagccggagaaggatgaaattgttattttcaaaagctttctaaaggctggattgagattcccccttcatgggattattgcagaggtgctgaagaggttcggtatctattttcaccagctgacccctaacgctatcgttaggcttattgtttatatctgggcactccgaagccaagcagtggaaccatttgcggacagcttttgccgggttcacgagttgcattatcaaacaaaggctagaaaagatggattgcacgataattttggttgctataacttcgcctatcggaaaactacaaagtttcctgtaattagctaccgaagcaagtgggcagcaggctggaaatcagagtggttctatgtcaaggttgatgatgacaaggaaaagcttgtgcaaagcccactcgatctgatcttcggagaaacccgacctcgctgcaacatgacacccgaaggtccaacacaacaagcaatgaatgaattcagaattattgcagagcatatcagcacaagggacctggttcaggagtttttggctttcaaagtttttcccagtttgaaagaatggaaaatgccgaagctacagggggaaaagaaagaaggtgaacttgtacgtttaccttactatttcaagtttaaaaagtactttaaaacaccttgccgagagtggctagattcaattgaagtgatgtgtaatgaaatacttggtaattattccaaaaaagaagatcaattgatgaccgcagccttcggcacccgtccgaagcgaaggttaaatcgggtgttggacgccttgaattttgaataccctgactatgaaaatctgaacaaaggtgccggaggccagaaaaggaaaagaataaccgaagcctcaaacgaagatgaaaaagagacaccaaaaaagaaaattccaaagaaaaggaaagcgtcttctccgaaacgaaaaatatccgacgaagaaaaattccccgcatcaccctctgccaccgatgtggaggcaattctgaaggtaatgactgaatccttacctgcgaagctaagtccactggggcctcgactgacaaagttttttcagaaggacaaggagcccgaaaaatcgaagaaaacaatcaaagcaaagaaacaaagaattattattgtgacagaagtaattgacaagacaccgccaagagctgcagctcaaaaaacaccagcgtatgcggaagagacagatgttgaaattacaccttcggaggtcgcggctgccgaagctgcctcagctgaagatttgaacctggagagcacaatcgaaaatattgataggatactgctagatatggctgcagaagaagctaccaccgccgccgaagaggtcgtgaccgcagcgtcggggaaagggaaggaaattgctgatgaagcttcagaagacgaagctttcatgttccagaatttagttggagaaaactgtcaaaagctgaaagagaagagcttagagaatatgcaaaatcctgcggatacaaacctggagcactcctcttcggaggcattgatgatgaaaaattag

SEQ ID NO: 96072 - DNA, 1017 bp, Zea mays
  Clone ID: MRT4577_19132C.1
cccacgcgtccggcccccggccgatatccacaagatagagcatactctttggtggtattgatgatgaaggtttgggctgcatacgagaccaaaccggtgcgaaggttgtcggtactttatcgaagagtatcggcttcccgaagcttgaagcggatatcagccgctaccgtcgacaacatattgtcagcagtttattctattctaatttcaaggtaaacattttgagtctaactcttatttcctttggtacgaaaatattttctaacgaaggctatttgtccacagagtatgctgttgagcaaagccttgcaaatgcaacaagattttgaagataaaaagcatgaagttataattgaaaatttggaaagcaaaataaaggaacaatcagatgctttcgagaaaaagaactttgagctccaggcaaccgaaggtttattggcggaagctgaagcaaaaataacagaactgaacacgaagcttctccgccagtctgagcagttcgaacaagaaaaacaagatcttaatgcaaaacttgaagccgaagctcgacaaaattcagatttgagaaaactactgacaagtcttcaagaaaaatgcttggaatttagcaacaagtgcattcaacgattaagaaagattttttactcagttggagccagcagtgaaaaattcaccccctcagctgaagatctaccgaggaccttcgaacatattgagggggagatcgacgagctcgacgaagtcatagctgggcatggtgacttctgtgcctgggtagcttctcgaggaactgctgcagctttcctgaaggctggctgtgatcatggaaagattgtcaataggccgaatttcactttatcaccatcaatcctggacgacattcctgacctcgcccgaagtatctcgaacagatttgtaaaaatgatatggacaaagggtgggcgagagaaggctggagacgaagctcgtagccaccttgaaccagatgacgaagctgaagccgaagatcaagaatga

SEQ ID NO: 96073 - DNA, 792 bp, Zea mays
  Clone ID: MRT4577_19133C.1
atgcagcaagattttgaagacaagaagcacgaagttataattgaaaatttggaaagcagaataaaggagcaatcggatgctatcgagaaaaagaactttgagctccaggcaaccgaaggttcattggcggaagctgaagcaaaaataacagaactgaacacgaagcttctccgccagtctgaacagttcgagcgagaaaagctagagctcaatgcaaaacttgaagccgaagctcaacaaaattcagatttgagaaaactattgacaagccttcaagaaaaatgtctggaatttagcaacaaatgcattcaacgattaagaaaaattttccactcagttggagccagcagtgaaaaattcaccccctcagctgaagatctaccgaagaccttcgaacatattgagggtgagattgacgagctcgacgaagtcatagctgggcacggtgacttctgtgcctgggtggcctctcgaggcactgctgcagctttcctgaaagctggctgcgatcatggaaagattgtcaataggccaaatttcactttatcaccatcaatcctggatgacatccctgatctcgcccgaagcatctctaatagatttgtaaaaatgatatggacaaaaggtgggcgagaaaaggctggagacgaagctcgtagccaccttgaaccactcggcgtcgccgtaccccgtcgttattcatgtaggatgacgaagccgaagctgatgattaagaatgacgccgaagctgaagctccttggagattaaacagtagtctagacagtacttga

SEQ ID NO: 96074 - DNA, 529 bp, Zea mays
  Clone ID: MRT4577_19134C.1
tttttttttttttttttttttttttttttttttttttttttttttttttttttttttttttttttttttttttttttttttttttttttttggggacccaaccccccaaacttaaaaactggagccgggtccatttaataaagggacatttaggaaaggggtaaagggtaaaaactaaaaaccacccccggttttaaaaatttatcgccgattagtttatttttgaaccaaaacgcgaaaaaaaaaaaaaaggggggatttttttttttaaaggaatttttttttttgggggccccccaaatagaaagcatgtaaaagccccaagggggaggggaaataggggggtaaaaacttggagggagggttggaaaaaccccgatttggatcgtaacccccaaaaaaatttggtttaaacaaattttcggaagccggtccccccttttcaaaaacaaaagggggaagggccttgggaaccttttaaatgggaaacttttttttttctggggggggggggacccaaagccccggc

SEQ ID NO: 96075 - DNA, 718 bp, Zea mays
  Clone ID: MRT4577_19135C.1
agcagtggtaacaacgcagagtacgcgaagaggagacccccgcatcacgctctgctactgacgtggaagagattttgaaggtaatgactgaatccctgcctgcgaagctaagtccattggggcctcaactgacaaagttttttcagaaggaaaaggagcccgaaaaaacgaagaaaacaactaaaacaaggagacaaagaatcatcgcagtgacagaagtcattgacaagacaccaccgagagcttcagctcagaagataccagcggctgaggaaataacaaatattgaagtcgcaccttcggagatcgcggctaccgaagctacctcaaccgaagatttgaacttggaaaccacaatcgaacacatcgacaaaatgctactaaacatggccacagaagaagctactactgccgccgaagagaccatggccgcagtgtctgggaaagaaaaggaaatcgctgacggaacttcagaggacgaagcctacatgtttcaaaatttagttggacaagaattgtcaaaaaccgaaatagaagagcttaaagaatatgccaaatcttgcggatataaaccaggagcactcctctttggaggtattgacgatgaaaaattagactgtatccgggatcaaactggagctaagattatcggtactctatcaaaagtatttggttttccgaagctggaaacggatattagccgctaccgacgacacat

SEQ ID NO: 96076 - DNA, 2451 bp, Zea mays
  Clone ID: MRT4577_19136C.1
atggccagagtgcgttctaccgctagggttgagcgtgagggaggcgaagctgaaggctcggagactgttcccatctccgaagcaatgcagcgatccggactggtaacttcggaagaaatccccaccgttgaagcagaacaagcaactgccgaagcagaagaagagaacattgaagaaactgaccccgaagatgattatcgtattgccatgccgagtaaacccagtcacttggacttcggaaagtcgactgtttcaaaagctgatctctccaagatgtttcctgtaatcagctaccgaagcaaatgggcagcaggctggaagtcggagtggttctatgtcaaggttgatgatgacaaggagaagtttgtgcaaagtccacttgaactaatcttcggagaaacccgacctcgttgcaacatgacaccagaaggtccaacccaacaagtgttagatgagttcagaattatttcagagcatatcagtacaagagacctggtgcaggagtttttggctttcagggtttttcctagtttaaaagaatggaaaatgccgaagctagagggggagaaaagagaaggagaacttgtgcgattaccttactatttcaagttcaagaaatactttaaaacaccttgccaagagtggcttgatacaattgaagtaatgtgcaatgaaatactcggcaattactccaaaaaagaagatcagttgatgactgcggccttcggcacccgtccgaagcgaagattgaaccgagtgctggatgccttgggttttgaatatcctgactacgaaaatctgaataaaagtgtcgaaggccggaaaagaaaaaggggagccgaagcttcagataaagatgagaaggaaccagcaaaaaagaagaatattccgaagaaaaagaaagtattatctccgaagcaaaagatatccgacaaagaggagacccccgcatcaccctctgcctttgacgtggaagagattttgaaggtaatgactgaatccctgcctatgaagctaagtccattggggcctcaactgacgaagttttttcagaaggaaaaggagcccgaacaaacgaagaaatcaactaaaactaaaagacaaagaatcatcgcagtgacagaagtcattgacaagacaccaccgagagcttcggctcagaagataccagaggctgaaggactaacaaatattgaagttgcgccttcggagatggcggctaccgaagctgcttcaaccgaagatttgaacttggaaagcacaattgagcatatcgataaaattctgctagacatggccacagaagaagctaccgctgccgccgaagaggccatggccgcagcttctgggaaagaaaaggaaattgctgacgaagcttcagaggacgaagccttcatgttccaaaatttaattggacaagaattgtcagaggccgaaatggaagagcttaaagaatatgccaaatcttgcggttataagccaggagcactcctcttcgggggaattgacgatgaaaaattgaactgtatccgagaccaaactggagctaagatcatcagtactctatcaaagagtatcggttttccgaagctggaaacagacatcagccgctaccgacgacaacatatcgttggtagtttattttattctaatttcaagagtatgctgctgagcaaggctttgaaaatgcagcaagatttagaagacaaaaaacacgaagttataattgaaatcttagagagcaaaataaaagagcaatcagctattgttgaaaagaaagacttcgagcttcggacaactgaaggtttattggcagaagccgaagctaaagtagcagaattgaattcgaagcttctctgtcaatctgaacaatttgaacaggaaaaacaagaacttagtgtgaaacttgaagccgaagttcaacaaaattcagatttgaaaaaattattggcaaaccttcaagaaaaatgtttggaatttagcaacaaatgcattcaacgactgagaaaaattttccactcagttggagctagcagtgaaaaattcaccccgtcagctgaagatttaccaaagatctttgaacatatcgaaggtgaaattgatgagcttgacgaagttatagctgggcacggtgacttctgcgcctgggtagcttctcggggcactgctgcagctttcctaaaagctggctgcgatcatggaaagattgtcaataggcccaatttcactttatcaccatcaattctagatgacattcctgatctcgcccgaagcatctctaatagatttgtaaaaatgatatggacaaaaggcgggcgagaaaaggctggagacgaagctcggagtcaccttgaaccacttggttttgaccctcaacaacttaatttatgtaggatgacgaagctgagaccgatgcttaaaaagcatgacgccgaagctgaggccccatga

SEQ ID NO: 96077 - DNA, 2448 bp, Zea mays
  Clone ID: MRT4577_19137C.1
atggccagagtgcgctctaccgctagagttgagcgtgaagaaggcgaagctgaaggatcagagactgttcccatctccgaagcgatgcaacgatccggactagtaatcacagaagaaatccccactgctgaaacagaacaggcaactgctgaagcagaagaaggaaacattgaggaaactgattccgaagatgattctcatttcgccataccaagtaagcccagccacttggacttcgggaagtcgactgtctccaaggctgacttctccaagatgtttcccgtgatcagctaccgaagcaaatggccgacaggctggaaatcagagtggttttacgtcaaagttgacgaagataaagagaagctggtccagagccctcttgaactaaccttcggagaaacaagaccccgatgcagaatgatagtagaaggtccaacttgggctgcactgggcgagttcaagattattgcagaacatattggcactagagatttagtgcaagaatttctagccttcagggtttttcctactttaaaagaatgggaaatgccgaagctacagggggagaagaaaaaaggggaacttgtacggttgccttactattacaagttcaagaaatactttaaaacaccttgccaagagtggttggaaacaattgaattaatgtgcaatgaaatacttggaaattactccaaaaaagaagatcagttgttaactgcggccttcggcacccgtccgaagcgaagactgaatcgagtgctggacgccttgggttttgaataccctgactacgaaaacctgaataaaggtgtcggaagccggaaaaggaaaagaataaccgaagccttaaatgaagatgagatagaaccatcaaagaagaaaattccgaagacgaggaaagtgtcttctccgaagcaaaaagtatccgacgaagaagaaagtcccgcatcacgctctgccactgacgtggatgaaattttgaaggtaatgactgaatccctgcctacgaagctaagtccattggggcctcaactgacaaagttttttcagaaggaaaaggagcccgaaaaaacgaagaaaacgactaaagcaaagagacaaagaatcatcgctgtgacagaggttattgacaagacaccgccgagagcttcagctcagaaaataccagcggctgaggagataacaaatattgaaattacaccttcggaggtagcggccgccgaagctacctcaattgaagatttgaacttggaaagcacaatcgaacacatcgacaaaatgctgctagacatggccacagaagaagctactactgctaccgaagaggccatggccgcagtgtcggggaaagaaaagaaaattgctgacgaagcttcagaggacgaggccttcaagtttcaaaatttagttggagaaaaattgtcaaagaccgaaatagaagagcttaaagagcatgccaaatcttgcggatataaaccaggagcactcctcttcggaggtattgatgatgaaaaattagactgtatccgggatcagactggggctaaggttatcggtactctgtcaaagagtatcggcttcccgaagctagaaacggacattagccgctaccgacgacaacatatcgttggtagtttattttattccaatttcaagagtatgctgttgagcaaagctttgaaaatgcagcaagatctggaagacaagaaacacgaggttataattgaaaatttagaaagcaaaataacagagcaatcaacttcttttgaaaagaagaacttcgagcttcaagcaactgaaggcttattggcggaagccgaagctaaaataacagaactgaacacaaagcttcttcgccaatctggacagtttgaacaagaaaagcaagaacttaatgcaaaacttgaagccgaagttcaacaaaattcagatttgaaaaaactattggcgggccttcaagacaaatgtttggaatttagcaacaaatgtattcaacgactaagaaaaattttccactcagtcggagctagcagtgagaaattcaccccgtcagctgaagatttaccaaagaccttcgaacatattgaaggtgaaattgatgagcttgacgaagttatagccgggcacggtgacttctgcgcctgggtagcttctcggggcactgctgcagctttcctaaaagccggctgcgatcatggaaaaattgtcaataggcccaatttcactctatcaccatcaattctagatgacattcctaatcttgtccgaagcatctctaatagatttgtaaagatgatatggacaaaaggcgggcgagaaaaggctggagacgaagctcggagtcatcttgaaccactcaattttgacttacaacaacttaattcatgtaggatgacgaagccgaggccggtgcttaaagagaatgacgccgaagctgaggtctcttga

SEQ ID NO: 96078 - DNA, 225 bp, Zea mays
  Clone ID: MRT4577_19138C.1
ggaaccatgatctcttagttaagaagttgggtgctttccaaaagaatagtagagcacaagcaagcctttctcttgtggcttaaacagtgtcagaattctttgcttggcattatactcatggagataattttttttttaaatggaaactggatggaaggaacacgctccggtttctgaagatcttgcatgatattctgctcttttgttatttccttttgattatat

SEQ ID NO: 96079 - DNA, 194 bp, Zea mays
  Clone ID: MRT4577_19139C.1
atgtctataaaaatataaataagctctgggcctatattattcaatgttcacagagttaaaatcatctccacaaatcaccgagcttcctgcaaaatttctggaggatttacaacctggctccttttttaccaaatctgtgaaaactggggggcttttaccattgtttggacaagagaaacttggtcctacacaaa

SEQ ID NO: 96080 - DNA, 4383 bp, Zea mays
  Clone ID: MRT4577_1913C.1
atggatcctaagggaaaggggatggtggtcaacgacaaggagaaggagtccttcctcaacgagccgagggacgacaagcctactgactctggctcaagtcataagaagaaggacgggaagaagaagagggatgaatacaacaaggtgagcggcttggacaacgccaagcaaatatgggacaccctcaagatttcacatgaggggaacgatgccaccatgatcaccaaaatggagttggtggaaggcgagctaggaaggtttgccatgatcaggggagaggagccaacgcaaacatacaacaggctcaagaccctggtcaacaagatcaggagctatggaagcacgagatggacggaccacgacgttgtccgacttatgctcaggtcttttactgtcattgaccctcatcttgtgaacttcatctgtgaaaatcccaggtacacaaagatgacgcccgaggagatactcggaaagtttgtaagcggacgtatgatggtcaaggaagctagatatgttgatgatgcattgaacggcccaatggccatctatgagccccagcccgttgcactcaaggcaacaagcagcaacagggaggcgctacctagcaaggtggcacaagttgaggctgccgggctaaacgaagatgagatggccctcatcatcaagcgcttcaagatcgcactaaaaggacgcaaggagcatcccaacaagagcaaagcaaagggaaagcgctcctgttttaaatgcggtaagactggtcattttatagcgaattgtcccgataatgctaatgacaaggaacaagaaaatagcgggaagagggagaagaagaaggcctacaagaaggcgaagggcgagccgcaccttgacaaaaaatgggattcagattgctcttcttccgactccgacgatgaaggactcgccgcctcgaacttcaacaagtcgtatctcttccccaacgagtgtcatacttgcctcatggcaaaggagaaaaaggtaagcactcgagatacccctaagtatactacttcaagtgatgatgactctagtgatgatgaagtagattacacaagcttatttaaaggtttagaaagaactaaagtagataaaatcaatgaattgattgatgctttaaatgaaaacaatagactcttagaaaagcaagaggatattttgtatgaagagcatgataagtttgttagtgtacaaaaatctcttgctttagatattaaaaggaatgaaatgttgtcctctgaattatctgcttgtcatgaaactgtgtctagcttaaagagtattaatgacgatttaaatgctaagctagaagtagttaataaatctagttcttttacagagcatgttgtcatttgtaatagatgtaaagattttgatgttgatgcatgtgttgaacaccttacttctattacaaaattaaatggtgaagtggcaagtcttaatgcccaacttaagacttgcaaaaatgactttgataagttaaaatttgctagggatgcctacaccgttggtagacatccctcaattaaggatggacttggctttcgaaaggaagccaagaacttaacaagccaaagggctcccattcccaacaaggagaaagggaaggcccctatggctagtagtaatcaaaagaatcatgctttcatgtataatgatagaaatttttctagaagttctcattataataggagttataatgcttttgattcacatgctatgattgcttcaagttccaattttaatgtggttgctagaaagatggggtctaaatgcaaaggagacaagacttgcatttgggtcccaaagactattgtaactaaccttgtaggacccaacaagagttgggttcatgcatccgggggctcaagttggattatcgacagcggatgcacaaaccacatgacgggggagaagaagatgttcacctcctacgtcaagaacaaggattctcaggatacgattatctttggagatgggaaccaaggcaaggtcaaaggcttgggaaggatagccatcacaaatgagcactctatttctaatgtatttttagtagagtcgctaggctataatctcctgtctgttagtcaattgtgccacatgggctacaattgtttgtttacaaatgttgatgtatctgtctttagaaggagtgatggttcattagtgtttaagggtgtactagatggcaaactctacttagttgatttttcgaaagaggaggctgatctagatgcatgcttaatcgctaagactagtatgggctggctgtggcatcgccgtctagcacatgttgggatgaagaaccttcacaaacttctaaagggagagcatgtgttaggactaaccaatgataaatcagaaacccaagggacccttaagcgcttcctaaggcgggctcaaaatgaatttgagctcaaggtgaaaaggataagaagcgacaacgggtccgagttcaagaatctgcaagtggagtaccttgaggaggaaggcatcaagcacgagttctccgctccctacacaccacagcaaaatggtgtggtagagaggaagaacaggatgcttattaacatggcgaggacaatgcttggagagttcaagacgcctgagcggttttggtcggaagctgtgaacacagcttgccacgccataaaccggctctacctttatcgcctcctcaagaagacctcgtacgaacttcttatcagtaacaaacccaacgtatcatactttcgtgtatttgggagcaaatgttacattctagtgaagaaaggtttggttgaagtctctagcgacgttgtatttgatgagactaatgactctccaagagagcaagttgatcttgatgatatagatgaagatgatgttccgacggccgcaatacacaccatggcgattggagatgtgcgaccacaagaacaacaacagcaagatcaaccttcttcctcaacgatggtgcaccccccaactcaagatgatgaacaggttcatcaagaaggggcgtgtgatcaagggggagcacaagaagaacaagtgatagaggaagaagtaccactggcccctccaactcaagtccgagcgataattcaaaggaatcaccatgtcgatcagattctgggtgacataagcaagggagtaactactcgctcacgattagctaatttttgtgagcattactcgtttgtctcttctattgagcctttcagggtagaagaggccttgcaagatccggactgggtgttggccatgcaggaggagctcaacaacttcaagcgaaatgaagtttggagcctggtgccacgtccaaagcaaaacgttgtgggaaccaagtgggtgttccgcaacaagcaagacgagcacggggtgctcgacttgtggcaaaaggagacttttgctcctgtggctaggctagagtctattcgcattttgttagcctatgctgctcaccattctttcaggttgtttcaaatggacgtgaagagcgctttcctcaatgggccaatcaaggaggaggtgtacgtggaacaaccccctggctttgaggatgacaaatatcctgaccatgtttttaagctctctaaggcgctctatagacttaagcaagccccaagagcatggtatgaatgccttagagatttcttaattgctaatgctttcaaggttgggaaagtcgatcccactcttttcactaagacttgtgatggtgacctttttgtatgccaaatttatgtcgatgacataatatttggttctactaatcaaaagtcttgtgaggagtttagcatggtaatgacacagaaatttgagatgtcaatgatgggcgagttgaactacttccttaggttccaagtgaagcaactcaaggacggcaccttcatctcccaaacgaagtacactcaagatcttctcaagcggtttgggatgaaggacgccaagcccgcgaagacgccaatgggaaccaacggacatgtcgacctcaacaaaggaggtaggtcagttgatcaaaaggcataccggtctatgataggatccttgctttatttatgtgctagtagaccggatattatgctaagcgtatgcatgtgtgctagatttcaatccgatccaagggagtgtcactttgtggccgttaagcgaattctcagatatttagttgctactccttgcttcgggatctggtatccaaaggggtctacctttgacttggttggatactcagactccgattatgctggatgcaaggtcgataggaagagtacatcagggacatgccaattcctaggaaggtccctggtgtcttggagttctaagaaacaaacctccgttgccctatccaccgttgaggctgagtatgttgccgcaggatag

SEQ ID NO: 96081 - DNA, 3092 bp, Zea mays
  Clone ID: MRT4577_19140C.1
atggccagagtccgttctaccgccagggttgagcgtgagggggacgaaactgaagcttcggagactgtccctatctccgaagccatgcaacgatccgggctagtgacttcggaaaagattcctattgatgatgcagaacaagcaatcgctgaagcagaaggagaagatgctgaggaaactgaccccgaagatgattatcaccttgccacgccaagcaaacccagccatttggacttcgggaaatctactgtttcgaaggctgatctgtccaagatggtaaagtcaggctattttactgaaaatcaaaagaagctattacgcttcgggggagaagagactaccccaaagccggagaaagatgaaattgttatttttaagagcttcctaaaggctggattaagattcccccttcatgggattattgcagaggtactgaagaagttcggaatctattttcaccagctgacccctaacgctatcgttaggcttagtgtttatatctgggcactccgaagccaggcggtggaaccgtttgcggacagcttttgccgagttcacgaactgcactatcagacaaaggctagaaaggatggattacatgacaattttggttgctataattttgcttatcggaaaactacgaagtatcctgtgatcagctaccgaagcaaatgggcagcagggtggaaatcggaatggttctatgtcaaggttgatgacgataaggaaaagcttgtgcaaagtccactggaactaatcttcggagaaacccgcccccagtgccacatgttaccagagggtccaactcaaaaagcaatgtatgaattcaaaataattgcagagaatatcagtacaagggacctggtccaggagtttttggctttcaaggttttccctagtgtaaaagagtgggaaatgccgaagctgaagggggagaagaaaaaaggtgaacttgtacgtttaccttactacttcaagtttaaaaaatactttaaaactccttgccaagagtggctggatacgattgaagtgatgtgcaatgaaatacttggcaattattccaaaaaagaagatcaattgatgaccgcagccttcggcacccgtccgaaacgaaggctaaatcgagtgttggacgccttgggtttcgaatacccagactacgaagatctgaacaaaggtgccggaggccaaaaaaggaaaaggataactgaagccttagatgaaggtgaaaaagagccaataaagaagaaaattccgaagaaaaggaaagcttcttctccgaagcaacaaatatccgaagcagaagaaacccccgcatcaccttctgctgctgttgttgaggaaattctgaaggtaatgactgaatccttacctgcgaagctaagtccactgggtcctcaactgacaaagttttttcagaaggacaaggagcccgaaaaatcgaggaaaacaatcaaggcaaagaaacaaagaattattaccgtgacagaggtaattgacaaaacgccgccaagagcttcggcccaaaaaacaccagcggctgcagagggggcagatattgaaattgcaccttcggaggccgcagctgccgaagctgcctcagctgaagatttgaatctggagagcacaattgaacatattgaccaaatactgctagacatggctgcagaagaagctaccactgctgccgaagagaccgtgaccgcagcgtcaaagaaaggaaaagaaattgctgatgaagcttcagaagacgaagccttcgcgttccaaaacttagttggagaacatctatcaaaagctgaaatagaagagcttagagaatatgccaaatcctgtggatacaaacctggggcactcctcttcggaggggttgatgatgataaattagattgtattcgtgaccaaacaggggccaaagttatcagtactctgtccaagagtattggattcccgaagctagaagcagacatcagccgctaccgacgacaacatgtcgttggtagtttattttactccaacttcaagagtatgctattgagcaaagccttgcaaatgcagcaagatcttgaagataaaaagcatgaagttataattggaaatttggaaagcaaaataaaggagcaatcagatgcttttgagaaaaagaactttgagctccaggcatccgaaggtttattggcggaagctgaagcaaaaataacagaactgaacacgaagcttctccgccagtctgagcagttcgaacgagaaaaacaagatctcaatgcaaaacttgaagccgaagctcagcaaaattcagatttgagaaaactactgacaaatcttcaagaaaaatgcctggaatttagcaacaagtgcattcaacgattaagaaagattttttactcagttggagccagcagtgaaaaatttaccccctcagctgaagatctaccaaaaaccttcgaacatattgagggggagattgacgagctcgacgaagtcatagctgggcatggtgacttctgtgcctgggtggcttctcgagggactgctgcagccttcctgaaggctggctgtgatcatgggaagattgtcaataggccaaatttcactttgtcaccatcaatcctggatgacatccctgatctcgcccgaagtatctcgaatcgatttgtaaaaatgatatggacaaaaggtggtcgagagaaggctggagacgaagctcgtagccaccttgatccagatgacgaagccgaagctgatgatcaaaaataagtaaacttgattttgacttccaacgaccttattcatgtaggatgacgaagccgaagctgatgatcaaaaataacgccgaagccgaagctccttggagatttagatagtagactgcagacagtacttgaaaaacttttgagataacttttgtaaatgtaaacaaaaacttgtttttaatgtatgctgttcataccttgtaatatatccttaacctttcactgatgtatgagaaatgctttgatgtggacgaaaaaaaaaaaaaaaaaagcgggggatttaggtgacactatagaagcaaaaaaaaaaaaaagaaaaaaaaaaaaaaaaaagcggcc

SEQ ID NO: 96082 - DNA, 255 bp, Zea mays
  Clone ID: MRT4577_19141C.1
cggagtcgttcagggacgccgcgcatagcttctcacaaggcggcctggactacctgagggaccccaggactttgcacgcacagagcatgctcgacatatgaacctgccacgtggtgctgatgctcttctcaagggctaccgcgatgcttgtggatcactacgtgaatggctggacctggtgtcaccgggtggctccttatatccgctgtgcctggtctacgacatggacatatgacaacgagctcaatgtgaggg

SEQ ID NO: 96083 - DNA, 394 bp, Zea mays
  Clone ID: MRT4577_19142C.1
cccacgcgtccgattttctttgaatgcgttcaacgggaccattgctattgcttgcaaggcctttttccttgccagtcaatataattgtgaatttgaggctctgagcatgtgctagaatgggcatccataatagtaaatataagaaacagtttttagtactaatttattcagtattatccaaagaagaatttagtggaactgttttgagtgtgttgtatagttatgctaattctctcatctatttgcggctcactacaacgatgtttacagtacttcatttctgaacttggttttcaatggaattgcctagcatctgcattgtaatttttcatgctccggtcatctcagattgtgaatacttatgttttctgtaataatcatgggtcattttgac

SEQ ID NO: 96084 - DNA, 647 bp, Zea mays
  Clone ID: MRT4577_19143C.1
cgcacctacgacgacgcacaaccctagcccctttcctctcgatccccatagcccctccctcctccttgctctccgccatggcctctgcactaggagcctctccatggcctcctacccatccccccaccaccataggtgcacacagacggtggatccgtgccggagaagagcagctccagttatggtggggtgcatctgtgccgaagatgaaggaggtccgccgcccgtctttgcctcctcgctgcctccttgttgctgctcctcctctatctctctccgcacctagcagtgcagcagccgggacaaggggaaggagcagcccgacccggctccatctctctccttcatgcaggagaactggatgagcaggtggcgagggaagctgccacggctagcggcggcgctgcacaggaacgtccacctccagggaccagatcttggctatgatctatgatgctgatttggctatcaactgctaaatctacgaatcattcaaaatgttttgcctaactgcacaagccttgcatatgaccactgggccatgtcttttgtgagcccccataattcttttgttctattgatgctttgcctaactgtacaagccttggatatgaccattgcgccatgcccgttgtgaacccccataa

SEQ ID NO: 96085 - DNA, 796 bp, Zea mays
  unsure (1)..(796): unsure at all n locations
  Clone ID: MRT4577_19144C.1
gatagaagaatcccaggagcaaggcaacgtacgagagtacgacaccggcgccggcattgttcgatcgtcttctccttcttggcttcttgctaggcggcttaatcgaggtcgtcggcgcattgttactccgcaccgcgcgaggtccccggcgaattgaaggccaacctgcagttagttgctgtcgttccgctggagatagatgccgcaggccgccgccccggcgtgcgcgctgccgctgccgctgccgacgatgcccggggtggcgcggtcgcacgcgtgggactgggtggcgctgctcctcctggtcgccgtcgacgtgctgctcaacgtcatcgagccgttccaccggttcgtcggcgccggcatgatggcggacctcagataccccatgaaaggcaacaccgtccccgtctgggccgttccgatcatcgctgtcattgggcccgtcactatcttcgccgtcgtctacatcaggaggaggaatgcgtacgatctgcaccatgccatcctagcgcaggtatcttgttcgccngtgctgataacgggcgtcctgaccgacgcgatcaaggacgccgtcggccggccgcgccccaacttctactggcgttgcttccccgatggagaagcggtaaccacaagcagctccaactccattgctcttcatttttaggctgtatttcagtccatcctggtagtacgcatgcatgggtcgtcgaaatgcagtggactacttgctatccacctaaccttgagtagttttcctcgtctgtccatatctactataggtgtacaacaa

SEQ ID NO: 96086 - DNA, 901 bp, Zea mays
  Clone ID: MRT4577_19145C.1
catggctcaacagcagtcctcgtctcctcattctcagagtgctcaagccacacccttgtttcctccattcagctccccgaagcctgctagttctaacactgagccaattacaagaagtatggctgggcagcctccatactcttcatcgcagcagcagcatgaagtcgcccattcattttatggccaaggcaatacaatattggttcctgtagctgatcataatgctcagcatcagcaatcgcaatcagtgcagctacacagccagggcacctgtctacctcaaccaagcaagcccagtcactgcagtgttgcatcctatgctgttcaaggaaatggtcagacctacagctccacatacaagaacccttctaactgccctgcaactgtcgtagctcttctgcctcagcctccagctactgcttctatggcgtatcatcccttgggaccacaggtcgtgcacaatcatccatttggaaatatggttgaaacggctagtgtggtagggtattcacgggaccaaggtgagatactcccagtggtgactgcagtacaacccgtgatggttgataagcttaatgctggcagcaacgtaacatcccctcgtgaatggtcagcatagtggacgatgtgccatcgtacacttcactgcttccacaacttactactgcacatattgcagttggaagctcatcaggtctattttatctggctccttttttccatcagccagcagattagaatagatccttctaccttttcagctgaaggtcagtatgaaataagaaaagtaggttagctgagtgatcactgttggcatatgtcctcacttttaatgggcatatcttcttgtaaccggttgcgaacttatatgccttatatgaatacatgatgggtttacatc

SEQ ID NO: 96087 - DNA, 476 bp, Zea mays
  Clone ID: MRT4577_19146C.1
ggggttgaaaaatttaaaaaaaattggcttggttgggatttaaacccactcaatctcactcaatcttttttgattggaagctaacccgattagacccaaccaggttaacaaccggcctttttggggggggggcctaagatcactggtcaacattcaaataacccttgcaatacctttcccccctggcttaattcataacacaggcaaaagcccctggcccacttacacacaccagccaacccccacttctggcatgagaagcggcccatgacaatgcttgcttgaaaagcaaacaacaacgacccctacaacaaggggggtaaaaccaggggaacttggggaccgccttggtaccctcccaaaccgggtgcttggcgagctcccccgggaggaccaggcggaccgaggtcttgatctcgcgggaggggatggggggcttcttgttgtaccgggcgagcttggggggcttcgcgggg

SEQ ID NO: 96088 - DNA, 2042 bp, Zea mays
  Clone ID: MRT4577_19147C.1
gccggccggttccggaagcccgtggctcccgcgccagccatgggcgccacaacgcggcgcgagccgctgaagcagcgcgtcaaccgctgcctcctcaagctttccgaccgcgctcgccacggccgcggctgtcgaggcgtccgccgtcaccgacgacctcgcttcctacctccacaagctccaaccgcgcctcctcaagttacttcgcagcaatgccttcaaggccaagcccgcgctcatcacactcatcggcgcctccgctgccgtgggcggcgatgccgaagtcactgcctccatcccgtgcctccgcgatgcagtcgctagcgatgactgggcagcgaggaaggccgcggcggaggcgcttgctgcattggccctagagcacacggatcttctcacgacctacaaatcctcttgcgttaccttcttcgaggccagaaagtttgacaaggtcaagatcgtgcgagagtcgataaaccggatgattgaagcgtggaaggagatcccgggtgctgaagaggacgagtgctcctccgctccgccatcagcgtcccagtcacaacgaagatattctcttacaggaagtgcaagtgatggacgatatccagctgcttcgctgggctcaaactcagttccatcagcaacaaggaggagcagattacctgtgagcagatcatctccgcctgatgtgtcacccagtgtcaccaaaacatatagtccttcatccatcaggaacaagaagctgtcaccgccttcatatcgcaaagcgcgccaagcaaataattgtaactacaaggttgagatagctgttgctccggatgctacaccaatcaaagtggtgacggaggagaagctgctggaaggaggcaatgtgagaggcagactggaggctaggagggcactcttccaaggcagccaggataggtcggccaagctggctggacacaaagcagggtcacgagttgttttaagattgagaatcggcaatttggtttactggatctacttccagagatttatggggaagtccgagaacggtatgcattctttggagacaagagtgcatgggctggagatggctttggatgagatctctcgtgatttggccttctcttcgggaaggatgacaagcagagaggatgatgctaagaggtctttggagacaagagtgcatgggctggagatggctttggatgagatctctcgtgatttggccttctcttcaggaaggatgtcaagcagagagcctgatgcaaagacgtgctgcattccgagcccaaaattctggagaaggcacaatggtggtaggtcttcctcaaggttttctgtctcagacgcagcaaacagctcagatgggagcagaacttcttacaagtgggagaggcagaggtttgggcttcagggtgggtttgtcacaaacccattagccgagccgaacatttcatctgcagggaaaacaatggttactcatgaaggcaggaagaaggataaaactttacaaaagtgaagggcgggttaggcatgatgaagacattctgttccaagcgtgaactgctcgagtttgcttattatcatggaggcggctgtagttctcttttccaccgcgacctctttttttttctaaggaacgtacgttgtcatttttggaagcttctgaaagcatggcgtgcgcgtgaactatggatgtatgagtcactccgaagctaaactgtttgagtactatgctaagctgaggagctgcattcacatcatgtggtggagcgcgagggaggcttctttatcggacagcctcacttgtcaccgacgcaatcaggcacccccccaagccgtggactacgctgggtttggctttggcatgagaacgaccgctgtgtttgtcataagtcatatcgtaactagagaaacaagtagctttataatcacaatgtatcaccatcctacagaactatggatgcgtcttgtacataggccggataaagcgcttctatgttcccgagcgtcttttctttacccaaaaatcaaaaatgtgtttttttccccta

SEQ ID NO: 96089 - DNA, 1212 bp, Zea mays
  Clone ID: MRT4577_19148C.1
ctccgccatcagcgtcccagtcacaacgaagatattctcttacaggaagtgcaagtgatgggcgatatccagctgcttcgctgggctcaaactcagttccatcagcaataaggaggagcagattacctgtgagcagatcatctccgcctgatgtgtcacccagtgtcaccaaaacatatagtccttcatccatcaggaacaagaagctgtcaccgccttcatatcgcaaagcgcgccaagcaaataattgtaactacaaggttgagatagctgttgctccggatgctacaccaatcaaagtggtgacggaggagaagctgctggaaggaggcaatgtgagaggcagactggaggctaggagggcactcttccaaggcagccaggataggtcggccaagctggctggacacaaagcagggtcacgagttgttccatacgagggtggtggtaatttggaagagatttcagaagttgaaggtagatcggaaaggtatgcagttcagaaagatgagagcttatcagaaataaggacgcagctccttcagattgaaaatcagcaaagcagtttactggatcttctccagaaatttatggggaagtccgagaacggtatgcattctttggagacaagagtgcatgggctggagatggctttggatgagatctctcgtgatttggccttctcttcaggaaggatgtcaagcagagagcctgatgcaaagacgtgctgcattccgagcccaaaattctggagaaggcacaatggtggtaggtcttcctcaaggttttctgtctcagacgcagcaaacagctcagatgggagcagaacttcttacaagtgggagaggcagaggtttgggcttcagggtgggtttgtcacaaacccattagccgagccaaacatttcatctgcagggaaaacgatggttactcatgaaggcaggaagaaggatgtaactttacaaaagtgaagggcgggttaggcatgatgaagacattctgttccaagcgtgaactgctcgagtttgcttattatcatggaggcggctgtagttctcttttccaccgcgacctcttttttttttttctaaggaacgtacgttgtcatttttggaagcttctgaaagcatggcgtgcgcgtgaactatggatgtacgagtcactccgaagctaaactgtttgagtactatgctaagctgaggagctgcattc

SEQ ID NO: 96090 - DNA, 826 bp, Zea mays
  Clone ID: MRT4577_19149C.1
gggtacccacgcctccggccggggatttaggctcccaacgcatccccgccgacctcaacgccgacggtcctttcctaacccgcagcccccggccacagtctctctcttccggtccagtgggggctgctagcttccaggaatattggagatgtgccttcaacactctagggctcgattgcctccagataagcaacttgctgcagaaaaaagttttgccttgtattgcaagccagttgaattgtacaatattatccagaggcgagctattaaaaatccaccttttgttcaaagatcccttctatataagatacaggcaaggagaaaaaagaggctccaaccgcgcctcctcaagttacttcgcagcaatgccttcaaggcgaagcccgcgctcatcaccctcatcggcgcctgcgcggccatgggcgccaatgccgaagtcaccgcctccatcacgtgcctccgcgatgcaatcgctagcgatgactgggcagcgaggaaggccgcggcggaggcgcttgctgcattggccctagagcacacggatcttctcacgacctacaaatcctcttgcgtcaccttcttcgaggccagaaggtttgacaaggtcaaggttgtgcaagagtcgatgaaccagatgattgaggcggggaaggagatcccaggtgctgaagaggacgagtgctcctcgctctgccaccagcgtcccagtcacaacgaagatcttctcttacaggagtgcaagtgatgggcgatatccagctgcttcgctgggctcaaactcagttcctttagcaccaggaagagcatattatctgtaagcagatca

SEQ ID NO: 96091 - DNA, 1269 bp, Zea mays
  Clone ID: MRT4577_1914C.1
gggtggacccacgcgtgcgcgaacaccagccgaacgggccggtgacgccggtggacatggtggtggacttctacaagttcgactacgagttcggggagccgccgcgcgtgaccagcctgcataacaccgtgcctgttgcgaccttcaacgacttctgcgacgacgtctactttgtcgccgaccagcggggctacgaggccgtcgtctactacctcgccggccagtacctcaagaccgacgataagtctggaaagatcgttgacccgcgcctgcagctcaacaaggtggtgcgagagatcaagtattccccgggtggcgtcaccgtcaagacagagtccgatctcattcagttcaagcccaagctacctgtcagttagttgttcctacctctgccctcgatccgtcttcagctgatcgattatctactctcaatattaattatagtatattaatttgatatatggtcgtttcctcttgtctgccccagacatggaaggttagggcgatctaccaattcgacatggccgtgtacaccaagatcttactcaagttccccaggaagttctggcctgaagggaaaggaagggagttcttcctctacgccagcagcaggagaagttactacggagtgtggcaggagttcgagaagcagtaccctgacgccaatgtcctcctggtcaccgtgaccgacgaggagtcgaggcgcatcgagcagcagtcggacgagcagaccaaggcggagatcatgcaactgctacgaatgctgtcagcttagggcgacggttcggacggtatacacattcggtgagcacaccagcgagcactacaatggctatgtccatggagcctatctttcaggtatcgactccgctgaaattctcatcaactgcgcccagaaaaagatgtgcaaataccatgtccagggaaagtatgactaggaagctacaggaaaattgatttaaagctccagcaaattgagcagtgtggatgttgcatttctcagttcattttttcccagttttcaacaaagtatagatgacagccatatcccctcgcggcatatgccttttcattattccaataaagctagcggctggttcgatgagcacgatttgtgatcgagtatcccgtttaataagtacggtgtttgctttttttcatgatgaggggtgcatggcttatgatattatatctatttgctaatcaaaactttgtatcgcgtagttccattccatgggaatcactagtacacacaccattattactcgt

SEQ ID NO: 96092 - DNA, 426 bp, Zea mays
  Clone ID: MRT4577_19150C.1
gtgcgcgactacgagtcccgcgccggcgccgtcgccgcgccggccgccgcaccgaccgcgagggctctcccgtgctactgggccatggagcgccacgagcgcaaggaccggaacctgcccaccaacctggcgcccgaggtgttcgacgcgctcaccgacgtgctctcccgccgcgccgcgcgccgagggggcgcggcgatcacggccgccccgccgccaccccagctcgcgctgcctgctccgcctccgcctccgccgcttcctcctccatcgccaccgaagccgcccatcgtccagccccgcgctccgcctcctccgctgccgcttccggcggccgtgcctacgccggcgacgtccgtttccgcggaggagctgacggggtcgtcggagtccggtgaggacgacgactggtcggacgccgtggcg

SEQ ID NO: 96093 - DNA, 1726 bp, Zea mays
  Clone ID: MRT4577_19151C.1
cccgagacacggcagcgccttcctcctcacaaccgctgcgccatcttcagtccatgcccacacgctccctctccactacatccactctgccagctctgctcctccttgctctctaacacgcacgcttgaagaccgtggaggccggtgacagagtcgtcgtctggaagacgggaagaggaaagtttgggggaagcacgcttggatgttgattggtttatgctttatccaaaatgccctaaagattttaatttttaatcaatcattgttgcttgcagagactgcgtctcacgatttgaagcgatttgtgttgttgaagctttgattaagcaagctgtttctgttcactttatacgaagggtcatgccttcggataatgaaggagaagatttaggaacacaattgtctcggctgttaggacttatgcaagatgtgtgcactatcaaaagtggatcacacttggactcgaaagatgcatatgttactgtcatgcatgtgaagtttgcaacaaagaaaggtgaacacccattgtgcaaaatcgatagctacatgaaatgtagtgaactaaagtgggttcagcttgaaggcgatcaacagaaacttctcttgttattcgacataaaacgaaggcaagcatattaacgcatttaatgccacactcagattgatgtcatgtccaagttcttcaagctgatgatggtaggtgttctgcttcacttctttctcattgttgaagttgtcccaggttgtattcactcttagaacccctctattatttatttttgaacaaagcttccttttttgttacgtcctaaaatgatatcaagcaagaccattatttctgtgggttgagtaaatctagattttttacttggcatgatgagacaatctggagaatgtataccaattatgttgtatgccttttatatttatctacattaccgagtgtagcatattatttgtttctatcttagtcaattattactcatgctatggtatatttttcttttgcttcttgaaaataatttaacctatgttattgagtcatgttataacatattattcttttgcttcttggaaataatgtaaccatagattgtgcttcaaaattattgtcgtcttgaccatcaccatatgcacaacaggaacaaggtctgctactcagcttgcatcaatgctacaacactagctcttgtatatgctaggattccaatgcgagacactgtcacatcttgtagtgttgtctatttgtgttctactcctttgctccacaggaacctacctaattttcataactttagcagtagtcttatggtaataaaagtcaaacaataataatgtattgtgctagatctgaattacctcgaagacagtgttgggggttccgatgtcactgttgacatcatatccaaatttgtatcattttgtatggtgtgatatatctagaagctctaagaatttttgtcttgtgcaggtcctgcaattaatgaatgatttgaaccaaagtgttcgaaatgttgttctcttgtattgaggcttactgtgtgcttgaggttcttcgacctctctatgaatcccctaagataccggcacaaaagataactgttgcgatatgtgtcattgatcaatttcgttgttactaggagtttaaggtaaaagacatatggcatatgatgacttgtggacatgttattaatggaatgtactgttatataaaaaaaaacccccc

SEQ ID NO: 96094 - DNA, 833 bp, Zea mays
  unsure (1)..(833): unsure at all n locations
  Clone ID: MRT4577_19152C.1
cagctcacaattaagtaggagagcgagcccaccacaatggccagtccgacccaattcctgaccatattccctttaatctcccttgtgatcctagcagccatggcaactgcttcagctgcttgtgttggaccactgtgctgctactttggctgtgaacaagagatcagatttcccacctacttcttgtaccaagctcatgggaatacaaatgccaaccaatacataatagtgccatccagtcatgcatttgggtttggaaccattgctgctaatgactgggcaatacttgacgcgccacagcaaggcgcaaaggtcattgcacgtgcaagaggcatgcagatccaagttgaccaggctgctggcaatgactggcaatgctatttcagcattgagttccaggacgccagtttcggtggctctaccctgaaagtgatgggcgagaatcataatggagcaacgggtgagtggagcattatcggtgggaccggaaaactgtccatggcgcgtggtactatcaaatacaaggttgtcagcatcagtgaatttgagaattacaagcagcttgatatttacgcagtctacacatcactagccgtttaagaatgcagcgaataatactactgtgcttcgaataatcgtaggttgcaagctagtgatgcaaacaccatcgatggcatgtccttaattctgttcccttcttccaaacattacctgcaatagttggtttacatcctagctgtctctgctgtctcgttgccttcattcaataaatgattgtacctgcttcttctggatcgantgttacttcttgaaccaatgcaaaatggataacc

SEQ ID NO: 96095 - DNA, 411 bp, Zea mays
  unsure (1)..(411): unsure at all n locations
  Clone ID: MRT4577_19153C.1
angnctgcgtctcacgatttgaagcgatttgtgttgttgaagctttgattaagcaagctgtttctgttcactttatacgaagtaggattatggctacactgattctttcttcctcggtggagtacaattggtggccttatatacatgatgtgggcgtcatttttctgattgcctctgaatgcctatatccattttctagggtcatgccttcggataatgaaggagaagatttaggaacacaattgtctcggctgttaggacttatgcaagatgtgtgcactatcaaaagtggatcacacttggactcgaaagatgcatatgttactgtcatgcatgtgaagtttgcaacaaagaaaggtgaacacccattgtgcaaaatcgatagctacatgaaatgtagtgaactaaagt

SEQ ID NO: 96096 - DNA, 312 bp, Zea mays
  Clone ID: MRT4577_19154C.1
gccacacctgcctgtacgcatgcaaccatgcctacgctactcgtagatctcactatcaaggctgtgaaccacgttacttatgacacggacaagatactactaccattcaacgacgacgatgcaccaaagatcgctatcttcactacactggatcacttagttcttgtctaatacgacttaacctttaacacctaccccatgttactgatccagaacatggtgaccattgagcaagacgcattcaacaacctagcacactcgtacctacaactcataattgacgagggcctgtcttagatggaccatgagctg

SEQ ID NO: 96097 - DNA, 445 bp, Zea mays
  unsure (1)..(445): unsure at all n locations
  Clone ID: MRT4577_19155C.1
actgtggaatgaaagagatggtgctgatcattggcggggagaggaggagctgctgcgccgagaggcgactactaccatgaccctgttcatggcacggcgatgggcgaatcatttcaacgtgctacagggcctgagtaaaagaacttgatcgtcagctgctgcaaaatatgagtcttggtggtttcttttctcttttttttccccattcctgcaaacatataggtttggtgtctgtttttttgtctttttttggtggggatctgaatccctgaaagatctctctctctctttctctttttgcaagaaatgtgtgggttctgtcagacaaaatctgcttgtggtgngtgaatctgcgcgagaacagatcattctggagaaaaaaaaacgccgcaaaactaaaaatattatttgattgcgcttgcaaatttggaagccagggagttaa

SEQ ID NO: 96098 - DNA, 192 bp, Zea mays
  Clone ID: MRT4577_19156C.1
aagggccgcttctttttttttttttttagaaaatagcagagataaactgaccgaaaaccgacaggagatttacagagcttgacaaataaagacatcttactcctgagagaaggaagatgctcgcacagacacccagacgatgacaacaagcagagcctagcgcatctctaacctgcgtgcatataagtagag

SEQ ID NO: 96099 - DNA, 340 bp, Zea mays
  Clone ID: MRT4577_19157C.1
gcggctcgcgggagggctcgtttttttttttttttttttattacacaaacttcatcactataataattggacaagtagagatgcgccagaacataacttgcaagccatggcctagattgcagacacaccgacactatgagctagacatgttcttctacccatgcatacagaaccgatttatcttcacaagactatattttattaacaggaaaccacccatcacgttcaacacactggtttaaagtatgtggcttcctatttccttgattaagattccttcacatccgctttcaatatataggggacaccgccctctttgatactaagattcacaactttt

SEQ ID NO: 96100 - DNA, 193 bp, Zea mays
  unsure (1)..(193): unsure at all n locations
  Clone ID: MRT4577_19158C.1
caccagcttaccactacacacacagctttatttaataacgtccaaccaaacacgagaagggcccaatgtagtacatttcctaaaccaacncantaaagcacgaaccagagcagcatgccgcgcaccaccccctgtaacaagtgctttaacacgctgacaaccaccaacacacccgccaccgccaacatacaca

SEQ ID NO: 96101 - DNA, 354 bp, Zea mays
  Clone ID: MRT4577_19159C.1
acttcttcaccttctcatcctcgtcgtgtggaaaacagtaccctccggacaccccaggcaaatcacaaaaactatcggtagaaaacgtcctggcccaacaaaaaccaagcctcaaacacaatcattggatgggggccaaaagctgagagcccaacgccaataacccactggtccccgccatagcttccaaatacaaaccccgaaacctacttggaaaggctgaaggagccgatggcctttatggtgccagcccggaaaacgcacgggttctggctgcacgggatggcaacgcccacgagggggctcaaccccgagagcagtgggcgctccagcgctaaaccttgttgtagatga

SEQ ID NO: 96102 - DNA, 2841 bp, Zea mays
  Clone ID: MRT4577_1915C.1
atggtggtcaacgataaggagaaggagtccatcttcaacgaggcaagagatgacaagcccactgactctggctcgagtcacaagaagaaggacgggaagaagaagaggtgcatcaagaagatcgtctactacgacagggatgaatcttcttcttcaccaagagacgacgacgatgatgattctttgtcaaagagaaaaacggttaatcaaaattactcttttgactattctcgcatgtcgtacaattcgaatgcacatttactttctattccactaggaaaacctccacactttgatggagaggactactcattttggagtcataaaatgcgtagtcatctattttctctccatcctagcatttgggaaatagtaaaaaatggaatgcatttcgatagtacggataaccctgtgatgataaatgaactaattcataagaatgcacaagctaccactgttttgctagcatctttgtgtagggatgaatacaacaagttggtggaaggcgagctgggaaggtttgcgatgatcaggggagaggagccaacacaaacatacaataggctcaagaccctggttaacaagattagaagctatggaagcacaagatggacggaccacgacgtcgtccggataatgctcaggtcctttacagttattgatccccatcttgtgaatcttatccgtgaaaatctcaggtatacaaagatgacacacgaggagatactcggaaaatttgtaagtgggcgcatgatggttaaagaggcaaggtatgtagatgacgccttgaatggcccactacctgtctacgagctgcaacccgttgctctcaaggcaacaagcagcaaggaggcgctaccaagcaaggtagctcaagtggaggctgccaacctcaacgaagatgagatggcgcttatcataaagcgcttcaagaccgcacttaaaggacgaaaggagtaccccaacaagaacaaaacaaggggaaagcgctcctgcttcaaatgcgggacaagaaaagagcgggaagaaggagaaaagaagagctacaggaaggcaaagggtgaggcgcaccttagaaaggaatgggactcggactgctcctcttccgactccgatgacgaaggactcgctgcctcagccttcaacaagtcttctctcttccccaacgaacgccacacttgcctcatggccaaggagaagaagggtttagatagagctaaagtagataaaatcaatgaattaattgatgctttaaatgaaaaggatagattgttagaaaaacaagaggatatcttatatgaggagcatgataaatttgttagtgtgcaaaaatctcttgccttagggattaagagaaatgaaatgctatcttcggagttatctgcttgtcatgaaactatatctagtttaaagagtttaaatgatgaattaactactaagctagaaggagttaataaatctagttgttgtgaagagcatgttgttatttgcaatagatgcaaggactttgatgttaattcttgtgatgaacaccttatttctattgctaaactaaatgatgaggtggcaagtcttaatgctcaacttaagacttgcaaaattgattttgataaattaaaatttgctagggatgcctacactgttggtagacacccctcaattaaggatgagcttggttttcgaagggaagccaagaacttaacaagccatagggcttccgttctcaacaaggagaaaggaaaggcccctatggctagtagtcctcaaaggaaccatgcctttatctataatgaaaaagttgctagtcgttctcattataatagaaattatgctcatactacttataatgattcacatgctatgtttgcatcaagttctacttttgtgaattgtaggcctaggaaaaataatgttgtgtctcatgctcctagaaaaatgtgcaatgaaccttctaccatttaccatgcttgcaatacttcatttgttctcttatgtaagaatgcaaaagtagttgctaggaaattgggatccaaatgcaagggagacaagacttgcatatgggttccaaaggctattgtgactaaccttgtaggacccaacaagagttgggataaatcagaaacccaagggaccctaaagcgctttctaaggagggctcaaaacgaatttgagctcaaggtgaaaaagataagaagtgacaatgggtctgagttcaagaatctgcaagtggatgagtatcttaaggaggaaggcgtcaagcacgagttctccgctccctacacaccacaacaaaacggtgtggtagagaggaagaacaggacacttatcgacatggcgaggacgatgcttggagagttcaagacacctgagcggttttggtcggaagctgtgaacacaacctgccacgccataaaccggctatatctgcatcgcctcctcaagaagacctcctacaaacttcttaccggtaacaaacctaatgtgtcttactttcgtgtatttgggagcaaatgctacattttggtgaagaaaggtagacattctaaatttgctcccaaggcagtagaagggtttttactagggtatgactcaaatacaaaggcgtataaagtcttcaacaaatcatcgggtttggttgaagtctctagcgacgttgtatttgatgagactaatggctccccgagagagcaagttgatcttgatgacatagatgaagatgatgttccaacggccgcaatgcgcatgatggcgattggagatatgcgaccacaggaacaacaggagcaagatcagccttcttcctcaacaatggtgcatcccccaactcatgatgatggatag

SEQ ID NO: 96103 - DNA, 252 bp, Zea mays
  Clone ID: MRT4577_19160C.1
cgtagtccattcccagaattccatcttcctctagcgccggtcgctgctttccccaacctccatggcgtccctccttgctccactcgggtcctccttgatccggccatggggctcgcccagccgcgtgcacaggaccacgcgagtggatcctctgctcgccatggtcgcggccatcctgctcccttgccggcgtttctcccagcgtcgcgtcccccctcttctccttgctccagctcggctccttccccatct

SEQ ID NO: 96104 - DNA, 551 bp, Zea mays
  Clone ID: MRT4577_19161C.1
gccggcctttccgggatactagttactccactcatcttttctcgtgtacaagctatacaatttcgccccatccccagtcgaactagactctcaggcaacatgccctgccagtagagcccataccaagggtaataacgccgagcccgcatgcaaagcaggcatgcccacgaagatgccggcgacgcgatccgtcaatgaccttctgcaaatccctgatcaacgaagcggacgctaccttaaaaatgttcgagacctacagagcgtgaagactgtgagccaccgtctacctgcacgctcgtctctgagagaacctcaccgccgagggacttgagctgtcatctaaccacctgaaagtacatagtagaagaggggcattatctccgcgtcacgagttccatgagactgaaacgacaaggtagctcgataagctgttgatcgtgagtattattccgctcgattgcgtactccgaatactacacttcgtgctcctgtgctgataatggaagaagatcgagaccaccgaaggcatggtagtatccttgtccaccaag

SEQ ID NO: 96105 - DNA, 374 bp, Zea mays
  Clone ID: MRT4577_19162C.1
cagaaacaagccaacagcccaataggcaatagctagaggtctgttcgatgcgctgctggtgcagataaaagcccgagcgagagcgagagagagagagaagatcaagaagatgatgccggggagagatggtggaggtgcttatgcgaagctaactggctgcgcatgcggagccccgccagagcctatggaagacgctcgccccatatcgtttttctaggcctggactctatgacgtgcgtcatccagacagctctggttgtgctcatctgcacgcgcgagatggcgtgatccttgtggcggtgggacgatggcgcgggctacgagagggcagatctcgcgccgctggactgtcatcccaaggtagctatatggat

SEQ ID NO: 96106 - DNA, 714 bp, Zea mays
  Clone ID: MRT4577_19163C.1
cattgggtacctcgaggccggccgggagagtgaaatcaaagaatgtcatgtatcgcaaaaaatattgtcactgctaggtcacaagaaccatgcatgtagtgtcaaaggactctatacagagtatggagaaggactgctggagcatatatcgaagatgaagaggtcaacatgcaatccctatatgacacataccctctcccggaacctttgcatcgacgcaatactaagtgcagaactgtcaattgtagcgcaaccagtacaaccacaccatcagcaccttgtagttgcagcagatgcactgtgcaacgagataaccaaccaacacgcaactgatattgttcgaactagcccccgacacggctgtgctaggaggctgataataggcgaactgctggaggtacccaagaaaaaacatatgacgcactcacagctcaagaagattgaccgcggggctcatcgacacttccacgaccacataacagttataggagtgttacgtgactccggcctcgtaagtcatgtaagtacacaccgagggccaactctttccttgcgaggtggtggccgtagaggtggtctgcacagcaacacacttgcagctacgtgactataaaaagtctggtggactggaggttactgactgaaggtggctctctttccttgtgaccaatgcgttatatatgcacttgtaccagctaagatcattcatacccc

SEQ ID NO: 96107 - DNA, 460 bp, Zea mays
  Clone ID: MRT4577_19164C.1
aaaaaaacaaacggggggacctgcctttttttaaaaaaaaaaagggggggaaggtcccctgttaaaaagttggccccattggccgagcccccaaggttttgccccaagcccataaaaaaggtttttttttggggggggggtccatatgctttgctaaaacaaagggtttttgggccccccttattggggggcccttaaattcccccttcaggggcttgggaattataaaaaatgggccccccctggaaacccagggggcccccaatttttggaggaggggggcccctataagggggcccccccttccgggccaaaaaaaaaaaggggggggggggaaaaagccccccccaaaaaaaaatcctttgcccgggattgggggggggggccccaatggaaagccaatatttcccccgggaaaatttaaggcccatcctttgccccccctccttccggggggggg

SEQ ID NO: 96108 - DNA, 2766 bp, Zea mays
  Clone ID: MRT4577_19165C.1
atggccagagtgcgttctaccgccagggttgagcgtgaggggggcgaaactgaagcttcggagactgttcccatctccgaagccatgcaacgatccgggctagtaacttcggaaaagatccctagtgatgatgcagaacaagcagaacaagcaattgccgaagcagaagaagaagatattgaggaaactgatcccgaagatgattatcgcattgccatgccaagcaagcccagccacttggacttcggaaaatctactgtttcgaaggctgatctctccaagatggtaaagtcgggcttttttaatgaaaatcagaagaagctattacgcttcgggggagaagagactaccccaaagccggagaaggatgaaattgttatttttaaaagctttctaaaggctggattaagattccccctacatgggattattgcagaggtactgaagaggttcggtatctattttcatcagctgacccctaacgctattgttaggcttagtgtttatatctgggcactccgaagccaagcagtggagccatttgcggacagcttttgccgggttcacgagctgcattatcagacgaaggctagaaaagatggattgcatgacaattttggttgctataattttgcctatcggaaaaccacaaagtttcctgtaatcagctaccgaagcaaatgggcagcaggctggaagtcggagtggttctatgtcaaggttgatgacgacaaggagaagcttgtgcaaagtccactcgaactaatcttcggagaaacccgacctcgctgcaacatgacacccgaaggtccaacacaacaagcaatgaatgaattcagaattattgcagagcatatcagtacaagggacctggttcaggagtttttggctttcaaagtttttcccagtttgaaagaatgggaaatgccgaagctaaagggggagaagaaagaaggtgaacttgtgcgtttaccttactatttcaagtttaagaaatactttaaagcaccttgccaagagtggctggatacaattgaagcaatgtgtaatgaaatacttggcaactattccaaaaaagaagatcaattgatgaccgcggccttcggcacccgtccgaagcgaagactgaaccgagtgctggacgccttgggtttcgaataccctgactacgaaaatctgaacaaaggtgccggaggccagaaaaggaaaagggtaactgaagccttaaatgaaggtgaaaaagagccatcaaagaagaaaattccgaagaagaggaaagcgtcttctccgaagcaacaaatatccgacgcagaagaaacccccgcatcaccctctgccgctgtcgttgaggaaattctgaaggtaatgactgaatccttacctgcgaagctaagtccactggggcctcaactgacaaagttttttcagaaggacaaggagcccgagaaatcgaagaaaacaatcaaggcaaagaaacaaagaatcatcactgtgacagaggtaattgacaagacgccgccaagagcttcagcccagaaaacaccagcggctgcggagggggcagatattgaaattgcaccttcggaggccgcagctgccgaagctgcctcagctgaagatttgaacctggagagcacaattgaacacattgaccaaatactgctagacatggctgcagaagaagctgccaccgccgccgaagaggccgtgaccgcagcgtcggggaaaggaaaggaaattgctgatgaagcttcagaaaacgaagccttcatgttccagaatttagttggagaacaactgtcaaaagctgaaatagaagagcttagagagtatgccaaatcctgcggatacaaacctggggcactcctcttcggaggcgttgatgatgaaaaattagattgtattcgagatcaaactggagccaaagttatcggtactctgtccaagagtatcggtttcccgaagctagaaacagacatcagccgctaccgacgacaacatgtcgttggtagtttattttattccaacttcaagagtatgctgttgagcaaagccttgcaaatgcagcaagattttgaagacaagaagcacgaagttataattgaaaatttggaaagcagaataaaggagcaatcagatgctttcgagaaaaagaacttcgagctccaggcaaccgaaggtttattggcggaagctgaagcaaaaatatcagagctgaacacgaagcttctccgccagtctgagcagttcgaacgagaaaaacaagatcttaatgcaaaacttgaagccgaagctcaacaaaattcagatttgagaaaactactgacaagtcttcaagaaaaatgcttggaatttagcaacaaatgcattcaacgactaagaaagattttttactcagttggagccagcagtgaaaaattcaccccctcagctgaagatctaccgaaaaccttcgaacatattgagggggagattgacgagctcgacgaagtcatagctgggcatggtgacttctgtgcctgggtggcttctcgagggactgctgcagccttcctgaaggctggctgtgatcatgggaagattgtcaacaggccaaatttcactttgtcaccatcaatcctggatgacatccctgatctcgcccgaagcatctcgaatcgatttgtaaaaatgatatggacaaaaggtgggcgagagaaggctggagacgaagctcgtagccaccttgatccagatgacgaagccgaagccgatgatcaaaaatga

SEQ ID NO: 96109 - DNA, 2628 bp, Zea mays
  Clone ID: MRT4577_19166C.1
atggccagagtccgttctaccgccagggttgagcgtgagggggacgaaactgaagcttcggagactgttcctatctccgaagccatgcaacgatccgggctagtgacttcggaaaagattcctaatgatgatgcagaacaagcaatcgctgaagcagaggaagaagatattgaggaaactgatctcgaagatgattatcgcattgccatgccaagcaaacccagccacttggacttcgggaaatctactgtttcgaaggctgatctgtccaagatggtaaaatcgggcttttttactgaaaatcagaagaagctattgcgcttcgggggagaagagactaccccaaagccggagaaagatgaaattgttattttcaaaagctttctaaaggctggattaaggtttcccctacatgggattattgcagaggtactgaataggttcggtatctattttcaccagctgacccctaacgctatcgttagacttattgtttatatctgggcactccgaagccaagcagtggaaccatttgcggacagcttttgccgggttcacgaattgcattatcaaacaaaggctagaaaggatggattgcacgataattttggttgttataacttcgcctatcggaaaactacaaagtttcctgtaattagctaccgaagcaaatgggcagcaggctggaaatctgagtggttctatgtcaaggttgatgacgacaaggaaaagcttgtgcaaagcccgctggaactaatcttcggagaaacccgacctcgctgcaacatgacacccgaaggtccaacacaacaagcaatgagtgaattcagaattattgcagagcatatcagcacaagggacctggttcaagagtttttagctttcaaagtttttcccagtttgaaagaatgggaaatgccgaagctacagggggaaaagaaagaagatcaattgatgaccgcagccttcggcacccgtccgaagcgaaggctaaatcgagtgttggacgccttgggctttgattaccctgattatgaaaatctgaacaaaggtgctgggggccaaaaaagaaaaaggataactgaggccatgaatgaagaaaaagaaccattaaagaagaaaattccgaagaagaggaaagcttcttctccgaagcaacaaatatccgaagcagaagaaacccccgcatcaccttctgctgctgtcgttgaggaaattctgaaggtaatgactgaatccttacctgcgaagctaagtccactgggccctcaactgacaaagttttttcagaaggacaaggagcccgaaaaattgaagaaaacaatcaaggcaaagaaacaaagaattatcactgtaacagaggtaattgacaagacgccgccaagagctttagcccagaaaacaccagcggctgtagaggggacagatattgaaattgtaccttcagaggccgcagctgccgaagctgcctcagctgaagatttgaacctagagagcacaattgaacatattgaccaaatactgctagacatggctgcagaagaagctaccaccgccgccgaagaggccgtgaccgcagcgtcggggaaaggaaaagaaattgctgatgaagcttcagaaaacgaagccttcatgttccagaacttagttggagaacaactatcaaaagctgaaatagaagagcttagagagtatgccaaatcctgtggatacaaacctggggcactcctcttcggaggcgttgatgatgaaaaattagattgtattcgagatcaaacaggagccaaagttatcagtactctgtccaagagtatcggcttcccgaagctagaaacagacatcagccgctaccgacgacaacatgtcgttggtagtttattttattccaacttcaagagtatgctgttgagcaaagccttgcaaatgcagcaagattttgaagataagaagcacgaagttataattgaaaatttggaaagcagaataaaggaacaatcagatgctttcgagaaaaagaactttgagctccaggcaaccgaaggtttattggcggaagctgaagcaaaaataacagaactgaacacgaagcttcttcgccagtctgagcagttcgaacgagaaaaacaagatcttaatgcaaaacttgaagccgaagctcaacaaaattcagatttgagaacactattgacaagtcttcaagaaaaatgcttggaatttagcaacaaatgcattcaacgattaagaaagattttttactcagttggagccagcagtgaaaaattcaccccctcagccgaagatctaccgaaaaccttcgaacatattgagggggagattgatgagctcgacgaagtcatagctgggcatggtgacttctgtgcctgggtggcttctcgaggcactgctgcagctttcctgaaggctggctgcgatcatggaaagattgtcaataggccaaatttcactttatcaccatcaatcctggatgacattcctgatctcgcccgaagtatctcgaatagatttgtaaaaatgatatggacaaaaggtgggcgagaaaaggctggagacgaagctcgaagccaccttgaaccagatgacgaagccgaagccgatgatcaaaaatga

SEQ ID NO: 96110 - DNA, 957 bp, Zea mays
  unsure (1)..(957): unsure at all n locations
  Clone ID: MRT4577_19167C.1
gtttttaataatgaagacatgtctaacgaaggttgctttcgtgcagagtatgctgttgagcaaagctttaaaaatgcagcaagatctggaagacaagaaacacgaggttataattgaaaatttagaaagcaaaataaaagagcaatcagctactattgaaaagaagaacttcgagcttcaagcaactgaaggcttactggcggaagccgaagctaaaataacagaactgaacatgaagcttctctgccaatctgaacagtttgaacaagaaaagcaagaacttactgcaaaacttgaagccgaagtccaacaaaattcagatttgaaaagactattggcgggccttcaagacaaatgtttggaatttggcaacaaatgtattcaacgactgagaaaaattttccactcagttggagctagcagtgagaaattcacnccgtcagttgaagatttatcaaagaccttcgaacatattgaaggtgaaattgatgagcttgacgaagttatagccgggcacggtgacttctgcgcctgggtagcttctcggggcactgctgcagctttcctaaaagctggctgcgatcatggaaaaattgtcaataggcccaattttactctatccccatcaattctagatgacattcctgatctcgcccgaagcatttctaatagatttgtaaaaatgatatggacaaaaggcgggcgagaaaaggctggaaacgaagctcggagtcatcttgaaccagatgacgaagccgagaccgaagcttaaagagaatgacgccgaagctgaggccccatgaagatcaaataggactagactgtagacagactcaagaaacttttgagataacttttgtaaatatgactaaacttgttcttaatgaattctgttcataccttgtaatgtgctcttacccttccattaatgtatgagaggtgctttgattgtggacg

SEQ ID NO: 96111 - DNA, 349 bp, Zea mays
  Clone ID: MRT4577_19168C.1
cttcacaaaagaggcaaacaaagtcttttttaaacaaacaataaaccaggacccggaagtctggaaaacagggacacatggacactaatccaacaacaagcaggcccatcgctaataacaaggcaaaagaaaaaaggggccacgaaaaaaaaaacagggggcccacccagcacggaggacaaaaaaagggggggcaaaaaaaggagaaggggggggaaaaatccccaaacgggggcgcaaccaacaactcccggacctaaaaaaaccttgggcagccataatggcctaacccaaaaccaacgggaggtcaccgggccccatctttaaggggggggaccccggggggagg

SEQ ID NO: 96112 - DNA, 2529 bp, Zea mays
  Clone ID: MRT4577_19169C.1
atggccagagtccgctctaccgccagggttgaacgtgagggggacgaaacggaagcttcggagactcttcccatctccgaagccatgcaacgatcgggtctagtgacttcagaaaagatccctcatgatgatgcaaaacaagcagaacaagcaatcgctgaagcagaggaagaagatattgaggaaactgattccgaagatgattaccacattgccatgccaagcaagccgagccacttggacttcgggaaatctactgtttcgaaggctgatttgtccaagatgaagaagttgttgcgcttcggtggagaagagactaccccgaagccagagaaggatgagattgttatttttaaaagttttctaaaggctggattaaggttccccctacatgggattattggagaggtactgaagaggttcggtatctattttcatcagctgacccctaacgctatcgttaggcttattgtttatatctgggcactccgaagccaagcagtggaaccatttgcagacagcttctgccgggttcacgagctacattatcaaacaaaggctagaaaagatggattacacgataattttggttgctataactttgcctatcggaaaactacaaagttccctgtaattagctaccgaagcaagtgggcagcaggctggaaatcagagtggttctatgtcaaggttgataacgacaaggaaaagcttgtacaaagcccgctggaattaatcttcggagaaacccgacctcactgcaatatgacacccgaaggtccaacacaacaagcaatgagtgaattcagaattattgcagagcatatcagcacaagggacctggttcaagagtttttagcattcaaagtttttcccagtttgagagaatgggaaatgccgaagctacagggggaaaagaaagaaggtgaactcgtacgtttaccttactatttcaagtttaagaagtactttaaagcaccttgccaagagtggctagatacgattgaagcaatgtgcaatgaaatacttggcaattattccaaaaaagaagatcaattgatgaccgcagccttcggcactcgtccgaaacgaaggctaaatcgagtgttggacgccttgggtttcgaatacccagactacgaaaatctgaacaaaggtgccggaggccaaaaaagaaaaagggtaactgaagccttagatgaaggtgaaaaagagccagtaacgaagaaaattccgaagaaaaggaaaacttcttctccgaagcaacaaatatccgaagcagaagaaactcccgcatcaccttctgctgctgttgttgaggaaattctgaaggtaatgactgaatccttacctgcgaagctaagtccactgggtcctaaactgacaaagttttttcagaaggacaaagagcccgagaaatcaaagaaaacaatcaaggcaaggaaacaaagaatcattaccgtgacagaggtaattgacaaaacgccgccaagaacttcggtccaaaaaacacgagcagctttagaaggggcagatattgaaattgcaccttcggaggccgcagccgccgaagttacctcagctgaagatttgaatttcgagagcacaattgaacatattgaccaaatgctgctagacatggctgcagaagaagctgccactgctgccgaagagactgtgaccgcagcgtcaaagaaaggaaaagaaattgctgatgaagcttcagaaaacgaagtcttcgcgttccaaaacttagttggagaacatctaacaaaagctgaaatagaagagcttaaagatatgttattgagcaaagccttgcaaatgcagcaagatcttgaagataaaaagcatgaaattataatcggaaatttggaaaacaaaataaaggagcaatcagatgcttttgagaaaaagaactttgagctccaggcagccgaaggtttactggcggaagctgaagcaaaaatatcagaactgaacacgaagcttctccgccagtctgagcagttcgaactagaaaaacaagatctcaatgcaaaacttgaagccgaagctcagcaaaattcggatttgagaaaactactgacaaatcttcaagaaagatgcctggaatttagcaacaagtgcattcaacgactaagaaagatttttcactcagttggagccagcagcgaaaaatttaccccctcagctgaagatctaccaaaaaccttcgaacatattgagggggagattgacgagctcgacgaagtcatagctgggcatggcgacttctgtgcctgggtggcttctcgaggaactgctgcagccttcatgaaggctggctgtgatcatgggaaaattgtcaataggccaaattttactttgtcaccatcaatcctggatgacatccctgatctcgcccgaagcatctcgaatcgatttgtaaaaatgatatggacaaaaggtggtcgagagaaagctggagacgaagctcgtagccaccttgatccagatgacgaagccgaagctgatgatcaaaaataa

SEQ ID NO: 96113 - DNA, 335 bp, Zea mays
  Clone ID: MRT4577_1916C.1
cggacgcgtgggctaggaagctacatgaaaattgatttaaagctccagcaaattgagcagtgtggatgttgcatttctcagttcattttttcccagttttcaacaaagtatagatgacagccatatcccctcgcggcatatgccttttcattattccaataaagctagcggctggttcgatgagcacgatttgtgatcgagtatcccgtttaataagtacggtgtttgctttttttcaaaaaaaaaaaaaaaaaaaaaaaaaaaaaaaaaaaaaaaaaaaaaaaaaaaaaaaataaataaaaaataaataaataaattaaaaaataaaaataatg

SEQ ID NO: 96114 - DNA, 186 bp, Zea mays
  unsure (1)..(186): unsure at all n locations
  Clone ID: MRT4577_19170C.1
aaaaacgggccgaccgacgcgtccgcatagacnatcnanctctttcatatatggctttatcctcttacttcattaaaaggatcacagcaaatattctcacatatcaatccactctccatcacgtctgtggggcgactcacattaagtattcttttctagctttttcaactcttgatatagaccacc

SEQ ID NO: 96115 - DNA, 3327 bp, Zea mays
  Clone ID: MRT4577_19171C.1
atggccagagtgcgttctaccgccagggttgaacgtgagggggatgaaactgaggcttcggaaactgtccccatctccgaagctatgcaacgatccgggctagtgacttcggaaaaaattcctagtgatgacgcagaacaagcaatcactgaggcagaggaagaagatattgaggaaactgatcccgaagatgattaccgcattgctatgccaagcaaacccagccatttggacttcgggaaatctactgtttcaaaggttgatctgtccaagatggtaaaatcgggcttttttactgaaaatcagaagaagctattgcgcttcgggggagaagagactaccccaaagccggagaaagatgaaattgttattttcaaaagctttctaaaggctggattaaggttccccctacatgggattattgcagaggtactgaataagttcggtatctattttcaccagctgacccctaacgctatcgttagacttattgtttatatctgggcactccgaagccaagcagtggaaccatttgcggatagcttttgccgggttcacgagttgcattatcaaacgaaggctagaaaggatggattgcacgacaactttggttgttataacttcgcctatcggaaaactacaaagtttcctgtaatcagctaccgaagcaaatgggcagcaggctggaaatctgagtggttctatgtcaaagttgatgacgacaaggaaaagcttgtgcaaagcccgctggaactaatcttcggagaaacccgacctcgctgcaacatgacacccgaaggcccaacacaacaagcaataagtgaattcagaattattgcagagcatatcagcacaagggacctggttcaagagtttttagcattcaaagtttttcccagtttgaaaaagtgggaaatgccgaagctacagggggaaaagaaagaaggtgaacttgtacgtttaccttactatttcaaatttaaaaagtactttaaagcaccttgccaagagtggctagattcaattgaagtaatgtgcaatgaaatacttggcaattattccaaaaaagaagatcaattgatgatcgctgccttcggcacccgtccgaagcgaaggctaaatcgagtgttggacgctttgggttttgattaccctgattatgaaaatctgaacaagggtgccgggggccaaaaaagaaaaaggataactgaggccaaaaatgaggaaaaagaatcattaaagaagaaaatcccgaagaagaggaaagcttcttctccgaagcaacaaatatccgaagcagaagaaacccccgcatcaccttctgctgctgtcgttgaggaaattctgaaggtaatgactgaatccttacctgcgaagctaagtccactgggccctcaactgacaaagttttttcagaaggacaaggagcccgaaaaatcgaagaaaacaatcaaggcaaagaaacaaagaattatcaccgtgacagaggtgattgacaagacgccgccaagagcttcagcccagaaaataccagcggctgcagaggggacagatattgaaattgcaccttcagaggccacagctgccgaagctgcctcagctgagggtttgaacctggagagcacaattgaacacattgaccaaatactgctagacatggctgcagaagaagctgccaccgccgccgaagaggccgtgaccgcagcgtcggggaaaggaaaagaaattgctgatgaagcttcggaagacgaagttttcatgttccagaatttagttggagaaaaactgtcaaaagctgaaagagaagaacttagagaatatgcaaaatcctgcggatacaaacctggggcactcctcttcggaggcattgatgatgaaaaactagattgcattcgagatcagacgggcgcaaaaattatcggtactctgtcaaagagtatcggcttcccgaagctagaaacagacatcagccgctaccgacgacaacatgtcgttggtagtttattttattccaacttcaagagtatgctgttgagcaaagccttgcaaatgcagcaagattttgaagataaaaagcacgaagttataattgaaaatttggaaaacagaataaaggagcaatcggatgttattgagaaaaagaactttgagctccaggcagccgaaggttcattggcggaagctgaagcaaaaataacagaactgaacacgaagcttctccgccagtctgagcagtttgagcgagaaaggctagagcttaatacaaaacttgaagccgaagctcaacaaaattcagaattgagaaaactattgacaagtcttcaagaaaaatgcttggaatttagcaacaaatgcattcaacgattaagaaagattttttactcagttggagctagtagtgaaaaattcaccccctcaactgaagatctaccgaaaaccttcgaacatattgagggggagattgacgagctcgacgaagtcatagctgggcatggtgacttctgtgcctgggtggcttctcgaggcactgctgcagctttcctgaaggctggctgcgatcatggaagaattgtcaataggccaaatttcactttatcaccatcagtcctggatgacattcctgatctcgcccgaagtatctcgaatagatttataaaaatgatatggacaaaaggtggacgagaaaaggctggagacgaagctcgtagccaccttgaaccagtaagaaaccatacctttgtgcttacctttttgtgtgagcttgattttgacttacaacaaccttaaaagaaacttatgtttacaacttttaccttctcctttaaaatttgtacctttcttactctggtatttggtataaacaggatgacgaagctgaagattgacaatgctgaagcttggcaaaactgaagacgaagccttagctaaagcttaaagttgtttataatgtgctttcctgcaaaaactcttggagaaactcttgtaatatagatatggaatatcttatgtaaatttgtacataccttgtaatatatcatgtctcccttatccgtattcaatctgctttgctgtggacgaaacttctcttttgagccgaaggcaaaaacaccttcccttcttttcatacacaacgaagcatagaaaattttttccttcgaatcttttcctttttttctaaagcacctgtctctttttgtgtagcatgatgatgattatatatatgtctaaatggatgtttatgaatgcaaatgacatgatgatatgttatgtgaaaatgaatattaggacacatattcaaaaaaccataagcacggcccttcgtctcct

SEQ ID NO: 96116 - DNA, 2742 bp, Zea mays
  Clone ID: MRT4577_19172C.1
atggctagagtgcgctctaccgctagggttgagcgtgaaggaggcgaagctgaaggatcggagactgttcccatctccgaagcgatgcaacgatccggactagtaatcccggaagaaatccccactgctgaaacagaacaggcaactgccgaagcggaagaaggagacattgaggaaactgattccgaagatgattatcatattgccatgcccagtaagcccagccacttggactttggaaagtcgactgtctctaaggctgatctctccaagatggtgaagtcgggctatttcagtgagagtcagaagaagctacttcgcttcgggggggaagaaactactccgaagccggagaaggatgaaatagtcattttcaagagctttctaaaggctgggttgagattcccccttcatgggattattgcagatgtattgaagaagtttgggatctactttcatcagctgactcctaacgctatcgttaggcttagtgtttatatctgggccctccgaagccaaatggtggaaccgtttgccgacagcttttgtcgagttcatgagctgcactaccagacgaaggctagaaaagatggattgcatgataactttggttgctataattttgcttatcggaaaaccacaaaatttcctgtaatcagctaccgaagcaaatggccggcaggctggaagtcggaatggttttatgtgaaagttgacgaagacaaagagaagctggtacaaagccctcttgaattgatcttcggagaaacaagaccgcgatgccaaatgtcattagaaggtcccacttgggctgcactgggtgaatttaaaattatttcagagcatatcggcacaagagacctggttcaagagttcttggccttcagggtttttcctactttaaaagaatgggaaatgccgaagctagagggggagaagaaagaaggggaacttgtgcggttaccttactattacaaatttaagaaatactttaaaacaccttgccaagagtggctggacacaattgaaataatatgcaatgaaatactcggtaattactccaaaaaagaagatccgttgatgactgcggccttcggtacccgtccgaagcgaagactgaatcgagtgctgaacgccttgggttttgaataccctgattacgaacaactgaataaaggtgtcgaaggccggaaaaggaaaagggtagccgaagctttaaatgaagatgagaaagaaccaccaaaagagaagaaaattccgaagaagagaaaagtatcatctccgaagcgaaaagtatccgacgaagaagagactcccgcatcacgctctgccactgacgtggaagagattttgaaggtaatgactgaatccctgcctgtgaagctaagtccattagggcctcaactgacgaagttttttcagaaggaaaaggagcccgaaaaaatgaaggaaacaactaaaacaaagaaacaaagaatcatcgcagtgacagaagtcattgacaagacaccaccgagagcctcagctcggaaggtaccagcggttgaggaaataacaaatattgaagtcgcaccttcggagatcgcggctaccgaagctacctcaaccgaagatttgaacttggaaaccacaatcgaacatatcgacaaaatactgacagaagaagttacgactgccgccgaggagaccatggccgcagtgtctgggaaagaaaaggaaatctctgacgaaacttcagaggacgaagccttcatgtttcaaaatttagttggacaagaactgtcaaaaaccgaaatagaagagcacaaagaatatgccaaatcttgcggatataaaccaggagcactcctcttcgggggtattgacgatgaaaaattagactgtatccgggatcaaactggagctaagattatcggtactctatcaaagagcatcggttttccgaagctagaaacggatattagccgctaccgacgacaacatatcgttggtagtttattttattccaatttcaagagtatgctgttgagtaaagctttgaaaatgcagcaggatctggaagacaaaaaacacgaggttataattgaaaatttagagagcaaattaaaagagcaatcagctaccattgaaaagaaaaacttcgagcttcagacaactgagggcttattggcagaagccgaagctaaaatagcagaattgaatacgaagcttctctgccaatctgaacagtttgaacaagaaaagcaaaaacttaatgtgaaacttgaagccgaagtccaccaaaattcagatttgaaaaaattattggcaagccttcaagacaaatgtttggagtttagcaataattgtattcaacgactgagaaaaatcttccactcagtcggggctagcagtgggaagttcaccccgtcaactaaagatttaccaaagaccttcgaacatattgagggtgaaattgatgagcttgacgaagttatagccgggcacggtgacttctgtgcctgggtagcttctcggggcactgctgcagcttttctgaaagctggctgcgaccatggaaaaattgttaataggcccaatttcactctatcaccatcaattttagatgatattcctgacctcgcccgaagcatctctaatagatttgtaaagatgatatggacaaaaggcgggcgagaaaaggctggagacgaagctcggagtcatcttgaaccagatgacgaagccgagaccgatgcttag

SEQ ID NO: 96117 - DNA, 450 bp, Zea mays
  Clone ID: MRT4577_19173C.1
gggggcccggaaacttggggataaaaaacggaaaacggggcttgggggggagttttccttttaagggtcgggggcgccggggggggacatttttttttattaaaactggttaccaaggccccgctggaaatttaaaaggggccaggggggggggcctaacccataaaaaggacggcccatcctgccatccataaggattaagggaagggggccccggttttggggggtttcgaggggatcccgggggattttttccaggggggggaacggaagccccaggggggggggtttttgggaccccaccttttgtttaaccaacccaggggggggggccagggggaactggggccctttgtagccgggggaaagctcgggaattttggggggaaaacccttccaggggcaaaggggggggacccacaggggcctccccgacgcggaggggttttt

SEQ ID NO: 96118 - DNA, 253 bp, Zea mays
  Clone ID: MRT4577_19174C.1
acgcccaggcgtccgcccacgcgtccttccacttgtccgcccacgcgtcctccgtcctgtaacgaattcttatgtagtagggctttcctgctttgttaaagaataaacaatgaggtttcagttttggtggcgcaaaaaaaaaaaactaaaaaaaaataataaaaaaaaaaaccaaaaaaaagcaaaacttaccatatattaaaaaaaaaaactaaaaaatttaaaaaaaaaaacggggcgccgttttaaataa

SEQ ID NO: 96119 - DNA, 1280 bp, Zea mays
  Clone ID: MRT4577_19175C.1
tggcggttcctttcgccaaacgccggtcgatgacactattgaagggccggccgggatgaagggaagcggatccgctcaggtcctaccgtccgacccggctccctcggtccctccctcggtccctcccggtctcgcagttcctccccgtcgtcttccaccgcaaatcgccgaagcaagcaggcgagctcgggaccagatccactgcgggcagctggagcggaagggccatggggacgccgccgcctttccaggagtccggccactgcgacgtctgccgctgcaccttcaacaccttccgccgccgtcatcactgccgcagctgcggacggacgctctgtcacgagcattcttcgtactacatggctctcccgcagtatgggatatatacagacgtcagagtctgctacggttgcttcaacaaatcctccagccaaggacacgctgataatccggtgtcagctggtagcatttctggagcagctgactctttttcagggctgagtttgggtaaggaggatgattcgtcgcctatgaagaattcaacggttcagagcacggcagcccttattgagtgcaaatgtgggatgcctttgtgtatatgtgaagcaccaaaaccagaaccttctcctacacctgtaaagaatatcaacaccgttcccccaaccacacagtcaaatccaaggccaaagaagcctgctaacactcaacagaaggcttcagctacttccagtagcaactcaagcccattcttaaatattggattaatgaacaacgatagcaatgataagggcattgttgactatgaagttagtggggagggactgagaggattcatttagccagtgtatgccatctagaaacgttgacatgccagtcagggctcacgtaactactataatatatattcagcttcatcctacattcctactcatgtactctgtagccggtgaatacttgcaaacatttaccacgtacaataggaaattctactagggtgaactgtgctcgtgctagtttctgctgagttcctcctattccagtttgtgtcaaatgtggtgtcaagaataaaatagttaagtcagctgaaagcttcttgctggtgggacagtgtttggtccgccagtgtataccatctagaaacgttgaatgccagtcacggctcacgcgtgtgaaataatatatattcagcttcatcctacattcctactcatgtactctgtagccggtgaatacttccaaacatttaccacgtacaatatgtttttcttttaaaaaaaaaa

SEQ ID NO: 96120 - DNA, 675 bp, Zea mays
  Clone ID: MRT4577_19176C.1
ctcgaggccggccgagaaacgtccgccatctcacctgcgctctgtacggactattgatcttccattgctgctactgctatttcttcgatatgcgcgaccaaggtcaccatctcgagcaggaggagctctccttttgttccaccccgtaccgatgagcctcccaagatctactgtatgcagctttctactactactcatgctccggccaggacgaagctctgaaacttcctgagaaagctgaacatcgcaagaaaagcaaggcagatgttcatcctccacctcatcttccacgagctgcttaaccaacatctgcaactactcgatgttgctgcacgaccagaccaggttccagtaccacaacatgtacaaccctaaccacgactccaccctgaaagtcgacgtgatagacatggacaaggacatcgtctcaaagctgcgcgcgaggtccccctgctgtcccaacatcctcaccatcaccgtccactacagagtgtgcatcatggacgacacgaactgggaccacaactgccgcgatcaagttactcgcatcgacgtaccagcattgtgaggcgcccacaacaacatcctcacgaccacgttcaaggctcccaacctcacgctgttcatgtgacgggactcgactttctcagaaggatgtggcacctgtctctggtg

SEQ ID NO: 96121 - DNA, 430 bp, Zea mays
  Clone ID: MRT4577_19177C.1
ttttttttttttttttttttttttttttttttttttttttttttttttttttttttttttttttttttttttttttttttttttttttccaggaaagggccaaataaaagggggctatcagccaaaaaaccaatggcccaaaaggcaaaaaaacccccggtttggccctttggccccaaaaaaaataggcttatttttaacaggggcaaggccccccgacaaaaggcttaagaaagttcttaaacaaatgttcggcaccccattttcctttgtttgcagaaaatcttgcccccaagggccattgcccagtttaaaaaccaaaccctgttaaaacggggcaaaaacatcgccgccatcaggaagtttcaaacccccaccaaaccagggggccttttaaaaaaaaagttttttttgtctttgcccccttaac

SEQ ID NO: 96122 - DNA, 1700 bp, Zea mays
  Clone ID: MRT4577_19178C.1
gatccgattacctcctaccgtccgacccggctccctcggtccctccctcggtccctcccggtctcgcagttcctccccgtcgtcttccaccgcaaatcgccgaagcaagcaggcgagctcgggaccagatccactgcgggcagctggagcggaagggccatggggacgccgccgcctttccaggagtccggccactgcgacgtctgccgctgcaccttcaacaccttccgccgccgtgtacgggttcccttctctccgcatattatacatctctgatccatggaccgatctcgctcgttctggtgtgaattcctcccctatctcgtctcacgtctctaatcggagcatgcgtgtatgggctccagctgattccagccttccagctgtggagaactgaaataccgtaactgactttttccttcctccccccgccaataataacagcatcactgccgcagctgcggacggacgctctgtcacgagcattcttcgtactacatggctctcccgcagtatgggatatatacagacgtcagagtctgctacggttgcttcaacaaatcctccagccaaggacacgctgataatccggtgtcagctggtagcatttctggagcagctgactctttttcagggctgagtttgggtaaggaggatgattcgtcgcctatgaagaattcaacggttcagagcacggcagcccttattgagtgcaaatgtgggatccggttgtgtatatgtgaagcaccaaaaccagaaccttctcctacacctgtaaagaatatcaacaccgttcccccaaccacacagtcaaatccaaggccaaagaagcctgctaacactcaacagaaggcttcagctacttccagtagcaactcaagcccattcttaaatattggattaatgaacaacgatagcaatgataagggcattgttgactatgaagttagtggggagggactgagagaagcaattaaaggcggggatgttaagggtgtaaagaaacttcttacacagggagtggattctaactactgcgacaaacaaggatttactttgctgcatttggctgctttgtttaaccaaactgaaattgctcttattctcatggaccatggggcaaatgttgaaagcaaaaatgggcaaggggaaactcctttggactgtgctccggcaatgctgcaatacaaaatgcgccaacgggtggaagaactcgcggcttcggcttcgaagggaccactagggtgaactgtgctcgtgctagtttctgctgagttcctcctattccagtttgtgtcaaatgtggtgtcaagaataaaatagttaagtcagctgaaagcttcttgctggtgggacagtgtttggtccgccagtgtataccatctagaaacgttgaatgccagtcacggctcacgcgtgtgaaataatatatattcagcttcatcctacattcctactcatgtactctgtagccggtgaatacttccaaacatttaccacgtacaatatgttttcttttactgaaaaaaaaaagggcggccgccaccgcggtggaaagatttgccccatggtttgtggggataagagcaatttcagtttggttaaacaaagcagccaccgggccgaaaccagagctgatgtaagcgtgcttgagcagtttgcgcacgtcgatagcgacacctgaatgggactaactggcc

SEQ ID NO: 96123 - DNA, 462 bp, Zea mays
  Clone ID: MRT4577_19179C.1
aatgaaaccggggtttaaaaagaaaaaaccaatggcccactggttccagaataaacccaaaggggtttggaaaaagggaaaaaaaatttaaccccattttaataaaacacgaccggccaaatcttaagaaggtcttgatggttggcgggcaaaaaatttgaattgaatttggtggatggcttaggaaattacaaaggggaatggccgcttagttggttttgcttgagaacggccccttggttggtttttttaacaaaagggccttggcccgggggggccccgtcttccccaaagttgagggaagaaccaaaggcgtctttaacttcttgggtgggaaggggaaacttgttgttaacattgaatttaacaaggaaccccggcccttcgggaaaaaaagggccaataccgtcttcggccgggttcgcaagcccttttggaccgggagggccgggcccaaaggga

SEQ ID NO: 96124 - DNA, 4374 bp, Zea mays
  Clone ID: MRT4577_1917C.1
atggatcctaagggcaaggggatggtggtcaacgataaggagaaggagtccttcatcaacgagcctaaagatgacaagcctaccgactcgggctcgggccagaaacgaaaagatgggaagaagaagaagacaaggcgcatcaaggaaatcgtctactacgacgacagcgacgagtcctcttcttcccaaaaggacgacgacaccgactacgagaagaagaagacggttaattcaaacttatcttttgattattctcgtattcctcaaagtaccaatgctcatttactctccattccacttggtaaacctcctcattttgatggagaggactacagattttggagtcacaaaatgcgtagtcacttgttctctctccatcctagtatatgggagatagtagagagtggaatgaaatttgatagctcggatagtccgttgtttatcaatgaacagattcataaaaatgcacaagctaatactgtgttgttagcctcattgtgcagggacgagtaccataaggtgagcggcttggacaatgccaagcagatctgggacaccctcaagatctcacatgaggggaacgacgtcaccatgctcaccaagatggagttggtggaaggcgaactcaggagattcgtgatgataagaggggaggagccaacccagacgtataacaggcttaagaccctcattaacaagataaggagctatggaagcacgcgatggacggaccacgacgtcgtccgcctaatgctaaggtcctttaccgtccttgatccacatcttgtgaacaatattcgtgagaatcctaggtacacgaagatgacgcccgaggagatccttggaaagttcgtaagcgggcggatgatgatcaaggaggctagatacgtcgacgatgcattaaatggcccaatccaagagcctcaaactattgctctcaaggaaacaaggagcaaggaggtgctatctagcaaggtggcgcaagttgaggcggtcgggcttaatgatgaagagatggccctcatcatcaagcgcttcaaaacggcgctaaagggtcgcaaggagcactccaacaagaacaagacgaagggaaagcgctcctgcttcaaatgtggactcaccgccaccgccttcaacaagtcatccctcttccccaacgagcatcacacttgcctcatggcaagggaaaagaagggcctagatagaaccaaggttgataaaattaatgaattaactaatgccttgaatgataagaataggttattagaaaagcaagaggatcttttgtatgaagagcatgataaatttgttagtgcacaaaattctcttgctttagaagttaaaaggaatgaaatgctttcttgtgaactatctacttgtcatgaaaccatttctactttaaaaggtgttaatgatgatttaaatgctaaactagaagtagcaaataaatctaactcttgtgtagaacatgttatgatttgcaataggtgcaaagattttaatgttgatgcttgtagtgaacacctagcttgcatttctaaattaaatgatgaagtggctagtcttaatgcccaacttatgactagcaagagtgaatttgacaaactaaaatttgcaagggatgcctacacgattggtagacacccctcaattaaagatggtcttggcttcaagagggaagtcaagaacttaacaagccataaggcttccatctccgtcaaggagaaagtgaaggcccctatggctagtagtgctcaaaagaaccatgccttcatgtatcatgataggagacattctagaaatgtttataaaagttatgatgcttttgattctcatgccatggttgcttctagttcttctattgtgcatgatagaaattttgctaggagaaatattattaatcacatgcctagaagaaatgttgttcatgtgcctaggaaaacaaatagtgaaccttctacaatttatcatgccttaaatgcttcctttgctatttgtagaaaggataggaagatagttgctagaaaattaggggcaaatgcaagggagataaaacttgcatttgggtccctaaggctatttgtttatgcatccgggggctctagctggattatcgacagcggatgcacaaaccacatgacgggggaaaagaggatgttctcttcctacgtcaagaacaaggatccccaagattcaatcatattcggtgatgggaaccaaggcaaggttaaaagcttaggcaagattgcaatctcaaatgagcactctatttctaatgtattcttagttgagtcatttggatataatttgttatccgataaatctgaaacccaagggaccctcaagcgcttcctaaggagagctcaaaacgagtttgagctcaaggtgaagaagataagaagcgacaatgggtccgagttcaagaaccttcaagtggaggagtatcttgaggaggaaggaatcaagcacgagttctccgctccctacacaccacaacaaaatggtgtggtagagaggaagaacaggacgctactagacatggcgaggacgatgcttggtgaattcaagacgcccaaacggttttggacggaagtcgtgagcacggcttgccacgccatcaaccgggtctaccttcatcgcctcctcaagaagacttcgtatgagctactaaccgtgaagaaaggtaggaattccaaatttgctcccaaagcggtagaagggtttttgttaggttatgactcaaatacaaaggcgtatagggtcttcaacaaatcatcgggtttggttgaagtctctagcgacattgtatttgatgagactaatggctctccaagagagcaagttgttgatcttgatgatgtagatgaagaagacgttccaacggctgcaatgcgcaccatggcgattggagatgtgaggccaatggaacaaaaggagcaagatcaaccttcttcctcaacaatggtgcatcctccaactcaagacgatgaacaggttcatcaagaggaagcgcatgatcaagggggagcacaagatgttcatgtgatagaggaagaagcacaaccggcacctccaactcaagtccgagcgatgattcaaagggattatcccgtcgaccagattttgggtgacattagcaagggagtaactactcggtctcgattagttaatttttgtgagcattactcctttgtctcttctattgagcctttcagggtagaagaggccttgctagatccggactgggtgttggccatgcaagaggagctcaacaacttcaagaaaaatgaagtttggacactggtacctcgtcccaagcaaaatgttgtgggaaccaagtgggtgttccgcaacaaacaagacgagcacggggtggtgacaaggaacaaggctagacttgtggcaaaaggttatgcccaagtcgcaggtttggactttgaggagacatttgctcctgtggctaggctagagtcaattcgcatattgttagcctatgctgctcaccattctttcaggttgttccaaatggatgtgaagagcgctttcctcaacgggccaattaaggaggaggtgtacgtggagcaaccccctagcttcgaggatgaacggtaccccaaccacgtgtgtaagctctctaaggcgctctatggacttaagcaagacccaagagcatggtatgaatgccttagagactttttaattgctaatgctttcaaggttgggaaagctgatccaactctttttactaagacatgtgatgttagaagggtgatgactcaaaaatttgagatgtcgatgatgcgcgagttaagctatttccttgggttccaagtgaagaaactcaaggatgggaccttcatatcccaaacaaagtacacgcaagacttgatcaagcggtttgggatgaaggacgccaagcccgcaaagactccaatgggaaccgacggacacaccgacctcaacaaaggagactccgactatgctggatgtaaggtttataggaagagtacatcagggacgtgccaattcttaggaaggtccctggtgtcatggagttctaagaaacaaacttctgttgccctatccaccactgaggccgaggactttggctacaatctgagcaaagtcccactcctatgtgataatgagagtgctatccgcatggcggataatcctgttgaacacagccgcacaaagcacattgacatccggcatcactttttgagagaccaccaacaaaagggagatatcgaagtgtttcatgttagcaccgagaaccagcttgccgatatctttaccaagcctctagatgagaagaccttttgcaggctacgtagtgagctaaatgtcttagattcgcggaacctggattga

SEQ ID NO: 96125 - DNA, 1009 bp, Zea mays
  Clone ID: MRT4577_19180C.1
gtgtagcaaagattcgataccttctgcccgaatggttttgattaaaagttactctgaaacagaaggttttaaattttatacaaattttaatagtcgaaaaggaaaagagctagaagaaaatccgaatgccgcaatgttatttttttgggacgaacttaaacgacaaattcgaatagaaggcaaagttataaagcttagtgaagaagagtcaagcgtttattttaaatctagaccgattaaaagtcagattgcagctgtgtgcagtaaccaatcgaaaccgattgaatcaagagacaatttggaagaacaatttaatcaagttgaagctagctttcaagacgatccggacaatggtttaaaaaagccaccaaattggggtgggttcacattaattccgaataattttgaattttggaaaggacagagcactcgattgcacgatcgtattgtgttttcaaaacaaaccgacctaaactcgttaccaaaaggtgtgatgttcaaacaagcgtataaagattggattatgtatcgtttacaaccttaatcaatacttattgaaatataattaaaaagtgaacaaacatttatcaaacaaatagttagtttccgtagtattttggataattgatttggttcatttgttttaaaataaagtttgaatgttggaaagaaaaagcatagatggttaaggttatatttatatatgtacataaaaactgaacaagtttacatagctcaaaacgagaacacaaaaggataatgttaattcaaaaagttacaattgttcttttacaatcactcgagcttgaattgtaagctcacttccggttggcccagatttatactcaatttgtttaaaccagagcttatgacaaagttctttgtcattttacttttcactctcttatcacttaattttgattattgttaaaagtctgtaacccttttaattttttgttttatttttacatgcatatattttaaattgttttatgtttcaatattaatg

SEQ ID NO: 96126 - DNA, 473 bp, Zea mays
  unsure (1)..(473): unsure at all n locations
  Clone ID: MRT4577_19181C.1
tgtgctggcnaattcggctctctttcgaggctggcctgcctcggggcagggtataaaaataaaaaaaaaaaaaaagaaaaagaaaaaaaaaaaaaaaaaaaaaaaaaaaaaaaaaaaaaaaaatagaaagatattatggttggggccttgttcgggaccatttttggggaaaaattttgaaaatataagtgtttttttttgggcgggggccccttttgggggggtttttatttttttctttccccgggggggggccttggcttttcttttgggggccccatttccccttttgggggggttttttaaattcccggggggtggtttttcccccttttcccttgggaaaccttggggttttcccattttaggccgctttcgaacctcctttttttcggggggggggtttaaagggaaaggggcccccccttgattttttccataaggtgggggggttttgggggttatgggccccc

SEQ ID NO: 96127 - DNA, 233 bp, Zea mays
  unsure (1)..(233): unsure at all n locations
  Clone ID: MRT4577_19182C.1
gggagctacgggcgaggcgcgctggcccccgggctggtgtacgacgccaggggaggacgactacctccgcttgctctgcacctgacggctccaatgcgtccactgctgangcgagtcgcctccaccctccccagcaggtttcagctgcgcgcctaacgtaagcaaggacctcatctccgacatcgactacgcgtcgatcnccgtgacggggctcctcggcaataaatcggctg

SEQ ID NO: 96128 - DNA, 436 bp, Zea mays
  unsure (1)..(436): unsure at all n locations
  Clone ID: MRT4577_19183C.1
ccatggggccgcgctttgaaaattcaacttataccccattttccgagtagcaaattatggctggaaggggggggggggggggaataaaacaaggggggacacgttcgtttaagagactgggggaggcaagcacatttgcagacgatgcactggaccttcactacccaaaatggcaccggcccaaggggcccccggggcccgtccccgtggcctgactagatcggggccncagggacccccccctttcaaagcaagcgcgtagcgtcccatgacggggcacgggctcttcttggggaccacgttgcaggggccccacgggggcggccaaaccggcggggggatcgggggccctatttttttttggggggggccccaaacacaggcggggggggttgaacccgcccccggggttggttttgggggggacttgggccgc

SEQ ID NO: 96129 - DNA, 338 bp, Zea mays
  Clone ID: MRT4577_19184C.1
tcggagcctgatacgctattcccgttcagagtttacctaaacgatacttctcataacggccggaagcctaagatgcagaaaatctcagtactaagccgtagcttgacagatatgctgatgtccatgttgacattcgactgagatgaacatatacacgaatgcaattaacgtccacttacatacatctgatgaatcctaagatgacatatgtcttacaccttctgagattccccttttaacacatccaacttgtgaaagaccatctttatacgccaccatgatctcttgcagctaatcaaaatacacatggatcacgattaacacgaaaagatgatgaa

SEQ ID NO: 96130 - DNA, 393 bp, Zea mays
  Clone ID: MRT4577_19185C.1
aatcgagcatcgcatagataggcgctgtgcggactcgcctacctccgcggctcaaacctttccgacttatcccaattccctccgtcgaccgccgctccatcccgcacgacgacaccatgagggagtgcatttggatccacatatgtccaggccggggtccaggtcgcaaacgcgtgctgacagctgtggggcggtgagcatgacattcaggctgacggtcagatgcccggcgacaagaccattgggggaggcgatgatgctttacacaccgtcttcaatgagactggtgctgggaagcacgcgcccagcgctgtttttgttggccttcaccacagtagtctcgatgggtgaggtactggctcctactggcagctcttccaccctgggctggtc

SEQ ID NO: 96131 - DNA, 315 bp, Zea mays
  Clone ID: MRT4577_19186C.1
atgcagcaaggatcatggatgagatgggagctgctgcctgctggggtgcagccacaaagaataccaaagttccagaaggccactgtttatcaaggaaaaaagtgcatgacgaatgaggaatctacaagtagcaggtgtattttatttggagctgaactaccatcgcttcagtttgagtatggagtgaaactgaagccgctggttcgtatttgtgacacaactaagtttatcaaggaaaaaaagtgcatgacgaatgaggaatctacaagtagcagaaacaatcatgagcctaatgtgtatcctaaagacatgtga

SEQ ID NO: 96132 - DNA, 331 bp, Zea mays
  unsure (1)..(331): unsure at all n locations
  Clone ID: MRT4577_19187C.1
aaaaacgcaaactttgttccggggaacacatggttccaaaaatttaaaaatttcaggcgcgttccaggtttccaagaacccatgaaatcgagtaaataatnccctttttttttaaaaaaaaaagagggatactctctccaggggacggttgactccacaaggttcccggatatatgggaaaacacaaaaacggggagctatagcagagcaaccccccatagatatgtcatcaaacgagggtttttccaggaggaaaataaaggctggggggggggggggggggtggggggggacaagagggggacctaattcctaatactcagcctttgaa

SEQ ID NO: 96133 - DNA, 177 bp, Zea mays
  Clone ID: MRT4577_19188C.1
cgtatgctcggtattcggctcgtgctgtttgtgacctcgatgttgttcgcgtgaggactacctcagctaggcatgttcttttatttgctgtccacctagccatgccttctacgatgtcggttgctgcggcagcctctgctccaagctcgctccgtgttttgcgccaggggacgatcg

SEQ ID NO: 96134 - DNA, 292 bp, Zea mays
  Clone ID: MRT4577_19189C.1
tccacacatttaaaaattctcctcttttcctcttcctctcccgttgccactcattttgtttgcctacttttaccccttcagcactaacaacctccttgaaacctacacatctttccctccaagcccctccttcctcagcaacaacagcacctcccttttccttctccctttcctgactactcctgatgacaattatcctatccttaacctctcctagtcatctcctttaatttcaatcaactgcttcctcataatatatccctttcctcaaagactgtacctttttcatatt

SEQ ID NO: 96135 - DNA, 2025 bp, Zea mays
  Clone ID: MRT4577_1918C.1
agcgtctgacgccgggatccgataaaacatcgaaaaaaaaaaaaaaaagggcggcgtcgggatctacccacgcgtgcgcacatgggtccgtccacgcgggcgccgggggggcaacgcaagcactccacactgctgtgcagaacgagagccacaccatcagtagttagagcgaccaatagatgagttcctccccgtcctttggtctcctggctgtagcagcattactcctagcactgagcttagcacaacatggctccctcgccgcaaccgtcggccccagggtcatcgtcgtcggcgccggcatgtctgggatctcggcggcgaagaggctgtcggaggccgggataaccgacctgctgattctggaagcgacggaccacatcggcgggcggatgcacaagacgaacttcgccggcatcaacgtcgagttaggcgccaactgggtggagggcgtgaacggcggcaagatgaaccccatctggcccatcgtcaactccaccctcaagctccgcaacttccgctccgacttcgactacctcgctcagaacgtctacaaggaggacggtggcgtctacgatgaagattacgtccagaagagaattgaactggcggacagcgtggaagagatgggggagaagctctctgccactttgcacgccagtggcagagacgacatgtctatccttgccatgcagcgcctcaacgaacaccagccgaacgggccggcgacgccggtggacatggtggtggactactacaagttcgactacgagttcgcggagccgccgcgcgtgaccagcctgcagaacaccgtgcctctcgcgaccttcagcgacttcggcgacgacgtctacttcgtcgccgaccagcggggctacgaggccgtcgtctactacctcgccggccagtacctcaagaccgacgacaggtctggaaagatcgtcgacccgcgcctgcagctcaacaaggtggtgcgagagatcaagtattccccgggtggcgtcaccgtcaagacagaggacaactcggtgtacagcgcagactacgtcatggtttctgcgagcctgggtgtcctgcaatccgatctcattcagttcaagcccaagctacctacatggaaggttagggcgatctaccaattcgacatggccgtgtacaccaagatcttcctcaagttccccaggaagttctggcctgaagggaaaggaagggagttcttcctctacgccagcagcaggagaggttactacggagtgtggcaggagttcgagaagcagtaccctgacgccaatgtcctcctggtcaccgtgaccgacgaggagtcgaggcgcatcgagcagcagtcggacgagcagaccaaggcggagatcatgcaggtgctgcggaagatgttccccggcaaggacgtcccggacgccaccgacatccttgtcccgaggtggtggtccgacaggttctacaagggcaccttctccaactggccagttggcgtcaaccgctacgaatacgaccagcttagggcaccggttgggagggtatacttcaccggtgagcacaccagcgagcactacaatggctatgtccatggagcctatctttcaggtatcgactccgctgaaattctcatcaactgcgcccagaaaaagatgtgcaagtaccatgtccagggaaagtatgactaggaagctacagcaaaattgatttaaagctccagcaaattgagcagtgtggatgttgcatttctcagttcattttttccctgttttcaacaaagtatagatgacagccatgttccctcgcggcatatgccttttcattattccaataaagctagcggctggttcgatgagcacgatttgtgatcgagtatcatgtttaataagtacggtgtttgcttttttttcatgatgaggggtgcatggcttatgatattctatctatttgctaatcaaaactttgtaccatgggaatcactagtacaaacaacattattactaaaaaaaaaaaaaaaaaaaaaaaaaaaaa

SEQ ID NO: 96136 - DNA, 268 bp, Zea mays
  Clone ID: MRT4577_19190C.1
ggggcaggaaccaatggcacatttttactatataatcgggggtctgtacaaaataaaaaaataattacattatatggggacaatggtccaacaacccgaaattgactgggagacgacaacctaaaccttttacgaacttgtcacagcattctttatgcgcctcatcctgggggacctggtcttgacctgggacttgagataccaggtaccaacttgtttttcaagggactcgggacctcccatcgttcggagcgacgggagccttgcc

SEQ ID NO: 96137 - DNA, 982 bp, Zea mays
  Clone ID: MRT4577_19191C.1
aaaaaaaaaaaaaaaaaaaacaaaaaaaaaaaaaaaaaaacctcaaaaaaaaccgggggcctcgtcgctcgccgctagtcgccacttctcccgttgccccccgcgtctctcttctcgttgcgacgactgggcgatccctgccgccccccgtctcccgctccccgccgccaggtgcccaggttgtcgccgggcccttcgccggcgatgagcacccaacaggaggttactgagaactacgcaaatcctaagacatgcttcttccatgttctcttcaaggcatcggcattggcgttctacatactgtccacactgttcgtgaacaacttcgtcatcatctttgtcatcactgtgctcctcgcagcacttgacttctgggtcgtgaagaatgtcagcggaaggatactggttgggctgcggtggtggaatgagattaacgatgagggagagagtgtctggaagtttgagtgccttgatggagagtccctggctaggatgaataagaaggactcatggctgttctggtggactctatatttgactgcggctgcatggattatacttgggatattctcgctcatcagacttcaagctgattaccttctcgttgttggagtttgcttgagcctcagcattgcaaatattattgggttcaccaaatgcaataaagatgcgaagaagaacatccaggattggacaaggaatgcacttctatcaggtagtgtcagatcgcatctgcagtcagcatttggtgtctgaacaataacctatgaccttgttatacgtgtagtgctgtataatttacagataacatgattggttactagagtgcgtctgttttttttttttgttggctatgtgcatcttgctaggcagagtcggaagaacattttcagagccgtgtatcaactcgatgtataatgcagtttgaataaaatcttcctttaacaaaaaaaaaaaaaaaaaagcggcctcttgtccgtcc

SEQ ID NO: 96138 - DNA, 633 bp, Zea mays
  Clone ID: MRT4577_19192C.1
ccgtcgtgtgcccctgcagcgcaccctcgtcttctccccgcgtccggctgcagcccagctcggagtttcctccgtccatctccagctcgtcgaatcccctctgctcacacatggcgctcagatcttcatcggccatggcgcctcgtcctcgcctcctccggttcctcgctccatggcgctcggctgcttctactccctcccctgttcgcccatggaagccgcgcccctgccgagattctccctgcgtcgcgttccgagctcccgtgctcgcgcgcagccccatgcgtcggctccagctcagccaccggcccacgttttcccccaaccctggcgtgcatcgccatccctcgtcagcatggagatcctcttgtggctgctccacctcgaccaaggacgcagcgtctgcatgaccctcggttcttgcgtgccttggatttgtggcgcccctgcctctgctccatttttcccctgctcgctgcaaacagccgagcagctcggcgcgaagctccctcgtgtacgcacccagccggagtcccttccacccgtgcagctccctgttgcgtcactcgccggtgacggtagggctgaccgttggcagctccccatcctttggctgtgctcgatgctggccct

SEQ ID NO: 96139 - DNA, 607 bp, Zea mays
  Clone ID: MRT4577_19193C.1
gtccgtctcctcctccccaagcgggggggggggggggagccgaaccacaccttctttctccccgcgtcccacgattcgccgtcggcaagaggcaaggcaacggaaaccgagccgtcctgcgtgagctggggcggggtcccccttttgtttgccttccgtgccactctcctgcaacgcggggggcattgtcttgctgcccccttgagaagggaagattcccgccatctattaatcctcctctcgtatgccgttttctgccttgggaggacacaaacgcagcgccgtgggaaagccgggcgccgcatggatcgaggcatccggtgttcctgtctcaagacccagttttggcgttttggcgtagcgggacggaggaggacgacggggtttcggagcgcagggtcgcggcggcacgccgggatctccgaggcgccgcgctgttgagtgttgacgccttctcgttcctgggaggaggtgatttctctgctgagggcctggggagtctcttggttcagtccctctccctctgcagtttatttgctttttttaggtatgtggagtgtggagttgttgggtgggagagggcctgagatttatttcgagctgcttc

SEQ ID NO: 96140 - DNA, 507 bp, Zea mays
  Clone ID: MRT4577_19194C.1
ggcgaagacagtaacggacgcaaaagaaagcgcaaaaatgcatgctactccacagggaatgtcaaatgtacacgcgtcaatcgcgaaattggtttctttattgcaaagcgacgacacgcgaacttgcgccacagcgctaaaatcggtccacacgctttcaaaaaatggtcgtaatcgagaacatttaatggactgcggcgcgtatcgatacattttgcaattaacaacgcgcccagaagacgtacgcgaacaaattggtcatgcattggttggtattgctgaaggcgaacaatatagcaacatgattggcgaagctggcgcagtggagacccttggcggcttattgcggtccgaacgcgataaaacagtcgagaatgccgcaagagcgttagcgcaattagccgcaactgaggccaatagagttcgtatgaaacaaagcggcactacagcgatcttggccgatgtactaaaagactcaaaaaacgaatggaacaaactctttgcaag

SEQ ID NO: 96141 - DNA, 406 bp, Zea mays
  Clone ID: MRT4577_19195C.1
attcggctcgagttggacaattcattcatataattaattttctctcttcttcttctttctccttggtcgtattcacattagatcagactatggatcgcccaacactatcatgattatttacattcctactaacacttcatctatcattatcaggggtgatcacaacaacattcactctagttaacaaacgtgactacaccgagtggccgggaattctttccaatgcgggtgttcctcctttttcaaccaccgacttggttctgcaaaccggcgccttcaccacaatcgccgcacccgtgtattggggtggccgtttctggggcagaacactctgctccgaagactccaccggcgaattcttctgcgtcaccggcgactgtggctccggaaagctcgagtgcttctg

SEQ ID NO: 96142 - DNA, 269 bp, Zea mays
  unsure (1)..(269): unsure at all n locations
  Clone ID: MRT4577_19196C.1
gttttggatacatttctgaaacttgcgccgctgagagcctgagatcaagcgagcgcgcggcgttggaagagccacggcgtgagtgacgcattgcggcaaaggcatcactgtttctcgttctggtttggactttggagtcccacagcaaaaaaatgcctatccctacccactcatgcctaccaagaaacaacaactcaactctcgggaggcgcaacanacgatgccgcatttcccttcccctttcgtttttttttacctcttcagtggtc

SEQ ID NO: 96143 - DNA, 835 bp, Zea mays
  Clone ID: MRT4577_19197C.1
gaacgatgtgccctgcgttcggctcgacgtcgcggacgcgtgggcacacgcccgcccaacggcccttgcgatcgccaccacgtcagcgcggaggatgcacggccaccagcagcagccgtacccatacgggctgcggcaagacccgctgcggcggatgcgaggtctggacgtgaaatcggcgctccaggccagcccgcgcacgtccacggtggccacggccgcactcgtcgtcccgctgggtgccgcgctgctgtgcgcgtcggggatcgcgctggctgcgaccgtgaccggtctcgcgctcgccacgcctcccctcgtgattttcagcccggtgctcatacccttcgcgctggccgcggggctcatcgcgtcggggctcctcgcgtcgggcgcgctcggcgtcgcgggcgtctcggcgctcacgtgggccgtcgggtacgtctggcaacggcagggcgaaggcggcggcggggtcactgggatggtggtgcagccgctggaccaggggtcgaagcgccatggtgtccaaggcgccgccgcgttcgtggggcaccgccgcctgccacgggacatcgacgttgctggtgaatgatggtttggcggcgtgtgtgcaaacttttctatgctagtttagtttgcaggtgtgtatggattttgatttatggcctggatggatcacactatgtagcgaacgatgtgttcaatttactgttggaataaaactgcagattggtgttacttaaaaaaaaaaaaaaaaaaaaaaaaaaaaaaaaaaaaaaaaaaaaaaaaaaaaaaaaaaaaaaaaaaaaaaaaaaaaaggggcgggcggttttaa

SEQ ID NO: 96144 - DNA, 521 bp, Zea mays
  Clone ID: MRT4577_19198C.1
gcacgtccgggtccggcaacgacgctcaaggctccctaacccccgctttgtccaccccgaatccctcctgctgcctgccctgtcgccgcttcccgtactgccggccgtcctcgccgagagccgctaactttggcgccaccacgagccgggtaagaagatggtgaaggggatgcccaaatcaagacctatcaaagcggcggccgaggtggtcttcgacccgtccgtctctggcccccggaagccgcgccgcgccgaggcgccctcgtcgagcagcgagtatcaccacttcatggggtcgaatctttcaaatatgtaccacaagccagctccggcgaaatctaccgacatgtctgatgatgagcctgacatcgatattgagaagttattgaaagatgttgagcttttcggtgccactacctggaaggacaagaacaaaatacagaaccgcaaagtagttgaactgggtggaaaggccattaagaagcagcgtacaccgttatctgtggcaatcccagctatga

SEQ ID NO: 96145 - DNA, 386 bp, Zea mays
  Clone ID: MRT4577_19199C.1
gatcgatcaccgtagtagctcggaatcggtcgagctcgagcgtacttgcgcaccttctcccaattcatcctagcagcaagcatatattgagccacttgagtactgtaacaacagctctatatggcttgcaagcctcagctcctgttcttcaccgcgatcgcagctctagcctcgatcatccatccttgtgcatccgtcgagtttcaccgcaagctatccagctggtccgacggcggcgcaacgtggtacggcgccgccactggggctggaagtgatggtggcgcatgctggtaccgaggtgccgtcgaccaggcgccgttctcgtccatgatcgccgcggggagcccttccatctacaactccggcaagggctgcggctcttgctt

SEQ ID NO: 96146 - DNA, 3345 bp, Zea mays
  Clone ID: MRT4577_1919C.1
atggatcctaagggaaagaggatggtgatcaacgacaaggagaaggagtgcttcatcaatgagccaaaagacgacaagcccactgactcgggctcaagtcacaagaagaaggatgggaagaagaagaggcgcatcaagaagatagtctactacgacagcgacgagtcctcttcttcccaaagagacgacgacgacgagaaaaagaaaacggacaccctcaagatctcacatgaggggaacgacgccaccatgatcaccaagatggagttggtagaatgcgaactaggaagattcgcaatgatcaggggggaggagccaactcaaacgtacaacaggctcaagaccctggtcaacaaaatcaggagctatggaagcacgagatggacggaccacgacgtcgtccggcttatgctaaggtccttcactgtccttgatcctcatcttgtaaactctattcgtgaaaatcctaggtacaccaagatgatgctcgaggaaatactcggaaagtttgtaagcgggcgaatgatgatcaaggagacaagatatgttgatgaggcgttgaatggcccaatgccgatccacgagcctcaaaccgttgctctcaaagaaacaagcagcagggaggggctacctagcaaggcggcgcaagttgaggcggccgggctaaatgaggatgaaatggccctcatcatcaagcgcttcaagacggcgctcaaaggtcgcaaggagcatcccaacaagagcaatacaaagggaaagcgctcctgcttcaagtgtggtaagattggtcactttattgctaactgtcccgataatgatagtgaccaggaacaaggaaagaatgggaagagagagaacaagaagatttacaagaaggctaagggcgaagcacaccttggaaaagaatgggactcggattgttcttcgtccgactccgacgacgaaggactcgccgccacggccttcaacaaatcgtctctcttccccaacgagcatcacacctgcctcatggcaaaggagaagaaggtaagcactcaaaatactattgcatatgcttcttcaagtgatgatgaatctagtgatgatgaagtagactacgcaagtttattcaaaggcttagatagaactaaaattgataagatcaatgaattaattgatgcgttgaatgagaagaatagattgctagaaaagcaagaggatcttttatatgaagagcatgataaatttgtaagtgtgcaaaagtctcttgctttagaagttaaaagaaatgaaatgctttcatgtgaattatctacttgtcatgagtctatttctagtctaaagagtgtcaatgatgacttaaatgctaagttagaagtagcaaataaatctagctcatgtattgaacatgtagtaatctgtaataggtgtaaggattttaatgttgatgcatgtgttgagcaccttacttctattgcaaaattaaatggtgaagtggctagtcttaatgcccaacttaacactagcaagaataactttgataaactaaaatttgcaaggggtgcctacactattggtagacacccctcaattaaggatgggcttggctttaaaagggaagccaagaacttaacaagccaaagagctcccattttcaacaaggaaaagggaaaggctcctatggctaatagtagtcaaaagaatcatgcatttatttatgatagaaaattttctagaaatgcttatcataataggagttgtaatgcttatgattcacatgccatgattgcttcaagttcttccgttgtgcatgatgtgtccgtctttagaaggtgtgatggtttgttagcttttaagggtgtactagacggcaaactctatttagttgatttttcgaaggaggaggccggtctaaatgcatgcttaatcgctaagactagcatgggctgtttgtggcatcgccgtctagcacatgttggaatgaagaaccttcataaacttctaaagggggaacatgtgttaggtctaacaaatgtaactttcgaaaaagatagaccttgtgcagcttgtcaagcaggtaaacaggtgggaagctctcatcatagcaaaaatgtgatgaccacatcaagacctttagagctacttcacatggacctcttcggccctgtcgcctacctcagcatcgggggaagtaagtatggtcttgttattgttgatgatttttcctgcttcacttgggtattctttttgcaggataaaacagaaacccaagggaccctaaagtgcttcctaaggagagctcaaaacgaatttgagctcaaggtgaaaaagataaggagcgacaatgggtccgagttcaagaatcttcaagtggaggagtaccttgaggaggaaggaatcaagcacgagttctccgctccctacacaccacaacaaaacggtgtggtagagaggaagaacaggacgctcatagacatggcaaggacgatgcttggagagttcaagacgcccgagcgattttggtcggaagccgtgaacacggcttgccacgccataaaccgagtctaccttcatcgcctcctcaagaagacgtcgtacgaactcctaaccggtaacaaacccaacgtttcatatttttgtgtatttgggagtaaatgctacattctagtgaagaaaggtaggaattccaaatttgctcccaaagctgtagaagggtttttgttaggttatgactcaaatacaaaggcgtatagagtcttcaacaaatcatcgggtttggttgaattctctagcgatgttgtatttgatgagactaatggctctccaagagagcaagttgatcttgatgatgtagatgaagaatatgttccaacggccgcaatacgcaccatggcgatcggagatgtgcgaccacaggaacaaaaggagcaagatcaaccttattcctcaacaatggtgcaccccccaactcaaactgatgatcaggttcaagaagaggcgtgtgatcaagggggagcacaagatgatcatgtaatggaggaagaagcacctcaggcccctccaactcaagtccgagaaacgattcaaaggaatcatcccgtcgaccagatcttgggtgatataagcaagggagtaactactcgctctagattagctaatttttgtgagcattactcgtttatctcttctattgagcctttcagggtagaagaggccttggtagatccggactgggtgttggccatgcaggaagagctcaacagcttcaagcgaaatgaggtttggaccctgggtgttggccatgcaggaagagctcaaccacttgatttcattgtgctaacacttaatcaagttttgtggctttaa

SEQ ID NO: 96147 - DNA, 968 bp, Zea mays
  Clone ID: MRT4577_191C.1
ccaagttctgatgtccttacatttttgctttcagatccaagtcaccatggaattagagaagagcacccagtcttccttggagagaaccaatgttgtgctggtggcatggattttattaccatggtagattaattttatctggtgctagttggttagccatactcatatcatttgtttgcaattgcatataaaaaatgatcatggtgtacatgtatatgtatttttaagcttgacttgcacttgttgtagttgtgaatgtactttggagaacagcacttccacattctcagtataggtactcgtcttttaccagttaatagatgttatagttttttatttttatcattggcagatattcacactgtcagccatacccttcgacataatgccaactaccatagaacaatgtgtttctgttctgaaacccggcggtcttcttctgtttagggattacggtctttatgacatgacaatgcttcggtttttacctcatcaaagaataggatttcgggaatatatgcgatcagatggtaccttttcatacttcttctcattggatactgtgagagaactctttcatgctgctgggctagtagagttggagctggaatattgctgtgtcaagtccgtgaaccgaaagaatgggaagacgatgcggcgggtatgggtccatggcaaattccaaaaaccacctaggtgacaccagttagggcttgttcgtgttcagctcaatccatatgggttggatagaattgtgtgggtttaaatccatagcaagtcaaactcactactaatttttttccaatctcatccaatccatatagtgtagaaataaccaaagggcttagctgttagttttgctcggccactttgttgttgcaacaaagcgctgtaacagttttgtagccacaaacttaaatggcattgaaattatgccctccctcacccccaatagccattctccaacc

SEQ ID NO: 96148 - DNA, 379 bp, Zea mays
  Clone ID: MRT4577_19200C.1
agtatatagctatttttcggtatttagctgctgcaagccgttgacatagataatgaggacgccaccgctgcaccgtgtaggctcacttcaaaggtgatgccctcggccgggctagccctgacgcaagcactcctcacccaggcgatccgacctgcagccatacaccgtgtgagaaggagctttagttgacaaacaacgatgaggacaagtcatactgcaaagggggcatgccggttaaaatgcacccacatataacgaccgttgtgacacccggaaacagcctgcaagtagcaggcctaaaacaggctgagggggatagaaaggcggctcaagatcatggtcttcttatacgtgacgacaacgatgaatgcggcggttt

SEQ ID NO: 96149 - DNA, 291 bp, Zea mays
  Clone ID: MRT4577_19201C.1
gcacgcctacgcaagctcggaattcgtctcgagacgcattggacagccacactttcttttccaggccgaccttcaccgttttctggaggggctaaacctactggtgggcacggaaaaagcaacactgaatacacccaatctgtgactcggtcgggctctcactgagcccaggaaacgctacacccatgagattgcgaccctttggtacaacgcttctgaagttttgcttgaagcgacacagtactgaactggctttgctctctggcccgttggatgcatctctactgaaat

SEQ ID NO: 96150 - DNA, 161 bp, Zea mays
  Clone ID: MRT4577_19202C.1
cgctcaagtgcgccggcccggagatcggctcgcacccggcgtcgtccttcttcgccggctgcctggcggtcggctccccgcacaggaagaacgagggagcggacgtcggaccgcggaagcaggggcggaggcccccggagaaccccccggcccgggcgggg

SEQ ID NO: 96151 - DNA, 288 bp, Zea mays
  Clone ID: MRT4577_19203C.1
gggggccctccgttgttgctttgccgctctgcttctggtcctcgcttctccgggccggttctggcgcgtcctgcgtcctccccgcttcccttcgggggggtctcgcgggggctgcggctcctgggcctttggttcgttcggctctggttcttccccctcttcggcggctcctttccgctgctgcgccggctggggcctcggccgccgtgcttgggggcttttgttcctgggccgcctggtgcttgggcccgccgttgcttcgtctttgcggccttggtgtggggcggc

SEQ ID NO: 96152 - DNA, 268 bp, Zea mays
  Clone ID: MRT4577_19204C.1
accagatcctgacccgggatgccaagggcatcagccaggagcagatgaatgagttccgggcctccttcaaccactttgaccgggatcactccggcacactgggtcccgaggagttcaaagcctgcctcatcagcttgggttatgatattggcaacgacccccagggagaagcagaatttgcccgcatcatgagcattgtggaccccaaccgcctgggggtagtgacattccaggccttcattgacttcatgtcccgcgagacagccga

SEQ ID NO: 96153 - DNA, 645 bp, Zea mays
  unsure (1)..(645): unsure at all n locations
  Clone ID: MRT4577_19205C.1
ggggcatcctgtgatagctcggagccttgacccagatgaatgtgcttgggcatatggtatgaatatatttgatctggcagtttggaggaagacaaacatcagggatacataccatttctggttgaaggaggtaatgcattttacacccacatatccatttcccagtcttactcgatgttccattgttcgtttactatgtttgtgaactgaaattgttctggtatttttgcatgcagaatttgtactgtatgatattccaaaatcttaaaaggaaaccttgattcaacactcttgtgcaaatgtgaaaaatgaatttccttttctgctatccggctcttgtcaccatgtgcttatatattataacagacacagaaaattataaataaataaaaaacataggtaactgctgcttaaaacataataagagttgttggttgtcaattgtcattacctgtcttcacatttatttcaatctcttctgcagaatcttaaatctggtcttacactctggaaatttggtaccttaccaccagcccttatagcatttaggggtcatgtgcatggtatagacccatcatggcacctgcttggcttangatacccagacaagacagatattgagagtgtcaggagggctgcagtgat

SEQ ID NO: 96154 - DNA, 232 bp, Zea mays
  Clone ID: MRT4577_19206C.1
cggacgcgtttgcgccagacgtttagttttagctctagccttttccaccagcaacgcaggccaccgggggctggcagaagctcatctacagaaccacctctataagctagcttatcagcacgggcacccctgcaacgcctgctgtggcaacaaggagaagagtcccacgtcaagaggcaacagctcaaggggcatatagacaagactcttctgggcacacatgtggagccct

SEQ ID NO: 96155 - DNA, 263 bp, Zea mays
  Clone ID: MRT4577_19207C.1
aaatcaacccttagcataaggggcactcaataatacgtaaatacaggtaatgaaaagtattcttccaacattcagctgagtgcagtacaatattacatagcagggctgagtgcatatctcagattgaggccttcacttataaacccgcagggagaaaaagaaatgacgaaacttactctcatatatttacagggtggatatcctccaacagcctttctagcctatgaataataagaacataccaaagccttatgaagattgag

SEQ ID NO: 96156 - DNA, 324 bp, Zea mays
  Clone ID: MRT4577_19208C.1
cccacgcgtccggcgacgtcgtggcgggggggtgggggggccccctaccatgacctggtcagagaatatagtcatgcatcttatcctgctcgatttctttgacaggtgtgcctaccgcgtatcctctcccctcagtgcttcgctggctcctcctgcttcccttcttggcccttcctttggttgtgggtggtgccctgtgtgccggctcccttctcttggctggcttgcgtcccttgcgatgcggtcgtgtctttcttcttgggtcgcccttggtcttgctctccttggcctccctgcctttgctgtgggccttggtgcccccct

SEQ ID NO: 96157 - DNA, 473 bp, Zea mays
  Clone ID: MRT4577_19209C.1
ggccgggccgggaattcccgacatcagaacttgcctatctatctacagatacacaaagagcacagctacttagctaccatggacatgggtaaggataacgcatcaggtggtccgctctgcgatggtgcttctccagatgccgctagctccgacgaaggacaagaacaacatcctgcacgggcgtacttacaacgggatgtgatatgaacgtcatcttcgacacagcctgtgcatgcattcgagagagaatcctcgtgcgcagctacctgtgacaatcatatcatagctatagggttatgcgtgttattccccatgtattgcctcactgtggatgacttgatatctacacaagctataatcggaatctatgttactgcaataatgatgacgagaatatgtggatcgactaattgcatgagtatgctgagctagtggtcctttttaataaaaagggatatgttggatgtgtaccg

SEQ ID NO: 96158 - DNA, 280 bp, Zea mays
  Clone ID: MRT4577_1920C.1
aaaagccctttggggggttcaaaaaaaacaaatctgcaacggggtggcgccccccttgtgtagccgtatttttcacggagcgcctggtggaaaaggaatcaagtcctattccgcgctttataatttgtttcaaaaggggctttatatttaaactgaatacaccccctttttgattttgttccaagactggagttctcgggagaaaaacctttctccccttctttgtgtttggcaccccctgcgcccccggggtttgagtaggaaccagaaaaaacccccc

SEQ ID NO: 96159 - DNA, 321 bp, Zea mays
  Clone ID: MRT4577_19210C.1
ctccaggaagcgaagtatggtgatggggtctagatgctccatgacgaggtcgcacagctccggcaggaggtcggcccacggcggtgcggtggctgcgctcgaagacgaagacattgccgagcacctgcgtggtcaccgttcacgacggtgaggaacagggccggccctggacaggtgccggcggtgcggccgcaccgggcctccgagaaccagagggcccctccccgtatatacgtgtatgtgtatatatatagaaaatgtttatgtagattacaacacaaagattgataaaaggccaaagctcatcaacgtacaatatgc

SEQ ID NO: 96160 - DNA, 230 bp, Zea mays
  Clone ID: MRT4577_19211C.1
gtactgatcaagacagtgtagctatgccgtaggtacttcgcgagatgctcgcaagtgatcaacaagtggctgtcaggactgtctgtcgtaacctctggaacagttctaacaccagagggctacagccaatgatcataaggtgcagactacacgcttctgcgacgctgaaatactacctgctgaaggacgtctcagcaggacaaggcggagggcagcatgatctcgggcct

SEQ ID NO: 96161 - DNA, 405 bp, Zea mays
  Clone ID: MRT4577_19212C.1
atcggaaacagggtcttcctggagatttggtgatggagatgtcaagcagctggcctctggacgtcaccgttgccctgcatggtggctccagagcagcctctatgaacaacctcggttccagaccacagcccacagccggagagtccaggaagacttgcgcactcagagcagaagggtaggagtcctctagacagcctcgcagccgcgccagacgcccatagacactggctgtgaccgggcgtgctggcagcggcagtgcacagtggccagcactaaccctccctgagaagatagccggctcattcacttcctcccagaagacgcgtggtagcgagtaggcacaggcgtgcacctgctcccgaattactcaccgagacacacgggctgagcagacggccccgtgga

SEQ ID NO: 96162 - DNA, 471 bp, Zea mays
  Clone ID: MRT4577_19213C.1
ggaaccaaaaaaaacttggggagtgttgttgcgacatgctcagcccagatgcccaggggcccacatttcctgcatgaaaaaaaaggctgtgacctaccgtcctttgagggggagatcgctgtagaccagaggatccgtatataaaacgccctcgatggagagcaaatgtacagattttttttccttcctttgctaagatataccatccaaaccgcaaaactcagttgtacacaaaacattctgtaggaagcgtgccttggcgataagggtcgtgcaaaaagtggactaagacctgaaatggcggcgggatgctccttatttcttctacccactttgagatatgtacatgaagttggcctcgaatcgatcatgggcgccttgcgtgaaaccaaatgaactggttcggctatgctcctcttcatcctttcttgcacctgaagctcgcactcgtagaaacaaaccaatgcctga

SEQ ID NO: 96163 - DNA, 153 bp, Zea mays
  Clone ID: MRT4577_19214C.1
aaaaaaaaaaaataatttttttccttccccccaaaaaaaaaaggtaaatagttgcttggggcttaaatcaaagtctacgagataaagggttaaaagcagtctaccgggctgtttcacagggcctaaaatacagcccacaacagtttcatgaag

SEQ ID NO: 96164 - DNA, 439 bp, Zea mays
  unsure (1)..(439): unsure at all n locations
  Clone ID: MRT4577_19215C.1
ggggggccccaaaaaccaaaagagcgccggccccccgcccctgcccccaagccncaacaaccacggggaaagggacggaaggcaacccggcccagcgcgagagaggcccaggccgaagagggaaagcagcgcaccaacacccgggacccccgcccgccccccagagccccgagagggcgccaggagaccaacacgncgaccagaacaccagcgaccagcaggccgccggcgggcagggcgagaacaccgcaggccgcccagacagcggagaagagcccagcgcccccaagcgaccgcagccaagcgacgaaggacccacgcccgacgacccccaacaaacgggacgcccccagccgggaggcacccagcgcgaagcgcgccgggcccgacggcgaagagccccagcgggaggcgccagaggacgcccaccgcccccccc

SEQ ID NO: 96165 - DNA, 310 bp, Zea mays
  Clone ID: MRT4577_19216C.1
ggttattatatgcgtacatgccgacgtttagtttcctttaatcttcttgaaatgtgggattgtagggcaccagagattggattgcacagaagcgaggggctgttgggatgtggaggtatacaagtttggaactaccgaactacgggggggggggggagaaaggatgggcgctgggggacgaatggagaactgtaggagggagaaagggtgttgcaagtttggttggggggaggggggggttggtgggatggtttttggctttcttggggtttggggggaggtttttgtgggttttgtcggacaaattttt

SEQ ID NO: 96166 - DNA, 247 bp, Zea mays
  Clone ID: MRT4577_19217C.1
accacacggacggcgactcgatttttcacctaccgcgtcatcgtccgcagatccctaaaccccggccaggggtagacacaggccccacctacgtctgcttacgcggcactcagagcccatgcatggtgggtcccatgccggacacggcaccgagcccttgcatgagaaagtctcgcccccgtcggcacatcggcaccaacatagccggcgctcgacttggacacctgcgactgaaacaaagaaaagg

SEQ ID NO: 96167 - DNA, 555 bp, Zea mays
  Clone ID: MRT4577_19218C.1
atgacacccgaagagatcctcagaaaattcgtgagtgggcgcatgatggtaaaggaggctcgatacgtggacgatgcactcaacagtccactacccgtctatgaaccacagtccgttgctctcaaagcaaccagcagcagggaggcactaccaagacaggtggcacaagtggaagctaccgggctaaatgaagatgaaatggtgcttatcatcaagcgcttcaagatcgcacttaaaggacgcaaggagtaccccaacaagaataaaacaaagggaaagcgttcatgcttcaaatgcggtaagactggtcactttattgcccaatgtcccgataatgatcatgaccagggacaagaaaaaggcaggaagagggagaaaaagaaaaactacaggaaggcaaagggcgaggcgcaccttggaaaggaatgggattcggactgctcctcttccgactccgatgatgaaggattagctgcctcggcttttgacaaatcttcactcttccccaaagaacgccatacgtgtctcatggccaaggagaagaagtttaaatga

SEQ ID NO: 96168 - DNA, 705 bp, Zea mays
  Clone ID: MRT4577_19219C.1
aaaataccgataaccctcaaagagagaagaaattccccgaaatggcggcgtccggcgagggagcgtcgctgccgtctccggcaggtggcgaggacagccgccgccgtcgtgtgagctacttctacgagcccacgatcggcgactactactacgggcagggccacccgatgaagccccaccgcatccgcatggcgcactcgctagttatccactatggtctgcaccgcctgctcgagctctcacgccccttccctgcctcggaagccgacatcagccgcttccactccgacgaatatgtctccttccttgcctccgcgaccggcaacccgaccatcctcgacccccgcgccgtcaagcgcttcaacgtcggggaggactgccccgtctttgacggactcttccccttctgccaggcctccgccggtggcagcatcggcgccgccgtcaagctcaaccgtggcgacgccgacatcaccgtgaactgggctggcgggctccaccacgccaagaagggcgaggcctctgggttctgctatgtcaatgacatcgtcctcgccattcttgagcttctcaagttccacaggcgtgtgctatatgtagacattgatgttcaccacggagatggtgtggaggaggccttcttccctacaaccgagtcatgacggtttctttccacaagtatgaagacttcttttcctggaactg

SEQ ID NO: 96169 - DNA, 1727 bp, Zea mays
  Clone ID: MRT4577_1921C.1
cttaattgctaattctttcaagggtgggaaagcggatcccactctcttcactaagacttgtgatggtgatctttttgtgtgccaaatttatgtcgatgacataatatttggttctactaaccaaaagtcttgtgaggagtttagcagggtgatgactcaaaagtttgagatgtcgatgatgggcgagttgaactacttccttgggttccaagtgaagcaactcaaggacggcaccttcatctcccaaatgaagtacacacaagatcttctcaagcggtttgggatgaaggacgccaaacccgcgaagacacctatgggaaccgacggacatgtcgacctcaacaaaggaggtaagtccgttgatcaaaaggtataccggtccatgataggttcattgctttatttatgtgctagtagaccagacattatgctaagtgtatgcatgtgtgctagatatcaatctgaccccaaagaatgtcaccttgtggccgttaagcgaattcttagatatttagtttctacgccttgcttcgggatctggtatccaaaggggtctacctttgacttgattggatactcagactccgactatgccgggtgcaaggttgataggaagagcacatcggggacgtgccaatttctagaaaggtccctggtgtcctggagttcaaagaaacaaacatccgttgccctatccaccgctgaggccgagtatgttgccgcaagactgtgttgcgcgcaactactttggatgaggcaaaccctccgagattttggctacaatctgagcaaagttccactcctatatgacaatgagagtgcaatccgcatggcggataatcctgttgaacacagccgcactaagcacatagacatccggcatcacttcctgagaggtcaccagcaaaagggagatatcgaggtgtatcatattagcaccgagaaccagctagccgatatcttcaccaagccattggatgagaaaactttttgcaggatgcgtagtgagctaaatgtcttagattcgcgtaacttggattgatctatagcatactgtgttctatgcctttgatcatgttactttatgcatttaaatccattattgtggtgctcaagttgtacatgtgatccccggacctcacaagtccatttgcaagtgatacacatattaaggggaagatgtgctacaacttgaccttttgagactaacctggttgtttgagtatacttgatgtagtctaaaaggtgcttgaaaagggaaatgtggacttggacgatgcaaagacttccactgcactctgtacccaatgattcagactcatctgatgcttctgcttccttacatgaacatgcatcatacccaatgattcagactcatctaatgcttctgcttccttacatgaatatgcattagcagagatactattgcaaaatacagccacagcatgaaggaccttgctcaacaaattgttgtgcatcatctcagaaaatctgagcctgccaccatcttatatacaagaggcggttggagaagttttccagaacattactattagctactattctccgtgtccacaacctgatcttgctcttgggttacaatctcatgataaacaatgcttgttctagtttcagttcttcagtgtttttatgattatatctatattgtttaattatgaacaacttgtatctgaatctgaatgtaacagattactaaattttacgac

SEQ ID NO: 96170 - DNA, 297 bp, Zea mays
  Clone ID: MRT4577_19220C.1
cgcttattatcttgtactgccaatccaggggggcaaaatgacctcttgtttgtattgacatacacgcacttatgacttatccatgtatcttaagaattgaattcactggcaattatactaacatgttttcagtgcatggtatttttgctccaaaaggccatgctttgagttactgcttccggctcggtagcaatggacaaacttgatgctaactatacgtacttctcttctattaagatcaactcagcacacccttgatctgacggggcagattatgcatgctcacaagcctacact

SEQ ID NO: 96171 - DNA, 275 bp, Zea mays
  unsure (1)..(275): unsure at all n locations
  Clone ID: MRT4577_19221C.1
annntgtttggcttacttctaagatcaattgattccatcaggcaaagggatactagcgaggacactctcccagactgcttggaaccatccaccggtgaagacagaacccacacactacaaacggacgatgagaagaacagtcacacaagccacagaggatatgcaaaaacaattgtgaccgggctcaaaatgcaaggccaggccatgaagccgcaagctcaaaaccaaatctgcacaaagccgctggctgagacacttttaacctggacaccaca

SEQ ID NO: 96172 - DNA, 743 bp, Zea mays
  Clone ID: MRT4577_19222C.1
aaaattctgacactacatgagatcttctcatctgcagatactgtccccaaactgcaagtctgccaagagactgaaaggtaagctagcagcgtcaaaaaaaaaagggtccatctgtagtttagaaagattatatttccagacatcattatccagcacatggacatggttacagcattggtggcgttcacttcggcgacaactgaacagaacaaagaagcggatcaaattgggatcaaaatgtatgcctgggacgatttcttgaaagtggtaggcgcattggttgttggtcgtttacagttcaacctactgacaaacatctagacaaacctattcaggtttcagagtcagttttgtagcgatgtaatgtttacgatggttatatttgtaaccaagtgatgctttggaactgggtttcaggggaaggataatcctcgtcaaccttgccctccgcaagcaagtgacatctgcactgtcatgtacacgagtgggacaagcggacagcccaaaggtgtgatgctgacccatgaaagccacgccatgtatgtgaaaggggtggacctcttcatggaccagtttgatgataaggtcagccacatcctacactgaactgaaacctgagcatgatctgataacagttttctgttctatatgatatgatgcatggctgaatactaacttgataccttcatgtgatcagatgacaacagatgatgtcttcctgtcgtttctcccgcttgctcaca

SEQ ID NO: 96173 - DNA, 319 bp, Zea mays
  Clone ID: MRT4577_19223C.1
ggccgccatgtgctggcgaatcggccttgagctatctgcaggaagcggccttagcgactgcaccaaagatgggctgtcgattgttggaaacatgggtgataagagaatgttgtttgctgcgattgcttgttggagcctatagggttgaagagatgtgttttttttaccgttagaacagcatttgagagggggggggggggtgcagtcgctggggcctaggtcgggagcacgctgggggggagttggaggacactggcgggtgttgcgagtggatttgggcttggtgccaagcttggtgtaattatggtgatagttgttt

SEQ ID NO: 96174 - DNA, 626 bp, Zea mays
  Clone ID: MRT4577_19224C.1
agatccgaagccaaggttcatgtctcttaccgaagctgttgcttttcttttttgagacactcaccggaaagacaatcactctcgaggttgagagctccgacaccatcgacaacgtcaaggctaagattcaggacaaggaaggcatccctccggatcagcagcgcctgattttcgccggaaagcagctcgaggatggccggactctcgccgattacaacatccagaaggagtctaccctccatctcgtcctccgtctccgcggtgggatgcagatcttcgtcaaaaccctcaccgggaagacgatcaccctcgaggtcgagagttccgatacaattgataacgtcaaggctaagattcaggataaggaaggcatccctccggaccagcagaggctgatcttcgccggaaagcagctcgaggatggaaggacactcgcggattacaacatccagaaggagtcgaccctccacctcgtcctccgcctccgtggtggtatgcagatcttcgtgaagacgctgaccggcaagactatcaccctcggagtggagagctcgggtgcgatcgataacgtgaaggcgaagattcatgacaaggggggcattgcccccggatcagcagaagctgat

SEQ ID NO: 96175 - DNA, 808 bp, Zea mays
  Clone ID: MRT4577_19225C.1
ttgggtccctcgaggccggccgggccggtcccaccttgcgtacgtgagccaaacgctcctggtcctggcagtctccatctccacctagggttccggcgatggtgcacggcggctacccgcgccgcgacgccgccgtccgccggcccaagtcctcgtcctccgccgtagttgccgaccgcaagcggaagtggaccgccgccgccaagaacacctcacttaaaaaccagatccgttccactgagcgctttctccacaaggtacttaccgacacctgggggctggggtcttctcgactgagctcggaacctctagtttagcgttgttcctacccagtggatgggctttggctgttgcttgtggagcgctgggtgtttctctaggaacctctccattttctagttgattgggaagcttccccgaacgtagctaggaattttagcacgaaagtctttctacaatgatgaattgttcaaccacaaatatttatttacttgttgcttctgtagggggctaggggcaaattgatgcttcaactgaggcctctgtttgttgcattccgctcagtagcctaattcatggtgtagctggattactgcagcttgcataggtgattaggtgctattaagtatcaagtattgattgaaaaactatcagactgaaatgttaactatgttgctcaaacggttagtcagaaatgctgtgaaagggcatttgttcttgtcagaggagaagtgacgaagcctagttgaccttgtgttggtgaagatattcactcaaacatcaaaatcataataccaagtttgattga

SEQ ID NO: 96176 - DNA, 214 bp, Zea mays
  Clone ID: MRT4577_19226C.1
ggtaccacaacacattaccgggcatacatgttcataaaataaaaatcaaatggaacaaccctttttcactgaacatacaaaccctttttttacaaaaagggaggagggggtgcaggggggtaaacatacaagacaggcttggggagaacaaaatgccccggaaacgggcacactacatacacattggttcttaaaggaccgaacaaccaaccat

SEQ ID NO: 96177 - DNA, 354 bp, Zea mays
  Clone ID: MRT4577_19227C.1
gacctcaaaagataaatcctctcccaagtccggatcactccaaatcaaatgtgaccagagagagcgcctcgggtcatgggagctcttgcgcttggatcgcttttttctttctcatattcttgagatcaaactcatttgaatcaaagagagacaccaattgttgatggtccttgcgggacttgagttccgctgattgagaagagaactactcgtctaagtgaccgctgtgagagacagggttgaaagaaccctgtctttgtgaccacctaacgggtagtaggcttgctagatccaacctcgtaaaataaatcatctgtcttacgtattatttgcctgcgatttgttttttaccct

SEQ ID NO: 96178 - DNA, 186 bp, Zea mays
  Clone ID: MRT4577_19229C.1
gcagcacggccgtgcctggcgccgtatacaagagcacataggcagcaagactgccgtgcagatcaggagccacgcccagaagttcttctccaaggtcatccgagaatcctctggggacaacaacaacaacagcgtaggtgctccaccgcaactccagattccgccgccgaggccgaagaggaggcc

SEQ ID NO: 96179 - DNA, 318 bp, Zea mays
  unsure (1)..(318): unsure at all n locations
  Clone ID: MRT4577_1922C.1
cattcaggccagggagccctncaaggaaaaaagacncgggcnccnaaggagcnnnccccaaagaaagggaacncaagaggagnacacgggggngcaagggnancngcangngccnggacngcngnacgnnncgccnacacgccgaccgagccnncgaggggggggggaagcagnnagagagaagccgagacancanaaggaacnnaccgaaggagggggacagncnnaggagcccgcnggagaagcaggcnggccaaccggaancaacacaggcagcccgcagacaggccngccgggggccggagggggcccggaacc

SEQ ID NO: 96180 - DNA, 538 bp, Zea mays
  Clone ID: MRT4577_19230C.1
ccgcagtccgcacctctcgcgctcgccttcgctttgtcgccacggcgagccccacgccgccgatcggggcgccgcaagcggcggcgcccgttccgatggacgcggatgtgggggcgggggcgacgaatcaaccgtggccggagcccgacgacgcgcacctctccccgcctccggctgcgcctcccgcctccgccccgactccagccgccgaggctgccgcgcccaccgcctccgcggccgtatcgccgccagcgccggcggaggcgaacggcaactccgacaggaagaggagttattgcgtgtgctatgcttccgggtcacattgtactgaattatgtggatgcgaaccttgtcataacaagccacctcaaggtgctccatggactgcaccagttttacctctgaaacctgtccaaacattgaaggctggtcaagaaatagtgcaacacctcataaggtcccctatggatcttattagaagaaaatgcacctgaaagaagtcaggctgccttaaaaagtcttgtgcctgctaccaggg

SEQ ID NO: 96181 - DNA, 328 bp, Zea mays
  Clone ID: MRT4577_19231C.1
attatgctgggcggcctcaaaattttaagggatgaaaagagcacaaggttgtaacagagaatgaagatgtgaccccctttaagcaggtccgtacggaaggacctggctgtgaataacatcgagcgacagaacaccatgaaatggccaacaccaaagacttgaacagtctgcgaaggactatacagccgggcaagtgcccttactagcttaaggacttctaccgccacgcagcggctggagaaccggtagaccgattaaaaagccaattattcggctgtaaacagtaattgggcgggaagcgctggcttatctacgagcgacagaggtt

SEQ ID NO: 96182 - DNA, 430 bp, Zea mays
  Clone ID: MRT4577_19232C.1
cgactcccgttattcgtactttttgtgttcgccttcgctttgtcgtctcggtttagttttacgctgctgatcggggcgccgcaagcggcggcgcccgttccgatggacgcggatgtgggggcgggggcgacgaatcaaccgtggccggagcccgacgacgcgcacctctccccgcctccgcctccgcctcccgcctccgccccgactccagccgccgaggctgccgcgcccaccgcctccgtggtcgtatcgccgccagcgccggcggtggctaacggcaactccgacaggacgaggctgaggaaggcggacgacggtgacgggtgcaaggcctgcagctgcaagaagtccaggtgccttacgctttgttgcgtgtgctttgcttccgggtcaccttgttctgacttttgtggttgcgcgccttgttttt

SEQ ID NO: 96183 - DNA, 603 bp, Zea mays
  Clone ID: MRT4577_19233C.1
cgactcccgcagtccgcacctctcgcgctcgccttcgctttgtcgccacggcgagccccacgccgccgatcggggcgccgcaagcggcggcgcccgttccgatggacgcggatgtgggggcgggggcgacgaatcaaccgtggccggagcccgacgacgcgcacctctccccgcctccgcctccgcctcccgcctccgccccgactccagccgccgaggctgccgcgcccaccgcctccgcggccgtatcgccgccagcgccggcggaggcgaacggcaactccgacaggaagaggaggaggaaggcggacgacggggacgggtgcaaggcctgcagctgcaagaagtccaggtgcctcaagctttattgcgtgtgctatgcttccgggtcacattgtactgaattatgtggatgcgaaccttgtcataacaagccacctcaaggtgctccatggactgcaccagttttacctctgaaacctgtccaaacattggaggctggtcaagaaatagtggaacaactcataaggtcccctatggatcttattagaagaaaatgccctgcaagaagtcaggctgccttaaggagtactgtgactgcta

SEQ ID NO: 96184 - DNA, 418 bp, Zea mays
  Clone ID: MRT4577_19234C.1
tctgagcaccgcagagagcggacgcaacgggggaccgtttaggaagtgccacggcctttctcccccaggagcgcactgaagccagccgacgaagagccgccacctcaggcggcagcacccagcggcccgccgcggagctgaacacccggcgggcgaggccaggcggctgcacacgccgccattcgcgacgggggccccgcaagaggccaaaggatccagcccagcggaagcgcagaactaggcgcagggcagctgggcaggaccggccaaccggaacgggaaagacgaccccccgaacggggataaactgcaccaaggcgcagaagtcgagggaacagaaacaaagccagccgaggagagagaaaccaaacgcccaaagcacggactgcacaacccacgcaaagctccagagaggggc

SEQ ID NO: 96185 - DNA, 587 bp, Zea mays
  Clone ID: MRT4577_19235C.1
ttgggtacctcgaggccggccgggagacgaagttcgggaagtaaacaatcgcgagagggtagggaacacaacaagcacagcagacaggacccccgcagaacggtgactcccccccggtccgccacactcctcggaggcgctgaacggaaatctctcgtcgtagatcggccttcaccgatttcgctaggagactgatcaactcctctgcggcgatgccgattcaatctgacgaccacgcaacagaaggctgaaggaggatactgggagccgagggggaggctaggggttacgactccggtgtgatgcaccgcccgctacgacttcaacggtcggtgttcaagcgcgggctgtaacccaccggggggggcgaccacgacaaccatgcgcccaagcgtccccgcatccccggcctcgctagtgtcattgtggaagctctcaagatggacaggctgaagacactctgttcatcgcttgagcccattctcctaagagctgcaagtgaataagtagagcgagatttagccaaactgtaccctgctacaatccaaggaaggtataaacaatcaacttacacttcatgttgatgc

SEQ ID NO: 96186 - DNA, 1519 bp, Zea mays
  Clone ID: MRT4577_19236C.1
cccacgcgtccgcccacgcgtccgcccactcgtccggaactctagaagaaatcctaagagagaagccactaacgactaatgaacatcaatggagatctctagttggaatttggtgccaagagcaacataagaaattatgttccacaaactctcgttgtgcaaaagaacagaagactgcacacacatgtgggaggaaaagccttgctagattaaaaaaagagatggaaacaagaactaaacgaaaggttcataggatagaactatgggaggcagctcataaaaagaagaatggtagatacacaacagaaaaggcagagacactgatggctgcatcttatgaggaatttaaaaaaggcgagggaacaacgatggtaatcgtctttcatctaaagattacaatgaagtgttcaatgatattgttgccaaggatttcaaagcacgtgggtactatgatgataagtactggagtcaagtacaagcttttcaaggtttaccgtttgttattcaaacagaggaagaaagaatgtaccaagagaaagtaaatgaaattgacaataaaatggaatccgtgagtggtctcatgaagcattggcttacttttatgtcaaaaaagtatctagaagatttaaccccagagatgagagaacctttacaaaatgaaggtggtgatagttatgaccaatgcactgaagatgacaactctgaaaattatgctttaacagatatgaatagcctccaagattgttcaaatgctaacgttaacttttcaataggctacggggctgatgatgatgagaggggagtacaacggcttttagtgtacgaatatatgcctaatggaagtgtggatgatcacttgtcgagtaggtcaacttctactctgtcatggccaatgagactaaaagtagctcttgattctgctcggggactgaagtatctgcatgaagaaatggaattccaggtaactcctttactttatggtcatggaggccataacacttgcacaatctgaaacatctatggggcaatagcatccctctgcatctcaatggtgtggatgcagatcttctaccaaactcgatatcccgcctcctccatctacctcgatctatagcaagacgaggtggggattgaggatggtgacatgcctcgacggcgtgctcctgctctttcatctgcctcgatgcgtagcacaacaaggtggagatcgaggatggtggcataccacaatggtgtagagacagatctcaatgatgtggaggtcggtctccatctagatttattatgtttgcctgctccttcatctacatcagcccacaatatgacaaggtggagttcgacggggatagccatggtctcaccgcctccttcatccatctttacacacgtgagatctacatgacctcactccatcgccttctccttgggaaatatgcaagcaaaggaaggagcgaatctaaaaggagaaaagagaagaaaaaaagatgaaaaagcaatgtggtagtagtatcccggccgg

SEQ ID NO: 96187 - DNA, 730 bp, Zea mays
  Clone ID: MRT4577_19237C.1
aaaaagattagactttatagcattactacatgacatacaggagaatcattgcgaatattatatcatctaatccattagattaattaatagaagtagcgagcacattattaccaaccgatgcgaaagtttccaaaaacgacgatgctttcgtgggtgaggcgtttcgtcgagcaccaggcgagccttacacaaaattcattttctgcttctatcaacaccactcttaaccaaaccaccacctatgcagatcaacagaccattgagaccaagcgctgttgcatagtcttcatggcgacgagagcggtgggccgatagcgaggttcgaacgcgatggaaagatctgcacggctggcgcgacactgaggacaaatcgaccaggccacggcgagccaatgttatagcagagaaaccccatgttgagtataaggacgcgtcgagcgaagactggtgacgaagccgggtgaggcgagcctgcggcagctgacatgcccgatgaccacagacgtagctggggagggagcctcggcaggtcatgaagggaagaaaaacaaggacaaggccgagtagaggagctggccatggcgcgactgccaggacaagcgcagaggaaactccgaccggccgccggaaagaagaggccgccggggcgaagctccatggtcaggagctgggggcgaactcgagcagcaggggagagcgagcgcagcagcgagcgagtaccagggcacgc

SEQ ID NO: 96188 - DNA, 287 bp, Zea mays
  unsure (1)..(287): unsure at all n locations
  Clone ID: MRT4577_19238C.1
ctgcagtaccnttccntaattctctttcgaccccgcgtcctaataatataacttgcaacattcatgtttgcgatcatacatacctacgtacacatttacgtgttgaggatcatttatgcttggcagaaggtgtatcctatcttaatcaatcaccttcttctttttctcaaattttgcaggttctcgtcatggctcttaagatttataccctttttcacgactcctctttaatcaaatattttaatgaaaatttgacgtttcaaaaaataaataaaattgcccttcgt

SEQ ID NO: 96189 - DNA, 287 bp, Zea mays
  Clone ID: MRT4577_19239C.1
ttcttcccccgggcccctaaaatcccttattaaatggctggattagttcggggctaaacctaataaacccacgggccctggggccccaaaaacatgtattaaatccccccaaaaaaaaaaaccttcgcttgggtttctggggcccaaaaaaaaaaaaaaaccccccaaaaaaccaacctttgaagggccccggggcaaggggaattccagggtccgggcccgggaaatatgccccctttaaggggaggtttgcattggaaaacaaaacctgggggttttggggtttc

SEQ ID NO: 96190 - DNA, 291 bp, Zea mays
  Clone ID: MRT4577_1923C.1
cggagcgtgggtctccttcccggtctcctacgttcgttgccttcgtcccctccatcgcctgctgggtcgcctgccagcccgacaccgcgaatcggatccgacgacaaggtgagagggaagagattgggctcactgttcaccaagctggtcagccggctgttcgccaagaaagtgatgcagctcctgatcgtgggactctacgccctcagatacgaccacactacctatagtccgacacttgccgagaactatatcaacaggcgtaacttcttctagcatgagataaccaag

SEQ ID NO: 96191 - DNA, 351 bp, Zea mays
  Clone ID: MRT4577_19240C.1
atggccgaatccagttgggtaaaagaggctgcttacctcgctttgacatggcggcaaatggtgttggacccgattggtacgaggcaagctagggagagggaaacgggcgggaatctcagccaccgcgtaggggagaagaagaggatgatggccgacagaagtggggccatgcggtggaggaacgggagacggtggatgagcggacaaagaagaggtggagaatcgcaagctcaccctggtgaagtgaaggggcgaggggaggagcagtcggcggcagaagaggcgacgcagcagctcctcgcgttggtggcggtgactcaagaggagcatggagtgggcatcgatggttga

SEQ ID NO: 96192 - DNA, 292 bp, Zea mays
  unsure (1)..(292): unsure at all n locations
  Clone ID: MRT4577_19241C.1
ctctagtcctacgctctacaaaacccttttcacctgcgaaggttccatagcccggaggggggggctcacataaccgacaacgcgaaaaccatggagagacatccgatgccgcagtccactcaagaggacgaggaggacttgattgaaacccagggtgacaatcccgtaatcgaccgcgccgtcaccaatatctcacaaacatgtgggcgtacccacagacatgtcgatctctttctacacacagancatatatacgacccctttcactttttgcattccaagtctctatagc

SEQ ID NO: 96193 - DNA, 356 bp, Zea mays
  Clone ID: MRT4577_19242C.1
aacatgtcgctcgttatctctgtgtttctaaagggggaacttgatctctttaaggatagtccgcacttataccccacgaaagagagacaaaaagcgcacacagctgcccccactgggctgttggatccaaacaacgcacagtgtcgtatcaacgcactgacaagaaaaccccatgttgacaacaccaagcgacagactcggcctaggaggactcacggagggggcctctacagcttataacattgagctcgaccttggcctagacccagatacatgactgaactccacatatcagctggaccaagacaagtatactcacgtgccgccaccacggcctggaccctcctcacgacctc

SEQ ID NO: 96194 - DNA, 777 bp, Zea mays
  Clone ID: MRT4577_19243C.1
ggtaccactcgaggccttccggacagcaattaagtgctcactcactcactcagctcgtcttcttcttcctccgctcggcctctcgttgcggccagggaaagagctagctagctagcgtgtgctcgatcgatggcgaaaacgacgatgagcgcggccaagaacctcgtgaggctcctcgtcctcgtgcaggtgtccttaggccttctgggcggcgtcgcggcgctcagcttcgactactacggcatgacctgcccgttcgcggagatgatggtgcgcagcgtcgtctacgacgccctcatgaaggaccccaccctggccggcagcctcctccggctgcacttccacgactgcttcgtgcagggctgcgacgcgtcggtgctgatcgactcggcggacggcaacacggcggagaaggacgcgcaggcgaacctgaccctgcgcggcttcgaggtgatcgaccgcatcaaggagctgctggagtcgcagtgccccggcgtcgtctcgtgcgccgacgtcctggcgctggcggcgcgcgacgccgtgctcctggcccggggcccctactacggcgtgcccctggggcggcgcgacggcacgcggtcggtggactccgacaccttcacggcgctcccgccggccttcttcaacgtgaccatgctcatgaagctcttcggctcccacgggttcacggtccaggacatggggccgcttgccggcggccacacctgggcgtcgcgcactgcgccaacttcagggccgcctcgccgagacggacac

SEQ ID NO: 96195 - DNA, 558 bp, Zea mays
  Clone ID: MRT4577_19244C.1
cggccgcgtcgactttttttttttttttttttttttttgcaaagcaaaagtcggaagctgacattgcatcaacctttgggatctagtagtctgctggtcttcaggaactataacaatcaatgtctaagatgagctgtggtggagttatccgtgacgaacttcttgaacgagacgaggatcggggtgcgcactacgttcttgggtgagacccacgtgaggtgcccctcggcgatccctttctggatacttgtgtccatagacccgatggtgaccgtgaaccccttcgcctcgttcaccttcttgaacaggagcactctcggagttactgtcaccgacaccgtgctcggcatctccaccctggcgacgtacaaggaggtgccgcgcccaacgttcgtcacgacgcgggtgacattaacgacgtagggctcctgctctaggaacgcggtgatggacgggtagttgaggtccttctgctccacgacgcccatctgcgcgcacgacaccgccggcagcgggtggatgatcgagttgatctcttggtcgggtcgacgcggccgc

SEQ ID NO: 96196 - DNA, 785 bp, Zea mays
  Clone ID: MRT4577_19245C.1
ccgggttagagaatactaattcccagggcaggataatgattctattagtctcacaaccaaggaagagtacttggcacctgatgctggaacaagtgtttccacaggccaacaggatttcttcctacatgatgagatctgttttattcccgaacaacaacggagtttagacaacgatactaaagaggctgtcctaagcgacccgttaggtggaacaaagtcagatgatgtgtcttccagtgcaaaggtttgtctgaattaaaatttccattatttcacagctaagaaaattgggtgttttttttttttgtccatgtcttcatgcacaaattcagcacgtaaaacttgcttttcataaggttacgcccactaagaagttggatgaacctgatcccttgatcagcccgaaggctgtgtcttcatctagtaaacctgaccagcagtcatggattgatggctacatttgttccatctgtggatttgaactgcctccgggcttcgaggaggagaggctggaacattcagattttcacctggctgaaacactccagcaggaagaagcagtggacggcacaagacacatctcaaacgagagctgggtggctgaaagaccacgctctactgcacccacgcccaagaagaaactcaagtcttctaaagaaggaaagcatatttctattgactctttcttcacaaagtgtaataagagcccgtaaccgtaaggtaggacttgccggcaactctgtaactatgggcatgctagccaagtgttgtacgtgttaacttta

SEQ ID NO: 96197 - DNA, 1891 bp, Zea mays
  Clone ID: MRT4577_19246C.1
cgaaaatgagcagaggaaggaggcagccaccaaacaaaagattgaacatctccgtgcacaatgtgcagtattgactgataatgacatatcacattttcagaaggttgcagataagaaaatgttagagttggaagcttcacgagatctttcaaagatatggcttcacactgacatggatgccttttatgctgctgttgagacattggagaacccatccttgaagggaaaacccttggcggttggtagcatgtctatgatagctactgccagttatgaggcacgcaagtttggagtgcgtgcagcgatgcctggttttattggatgcaaactatgtcctgacttggtttttgtcccaccaaactttgagagatatactcattatagcgagctgacaagaaaagttttccagaggtatgatcccaacttcattgcaacaagtctagatgaagcatacctcaacataaccaatgtttgcattgagagaggcattacaggcgaggaggttgctactgaacttaggtctgccattcaccaggaaactggtctaacatgtagtgctggggttgctccaaaccgtatgattgcgaagataggtggcataggtaaggtaacagaacagatgttacatcaggttcttggaatcagtacatgtcaggagatgctgcaaaaggctgcttttttatgtgctcttttttcggaaagctcagctgatttctttctgtcggttggtctcgggttaggaggtacagaaaccccagaacaaaggcaaaggaaaagtatcagttgcgagcgaactttcacagcaacaaatgattcttctttgcttttcaaaaaaattagctagccttgcagaaaatgtatctgatgatttgcaaaaggagggtttcaagggaaaaacactaacactcaaactgaagactgcagattttgaggttcggacaagggcagtaacaacacggaactacatcgactccaaggaagatattctggtctatgctacaaagttgattaaagctgaaatgcctatttctttgagattgatggggttgcggatgtctcagctacatgatgagaaggatgatccatctacttcaacacaaaagacactagatatattctttcgttcatcaaactgtaactcaaatggcaatggaaccaatgttcagagaatcactaatgccccagggcaggataatgattttattagtctcacaagcaaggaggagtacttggcacctaatgctggaacaagtgtttccacaggccaacaggagttcttcctacatgatgagatctgttttattcccgaacaacaacggagtttagacaacgatactaaagaggctgtcctaagcgacccgttaggtggaacaaagtcagatgatgtgtcttccagtgcaaaggttacgcccactaagaagttggatgaacctgatcccttgatcagtccgaaggctgtgccttcatcaagtaaaccttaccagcagtcatggattgatggctacatttgttccatctgtggatttgaactgcctccgggcttcgaggaggagaggctggaacattcagattttcacctggctgaaacactccagcaggaagaagcagtggacggcacaagacacatctcaaacgagagctgggtggctgaaagaccacgctctactgcacccacgcccaagaagaaactcaagtcttctaaagaaggaaagcatattcctattgactctttcttcacaaagtgtaataagagcccgtaaccgtaaggtaggacttgccggcaactctgtaactatgggcatgctagccaagtgttgtacgtgttaactttattcttgatgagagcaatatatgtaaatatcaccgtcaaaaaaaaaaaaaaaaagcggcc

SEQ ID NO: 96198 - DNA, 460 bp, Zea mays
  Clone ID: MRT4577_19247C.1
aagacagaaaatcactttctagacgtatgattcaaatatctccggcttcaaagaccggaaacaaagacctctctgtatgtctttgcgctgaaaatgtgatacaggactacggccacggaataaataccagctaagaggcactagtgcggctgctaaaaccggatatcccccatatgctccagctgttgggttggcgtccttttcaggttagacttgctcctacttcgcgaattactcaatcagctcccgctgtctaaacgtctaatctacggggaggttgacattgaaatggacatattgatcttcgtggtacggtgagtttatcgtcttgagccctgctcctctgagaactaccttgtgaccaggtacagcaccgggctcgatcttaacaacaacgtctgctctgagagtggggactcgaactgcccctcccaaaattgcctgaatgagagtaggacag

SEQ ID NO: 96199 - DNA, 722 bp, Zea mays
  Clone ID: MRT4577_19248C.1
gtgcggcgctcgaggcggccgttccggattcttacttgctactacgttgatacaccccgacactctgcactactcccactcatatccaacaccgacttcaacaccgcaaacatgttcaacattgtcctcaccctgcttcttcagctctccatgttcatgctggctgaagcagctcctcttaccgtgcagaaagccgagccatggcaagctggtaccggaggaggcatcgttggattcattgttcttgttctcgatatcatcgcatggattgagatcttcaagtcgaaccgccccgtgcccaacaaggtcatctgggctctcgtcgtgttcctctttcctgttgtcggcatgatcatctactacctcttctcgaaccgccaagcacacaacacctacgagcccatacccgcatagaccactcagaggccccttttgccctggccccttttgccctagcgtccactgtgccacgcaaagcaaaagctggatgtgatgacgacatgtgcttataggtattgcaacctggaggagcaatcgtgcagatatcttgagtgatggttgggtgttaggcgttctatcatggacctgtagtgggcaatagtgagagggacacggttcatctttgatatccggcctgtttacgagtttcctttcttatctcgatgaccactaacgcaataaccaatctattccaacaccacttcaatgtgttgcatctccaa

SEQ ID NO: 96200 - DNA, 466 bp, Zea mays
  unsure (1)..(466): unsure at all n locations
  Clone ID: MRT4577_19249C.1
cgcccttagctatctcccgaactcgcccctagccttatctgactcgatgtgcacactgaggggctgtttcttaaataagtgaattggattgtagaatttcataaataagtgaattgctttgtccttccctctctccctctttttgttttttttccctncgtctccgcccgtggggggcgtggtctcctcctcctttatctccatgttcatccctaacttttcctttcccccctccccctcgggccttttccccgcggtccccttcacactggggcctgttccgccccccccctgggggcccctcctgcccctttccttcgcgctgtctccctttcgtgcctccctttcccaaccccctttctccctattttttggccttttccttttctctgcccccccctttcttctccctttcttctcaatcccctttcttttctcctccctttctccttgctcttcttccctt

SEQ ID NO: 96201 - DNA, 4125 bp, Zea mays
  Clone ID: MRT4577_1924C.1
atggagttggtggagggtgagctgggaagattcgcgatgatcaggggagaggagccaacacaaacgtacaataggttcaagaccctggtcaacaagattaggagctatggaagcacaagatggacggaccacgacgtcgtccgacttatgctcaggtcttttaatgttattgaccctcatcttgtgaacctcatccgtgaaaatctcaagtacataaagatgacgcccgaggagatactcggaaagtttgtgagcgggagcatgatggtgaaagaagcccgatatgtagacgacgcacttaatggtccattacccgtctacgagcctcaacccgttgctctcaaagcaacaagcagcagggaggcgctaccaagcaaggtggcacaagttgaggcggtcgggctaaacgaagatgagatggctctaatcatcaagcgtttcaagaccgcgctaaaaggtcgcaaggagtatcccaacaagagcaaagcaaagggaaagtgctcctgttttaaatgcggtaagactggtcattttatagcacaatgccccgataataacaatgaccaggaacaagaaaagcatgggaagagggagaagaagaaggcctacaagaaggcaaagggtgaggcgcaccttggcaaagaatgggatttggactgctcttcttccgactccgacgaagaagaacttgctgcctcagccttcaacaagtcctctctctttcccaatgaacgccacacttgcctcatggcaaaggagaaaaaggtaagcgttcgagaaacccctaagtatactacttcaagcgatgatgattctagtgatgatgaagtagattataccgattcatttaagggtttagatagagcaaaagtagataaaattaatgagttaattgatgctctaaatgaaaaagatagattgctagagaagcaagagggcattttatatgaagaacatgacaaatttgttagtgtacaaaagtctcttgctttagaaactaaaagaaataaaatgttatcgtctgaactgtctgtgtgccatgaatcaatatctagtttaaagattttgaataatgatttaaatgttaagctagaggtagccaataaatctagttcatgtgtagaacatgttgccatttctaataggtgtaaggattttgatgttgatgcttgcgttgaacaccttacttctattaccaaattaaatgataaggtggcaagtcttaatactcagcttaagacttgcaaaaatgattttgataagctaaaatttgctagggatgcctacaccattggtagacaccactcaattaaggatgggcttggttttcgaaaggaagccaagaacttaacaagccaaaaggctcccattctcgccaaggagaaagggaagggccctatggctagtagcgttcaaaagaatcatgctttcctgtataatagaaaaattgctagtcataataggagatatgatcatgatgcttgtttatgcatccgggggctcaagctggattatcgacagcggatgcacaaaccacatgacgggggagaagaagatgttcacctcctacgtcaagaacaaggattcccaggatacaatcatatttggagatgggaatcaaggcaaggtcaaagaaggagcgatggttcattagcgtttaagggtgtactagatggcaaactctacttagttgatttttcgaaagaggaggccgatctagatgcatgcttaatctctaagactagtatgggctggttgtggcatcgccgtctagcacatgttgggatgaaaaacgttcacaaacttctaaagggagagcatgtgttaggactaaccaatgtatgtttcgaaaaagatagaccttgtgcagcttgtcaagcagggaaacaggtgggaagcactcatcacaacaagaatgtgatgacatcatcaagaccactggagctactacatatggacatctttggacccgtcgcctaccttagcatcgggggaacaaaatggtgtggtagagaggaagaacaggacgctcatcgacatggcgaggacaatgcttggagagtccagacgcctgagcggttttggtcagaagttgtgaacacagcttgccacgccataaaccggctctaccttcatcgcctcctcaagaagacctcgtatgaacttcttaccggtaacaaacccaatgtctcttactttcgtgtatttgggagcaaatgctacattttggtgaagaaatgtagacattccaaatttgctcccaaagttgtagaagggtttttactagggtatgactcaaatacaagggcatatagagtcttcaacaaatcatcgggtttggttgaagtctctagcgacattgtatttgatgagaataatggctctccaagagagcaagttgatcttgatgatatagatgaagatgatgttccgacggccgcaatgcgcgccatggcgattggagatgtgcgaccacaggaacaacaaaagcaagatcaaccttctacctcaatgatggtgcaaccccaactcaagatgatgaacaggttcctcaagaagaggcgtgtgatcaagggggagcacaagaagaacaaacctttcagggtagaagaggccttgcaagatccggactgggtgttggccatgcaggaagagctcaacaactttgagaggaatgaagtttggagcctggtgccacgtccaaagcaaaactttgtgggaaccaagtgggtgttccgcaacaagcaagacgagcacggggtggtgacaagaaacaaggctcgacttgtggcaaaaggttatgcccaagtcgcaggtttggaattcgaggagacttttgctcctgtggctaggttagagtctattcgaatattattagcctatgttgctcaccactctttcaggttgtttcaaatggatgtgaagagcgctttcctcaacgggccaatcaaggaggaggtttacgtggaacaaccccctggctttgaggatgacaggtaccccgaccacgtttttaagctctctaaggcgctctatggacttaagcaagccccaagagcatggtatgaatgccttagagatttcttaattgctaatgctttcaaggttgggaaagccaatcccactcttttcactaagacttgtgacagtgacctctttgtgtgccaaatttatgtcgatgacataatatttggttctactaatcaaaagtcttgtgaggagtttagcagggtgatgacacagaaatttgagatgtcgatgatgggagagttaacgtacttccttgggttccaagtgaagcaacttaaggatggcactttcctctcccaaacgaagtacacacaagatcttctcaagcggtttgggatgaaggacgccaagcccgcgaagacaacaatgggaaccgatggacatgtcgacctcaagaaaggaggtaagtccgttgatcaaaaggcataccgatctatgatagggtcattactttatgtatgtgctagtagaccggatattatgcttagcgtatgcatgtgtgctagatttcaatccgatccaagggaatgtcaccttgtggccgttaagcgaattcttagatatttagttgctacgccttgcttcgggatctggtatccaaaggggtctacctttgacttgattggatactcagactccgattatgctggatgcaaggttgataggaagagtacatcagggacgtgccaattcttaggaaggtccctggtgtcttggagttctaagaaacaaacctccgttgccctatccaccactgaggccgagtatgttgccgcaggacagtgttgcgcgcaactactttggatgaggcaaaccctctcggactttggctacaatctgagcaaagtcccactcatatgtgacaatgagagtgcaatctgcatggcggataatcctgttgaacacagccgcactaagcatatagacatccggcatcactttttgagacaccaccagcaaaagggagatatcaaagtgttctatattagcaccgagaaccagctagccgatatctttaccaagcttttagatgagaaaaccttttgcaggctgcgaagtgagctaaatgttctagatttgcgtaacttggattga

SEQ ID NO: 96202 - DNA, 177 bp, Zea mays
  Clone ID: MRT4577_19250C.1
aagagtgcaagctaggttccgctgttgatttttgatgtctgataacatgcatacggcccgcagttctagaaagttaggccgcattacctaatcatcattttgttagtgatatacgggcaatatattaaattgtgcttaaataaaagaaactgataaaaactattatatacataaaaa

SEQ ID NO: 96203 - DNA, 170 bp, Zea mays
  Clone ID: MRT4577_19251C.1
caaaggtgttcgccgcgttgggagatgggcagaggagaccccagaacctgaccgcagaaaaactaggagatccgcactggccaaggaagagaaccaagagccgcctccccttcttcctcccagctctagagcagctgctgttgaagagcaattcagaggacccatctgtt

SEQ ID NO: 96204 - DNA, 203 bp, Zea mays
  Clone ID: MRT4577_19252C.1
attaaggttcccaactggaacggtgtgacaaattaaagccaagtaactttggcactgcaacattaggctgggataggatccaaagatcctaacggaagtatggctggccacacaaagtagacatatagctatggataagaaaggctggggcatcggccatccaccaccatggtgaggacactaggagaaagactgatcggaag

SEQ ID NO: 96205 - DNA, 113 bp, Zea mays
  Clone ID: MRT4577_19253C.1
aattaggttccgccccttttagtttgaatggggggatgcttgccaacggaagatgattacccaacaacgaccccgtttggggctggcccaggccccggcttcggacgcgtggg

SEQ ID NO: 96206 - DNA, 577 bp, Zea mays
  Clone ID: MRT4577_19254C.1
aaggctgaataatttcccgttatatattgtggaggccgagaaaaatcaaggccattccacctcaagtttagcattagcacaagtacagccatcttaggcccctgtgaataagaggaataagagctgaactttacaggaaaagctgcagaatgtccttgccagggaatcccacatccgaaagacaacagagcctagcccgcgcggggcagaaaatcccatattagaatgagaacagagctcaatgcccttaagccccatatcagaatgtacacagacttgagaaattcctccaccccttctggaggtcccctagaccagcccataagaaacccagctgtaacccacttcggggtccaagtccctgctccgctgtgtcgggtgtacctgggccggagctcgggcttgcaaataaaccctcgggcgcttgcatcgctgtcggctccttggtggtttctcggattcgcaatcttgggcacaacatacatttgtatacatacacgcacctatatgtatatcctatatgtatatatatcaagcacaacctttttacgtataagcagtttgatcatgtaaacca

SEQ ID NO: 96207 - DNA, 746 bp, Zea mays
  Clone ID: MRT4577_19255C.1
actcctatgggcgattgggaccctcgaggccggccgggtattcttgattagtcaatggagaagatgcgactgtggtgctcggtgcttgcttgcacaaaatcaaaacaccccctcgtcgattatcaaattggctccctcttccttgagcacctcaggatgagggacgtgacgaatgtacctctactggagatggatactgatactgtatcttcatataatgaagtatgtccttcctctggacaaaaccaaactgcaaaaattcatctacgaaatgatgctgatcaatgcgaacacacaagactatactgctgctgcagatgatgcttgagaaactgacgaagaggattgggatggcatacctgctatgaccattgacaaaactttcgccaaaattcccatcgcaacaacaaatcagatcaggttatgcttctgagggtatggataatacctctggtgtgcgatatggaatggtcatcaggaatgtgtgtgctactgaaaagacataaactatctgtccctgtgtcatatttggatgtggtgaacggtggaagtcactgcatatatatgagtgcttccctgagactgtgtaatcctactgtgctcaaagaattaggaactcacgatgttgtggcggccttctccttggaaattgtggtcacgttagcgaggagagagacaaatcatcctctttgcaggtctctacaagataacagagtctttttgacttgaagaatgccttgctgctc

SEQ ID NO: 96208 - DNA, 1003 bp, Zea mays
  unsure (1)..(1003): unsure at all n locations
  Clone ID: MRT4577_19256C.1
ttttgattttaggtgatgatcacacccagtccaaatatgggattaaaaatatataattgtacagcaccagttggttgagttaagtacagttgttacatttatctccacaccacctcacacaggtcacagctgtatcatcttcttcttcctctctctctctctctctaccaacccaaagtcacaaattagcttctttccccgcccctacatgctacatgtcagatttggtcaagctaccattcactgagattttatctcgtctatacaaataaaaaaattaaattagacacaaaagatgcatctgaagaacttatttccctctctgttattttctgtttctttcttttgaaaattaaccgtttttatggacatcaactaatgcagcctatgtatgtataccaaccgtgaaaaagtaaaaagagaagagacaaaaaaaaaagaaaccccgtgatattttacatcgttgagtgagacctgccatgggtgacgggtcggctcgagccgaggccgaaaccaaagccgaagccgaagccgagctcgcgtgtgtggaacgggctcgggtcgtcggactcggagcgcgaacgcgaacgcgacaggtcggagccgccgtgccgggagctgttgtgtccggcggcggccacgacggactcctcgcacagggtgacggccccacgcgtccccgcccccatgggcggacgcgtcggcctcgcgcgcccccgtggtcggacgcactccgaggcgattttggcgacgcgcgccaccgcctccacctcgtgcccgcgcggggggggcacgcgctcgtccaggatctttgtgacgctgcccgcctcgaccgccggcacggngaactcgaccacgttccggggggacccgctgccgtcctggttcgtccgatggatggccttgcggccggtgaccagctccagcagcaccacgccgaagctgtacacgtcgctgcgctccgtcagttcctgcagccggtagtattccgggtcgatgtacc

SEQ ID NO: 96209 - DNA, 446 bp, Zea mays
  Clone ID: MRT4577_19257C.1
attcggctcgagggagatccttgaactttttttcattatctacacaatgacatgcttacggttgacattgctgcaccaagccgggagtttgatctggagtgctcaaatattgacgtgaaccaaacctctagggaatcatgttcctggcttagctgtgtttacccaatgctagaagcaatgacggcgcaaagcatataaatgaactagggatggcatatcggcgcatattgtgctcattacttaacagatcgatcacagagctgcttcaaaaaacctacgaattctacacacagagacattacacccctctgttccgtaggaattgaataccattctactgatcctaattgatacataaaatcattaactcaatatattcgtatatgtagcatatatggatattacgctgaatcatatgagagagattatatactacacatatgcta

SEQ ID NO: 96210 - DNA, 344 bp, Zea mays
  unsure (1)..(344): unsure at all n locations
  Clone ID: MRT4577_19258C.1
aatacacgccaagcacgcgcaccgaatccatcgcccgagcaagcgaagcagacgccacctgccctgcccagaccgccgcccaccgtctcccaggagctcagaggcgccaccaagaaccgcacggaagagagcggatcgatggcgatggccggcggagccccgccggcgccgctgccggtggtggggcaccagttctgcgcgccctacgtggtgccgctgacggtgaccaagaaggcgctcagcctctccgacggcgacttcgccatcacggacgccaacggcgccgncgngctcaaggncaagggcgccatcttcagcatccggagccgccgcaccatcctcga

SEQ ID NO: 96211 - DNA, 659 bp, Zea mays
  Clone ID: MRT4577_19259C.1
ccaattcctcgtgttagtactaacggggttgggagataagttgatgatagattaaactcattcaattacacaaaccaaacaaaaaagtgaagagtaagaagatgatggactaacttattgcttaaaccaaacaccctataaatagggtcactcacatatttcgggtttcttgcttggtgagggaggaaagccaggtcgagagtgcacacaatatacatagacagatgttattcgacggtggaaagatatagagcatgacttttattctaatggcttttcaaatatatagtgagagacagttttatatgcatacatttattccgctggtttcaactcgagatatacaggcatactgcctggatttacactgtaagcaaaatatattgtgacacatacactaatatataggcagcgttatttacagttgattaattatgtatacaatatatataacttttacatatttcattgattaattatgtatacaatatatataaccttgtgtaggtttatgaggctactgcatccgattaacctccccaaggcgtgagctttatgcagtcatttagcctggagtttgtatccgtgtcacctagtactttacggtaataataagagactgtatctgtatgtttcggtaaactagagttctggtcacc

SEQ ID NO: 96212 - DNA, 2588 bp, Zea mays
  Clone ID: MRT4577_1925C.1
cattctcttgattttcaaatctaattttgaatttttgttatgagtcacaccatggatcaaaatgtaccagattcaaatattagtgtaaaaaatatattcttattaatctattttattttacctcattggtttgatatttccttttcttttcttaaattctaaaattgtacctttagattaaatcccaattctcaatactccagtataatttgagatatctgaatttgctattttatttcttcatatatttattatattttttccttatacaaattttgggccttacaaaatgcaagttttatctcccttgcattttgcccctaatttcctagcaatcactttcttatcatttctacaaattgcaaaggaagtattgcaagcatgataaattgtagaaggttcattacttgctttcctaggtacatgaacaacatttctcctaggcatgtgatgaataacatttttcctaggcatatcatgcacaatagaagaactagaagcagtcatacatatgaatcataagaataattcctataagcatttctagagaattttctatcactataaatgaaagcatggttctttttagcactactagccataggagccttccctttctccttgacgaagatgggagccttatggcttgttaagttcttggcctctctcttgaagccaagaccatccttaattgaggggtgtctaccaaccgtataggcatcccttgcaaattttattttatcaacttcattcttgctagtcttaagttgggcattaagactagccacttccttatttaatttggaaattaaaactagatgttcactacaggcatcaacatcgaaatccttacacctagtgcaaatcttaacatgttctacacaagaattagatttatttgctatttctaacttagcatttaaatcattgttaacaccttgtaaagtagaaatggtttcatgacaagtagatagttcataagaaagcatttcatttctttttacttctaaagcatatgatttttgtgcctctacaaatttatcatgttcatcatacaataaatcctcctgcttttctaaaagcctatccttttcattcaatgcatcaatcaattcattgattttatctatcttagatctatctaagcccttgaacaagcatgaataatctatgtcatcatcactagactcactatcactagaagaagcataagtggagtcttgagtactcaccttcttctcccttgccataagacatgtgagacgctcgtttgggaagagagccgatttgttgaaggcagtggcggcgagtccttcgttgtcggagtcggaggaggagcaatccgagtcccactcctttcctagatgcgcctcgccctttgccttcttgtattgcttcttcttttctcttttgttccccttttcctggtcactttcattatcgggacagttagcgataaaatgaccaagcttaccgcatttgaagcatgagcgcttccccttggtcttagtcttgctcggctgtccattgcgaccctttagcaccgtcttgaatctcttgataatgagggccatttcttcatcgttgagtccagccgcctcaatttgtgccaccttgctaggtagcgcctccttgcttcgtgttgccttgagagtgagaggttgcggctcgttgatcggaccattcaaggcgtcgtccacatatctcgcctccttgatcatcattcgcccgctaacaaatttcccaagaacttcttcgggcgacatcttggtgtacctgggattttcacgtatattgttcaccaagtgaggatcaagaacggtaaatgaccttagcattaggcggacgacgtcgtggtccgtccatcgtgtgctcccgtagcttcttatcttgttgataagggtcttgagccgattgtatgtttgcgttggctcctcgccccttatcattgcgaaccgtccaagctcgccctccaccaactccatcttggtgagtaaggtgacgtcgttcccctcatgagaaatcttgagggtgtcccagatttgcttggcgttatccaagccgctcaccttatggtattcattcttgcacaaggaagctagaagaacagtagtagcttgtgcattcttatgaatttgttcattaatgaacatgggactatccgaactatcaaaatgcattccactctctacaatctcccatatactaggatggagagagaataggtgactacgcattttgtggctccaaaatccgtagtcctctccatcaaagtgtgggggcttgccgagtggaatggagagcaaatgagaatgtgaactttgcggaatacgagagtaatcaaaagaaaagtttgaattaaccggttttcttctctcgtagtcgttgtggtcctcgtccttttgggaagaagtagactcgtcgctgtcgtagtagacgatctccttgatgcgcctggtcttcttcttcttcccttccttccgtctttggcccgagccggagtcggtaggcttatcgtccttcggctcgttgacgaaggattccttctctttgtcgttgatcactatacccttccccttaggatccat

SEQ ID NO: 96213 - DNA, 488 bp, Zea mays
  unsure (1)..(488): unsure at all n locations
  Clone ID: MRT4577_19260C.1
tcgcggttcgacccaagactctacagtgagtcactattaaacatgaaagactttccccacaacgaagaattcttcatcgctcttcgcgacactgaccttgtcctcgatgtgcaaggcggcagcgctgatgcaggcgcccccatcattctgtacacccagaagcatgaggacaatgacaaccagaagtggatctacgagaacaagcagcttaaaaacaagcagactggtctcgtcctgaccttccctaatctcgatgctaacgttactgccactcagaaccacgctggatgctctgacgagcagacattcgagtactacgactacaccatctcggcccaagctcaggaggacctcgtccttggaatcaatggagaaaagaaggagctcgctcccatcaccttgattagacgcgacaacgattccgacaagcagcagtgggagatcacgcgttgatgggtgctgcatancgcaggctcacaaatcatgtc

SEQ ID NO: 96214 - DNA, 526 bp, Zea mays
  Clone ID: MRT4577_19261C.1
cttctggctctagtagctagtgtactagttgtatgccgcagcgatctgtatatatgtacatgcagtttctcgatcgttatcgctactcgatcggtagccatcgatcgatcttctgatgcaaatgcaaatgctcatcagataacatggaccccttcgtgatccttacctgccgcacccaagagcagaaaagcagcgtcgcaaatggtacgtacgtataggagcacttgttttttttttctctcttttcattcgttcgttcacaagaatccccatcttatgctgtcgatctgcaatacgtacaggagcaggaagcgagcccgaatggaacgagaccttcgtcttcaccgtctccgacgacaccccgcagctccacctcaagatcatggacagcgacctcaccaacgacgatttcgtcggcgaaacaaccgtacttatcactactgatcaacgacgattaccttagttgtgaaatgaaatgatccatattaacctttttcgaactgcatgcatgcgtgcgtgcgtgtgc

SEQ ID NO: 96215 - DNA, 1245 bp, Zea mays
  Clone ID: MRT4577_19262C.1
atacatttattccgctggtttcaactcgagatatacaggcctactgcctggatttagactgtaagcaaaatatattgtgacacactaatatataggcagcgttatttacagttgattaattatgtatacaatatatataacttttacatatttcattgattaattatgtatacaatatatataaccttgtgtagccggccggccgggccggcctcggacacaagcaaataagagcaaatcatagctgaccgatccaaacaacacgcccccgctctctcccaggtccctaagtgaaccaccctgtctggctaggcatggcctattgcgcatttgctccatctgcaccacctcaatattctgagcttaagatgactctatacacaaacaaggaggtgtatcgttctgggccagatcaaaacggagtaaccatcacagagagatcaaacatgggcacaacctgggtcttctcgtggcctgtagccgatgggccaacacctgatgcgaacatcgtcggccaactccagggcactagtgttcaagtagccaatactcccgttgtggtgtaccactactccctgggattagtgttcgaggataaaaggttcaatgggtccacactccaaatacaagggacctcccaaataaatggcgagtggagcattgttggagggacaggacaacttactatggcaatgggtactgtcaaacgcactgaagttgtgtacaaagacaataccaggatctcagaactcaaaatacatgcctatttcgctccagtgaattaagcctactacaactagtgtttatgaggctactgcatccgattaacctccccaaggcgtgagctttatgcagtcatttagcctggagtttgtatccgtgtcacctagtactttacggtaataataagagactgtatctgtatgtttcggtaaactagagttctggtcacctcttgtactcttttgtattttaatgaaatttagaatccgagtgtttctcttttgtactgatgcatcagtagttgtacatgcatcggtagatcgatcttttgttctttctaagctgtgatttgttgttggccttcttgtataatggtatatgaaaatacctttagccgagccggttaggtgtttgagtagcactttttagtgttagagtgtcaatgggcctggcccatgcattaggatttctatgttacctgtactgtagctagggttagggtttactgtaccccttagtacc

SEQ ID NO: 96216 - DNA, 218 bp, Zea mays
  Clone ID: MRT4577_19263C.1
tcgaaaaaaaaaaaaaaaattaaaactctaacaaaaaaaaaaaaaaaaaaaaaaataaaaaaaaaaaaaaaaaaaaaaaaaacctaaaaacaaaaaaaaaaagggcggggggtctccggtttccaagttcccggcttccttccgcgggcgggcgacttcatagatcttgtttcgggacacctaaatacagtccattgtcttacattttacaacctgga

SEQ ID NO: 96217 - DNA, 378 bp, Zea mays
  Clone ID: MRT4577_19264C.1
gacaagctaaaatttttctcctttctcttgttgggctcggaattcattctttcctgtccattcaccctggtggcaggcctgggccacgcgagcatggacaacatggactgcaccctgctgggtttcctgctactgggctcgctgggggggggtgatgtcagcagccacatggctggcaaggtccctgacgggatattgctgccttgcctggcgttcatgctggtgatgattggcttcaagctggcactttaacgcgccgacccattgccgatctgccatacaaacggcgggtcggtgccattgatcacgggagggtcgacaatccgcgccttgtagatcaccggattgcggaacgacaccgtacgtacattgcaccag

SEQ ID NO: 96218 - DNA, 1712 bp, Zea mays
  Clone ID: MRT4577_19265C.1
ggtaccccccgggtcgggctctctcttcccctctcccgttctcccattctctctctcctctcccgagtccctccccctatcccccccctctccgcctccgtcgctagggctccattcccctgcgcatccgccgccgccggatcccgcctcgcctccgccgcagcttcggcatcagaatcaccggattcggtggtgtttctcggctgcctcagcttccgccggcggaaggccccaggcggcgctccctgcagccctccggccttcattgagtcctctagaagccaaacatcgttgatacttagaaggcagctgagtatatggtatttgtgggccattgtgctgtccatgcgagcggagagcatgcgtggcacctgtgcttcgggtgatgcccctgaccagagtagctgccgatgcattcggtgtgctgacaatcgcactgtttgctctgtttgctgctctgggcctcttctgcatcttccagtcggtctacttcaggtgtcggattcggagaggaccctccttccttccgcttggttattttaacggcccatgggtgactcgcattgctctgattctgatcacaatttggtggggagtaggtgagatagtgagattgagcttcttgaagaaaaagttgttctccagcttaacatggcagaggaacatatgtgatgtgtacatactttccaacctagggtttgcagagccagggatcttctttgcgtttgcttttctgctccatggctcgttacaaaagagggagctgggcacattaaaccaaagatggaattggaagaccatggcctacttgttggttttctgtattccagtgttctcggtgcaggcaatcctagtgtttgttgggcccaagtttgttagagaggagaaccatgatctcgggagaaggaagattgctaaatacttcatacggacctacacgccggttggagataccagtgtttgcacttacccattgtttggcaccctttttcttggacttgtagatgctttcctgatgagctatgtatcatatgttggattacgggtgctgtccttggttattaacaagtcactgcgaaggagagtttatctactgatgctgtctgtgctgtgcttccttcctatcagggtgcttctcctcgggttttcggtgctgctcaagccaggacatgttgcctttgagggtattatcttcctgtcattcttgatgatgctgtcctgcacgactgttgggatactcttgctggtttactaccctgtagctgattcattggccctccgagatataggccagagggacatagcagaaatggtgccttatgatgattactactatgaaggcacatcgcttgtggccaaccagagtttccgagaaatcgagcggaattctgacacttcaacgaagccgggatccatatccttccggacaatgatcagggaagaccaactccagcaggacggtacggatgagatcggattctcttcgcgcagtggtgtccatattggatcgccctcaggctcttcgccaagcgcagcagtgccgatgctccctctcaaggaaatccctagatactaagaagtattcacctgtgactttgcccctctactgtgttctccttctcccccccctttttcccttctctttcctcttactaccttaatgataacagttttgtggcaatcaaaaaaggtttttgtcaaacaacaaacac

SEQ ID NO: 96219 - DNA, 355 bp, Zea mays
  Clone ID: MRT4577_19266C.1
gccgggctcggtatatatcgccatttcccaagcgtctccattccgtgatgtactcctctactaccgcaccatcatgaggcttagcttctctctctctgctctccctctctctcctccagggcccggtctaccgcacgaaagggcacgcacggcgccggttctcccatagagtacgccgggtgcgcgctccaggtggaggccctcgggggcattggccatagctgctgcgtcggcattaggctgctcctctccctccatgacggctaccatgagacgttccacttcctgggcaactggggtctcatcatgtacctcgtcctcatgatcgggcggaaaaagctcgcatacaaggcgc

SEQ ID NO: 96220 - DNA, 194 bp, Zea mays
  unsure (1)..(194): unsure at all n locations
  Clone ID: MRT4577_19267C.1
ggccggtatgcagtgcggaagcgcgtgctgcgagatgtaccgccttgagcatcgcattattgatgacggttagctgcccgctgacatcaccnctgttggaggagatgatgctgccaacaccgtcttcacggagactggatctgagaagcacctgccccgagctgttgttgtcgaccttgaacccactgtcatcg

SEQ ID NO: 96221 - DNA, 2369 bp, Zea mays
  Clone ID: MRT4577_19268C.1
ggccgctttttttttttttttttgctagccgattttttttttttgccgcttttttttttttttttttaaagagaaaattttctttattttagctgaaggaaacatagcacaatgcaacatatggcaagatatgtattttcctacaatgcccgagaacaacaactataggatggttgttgacatttttctttgagtaatacatatatatcaccatatcccttgatattacttaaggtgtacaatatatatagctcatgtagttattttggcctccttgaagtagtgcttcatgttgatattctcttgatccaagataacaataaagaaccttcacatgagtaccggcttcacataaagcgatgttaacatgtctttgattgtatgggagacagtgtacttatcagcttccttgtacatgtagtctacagttcgtgcaaactctagtacggttcgtggcacaattatcgggtattcttttagtgcaaggccttgttcaatcatgaacttccatgaatcttctgtaagttcttttatctgctcacatgcttcatccattgttagttcatgctgcttcatgtaacactgaacagtggagacacaatgcttctctctttgttcacgcttggttgatacaatatcattggagagccgtacaaatataccaaaagacttaacaagttcagcatcactcataacccattccatgatcttctttgttactacatcacccattccaacaaacgcggaacacagcaccagtgtacctccaatgcttatgagtgaaacttttaggtgttctttcaatgttttggggacataatcctcatcacgccattttatttccttggtatattcccgaactaattccttcaccgcttcttttaagtagaacactcggtagctcttgtctggtcctaactcattctcaaacgatgaaaatgtcttcaacaaatacatgtagaaatccttcatgtattctgggagtagtgagactgcactttcatcccacctttcgactgcttctgcaagttgcatactctcataagaattagcatgtgagtcaagggtatcatctagaatcgtgatgaaagcaacaatctttgtaagtataattcgagaatgagaatattgaggatcatagcatcccccactcatccaaaagtacacctctactattctatccctcacaaaactcaagtttgattcgacgcggagttctttccaccaggttgtgcactctttgagctctgatgaataaagaagctgtagaaggttgaagttcagtttcgcaaactctaatattgatttgttttgtttagcgtccttttcgtagataggaatgtaatccttcatttccaaagttccaacccttctaaaaagtggggtatcaagggcagacgacacttcctctgctattggtgattccaaatgttctaatctatcttgaaggcatctcgtagtaaaagaaattgcctcatcaagcactgtctctccatgaatcctcaggtatgctgcattgtataagcttaacaagctcctggtatctacctcaataaaatttccatattggtctttgaaatttagaaatacatcggatgaaacatgatagccacatttacgcagaagatagaatcggcgtgaaactaagtccaaattaccaccatcataattggagttgtaaacaacagccaacttttcatttatctcatcctcgtagtggtagtccagatttagtcgctgcagggtgataataaggtccactatttctggcacatcatgtgaacctttaatcatgtttctcacttcttccctcagcacttcagccctttgtcgcatttcagcttcctgtgcctcggtcggcgcctcgtaagaaagaaagaaatctccccacagagttggatggaaggagggagacatcttcttcatctcctgctggccgaggcgaggaccatctgtagttagtgttggggcagccatccttattagcagatgtgtgggatgcttttggtagtgtgatatgagatcccggccggcctcgaggttcccaatcccgcccgccccggaggtacccaatgtccgcgtcaccacctcctcgggcgccagcgccgccttgacgccgccggcctccttctgcagcacctccagcaggcccagctcgatggcgttcttcagcgtcatgggcaggatggacgacgacgccagctgcatcgcgtacatgcacgcctcctcgtccaccaccgcggccacgtcgccggcggtggagcccatggctattacgattagcgctgccggcctttctctgctgggctcgaggagcgcgctagctgctgatggcgtgcattgcgaccccggccggcctcgaggtaccc

SEQ ID NO: 96222 - DNA, 275 bp, Zea mays
  Clone ID: MRT4577_19269C.1
tgaagacttattttcaaagacctgtgtgtcggataagatctgcaaagcttgggtacagtggtaaatgtgtaaagagaaccaatcacctccatggactttaaaactgtaccaagctttgcagatcttttccgacacacatgtctgaagacttattttcaaagacagcacatttttggaaactaatctcttttccgtaatatttcctttattacaatgattctcagaataccaattcaaacaaacccacatttaaggttctttaggattatagaata

SEQ ID NO: 96223 - DNA, 4542 bp, Zea mays
  Clone ID: MRT4577_1926C.1
atggatcctaaggggaagggtatagtgatcaacgacaaagaaaaggaatcctttgtcaacgagccgaaggacgataagcctaccgactccggctcgggccaaagacggaaggaagggaagaagaagaagaccaggcgcatcaaggagatcgtctactacgacagcgacgagtctacttcttcccaaaaggacgaggaccacaacgactacgagaaaagaaaaccggttaattctaacttttcttttgactactctcgtattccgcaaagttcacattctcatttgctctccattccactcggcaagcccccacactttgatggagaggactacggattttggagccacaaaatgcgtagtcacctattctctctccatccaagcatatgggagattgtagagaatggaatgaactttgatagctcagatagccctatgtttatcaatgaacaaattcataaaaatgcacaagctactactgttctcttagcatctttgtgcagggaagaatacaataaggtgagcggcttggacaatgccaagcagatatgggacaccctcaagatctctcacgaggggaacgacatcaccatgctcaccaagatggagttggtggagggcgagcttggacggttcgcgatgataaggggcgaggagccaactcagacatacaaccggctcaagacccttatcaacaaaataaggagctacggaagcacgcgatggacggaccacgacgtcgtccgactaatgctcaggtcctttaccgttcttgatcctcatttggtgaataatattcgtgagaatcccaggtacaccaaaatgtcgcccgaagaagtcctaggaaaattcgtcagcgggcgaatgatgatcaaggaggcaaggtatgtggacgacgccttgaatggaccgatcaacgagccgcaaccttttgctctcaaagccacagggaacaaggaggcgctacccagcaaggtggcgcaaattgaggcggccggtcttaatgaagaagaaatggccctcattatcaagagattcaagacggtgctaaagggtcgcaatggacagccgagcaagactaagaccaaggggaagcgatcatgcttcaaatgcggtaagcttggtcattttattgctaactgtcctgataatgatagtgaccaggaaaaggggaacaagagggaaaagaagaagcattacaagaaggcaaagggcgaggcgcatctaggcaaggagtgggactcggactgctcctcgtccgactccgacaatgaaggactcgccgccaccgccttcaacaaatcaaccctcttccccaacgagcgtcacacatgccttatggcaagagagaagaaggtatgtactcgcaactctacctatgcttcttcaagtgaggacgaatctagtgatgaggatgaagtagattattcatgtttgttcaagggcttagatagatctaagatagacaaaattaatgaattaattgatgccttgaatgaaaagaatatacttttagaaaagcaagaggatttgttgtatgaagagcatgataaatttgttgaggcacaaaaatcctatgctttagaagttaagagaaatgaaatgctttcttttgaactatctacttgtcatgaaaccatttctactttgaaaggtgtcaacaatgatttaaatgctaaattagaagtagcaaacaaatccaattcttgtgtagaacatgttgaaatttgtactaggtgtaaagactttgacattaatgcttgtagtgaacacctagtttcaatttccaagcttaatgatgaactggctagtcttaatgctcaacttaagactagcaagaatgatttcgataagctaaaatttgcaagggatgcctacacaattggtagacacccctcaattaaggatggacttggcttcaagagagaagctaagaacttaacaagccataaggcttccattcccgccaaggagaaagggaaggcccctatggctactagtgctaaaaggaaccatgcatttttgtatcatgatagaaaacaaactagaaatgtttatgcatccgggggttcaagctggattattgatagcggatgcacaaaccatatgacgggggagaagaagatgttcacctcctacgtcaagaataaggattcccaagattcaatcatattcggtgatgggaatcaaggcaaggtaaaagggctagatgtgtctgtctttagaagaagtgatggttcactagcttttaagggtgtattagacggcaaactttatttagttgattttgcaaaagaagaggccggtctagatgcatgcttaatggctaagacttgcatgggctggctgtggcatcgccgcttagcacatgtggggatgaagaacctccacaagcttctaaagggagaacatgtgataggtctaaccaatgttcatttcgaaaaagatagaccttgtgcagcttgtcaagcagggaaacaggtgggaggagcgcatcacagcaagaatgtgatgaccacttcaagacccctggagctgctgcatatggatctcttcggacccgtcgcctatctaagcatagggggaagtaagtatggtctagttattgttgatgacttttcccgcttcacttgggtgttctttttgcaggataagtctgaaacccaagggaccctcaagcgcttcctcaggagggctcaaaatgagtttgagctcaaagtgaaaaagataaggagcgacaacgggtccgagttcaagaaccttcaagtggaggagttccttgaagaagaagggatcaagcacgagttctccgctccctacacaccacagcaaaatggtgtggtagagaggaagaacaggacgctcatcgacatggcgaggacgatgctaggagagttcaagacccccgagtgcttttggacggaagccgtgaacacggcttgccacgccatcaacagggtctaccttcatcgcctcctcaagaagacgtcatatgagctactaaccgatgaagaagatgttccgacggccgctatacgaaccatggcgattggtgatgtgcgaccacaggaacaagaagagcaagatcaaccttcttcctcaactatggtgaatcccccaactcaagacgatgaacatgttcatcaacaggaggcgtgtgatcaagggggagcacaagatgatcatgtgatggaggaagaagcgcaaccggcacctccaacccaagttcgagcgatgattcaaagggatcatcccgtcgaccaaattctgggtgacattagcaagggagtaactactcgatctcgattagttaatttttgtgagcattactcctttgtctcttctattgagcctttcagggtagaagaggccttgctagatccggactgggtgttggccatgcaagaggagctaaacaacttcaagcgcaatgaagtttggacactggtgcctcgtccgaagcaaaacgtcgtgggaaccaagtgggtgttccgcaacaaacaggacgagcacggggtggtgacaaggaacaaagctcgacttgtggcaaaaggttatgcccaagtcgcaggtttggactttgaggagacttttgctcctgtggctaggctagaatcaattcgtatcttgctagcatatgctgctcaccattctttcaggttgttccaaatggatgtgaagagcgctttcctcaacgggccaatcaaggaggaggtgtacgtagagcaaccccctggcttcgaggatgaacggtaccccgaccatgtgtgtaagctctctaaggcgctctatggacttaagcaagccccaagagcatggtatgaatgccttagagactttttaattgctaatgctttcaaggttgggaaagccgatccaactctttttacaaagacatgtgatggtgatttgtttgtgtgccaaatttatgtcgatgacataatatttggttctactaaccaaaagtcttgtgaagagtttagcagggtgatgacgcagaaattcgagatgtcgatgatgggcgagttgaactacttccttgggttccaagggtctacctttgacttagttggatactcagactccgactatgctggatgtaaggtcgataggaagagtacatcggggacgtgccaattcttaggaaggtccctggtgtcatggaactctaagaaacaaacttccgttgccctatccaccgctgaggccgagtatgttgccgcaggacagtgttgcgcgcaactactttggatgaggcaaaccctcagggactttggctacaatctgagcaaagtcccactcctatgtgacaatgagagtgctatccgcatggcggagaatcctgttgagcacagccgcacaaagcacatagacatccggcatcactttttgagagaccaccagcaaaagggagatatcgaagtgtttcatgttagcaccgagaaccagctagccgatatcttcactaagcctctagatgagaagaccttttgcaggttgcgtagtgagctaaatgtcttagattcgcggaacctggattga

SEQ ID NO: 96224 - DNA, 406 bp, Zea mays
  Clone ID: MRT4577_19270C.1
ggggggcccaacaaaaagaaaaaaggttttttttttatttttttgaagagggaaaaatatccccccccgggggttatttgacactttacgccacagtttttgtttgggcttttaaaaaggggggtgcttttttttctgcaaaaaatgtttatgaccttttttaaaggggtgaaaaacaccccttgttttttaaacccccccaaaaaaggggggggtttttttttttattaaaaaattggtgcacggtgtggtgtttttgtttttttttcagggggggataaactcttttggagaaattgggcaatatccccgctaattttgaaaaaaatggtggcccataaaaagcccgttggggttttttaaaaaggttgcactaaaaaaataggggggggagaactggagcttt

SEQ ID NO: 96225 - DNA, 191 bp, Zea mays
  Clone ID: MRT4577_19271C.1
gggacgaggggccttaggaaggaactcgagccccccatccgagcgcttcgggctagagaaaataggccgccggctcctcgctattcggtgacagctgggctgataggcgtgggagagctgttgactcagcacacgagcaggggaggtcggcgggggcgggtgagtggggggagaggtcggggccgtcgagg

SEQ ID NO: 96226 - DNA, 319 bp, Zea mays
  Clone ID: MRT4577_19272C.1
gggaagtgaactactcgtccaccatactccgacgctaactttggtacctcagagccctagtcgacgctcatggatataggcatggaccggggcgcgtagccttacgaaaaaggaggggtgcgttatttgagcttgtatattggtgcgcacgaggcgtttggcgcggggggagcaggacagataggggaagaacagaaggggaaggcggtctggacccgaatgtcgttgcagatcaaggcggttgtacaatcgctcgtgatggagctgcaagacgcgctggactcgtacattcaagaccgcgtgatgaaggtgctcgaga

SEQ ID NO: 96227 - DNA, 386 bp, Zea mays
  Clone ID: MRT4577_19273C.1
ccggaagcggcgccggtggccttcccgtgggccttgcacaaaactgactccccgtgggagcaccgtaatgggatgcataggaaacggtgtcaatcgggtcctgatttgctgtctagcgcagttttcgcctatgtgatcgtgacatgagagtcatcgctgtgactgagatccactgcgctgctgatgcacgtcatgtgcgaaggagctgtcttgatgctgatctcgctctcgactgtggaatccaccaggagccgtgtactatagggctgtatgtggggtggttctgctcacgttagaacaatacttctacacagttgactcatctccagaggatgatagcgatgtaaacaccagctgtttcatgatgcatgcaactcttcttaaca

SEQ ID NO: 96228 - DNA, 1047 bp, Zea mays
  Clone ID: MRT4577_19274C.1
gaaagcgagatccgcgcccagggcaaaggagtcggagacgcagacgtcgttctcaatcccagtcaacgggcctgactcgccggagagggctccctctccggtggcggaagctcgcgcgggaccgatggcgccggcgatgtcggcagaggacgccgcggcgcggatgcaggcagtggtgcgagggttcctcgcgaggaagtcggtgcgggcggtacgccaggtggatcaggaggcggagcaagtcgcgggaaagatggcgtgcgaggcggaggccctgctagcggaccccagggcacgcgtcgccgtctgggaggcgctcatgaggatgctgctgcgtctcgacgcggtgcgcggagcgcgggactaccggaggagggtcaccaagcgggtcgtcgcgctgcaggacgccgtcgacgcgctcgtcgctaagccggcaccggcaaccgtcgagattgctgaggagatcgccatagcgccggagctgccggacgctgaagatgaaaaggaagacgaagaggcagagacacacgaggcggcggccgtcgagatagcagaggagagcaataccaatgttggtgtcgtcgagccagagggttcggagatattggctgaagaaaacgaacacacctcaccggccctgactgcagttgctggcgccgcctccgacgttgtggacgcgaggaagttgatgcagatggtggcgacgctgtgcgagcagagcgcgcagcagtgcgcgttgatcgaagtgctggccgagcgtgtggacatgctggagcgtaccgtgcggcggatgcaagacgccgacagcgccggcggcggccagccaagaagctgagcacggagggcaactgaaggagcaacagcaagctttacagcggttgacgacgaaatctattaatagagatttaaatagttatgtatttttccattgcttttaatctcgagatttattattatagacactagattatttatattcattattttataataaagttcctcgtatttattgttaaaaaaaaaaaaaaaacccgggaagtccggccc

SEQ ID NO: 96229 - DNA, 345 bp, Zea mays
  Clone ID: MRT4577_19275C.1
acatcacattatattttctggggcacgcaaaaacttgtggacgtacacttaaatcttaacaatagactacacaccatcattgcatacaatggaatttgaacatttaacccactttggaggtaccacatcaactatacaacctatcaaccagcgaagcacattattaattctctacctcacaaattattaaaactgggctatgattaaaacctttgcatccatccctacgcagtagaacctaggcttccagcaacgtacataaccaaaccgtaactgacgtctttcttctcaaaacgcaatcatcaccaccacggtgatgaccataccagcatactcgatccacct

SEQ ID NO: 96230 - DNA, 594 bp, Zea mays
  Clone ID: MRT4577_19276C.1
aagaaaacaacacataatttataatcagcatcatagtcctctgcagagacaatgtttgagagagctcatgctaacaagacaaaaaatctaaaagataattatttatacgcggatgttcttctaatagtatttcacatgtcctatgtaatgaaaaccatcaaaacatgtaccatcaagagcgtcgcctgatgaccaggaaggcacctgatattgctcccctccgtctaagggcatgttcggttctaccccaatccatatggattgagggtgattgagggggattcaatccctagtaagtcaaaatccccttcaatccgtatcaatcccctccaatccatatggattgaaaataaccgaataagccctaaaggacattcggctttgatccaagcttcatatacttcatcctgccgcgccaagaactgacccaagaacaagcgagagaatcctcctagctcttcctcctccccctccaccaatcaccacaaaacgagatgaagggaggagcagcacaacaaccccacagacagcgcttaaccaatccgtcaagaaagtaccagcccaatggaaaggacagaaccaacaactggcaat

SEQ ID NO: 96231 - DNA, 394 bp, Zea mays
  Clone ID: MRT4577_19277C.1
gcaacaatggcattcagaatgggtcttgataagagtgacgttgaaccggtggttcattgtatcttgccagaaatcgtgggagaatacatacatgtatattgcatgcagattccccccaccctcccattttcttctcttttctagacatcttactatgctctttctaggaaactggtcgtgctgattcaacaaaagtcaaagtcttttgcacaaatgaaaaaaaaaaaaaaaaaaaaaaaacaaaaaaaaaaaaaaaaaaaaaaaaaaaaaaaaaaaaaacaaaacaaaaaaaaaaggcggaccgcccttaaaggaccacagatgactaacatgcagttcctacgaattagctgttctataaaagaggccacagctcatttaactggccgccggg

SEQ ID NO: 96232 - DNA, 333 bp, Zea mays
  Clone ID: MRT4577_19278C.1
agaacctacgctaattattataagctaaataatgtatagcggcgacgctgagatgtgattcagagtcaagacagacagataattgagtgtcatggaatgctctgagtctgagatgatgatgatgcctgatggcgacgtcgtgtactgtactcctcacctgccccctcgggcgcttctggcggcgagcactgtgatgagttgtgttatgtgggtgcagcacttcatcaggctatccatgtgccctgctgagttgtgtcaccatccatctataataatcttatatctataccccaaaaaatatctcctcctacacaaaaaagagagcgtacaagg

SEQ ID NO: 96233 - DNA, 1390 bp, Zea mays
  Clone ID: MRT4577_19279C.1
cgtttctcctggctactacctctcgctccctccggctccgatccagggtgcgagctgagcttgggctagtttagtctccccaagctcgtggcgcagcagcagactcgttggtggaggtggattagtagccaaggctttgcagctaggtagggttttgtagctagttcctcgcaggctcagctctctcatactagctagcgtcggtcagtcgggcgagcaggccaatggtcatggcgaacccggacatgctgccgccggggttccgtttccacccgacggacgaggagctgatcctccactacctccgcaaccgcgccgccaacgcgccgtgcccggtcgccatcatcgccgacgtcgacatctacaagttcgatccatgggacctgccatccagggctgcgtacggggacaaggagtggtacttcttcagcccccgcgaccgcaagtacccgaacgggatccggccgaaccgcgcggcggggtccggctactggaaggccaccgggaccgacaagcccatccacagcagcaccaccgccggcgagagcgtcggcgtcaagaaggcgctcgtcttctacgagggccggccgcccaagggcaccaagaccaactggatcatgcacgagtaccgcctcgccgccgacgcgcaggcagcgcacgcctaccgccccatgaagttccgcaacgcctccatgaggctggacgactgggtgctgtgccggatctacaagaaggccagctgccaggtgccggcgatggcggcggtgccgcagctctccgaccacgaccaggacgagcactgcggcttcgacgacaacccgtacgccgccatgctcctgcagggcgcgtcgtactcgtacccggcgccgccgcatgccgcggccggcgcgcagaggatgccccggatcccgtccctcacggagctgttcaacgacccctcgctggcgcacttcttcgaggagggcggcggcatgcaggacatggcgcggctcagcaacccgcagcagcagcagcagcacgctcctctcctcggccgcgccgtcacgagccaacagctgctgctcaacaacggccacagcatgcccggcggggggcaggcgcagatggatcctcatccgcctgctgctgccgcctcgacgtcgtcggccgccgctggcaacaacaagcgcaagagatcgagcactactactgatgccggtgcgctgtcgtcgagccaggcgtctgaggccaagaaaccgaacgggtcctgtttcggcgcaacgttccaaataggcaacggactgcaggggccctccctgggccaccaccacatgccgcttcactctaacatgggcacgatgaactgacagattattgctgttgttctccgctgaaagctatacttgagagc

SEQ ID NO: 96234 - DNA, 566 bp, Zea mays
  unsure (1)..(566): unsure at all n locations
  Clone ID: MRT4577_1927C.1
tcaggattcggcacgaggctctctctctctctctctctctctctctctctctctctctctctctctctctctctctctctcgcgcgcgcgcgggggggcggggcgcgcccgcccccccccacacatagagatatatatagatagagagagactctcgcgcgctcgcgcgcgcgggggggggggcgcgcgcgtttgtgcgcgcggggggggggggggggtgagtgtcactgtcacaccgagatggccaccccgcggggggggggggggggcgcgtgcgtgcgcgcgcgcgcgcgcgtgtgtgtgtatatagtgtatatatatacctacatcccgcgctgtgtctatatctctctctatctttctcaaacncacaaagaagagcgcgagatgggtccgcgtccgcgtccgtcccccccccncnctgcctccctcttcctctggcgcgcgcgctccttgtgcgcgtgcgcgcncgcgcgcncttggtctacccttctctctcacacccatagagtcccagaagaaaagaaagaagagaggcngagagaaagagagagtctcctctcccc

SEQ ID NO: 96235 - DNA, 506 bp, Zea mays
  Clone ID: MRT4577_19280C.1
acgcctgcaggtccggtccggaattcccgggtcgacccacgcgtccgggtttgccgtgttttcacccttctttgttctccaccggtctgggcagggtctgaggactccggagagcaaggcatgggtccgcctcgtgccgcaggttcctggcccacgccagccgtacccagtagcacaatgggatttgaggacacacgccagctgcctacacctgaagaaagggtgagctctgaggacttcacaggggccccatcccctcacctagatgagggctaaccttggaatccagacaaaggtggaagtgacctagatgtgacctgaatgagctaatcatctaatgagagccagccctttgtcctgcccacatgaagggctttgctgctacgcactgacaagttggacggctttttattgctttgttgccagttatctgaacatgagaggctgtaaggtgtaatctgcgagccctgcgcccagactgagccagggcctcccttgcacatgag

SEQ ID NO: 96236 - DNA, 487 bp, Zea mays
  Clone ID: MRT4577_19281C.1
aaaaaccaagcccgggccaaccatttcttggaaaggctttataacgggtccatgggggggaaactggaaaccccgggttcacccagaagggggggcccccaaccagggaaaaaaaggggggggggccaaaggggtttttaaaacccaaaaaccagaacctttttgggccccccaaacacccaggggaccggcggggggggttggtcccatggaaaaaaaaacccttggggacctggaaaagggttccaaagggttcccaaaagccccccttttaagattccccagagcacccttggggggacccaaggggcccaggggcccagattgggggcccttaaaaaaaccaaagggcccggggtttttaaaaaccccggtttttttcccgccgccgggaaggggcttctgggggggggacaaaaaggtttcttttcgaaacctttccttaaagtttcccccccttgggttcccaggccggtcacaaaggggg

SEQ ID NO: 96237 - DNA, 514 bp, Zea mays
  Clone ID: MRT4577_19282C.1
cattgggtacctcgaggccggccggagatcccctcctcgaccggctgctcctcctcctttcctcgcggcatcctctatcatcttcggctcgctacttctttaggagggatccgcacccggacccgatcctgtggccaacagcaacctcccgtgctatatcttcatagatacgcattcttccgctcatgctagccacgcgtcgacatatcgctcgcggcgccctcagaagataatatgcgctacttcaacggtatcgatctcttgtgcctcctccatccatcctatggacgaggaggttttaagcttgactcttctgaccatgaggatatcccatgatgtgccccaaaggtcaggttgactgaccagacatattagtcatcgcaacatttgactagcttgtgaggacatgcctcgtagcttctctaggacccatggaccccagcacttcagattcgagcagttcctgtgagaatacaggctctattgagtgatccagatgccgatgaccctatct

SEQ ID NO: 96238 - DNA, 277 bp, Zea mays
  unsure (1)..(277): unsure at all n locations
  Clone ID: MRT4577_19283C.1
aagaaaaggagggtataaaaggaaaaaaactggaagctgtgattcttttccttgtctacgtgtattattattcatataagatgttccccctttcgtgttaagttattggttcgagtacagagggataataaactcataaacctgtatggaacgaccaggtttatttcatggtaaaataaataaaaatttaaaaaatttaaaatattaaaaaataaaaaaaatataaaaaaaacaaaagatcttttggtggagnggatgagaaaaaaaaaaaagaaaa

SEQ ID NO: 96239 - DNA, 1687 bp, Zea mays
  Clone ID: MRT4577_19284C.1
cattgggtacctcgaggccggccgggccggcattgtgttgaatcctcatcgatcgtcagctaatataatagcatatatatactccgatctcagaattgaagctccgatcgatccgtcgaccacctatggctgccgctgcagctttctcctccacttccgtcgtcgctgctctcgcggcgagcggcttcctcggcaagaagctcgtcaccagcatcatcatcaggaataagaagaaggggtacgactccctgcatggcgccacgaccaccatcagagtcagagccatggcggtgaacaaggagacggagcaggacaggtggaggggcctggccttggacacctcggacgaccagcaggacatcaccagggggaagggccgcgtggacccgctgttccaggcgcccatgggggacggcacccacgtcgccgtgctcagctcctacgactacatcagccaggggctcaggcactacagcttggacaacatgatggatggctactacatcgctcccgcgttcatggacaagctcgttgtccacatcgccaagaacttcatgcccctgccaaacatcaaggtgcccctcatcctgggtatctggggaggcaagggccaagggaagtccttccaatgtgagcttgtcttggccaagatgggaatcaaccccatcgttatgagcgccggcgagctggagagcggcaacgccggcgagcctgcgaagctgatccgtcagcgctaccgcgaggcggccgacatgatcaagaagggcaagatgtgcgtgctgttcatcaacgacctggacgccggcgcggggcggatgggcggcacgacgcagtacacggtgaacaaccagatggtgaacgcgacgctgatgaacatcgccgacaaccccaccaacgtgcagctcccggggatgtacaacaaggaggagaacccccgcgtgcccatcatcgtcacgggcaacgacttctcgacgctgtatgcgccgctgatccgcgacgggcgcatggacaagttctactgggctcccacccgcgaggaccgcgtgggcgtgtgcaagggcatcttccgcagcgacggcgtccccgacgaggacgtggtgaggctggtggacgccttcccgggccagtccatcgacttcttcggcgccctccgcgccagggtgtacgacgacgaggtgcggcggtgggtggccgagaccggcgtggagaacatcgccaggaggctcgtcaactccaaggagggcccgcccacgttcgagcagccgaggatgacgctggacaagctcatggagtacgggcgcatgctggtggaggagcaggagaacgtgaagcgcgtgcagctggcagacaagtacctcagcgaggcggcgctgggcgacgcaaacgacgacgacgacttgtatggcaaggcggcgcagcatgtccgcgtgcccgtgccggaggggtgcactgaccccaaggccggcaacttcgaccctaccgccaggagcgacgacggcagctgcgtgtacaactaatataattgtccaaacaatttctgtggcacgtacttaagtttgagccaggatacaaactttggccgctaatggttgctgtcgccggtcaagagggcgttggctacttgagttagattttggttgtgtttcatccccacgtacgtccagcaaagaaaaattgaagctagtgc

SEQ ID NO: 96240 - DNA, 544 bp, Zea mays
  Clone ID: MRT4577_19285C.1
agcctgccgtcctgtcctctgtctccatttgctgccgcctgccggcctggagagagggagggagggaggtgttcatctgcgcggcggcttcggtgtctggaggggctccgaggggaggcggggagccatggcgcggaagcacggctggcagctcccagcccacaccctgcagatcgttgcaattacagttttcttccttctgctggttgcgttttatgtcttctttgctccgtttttgggaaagcaagtactcgagtatattgccattggcgtttatactcctgtggcacttgcagttttcatcctttatattcgatgcacaagtataaaccctgcggatcctgggatcatgtcaaagtttgaggatggccttattaagataccaaccaatggctctggaatagaaggcatgaatttgccccagaaagcaaacaatgctacaggaacaaactccccaacgtctacttgcagaagttctttagatggacattctaatcaaagaggttcatccataggggaggcacacatgaatctaggatcacaa

SEQ ID NO: 96241 - DNA, 370 bp, Zea mays
  unsure (1)..(370): unsure at all n locations
  Clone ID: MRT4577_19286C.1
agcgccccgnagngcagngcagngcagcagngngcnaccnccncagnccncncacaccaggacaagcgccagncagccgcaaaagcgcggagcgaggcncagaagcgaaggcgnccaagaggcngcagcnggcggcgcagngcgaggaggcggcggcgcggcgcgccgagcggacggaggcccacggccnggaggacggcgcaagcagcgacgcgacgccggagaagcagaccnncnacaagcccgaggccgcggcgcacccggaggcccaggacgcngagcacaagcccgccgnncaccaggccgcgaagccggaagccacggcgagcccgaccaccaccaccggcaccacggcggcggcggcgggcac

SEQ ID NO: 96242 - DNA, 602 bp, Zea mays
  Clone ID: MRT4577_19287C.1
gcccctcctcgagtttttttttttttttttttttttttttttttgttttttaacaacaacggccacaaactttttctttttcacaggaagcttacggtataatgacggaacataaataaaaaacaccacaatgatcctggataactttttcttttgcccgccttgggggctctttgaaccgccaccggaattgggcgcgggctcctgcttctttggccttccgcgaggccgggaaactacctgtgatacttggatcatcaactgcttgttggttgaaatagcaggataaggcgggggagccggcatttttcttaagctgacccctgaccctccccacctggaaaaaaccccgagggtaccccttatccaactcgcaggggtgggggatcttgaggggcgaacagccgtcagccatctacacgcaggggggcgccggccaggccttggcagtggtgatgcggtggccctcggcgaccggcttcttggagttgaggtacacggggcagatgatattccacttcttgatggtgctgcgcaggaccccggcgacgtccttcatccgcgccgtgttggacgtggccttcggggcaaagatcctgccg

SEQ ID NO: 96243 - DNA, 407 bp, Zea mays
  Clone ID: MRT4577_19288C.1
gcgatctaatttctaggagcagtacccgaaagcaggggcgagggatttggggtctgacgtgatggtgtccttgcttcactggtgtatagcttgtgatgggtagtgaagaaggtcaccgggggcaggtgatgtctcatgcaaggattaattgggcgctttgagcaccatggtgccaaccaattgcttgccgttgatatgctcaccgtggatccgcccttcggcgcggatagctcctatcggcgcgcctgctgctgcgaggttacgagaatttgaagatcattctggtacctggaactctcgagtgtcaggtcaagaacatgtaccattggatgaagcgcattgaaagaagatttgatgagtttcgtgagtggtctaatccatcgtttccattcaactatgggtgctaa

SEQ ID NO: 96244 - DNA, 605 bp, Zea mays
  Clone ID: MRT4577_19289C.1
actccacaacctaaatagatgataattgatatgaattcaaaacagaggatgtgttatgctactctccagttctccactgtccacacacggcacttccgcacttgtccagaacaccaagtctccagcacttgtccagcaagataacacttggcttggcacacagtagcacactagcacggtagcaccactgcagtctgcaccagcacacttcacaccactctcccagcacttggaacacacggacacaccactacacatctacaggctacagcagtgaccagtctacagagggaaacaatctcatctctcatgtagagacacaaccataccatacaaccgctagtctgccaccaacgaaggagacacagggacagacagacaatcaccaataagccagacgtgcaccacagtccacagctcactgttgtgttgcttaagacttggaagtggaagtaacctcagttctttttcctttgccaccatttccaaattcttcaattagctctttttctataatggctaattcctcgatattctcttgtatgtcaatgggagtagaccttcttagccaatcttgggtacatacaagggcctccaacatgaag

SEQ ID NO: 96245 - DNA, 151 bp, Zea mays
  Clone ID: MRT4577_1928C.1
ctctcgagctcgtcgaccagcggacgtcctctggatacgcctatggatcctgtcgagactgcctcgtactgcagcgtacctcagctcgggcttacgatgtccctactcgtcacgtcagtaaaacccacatgcgctcgcgattgcagacagc

SEQ ID NO: 96246 - DNA, 359 bp, Zea mays
  Clone ID: MRT4577_19290C.1
caaaataaaaattttaagggggggctaaatcgtagaaacaggggggggggggagcagcacacgaggccccaaaccttttaaataaatggccctcgcccccccccaggggttaattaaaaacaattaatcgaatggggggttttgcccatagacaatgtcccaagccttttttgggcggaccaatcccataagccaaaatttttttaaaaagaaaaagctgtaaaaaaactttttgggttttgggacaaacccctaaaagtaattgattttcctcccttgacccggactgggaaaggatagaaaacccccgttttattgggggttttgggcacttatggggggccctgggggggggtcca

SEQ ID NO: 96247 - DNA, 645 bp, Zea mays
  unsure (1)..(645): unsure at all n locations
  Clone ID: MRT4577_19291C.1
ccggccgggaacagaagattacccccgcattttgaacctccgagttcagaaactgaccccctcgtccctccccaccatcgcgatggctgacgacgccgcggcggcggcgttcgcgccctctccctcgccaccgtcacccgtagcgcaacctctgcccgacctctccccgccgccgcccttctccccaccagccggcacccctgcttccggggcgcagacgccgagcctcccggacaccccggcctccctagatccggacacccccttctccgacgccaccccgacccccgccgacgcctccgacgccgccctcgcttcggacgacggcatcaccaacccgtcggggggcaccgccggcaagcacatgacgctcgcgccgcccgccccgcccgccaagaaaccgtccaagaagaagggcggcaacagcgcctggacccgcccggcctcccgcaagggcaagaagaaggcgaggcagccgggcggcctcggccacggctccggcggtcnnnanggngctganagaggttatcaccttaggcaagcacgcgccgtcgagcattaagtgctcctcgctctacgactgatgaacaccaccacgagccaccacctttatactcgccgccatgcgtgcatgatgcgatggca

SEQ ID NO: 96248 - DNA, 362 bp, Zea mays
  Clone ID: MRT4577_19292C.1
ctgaactggcggatagacatgggctgcaggtgcgacttatgcatccaggcctagcccaccggcgaaggccccggagagaacctggccaagcacctaaccagacccctgcgggacaacctgctcacgcggacgtgcggaccagcgaaaggacgcccagactgtgaggacgcgccacaagcccgcagcgaagccaagtcatgccctgctgccgtccttgataataccggggaaagagctgggtaggagcatctgaagtgaaaaacgtgccatgcccatgcgtgaacatgatcgagagggggaagacaccacctgattctgacccatgatacgactgctggtggagacagcacccgagatatgct

SEQ ID NO: 96249 - DNA, 188 bp, Zea mays
  Clone ID: MRT4577_19293C.1
ccaacgcctatgcctgttcaaacgctgccttttgttagtcacagtgaatgcttgtgttccggtatgatctgtataggcgaactgctcgtagaaaacaagtcaacaacatcaaaacttgtatggtccagtgggcctgactagtccttaaaaaaatttgttcacttgcaaaacacataaataattataat

SEQ ID NO: 96250 - DNA, 424 bp, Zea mays
  Clone ID: MRT4577_19294C.1
cgaatttaggtgacactatagaagagctatgacgtcgcatgcacgcgtacgtaagctcggaattcggctcgagggagtacctcaaggtaaaacttgttttctcgggctatggtagttgttaagcaactcaaggccttgtataattctggtttaatttgattacagtccatatctatgaacgtgtctagttggcatttaaactaccatgcatacctatgcttctttgtccatatcatatgtactgtatcatcagatcacgatgtagctagtttatgtcttggaaccatgtgttttgaggtattctaatttctgtgtttggttttgcaggacccagtcaagtttgctgttgccgccccggttgctgctgggcgccagcaacggcgacagcaacggcgacagcaacggaattcgagctcggacccga

SEQ ID NO: 96251 - DNA, 448 bp, Zea mays
  Clone ID: MRT4577_19295C.1
gcatgatccctaccgccatggccgcgggatacctgcccaggcggccgctcgaaccattttcttttttttttttttaaaagacagtgacgttggttttatggatcaaaaccagaattttcatgtttcacaattttggtgctagagatccccaaactgcctaactcactggggaaggtttctgaaggtgtgcattatagtaaacagcagcaaaatacccaacaacgttactgctaaaagcagctgctcctgcttgcgcctttagaatactagccgtaaaacagcaaaaacccgcacatctgtgtcagcagttgggatgtgagctactctaaacaacaaacaactgtgaacagtccaaggcaggacctctacaatcatactgggcaagcgctgagctgtggggagaaaatgtcagcacatgcccaagaggagacaatgcacacgtttagta

SEQ ID NO: 96252 - DNA, 329 bp, Zea mays
  Clone ID: MRT4577_19296C.1
cggcttgaggagccgccgccgccggcgctgcgcgcaccgtaccctagccctcggcagcggccgcttccagctcatacagccatgacgttcaatcggaggaatggcagacgcaacaagcaccggcgcgggcacatcaagtacatccactgctccaactgctccaagtgctgtcccaaggataaggctatcaagcggatcttggtgaggaacattgctgagcaggctgacgtgcgagatgtgcaggaagactgtgtacatgatggatatgtactacccacattggatgcaaagggtgattactgcgtattatgcgcaatccatgcgcacat

SEQ ID NO: 96253 - DNA, 381 bp, Zea mays
  Clone ID: MRT4577_19297C.1
ctttcttttgcctcaatatcagaagctagctttcttgttcatcgcgttacgatctcggtgaggatcgaacgttcttcgtcttgccttaaggaaaaacccctctgacctctcgatcgtcgcggcattgccaaccgggatggcgatggcgtctcgggatggaggaggtgcggcgggccgggcggcgctgcgggtgggccggacgcgggagtaccggacgggcatggagacggagctgctgtccatcgacgccgggtcgtcgggcggcccggcggtgagcctcttcgtgctgtgcggcgacggcttcgaggccgcgcgcctgttccggtcggggaccctgtcgctgcacatggcccgcgtggagggcctcgtcccgatgtccat

SEQ ID NO: 96254 - DNA, 437 bp, Zea mays
  Clone ID: MRT4577_19298C.1
cgctgctgctgctgctattcccttcttcctccttcctcctccctggcctcggtcccttcagggtgcatctgcatgcatacatggatgatggacggaaaagatggatttgtttgccctctagctagctctccatgccaaaacattccccccctttgtgccaaaactgttgttgcggttggtatggtttagtgcatttttaccactctcttgtaatgatctagcttaattagctctaccaagcaatacaatcgccaccacaccaccgtctcctcctcccttttcctagctcgaaaaaaaagagcccaccaaaccctgcgagccccccaaccaagctcggtagccgaagccatggagtacaagagatcatcgcatgtggaggatgaagacgaggatgagctggaggaggaggaggaagaagacgaggaagaagaggagga

SEQ ID NO: 96255 - DNA, 875 bp, Zea mays
  Clone ID: MRT4577_19299C.1
cgactcggtcttctctgccagcccgtgtcaccaccacctcctcttccccttcctctctctctctctctcccgctgctgctgctgttcccttcttcctccctggcctcggtcccttcagggtgcatctgcatgcatagatggatgatggacggaaaagaggatttgtttgccctctagctagctctccatgccaaaacattccccactttgtgccaaaactgttgttgcggttggtatggtttagtgcatttttaccactctcttgtaatgatctagcttaattagctctaccaagcaatacaatcgccaccacaccaccgtctcctcctcccatcccccaagaaacccttttcctagctctaaaaaaagagcccaccaaaccctgcgagcccccaaccaagctcggtagccgaagccatggagtacaagagatcatcgcatgtggaggatgaagacgaggatgagctggaggaggaggaggaagaagacgaggaagaggaggaggacgaggatgaggaggccagaagccatcgctacaccacggcggcggcggcacccttaggcactccacagcagcaggaggtgcaagcccaagctcttgggctcggctcgcacgcctccctgatggactccgccgccttctcgaggccgctcttgcctcccaactcatctctggtgacgcagccaccgctgcctccaccaggttttctgcttttcaaaacaggagccgcagctccatccgaggaaagcggagagggagagggagagggacagagacgcgggagcgcagcagccccagctccggcgccaccaagaaccagagaggaataataatggcgttctcggcgacggttgtgacgcccgagcccccatcg

SEQ ID NO: 96256 - DNA, 274 bp, Zea mays
  Clone ID: MRT4577_1929C.1
caaggtctcatcagcggtgcgtcattcaacacttgccttatagaggaaagatctagatcacacgataagtggatcatctcacactgccccatacaacacgggccctaaccctatactggactctttcggtgaacgcaaatataacaacgctatgccagagaatgctccccaagagtcactatggtgagacacactggagaagtgatttaccttatcaaacaagcatcttatagctgtgatgagccttcgctccctgaggtagaacgatagcaaa

SEQ ID NO: 96257 - DNA, 447 bp, Zea mays
  Clone ID: MRT4577_192C.1
gctgtgtacccagctcctgctcatggaacaggccccccaaggtctgcttccattgaaggaacctaaacgagtgcggctatgtccatgaaaccgtattcttgtggctgaagcaaaaccggaggttgaccacaattatacatactctacgaaggctggtctcttacggaaccttgatcaccttctatgccgacacaggcaggatcatgtaggttaaacggattaaagacctagtgagcccataccttgggtacacagtggacgagaatgctcttgatgatgatcacacgactgggcaacttgtctgcaacacattgctcggattaccaaaacctttcctgcattgatttccatatcccggagcaagcccacaaaataaaggccaactgttctgaactcaataccggggtcctcatctgagagagcttcacgagcctttaaaaacacctc

SEQ ID NO: 96258 - DNA, 758 bp, Zea mays
  Clone ID: MRT4577_19300C.1
gccgacctcaccggcctccccatgtccaacgcctccctcctcgacgaggccaccgccgccgccgaggccatggccatgtgcagcgccatcctcaggggcaagaagaggactttcctcatcgcctccaactgccaccagcaacatctgctttgattctgccaatttcctacacatatatagccatgatgggctcacaggggctcactgatgcttcgaagatcgcgatcttgaatgcaaactacatggcaaaacgtctagagaaacactacccagttctgttccgtggagtcaacggaactgttgcccatgaattcatcattgatctaagggcatttaagacgactgctggtatagagccggaggatgtggcaaagcgcttgatggactacgggttccacgcaccgaccatgtcatggcctgttcctggcacacttatgattgaaccaactgaaagtgagagcaaggccgaactggacaggttctgcgacgctcttatctccatcagggaagagattgcagagatagaaagcggcaaagcagatgtgcttaacaatgtcctgaagggcgctcctcacccaccgcaactcttgatgggtgacacatggagcaagccgtattccagggagtacgctgcgttccccgcggcatggctccggggcgccaagttctggccaacaactggtcgtgtggacaacgtctacggggaccgcaacctcatctgcacgctgcagcaggcgacccaggtggccgaggaagcc

SEQ ID NO: 96259 - DNA, 230 bp, Zea mays
  Clone ID: MRT4577_19301C.1
ggcgccgtctcctcacgcgtccacgtacacgagcttaagcttctcgactccgaacactcatatcgacaccgatctcttatctcagggctcaagagagagcatgcacacttcctacatcataacgttcaacaagatctacacatgactatcgatcacctcatgctctccgacgctaacaaatgatctggctgggacacgaaccatcctaattatatcatatctatatacct

SEQ ID NO: 96260 - DNA, 3132 bp, Zea mays
  Clone ID: MRT4577_19302C.1
cccccacccccccccccgccccggggccgccccccccctccgcgaccccgcccccgccccccccgtgccccccgccccgggccgcgcccgccccgggcccccccgagtcgctgctcaactaccagaccatggtcgccgacctcaccggcctccccatgtccaacgcctccctcctcgacgaggccaccgccgccgccgaggccatggccatgtgcagcgccatcctcaggggcaagaagaggactttcctcatcgcctccaactgccacccgcagaccatcgacgtgtgccgcacccgctccgacggcttcggcatccgggtcgtcgtcgccgacgccaaggacctggactacggcggcggcgacgtctgcggcgtgctcgtgcagtaccccggcacggagggcgaggtgctcgactacgccgagttcgtccgggacgcgcacgcccacggcgtcaaggtcgtcatggccaccgacctgctcgcgctcaccgcgctgcgcccgcccggcgagatcggcgccgacatcgccgtcggctccgcgcagcgcttcggcgtgcccatgggatacggcggcccgcacgccgcgttcctcgccacgtcgcaggagtacaagcgcctcatgcccggccgtatcatcggagttagcgtcgactccaccggcaggcccgcgctccgcatggcgatgcagacacgggaacagcacatccgtcgcgacaaggccaccagcaacatctgcactgcccaggccttgctcgccaacatggctgccatgtacgctgtctaccatggcccagcggggctgaaggcgatcgctgaccgggttcatggcctggctggcaccttcgcccacggcctcaagaagctcgggacagtgacggtgcaggacctgcccttcttcgacacggtcagggtcacgtgctccgatgcacgtgcaatcgccaaggaagctgtcaagaacgagatgaaccttcgggtcgtcgatgccaacacgatcactgtagcatttgatgagacctccaccctggaggatgttgacaagctgttcaaggtgttcaacaacggcaaatcagctagtttcacagccgaatccatcgcaccagaggtctcaagctcaattcctagcagccttgctcgcgagagcccctacctaacgcatccagtcttcaacatgtaccacacagagcatgagcttcttcgttacctgcataagttgcagtccaaggatctctcgctatgccacagtatgatccctctgggttcttgcacaatgaagctaaacgctactgttgagatgatacctgttacatttcccaactttgcgaacctgcacccatttgcccccactgatcaggctgcagggtaccatgaaatgtttgacgacttgggcaacctgttatgcacgatcacaggttttgattctttctctttgcaaccaaatgctggtgctgcaggagagtatgctggattgatggttatccgtgcttaccacaactcaagaggagaccaccaccgcgatgtctgcatcattcctgtctcagcacacggcacgaaccctgcaagtgctgctatggttggaatgaagattgttgctgttggaactgatgccaagggtaacataaacatcgaggaattgaggaaagctgcagaagcaaacaaggacaacttggctgctctgatggttacctacccttcaactcacggagtctatgaagaaggcattgatgagatctgcaagatcattcatgaaaatggcggacaggtctacatggacggggctaacatgaatgctcaggttgggttaacaagccctggttttattggagctgatgtttgtcaccttaaccttcacaagacattttgcattccacatggtggaggcggtcccggcatgggtcctattggggttaagaagcatttggcaccatttttaccatctcacccagtgattcccactggtggctttcctctccctgagaaaacggaccctcttggcaccatttctgctgctccatggggatctgctttgattctgccaatttcctacacatatatagccatgatgggctcacaggggctcactgatgcttcgaagatcgcgatcttgaatgcaaactacatggcaaaacgtctagagaaacactacccagttctgttccgtggagtcaacggaactgttgcccatgaattcatcattgatctaagggcatttaagacgactgctggtatagagccggaggatgtggcaaagcgcttgatggactacgggttccacgcaccgaccatgtcatggcctgttcctggcacacttatgattgaaccaactgaaagtgagagcaaggccgaactggacaggttctgcgacgctcttatctccatcagggaagagattgcagagatagaaagcggcaaagcagatgtgcttaacaatgtcctgaagggcgctcctcacccaccgcaactcttgatgggtgacacatggagcaagccgtattccagggagtacgctgcgttccccgcggcatggctccggggcgccaagttctggccaacaactggtcgtgtggacaacgtctacggggaccgcaacctcatctgcacgctgcagcaggcgacccaggtggccgaggaagccgcggccgcaactgcaaccgcgtaatctcgtccgagaaccacgataattgatcgcggcgtgcgaaacatcctcaagaaactataatgcatgcttcctgtaggagggaagcatcgtcatcttcctcgtcatcctttctgcagtgtatatactagctcatggcagcgcctgatcccccaccaccaccacacacacacacaaagctgccaccttgtaattttgtacattacttcattgcttctctgttattcccatttaataaattaaaaggaatagctttttattgaatataatttgtttctcttttcaaaaaaaaaaaaaaaaaagctctagggtgggcccggtacccaattcgcctctatagcccatggcagggcctgatcccccaccaccaccagtccaccacacacacacaaagctgcccccctgtaattttggacaatactttaatgcttctctgttattcccctttaataaattaaaaggaatagctttttttttg

SEQ ID NO: 96261 - DNA, 355 bp, Zea mays
  Clone ID: MRT4577_19303C.1
aaaacagcgggcttacataaaagacacagtggggcccagtgcttcaaattacagtaaggagtaaggagcaatatgaaagactagagtgatttccataatatattcaagaggcacaggctggtatcgcggctcgcgtattataagccacccaaagccgttgactggtggaggggggtagactaatactcaaactcctggaagaactagaactcctggagaaccaccttgacgcctactgttttacccgaggataagttgcaccaaaggcaaccttcaccaaagagatgcttagggtgtttaatgctggggcactagcaaaactggatcacttggtcgtcaacgcttgatctttgat

SEQ ID NO: 96262 - DNA, 207 bp, Zea mays
  Clone ID: MRT4577_19304C.1
gcaaccgctccaagccaacctatgccgcaccgcaaccgtgtgtaccgcccgtggcgccggcgatcccgatccggcgacccgttccagccccgatcgcagacatgtcgccgtggcagccgacgcgctaggagagcgtgtacatggccaagcttgcggagcaggcggagcgcaacgaggagatggtcgagttcatggagcgcgtcggcg

SEQ ID NO: 96263 - DNA, 124 bp, Zea mays
  Clone ID: MRT4577_19305C.1
gacttgtgcctccgcttccctggacagctgaactcggccggcgcagctcgactcagcaggtgcgctgtgaggaaggcgcgcaagagagcaagaatgctatctacatcgggcccaggcgaggaga

SEQ ID NO: 96264 - DNA, 550 bp, Zea mays
  unsure (1)..(550): unsure at all n locations
  Clone ID: MRT4577_19306C.1
ggaggggaccggccggttttttctcttntggcgtttttttttttttttttttctttatttttttttttttaaagaaaaatgggggccccccccctctttgattaaggaaaattgggtttaaaaattggggcgtttaccacaaaagggcccaaagagaatcttttttttcggtggggggggttggtaaaaaaaaaaccctgttttaagggggggctccccaggttttcaaacaaaaccggttttacaccgggtgggcctaaaaaaaaaataacattttgtaaaaaaggtttgcccttctcagcagtgggaaaaaaaaaaagaaaaccccccggggggggttggggggtaaatccccggggcctttttggggcggggaaatttctaaaaattgggttgggggcaccccacccaaaagagaggcgtttgcaccccttttttttgggggggttcttaaaagggtttttccttaaggagggggggggccctcttttttggaccgggggtggaaaaaggggttcgggcttttctcaccttttttcttttttccagg

SEQ ID NO: 96265 - DNA, 393 bp, Zea mays
  Clone ID: MRT4577_19307C.1
ggaccaaaaaaaataggccccaagaagaggggccaaaggcccccaaccaaagggggggggggggaaaaaatcaaaatcaacaaaccccctaaatgggggccgcgaaaccaaaaaagggggaaccacagaatgaaaaaaaaccccaggtatggggccaggggggaaaaacttccaagggcacggtccttgggggaaaaggggccggattccccgggggggcgggagacctgggcaaaaaaaccccccggttgcgggaaaaggcccggaaaaacaggccggaaaaaagggcctggtcccaaaactttcttcacaaagcccaacccctgggggggcggaaacctggggagcccgggcccaaacccctgcctgacccctaccgccgggggggagggg

SEQ ID NO: 96266 - DNA, 344 bp, Zea mays
  Clone ID: MRT4577_19308C.1
gtgctagatatattcccacttcagttgtgtactctactcgtagaccgaaccataaccaccaagacgaacgcgatgcagagctacgccatggagcggggccgcctgttcaacgacgacatcgagatacatgctgcacgacgccgactaactacgacgaggaggacttcgaccacaagaacaaggtggagtccatcaactcgctggagaactacgcctacaacatgcgcaacacgatcaaggacgagaagatcgcgtccaagctggctgccgacgacaagaagaagatcgaggacgccatcgacgcgcccatcatctggctggactccaaccagctcgccgaggtt

SEQ ID NO: 96267 - DNA, 560 bp, Zea mays
  Clone ID: MRT4577_19309C.1
cattgggtacctcgaggccggccgggatccacacctgtctggtctcctatccatcagatgagacgtcgaagaactgatgaatccgcgatcgctatgtcgctgccgctctcctgaacgcgattgacctccagctccaagacaatgaggttcccctgaatgacatctccacaaacaccctccaagcctgtgacagcgacaccctgcccttccacgacactggaatccatgaccacctgaacgaccggacatgcaacaacctctactacagcactgatgctcaaaaggacaacgctcaggatgaatatatctttgtgacgaaaaagacccccaccattaccaatactattacgagctaggaacttacacagacctcgaccaaatgtaaacatggctgaccacaagattcaaaatgtctccaagtctgatgagattgtttgtgctaaacaccactgcacctggcgagagcgctgactatattgagaagaacatgaccagcaacagcataatactcccctacctaatccaatcccagacgcatgtcatttgcattcagaccgcca

SEQ ID NO: 96268 - DNA, 651 bp, Zea mays
  Clone ID: MRT4577_1930C.1
gaaagaccgaagttgacatgggaagagatagtaaaaggaaacttgaagggtggaatattgttaagacctacactactgttggctatatatacttaagtcctatggactacatatccatcatgtatcccaaggttaataattaatataactaaaaatttagccttgcataggagtgcatggtaaataactatttatgtgtctgaaccttgacttgcagtttctgttgggtttcaactcttgcctatcccaatttactttggacaaaaaggctttgttgttgtataaatcaggcttcaccgcagtgcccctacttgtcattctttcatcctgttctatccatgccttttggggtaggttccatggtctgcaagtaattacacagacagattagctggctgtatttgtccggccttctagtttggtgctgcttgaaactcctccctctcttttgtccttcctgaattcctttcatcgagcacgagatgtactacctgctgcctctgcctcactgttgcccttgctgctatgctttactgatcatggtagtggctgaaggccatatggagttggatggctgttttctcgaaaattctgacatgcttaatggctgtgcggatgcagagttatgactcttctggcatggagatgaca

SEQ ID NO: 96269 - DNA, 608 bp, Zea mays
  Clone ID: MRT4577_19310C.1
gcgtgcatccgtcgagaccagccgcgcgcgctccactccgctgctcctgcagccgccgccgtccatggcgtccgccgcgcgggctttgggtgcgttaatccacagggcctcgtcgctgtcctcctccgcctccgccctcaggagcgcctcccttgtacacaggaatggcccaactggtggcgccagcttgttccaggggcacgtggctaggcggaggatttcgacgttccagccgctctgtatggggcggcgctcctgcaagatcgccgggaggaagggtgctcagaatttgaaaaagatgaagcgcaacagcaaaatcggaaaggaaatcgttgctgccatcaagaagggtggtccaagtccttcgtccaacacagctttagcagcgatactagagaaagtaagagagcttgatgtccccaaggaagttgttgagcgtaacatcaaaagagcttcagaaaagggtcaggatacttacacagaaaagatttatgaggtctatggttttggtggagtaggtatggtcgttgaggtccttacagacaaaattacaagatctattgcggatattacaaatgttggaaaagactgtggagcaaaattggctg

SEQ ID NO: 96270 - DNA, 305 bp, Zea mays
  Clone ID: MRT4577_19311C.1
gcgtgacctgaactgttaactcactacgctatagaatccgaacggaacaggcacctctagaaagttactgccactgactaagggatactggcctacatccccatgaggtgtctggctgcacacccttgacccgatccactaataggggctgatgctccaaccatattcagctgcgatcattgaggataccaaggggcaacaaggttaaatatgaacttgacaagaaaactggactgatcaaggtggaccgtgtgctgtattcatcagttgtggaccctcacactaggaccattcctgacgctttt

SEQ ID NO: 96271 - DNA, 346 bp, Zea mays
  Clone ID: MRT4577_19312C.1
ttactctttctactctttattgttatacttttaccccaaatcttctaatggccttcgttattttcttcgtcattatgttaataccaatattttctcaccaccactacttacatttcttcctattccatctatgattctttgtatcttttttcaataattcttacatattatcctaaatcaagaatcatttctcatcattctctatatcacaattacttttcatcgttaccttctccaacaataccatcacatcttctaatgtcactttctaaattatatcaacataataacaatattccctatcttaaccttcatcatatccctcttattctctattcttcaataa

SEQ ID NO: 96272 - DNA, 661 bp, Zea mays
  unsure (1)..(661): unsure at all n locations
  Clone ID: MRT4577_19313C.1
cattgggaccctcgaggccggccgggaccgcatttcctaaccccaggtagtagatgattggacacatatcgaaactgctctctatctagcgcgctcgtcgcctaacctggattccgctatgctttccaagtagatcagagtcttgacctggttcattgccatcaccgctctcgtcttccgtccctgcgcatccgccgagaccatgaacgacgggtggtcgaacagggtggtcatctgccacgcgcccgcctaggcgctggatccgacgctggtgcgtgtgggtaccagtgtgccgtcgaccaacctccgttctcgactatgatcaccgccgcgagccaatccatcttctacaacgacaagacctgcgggagctgctaccacaatgaagtgcaccggacactagtcgtgctccggcagcccgtacgacagagaatatcaccgacctgtggcccgacgctacttgacaggtggagcccgtccacttcgaactgagcgaaacgctgctcggtgctatgacgatacccgtgcaggccgacatgctacgaaaagccggacgactacaagtccaatacactcgagctggcgtgcaaatgtaacggcttggacatcgtcttcatggtgaacgccgtgtcaacgccaattacctgaccatgntcatcga

SEQ ID NO: 96273 - DNA, 1105 bp, Zea mays
  Clone ID: MRT4577_19314C.1
ggccgcttttttttttttttttttggaagcacacaaaaggatctctgtatcatcccaccaattcagcatagcatagattattgcaggtgtatgacaattgagagagaagcatgccactgttatcaacctaataatacataacagtagggatgctatcccagctttacaaggctgttcttctgttcagtcagcagatgagaaggtgctccagccctcagaaccggcgaactagcgacctggggttcaccctcttctccttgacgcccgacgcagcggaagccttcttcatctccttgctgctcctgagagaggacctcagccccaggcccccgccgcggcgggccgcgaagtcgacggctggcatagacctcctcacggactcggcgccgccgctggtggcggtgtaggccttcttggcgacgcggcgcttggacagctcgacggcgacacaggggtcctgcgccatcgcctcagggtccacggatgccatggacgcaaactcatcggagcagtcgtagtagtaggggaagccctgcttgcgcttgagccgctcgttgcggcgagccgagtaggcgtcgtacagcctgccgcgcacgaagagcgggccgccgtccggcgtgcctgctgccctggcgatcgccgcgaggttcagcgccactagctcgtcgtgggcgtccgcgccggccgggaggaggttctcctcctcgaaacccgacctagctgccgggagcgtcggcggtggcgccgcggcgggaaggaagttctccttctcgcccgcctccctcgctgggggcgacgacgacgcggccacgacgagcgtcgggggctggagcgcggaggtcacgcgcgcgcgcatcgggtttggttcgccgcgcggaccagcgacgggagggcggagagtgaagcgcgcaccggcgaagggatcgcgcagacggacgcgcgcatcgggaccgccgcctgcttcttcgatcctgcaggcgtttgcacggtggaggccggcacgaggggcggacgcgggcggaggcggcgcggggatacagcgagcggcggacggcggtccatgggtcagtcggtcggcccggggaagagattgccccggccgaga

SEQ ID NO: 96274 - DNA, 346 bp, Zea mays
  Clone ID: MRT4577_19315C.1
cttacgtttccgcacacaccatactactgaccatactcttgccagtacgttgacaagaatcttgacgttcattgtggcacacaaagaggtacacctagagctatggctagccatgtagagcgactctaagtgcaattctctgaagactgttctcaagatctttgtgaacagccttgatgcccagccggatgtcctccttcttgtctacttcctgcacgacgccggtgacaaaccccttgaggaacaagcccaagcccagggccgattccgtaatggtcagccacatggacatatccctgaactgaacgctggactgtaccctaatttatatccttactgatttgct

SEQ ID NO: 96275 - DNA, 227 bp, Zea mays
  Clone ID: MRT4577_19316C.1
tgactctgctgctctgctcctctgacttacactctactgactgagatcgagcagctcgcacacgcccacaagcactacctcctgttgcgctagatacaaatcagaccgcctgcaccctacgccgttcgtggtgcatcgaaagacagtcaccgcgctggccatgctcgcctcgccctcaagctttacccttttgttcccttgatctgatgggcacatgtgcgcccctg

SEQ ID NO: 96276 - DNA, 211 bp, Zea mays
  Clone ID: MRT4577_19317C.1
acgcactcttctgttttcttctacgataggattacgtcgacttcgcaagacgtctcgttggtccatccatcgactctgaggctgccaacggctggacatgcatgagctggacagcgaggatcacattagggttgttgccgccagtaatagcgccggacacgattgctactgcccacttgaaggcaggggacatgtcaggtgtattttctgc

SEQ ID NO: 96277 - DNA, 415 bp, Zea mays
  Clone ID: MRT4577_19318C.1
cctgctgagctagtgaggtcgaaagcggagagcgcattataaaatgctggacaaggtggggtacgacgctggtggtcggtgctcgaaccctagacgggtgtgtgagaagctccgtaaggcgaccgccggccggccgctgcgtgatcctgagagacgcggagggcggaagctgacagggggcgcagtcgacgccgacgaccccaactacgccggtgacggctgaggtagatgacgaagctgcgcggcgacggcaacgtgtggcgcagagatttccaaccggggagtaacctggtcaccaagggaatgggagctaacctcgccgaccggacgcagtccaactcccccaccgactacgaatggctctacagcgaggagaccagcagcaaccaccgctaaatcgggcgagatggacagc

SEQ ID NO: 96278 - DNA, 291 bp, Zea mays
  unsure (1)..(291): unsure at all n locations
  Clone ID: MRT4577_19319C.1
ttcttnncccccataccccttccatnnncaatagataagcgttcacgtgatgtgaaaaccccacgctnncttcaaccnnctatatggctctcaaccaagcannatcgcagcaaagcaaccatacnnctttatnncacccttgtttcaaccaatcgccacgccctatctnttggtgcccagtcattggtactaaaccatcagnggcactnagcagctgcaagcaaccctcgtgcctacctgtagatacaaccaaagtagcttttctggcaaactctttcttccctacttctc

SEQ ID NO: 96279 - DNA, 541 bp, Zea mays
  unsure (1)..(541): unsure at all n locations
  Clone ID: MRT4577_1931C.1
acaatcaaggnattccagtgccagtcccttgccaatgggagtnngcgttttgggcttttggttggcgcgcgnacttttcgcggtgggtggggcgggcgcgacactctttccgccgtgccagtagtattcctctgtcctacaagaactgnnacgaggnacataagtggggtntgcngtgggagtnnncgcactaagctgtnntgggcgctttcnnaggggagcctgggtgacgcgnnggtgctagtttactggagtgtcattacagnaagnaactnctccacctgtgactcagtnntccgcaacaaccatttcccgcttgtnncaaccgcgcgctttgccgcgcaacntttcacacgctggcgagcgttcgccacagcgcctttcnngtaagagatccatttacatgggtgcaatgtgtatttcttcgnngtggttacgnnnataaggagtgttnnggcgccttcacttgtgacttacnnatcgacnttactattgcgaccttttgcactaagatnncgacaaggggcgcttttttgggtac

SEQ ID NO: 96280 - DNA, 712 bp, Zea mays
  unsure (1)..(712): unsure at all n locations
  Clone ID: MRT4577_19320C.1
cattgggtacctcgaggccggccgggttgatgtaaggaagagacagcaatgaggccattgcttcggaatgcttcacgcgagctggtcactaacaaggtagcctcttcactccgccttttcactcgccgtgcgggcaccgcgtcgtcgccatgtctgccatgccaacatcgcctgtcgttgtctggcggtgcaccaagatgggatccaaggctgcaactaaccatcaatgcggctgagacatggcagcgacgtgccctctcgagctcgacgagatggagagaagaaggaggaaagccgccaaaaccgtcagatgccatcgcaatgccaccgcccgcggcaccagcacaaccacaggccccacaaccacaagctccatcacaaccgcagcccccagcacaaccacggcccaatgtttctgcacccccgccatcgccagaagaccaagaaagattacagagaagactcaatgccttattagaggatcagatagccattcagagagcagccgagagctcggtagcagcactcaaggaatcaccggctaccgaagcctccaaacctcccccaccagagcccgaaccagaacaacccaagaaagccgagtccccagataccattgcacgtgtacccgatgagcacttgccttcgcaccgtgaaaggcagagatggagcctcttgaagcgcttctctgatngcatggatgaactgctac

SEQ ID NO: 96281 - DNA, 185 bp, Zea mays
  Clone ID: MRT4577_19321C.1
caaccgggggggaacccgttctcgcactaccccaaaggctctttaactgggtgatacctgacccaactcaaagccagacaacgcttaacactcaaaagattccccccactgttttcacacactaggcttgccatttctctgggtgcgcggactgataccccctccagttctttcgtcctggattc

SEQ ID NO: 96282 - DNA, 425 bp, Zea mays
  Clone ID: MRT4577_19322C.1
cacactatttctaccatagcaacagcttgtcgacagccctgctgccttcaacaatcaccaacgtaaggtggcatttccatcacaagcctttgcaatacttaatatacaatggtggtctcgacactgactagtattacacttacacaagtgtcaaaacattatcccatttcaaggactgcaaatgttgcagtcatagtacccacactcatgtaacataatcctgcgtgttgatacatcaactgcaagatgttgcatttatccatctcccttgtcgagtcctaccaccttatataatcagcctaacatctgtacaacacatgtactaaatattatatactacttactgactacataaatgtatgatactgatatctgcaacttcttgattaatatgaaattaaaaatctatatttccatactgcaat

SEQ ID NO: 96283 - DNA, 395 bp, Zea mays
  unsure (1)..(395): unsure at all n locations
  Clone ID: MRT4577_19323C.1
cccactcttccnctcacctttcccctctctttcctttcctttcctttcctatcctactaccctttaatctgaaaccgagccatccatctcatactacttctcactctctcctctaattcttctatcatttatatgctttcacactttcaccacttccataccctttgatccttttgcttctaattgagacactacttctaggctcctcatttttcttcacctaccacaacttcatacaagaggcttctcatcaacttatcttatctcttctagtctttcccatctcactcattctcctcatacactatattctcctccctctactccttttatagctaccttgtcttctaccctacagatatcccctttaatacccttttcaaacatttcccccc

SEQ ID NO: 96284 - DNA, 337 bp, Zea mays
  Clone ID: MRT4577_19324C.1
cggccgggccgggctcaaattaaccgccgacgcctccacttcgtgttctcgtctcatctcatcacgatcaggatgcggcggagaaggtaagggaagatgtgcaccgcgcaggaagaagatccagaaggatcagggacttgagccctcagagttctaggactccgtcggccaggctttcttcgagctggagaacggtaaccagtagctctagagcgacctcacggacctttacatcaacggagctatccacatggatgttgccgagagcaggaacgctgctgtgattcacgtcccataccgcttggacaaggccttcacgtagatccatgtcaggatc

SEQ ID NO: 96285 - DNA, 767 bp, Zea mays
  Clone ID: MRT4577_19325C.1
acgataccgatagagcggcgggaaatggcttcagctcgccgttgcaccaccatggccaccaacaaactcatcatgttcgtcgtgatgctggtggttctacagagggtgcgttctgatgattctccgtgtgacttcccggcgatcttcaacttcggcgactcctactcggacaccggagccttcccagccctcttcccggccgtgcagccaccctacggccggaccttcttcggcatgccggccgggaggcagagcgacggccgcctcactatcgatttcatggctcaaagcctggggctgcgttacctgaatgcgtatctggattcactgggaagcaacttcacgcagggagccaatttcgcgagcgccgctggaaccatcagacgagtgaacgggagcttgtggacctccgggtacagccccatttccctggacgtgcagatctggcagttccagcagttcatcaataggagccagtttgtctacaacaacataggtggagtctaccgagaaatcctgccgaaacccgagcacttggtctccaaggcgctttacaccttcgacatcggcgccaacgacctcgccatgggctacctagacaacatgaccacggagcaagtcgaggcctacgtccccgacctgatggagaggctcgcgtcggcgatccaaacggtgtacgacctcggtgggaggtacttctgggtgcacaacacagggacgctcgggtggctgtcgtacgccctggcgtaccccccggacctcgccac

SEQ ID NO: 96286 - DNA, 173 bp, Zea mays
  Clone ID: MRT4577_19326C.1
cttaagcgaaagagtattagatcttaggtgaaattgactttgatctggacattcaggatggaaaccacgtgcatgttcactggtacagatcgcttgcattgcgacaagagtgacatgaatgaagacacactgtacgctaaaagaatatacgccgagaacaccatggcgaacgg

SEQ ID NO: 96287 - DNA, 176 bp, Zea mays
  Clone ID: MRT4577_19327C.1
caaagaagcaacacaacgcggatcacaacaagagaggaaaagagggtgacaccaaacctccagacagacggacacgacaaggatagcccaacatcgacgcacaatccccacacctcagccggatttgggctcggacactcacagggcctcgacggtgcgggaggaaacggaagacg

SEQ ID NO: 96288 - DNA, 369 bp, Zea mays
  Clone ID: MRT4577_19328C.1
ttgattcttggaggctatacacagtttatacaagttctgatcctacacagcagaaagcgacatcctcatatcacggactgtcggatccgctgtttaattacacatgtagagctctatccacaagtccgaagagaatgatcagcgcagatcttctatcggtgcagccacggtgcgacattcataccagctacatctaccatatctccttggactacgattcgttcttaatcttcgacagcatgcgcctgtggcttattcaacgaggactaccgctggagcaccaggacacacgtggtgtgcttctactatgaccagtttatggaactaaagatggtccagcgcccagcctaagcccaaatgcagatccca

SEQ ID NO: 96289 - DNA, 230 bp, Zea mays
  Clone ID: MRT4577_19329C.1
aaaaaaaattggttttaaaaaagggaaaaaaagggggggggccaaagggtaaaaacttggtttgggggcggtaaccgacaaatggacacaaatttttggccccaaaacaattaaggcccacattttgggcaagccgggctcttttcatgatatacaaattaaaccccgctggtttttttttccgccacgggaatttatttttaggggccaaacgggaattttgggaaatt

SEQ ID NO: 96290 - DNA, 151 bp, Zea mays
  Clone ID: MRT4577_1932C.1
agggggaattgggatcttacggtcaaaccctggaaagccaaaaggggggggtgtataccataaaataaccgacacgggaagctaccctagtgcttggcaaaagccaaactgaacgcgacacaaaagcggggtccattgccagggggtatgt

SEQ ID NO: 96291 - DNA, 474 bp, Zea mays
  Clone ID: MRT4577_19330C.1
accggctgagcagcaccagcagaggtgtgttctggcttgtgtgggacctaaacgaagcttacacaacacggaagagtatagtgttggggtgtaacagttgccttgttcaatggaatggacataccttactgctacagactgagtcattagcccaagctcaagaggctaaggatgcttcacagtccatttcattcctttaccgtgccattcaagacccatcttcttctgctgatgcactgagaacaaaacaagttgcgattacaaatcttacaaactaccttactaaagaaaacagagctgaggagctgagcagtcttttgacccaactcagaccatactttgcagtgattcctaaggcaaagactgcacagattgtccggggaataattgatgctgtggtcaagatacctggaacatcacatcttcagatttcactctgctcggaaatggtataatggacccgagcagagaaga

SEQ ID NO: 96292 - DNA, 1546 bp, Zea mays
  Clone ID: MRT4577_19331C.1
gtctataaatgtagtctattaataaatacagaattaaatgcatttgtacagcagcagatcgatagaacagacgacaaattcgtacaataggaagtgagacgtctgttactacttggtttacgagccagaggcgtctcttcacggagagacggctctaattttttttgcaaatacaccccttaaacaccttaggagcctccacattaaacaccactgtacatgtttagtacatgccctaaacagaagattttttgagatcggacttcccctaagccacacgcatgcagtttatgcagtgcttgagataaaaatggcagcatcgtgttactgcacttctgctctaccgccaggttgtcaacttggaactggagcatcgtgttactgcacttctgctccacctgttagttttagtttgatccatccgaggctctaagatgaggacgaagctggggaactacctgttaaaaaaaacctaggactagatacagtagtgctatttccagaagaaagacagcatcctgttcagcatcatcataggttagcatcgaccaacattacaatgttcaagcatgacatactgaaaaatgtcaagtttgcaaacaacttggaacaacaagaacaaaaatatggttcagaaacatgcagtttttctcgaaaacaaataacatgacttactcaaccactaacaaaaattaacttcgttcactcctcacttgcttgacgacgagtttccaataacccttgccaatatctcctgttgcttagcctcgtagcattgtcgaagtagggggttacatttactcagatccatgcccaatatcatgacctcctcttccttgtcctccttcaatttctgccgatccatcctaagtttctccaggtttagcttcttcctctccaagatgagtttttgcctctcgtttttgttcatagactccaacttcctctcctcaattgaagctactaatttgaacacagacaaccgttccaaagatatttcacccatccacctgaggtactcagaaaaagtggacgatgtgtcaacagacctttgcttctttgccttttccttggacgaatcatgacctagcggcctcttcgaagtaaagcttgatggaacagagtcttcagcatctaagtctacagtatttgattggataccgattgggttgggtggtggattttggtgactcatgtgttgatccatccattttggttgatccttcaatattcccacagaagggtcactctcacagcaggcctcaaggcaaatgttgcatgcatcctgaatgccaccctccacaaaggctgcagcagatgtcaaactctccatcttagctttctcatcagtttcagatgccattgcaatggaatcacagcccaagcaccgccggcgattcgcagcaaccccgacccggctcggattcgatgcgtgaggcgtggtgggggtgggggcacaaaaccctagccccctcactctcctcttgcgttctgtgattgcggaggaaagacagaaaagacagaagctcgagccgaattccgagca

SEQ ID NO: 96293 - DNA, 273 bp, Zea mays
  Clone ID: MRT4577_19332C.1
aggggcggttgattttatgttcttttaaaaattttaaaatttataatgttaaggaggggggggacatgccaaaaatatgggctacattggttaggggggtgtgcgcttggcaggtctacaaaagggagtcaaagaaaagttaaagaaaatatttactacgggtgcaatatactctattggatccgtttttttcagacatcaaggcgcaattcaagggtgatgggggtttaacttaacataggataaaaaatggagttggggaaatgagagaac

SEQ ID NO: 96294 - DNA, 625 bp, Zea mays
  Clone ID: MRT4577_19333C.1
acgatgtgtcaccagacctttgcttctttgccttttccttggacgaatcatgacctagcggcctcttcgaagtaaagcttgatggaacagagtcttcagcatctaagtctacagtatttgattggataccgattgggttgggtggtggattttggtgactcatgtgttgatccatccattttggttgatctgcagaagggtcactctcacagaaggcctcaaggcaaatgttgcatgcatcctgaatgccaccctccacaaaggctgcagcagatgtcaaactctccatcttagctttctcatcagtttcagatgccattgcaatggaatcacagcctttgaattcccgcgtccagaaaaccaaatccacacagcccccaaccagctcacagcgacaaggacgaccaccctaaaatcgcctaggacgggcaagcacggcacctaccacacaggcctgaatcatcaagcaccgccggcgattcgcagcaaccccgacccggctcggattcgatgcgtgaggcgtggggggcacaaaaccctagccctctctctcccccctcactctctctctctctccccttgcgctcaatgattgcggaggaaaggcagagaagagacgaaaagg

SEQ ID NO: 96295 - DNA, 1553 bp, Zea mays
  Clone ID: MRT4577_19334C.1
cccttttatttgtaactgatttgcgcttcatgaagatacaatatcctttttatgtaccggtaaacatataatataaaaagttctcctttattgtagacatagacagaagacaagccgcgagcacggactttctctaagccacaagcttgcaatttaagcagcgcttgagatctctctggctgtaccgtgttactgcactcctgcaccaccgccatgttgttaacttggtactggagcaccgtgtagcttcacttctactccacctgggagttttagtttggaccatccgagggtataagatgaggacataactaggggactcctgtacgccatcatgcacagacacgtgtaagcctactttattgtccccttacatgatcagcacagtttcagaaaaaacaaccaaggactagatacagtagtgcaatttcgacaagaaacaacagcatcatgttcagcatcatcataggttagcaaataacataacaagtccattatcatcgaccaacattacaatgttcaagcatgacatactgaaaatatcaagtttgcaaacaacttggaacaacatgaacaaaaatatggttcagaaacatgcagtttttctcgaaaacaaataacatgacttactcaaccactaacacaaattaacttcgttcactcctcacttgcttgacgacgagtttccaataacccttgccaatatctcttgttgcttagcctcgtagtattgtcgaagtagggggttacatttactcagatccatgctcaatatcatgacctcctcttccttgtcctccttcaatttctgccgatccatcctaagtttctccaggtttagcttcttcctctccaagatgagtttttgagactccaactttttctcctcaatccaagctactatcttgaacacagacaactaatttgaacacagacaacccatccacctgaggttcaccgaaaaagtggacgatgtgtcaacagacctttgcttctttgccttttccttggaccaatcatgacctagcggcctcttcgaaggaacgcatcatgacctagcggcctcttcgaagtaaagcttaatggaacagagtcttcagcatctaagtctacagtatttggttggataccgattgggttgggtggtggggtttggtgactcatgtgttgctccatccattttggttgatccgtcgatgcttctgtcgaagagtcagtctcacagaaggcctcaaggcaaatgttgcatgcaccctccacaaaggctgcagcagatgtcaaactcgccatcttagctttctcatcagtttccgatgccattgcaatggaaacacagcccaagcaccgccggcgattcgcagcaaccccgacccggatcccattccatgtgtgaggcgtcccaacaccggcggcgcgttcgacgcaccccggccccgcctcggattcgatgcgtgaggcgtggtgggggtgggggcacaaaaccctagccccctcactctcctcttgcgttctgtgcggaggcgtggctgagaagacagaagctcgagccgaat

SEQ ID NO: 96296 - DNA, 636 bp, Zea mays
  Clone ID: MRT4577_19335C.1
cggctcacaccccttttcgtctcttctctgcctttcctccgcaatcacagagcgcaagaggagagagagagagagtgaggggggagagagagggctagggttttgtgccccccacgcctcacgcatcgaatccgagccgggtcggggttgctgcgaatcgccggcggtgcttgatgattcaggcctgtgtggtaggtgccgtgcttgctcgtcctaggcgattttagggtggtcgtccttgtcgctgtgagctggttgggggctgtgtggatttggttttctggacgcgggaattcaaaggctgtgattccattgcaatggcatctgaaactgatgagaaagctaagatggagagtttgacatctgctgcagcctttgtggagggtggcattcaggatgcatgcaacatttgccttgaggccttctgtgagagtgacccttctgcagtaagttgtcattttgttagttgagatattttacatataggggttatatctgtagtaagctgctgttgaaaataagcccttccatttcttacattgttgggcaatattgaaggatcaaccaaaatggatggatcaacacatgagtcaccaaaatccaccacccaacccaaatcgtatccaatcaaatact

SEQ ID NO: 96297 - DNA, 540 bp, Zea mays
  Clone ID: MRT4577_19336C.1
taggggccttttttttttttttttttcttttttttttttttttttttttttttttttttttttttgtaataggtaaatccttttttttatttattgtatgcttgacaaagtctgattggattgtaagaaagggtaatcacccacggggatggaaagtatgccccaaaaaccgcgcggggaaaaaaaaaaaaaaaaattttcggaaacaaaacacacaccatttttgtacgggccccacccccagaaggaggcccccgatacccaggcgggagaaacaacctgctgggagggctccctcacgcgggacgaactgccccaaccaccaggcagaccccttcaaggagcgcggggagttattggggcgggcgacacaaagaaagccctaacggggggggaagccggccaaccaatcaaagtgggcccggaaaaaccaaaaaaagcagccccgcacaatcgaacccaaagcgattgattactaaaaacaagggaaggggggctggaaaaaacccaaccgtttgcaaaaaaaaaaagcacccccca

SEQ ID NO: 96298 - DNA, 333 bp, Zea mays
  Clone ID: MRT4577_19337C.1
aagggaaggaatgcctgcactgacgcggacatacccgccagattgaggctactcgaaacggacctgtccagctgcacaagggaaaagctgctctcgatgctgatgatgattatgaggccgagcccccgaaggagaaggcaaagcctacgggggctgatatggccaagttgaaagatatgaagaggcaggaggagattgagaagaacaagcttgccttggagaggaagaaaaggcacgctgagtagcacgcaacaaaagctgtggcccgagcacagaaggaagctgagaagaagctgaaaaaagaggagaagaaagcccagaagaaatctgggg

SEQ ID NO: 96299 - DNA, 295 bp, Zea mays
  Clone ID: MRT4577_19338C.1
ccaaaatagatccccatgggttccataatgtttggtcccttttgagcagtttgccgaacccgccatttgaaggcggctttcaacgttccttgcctttaccggcccattcttcttaatggtaggtttaaacttaactttggctgctttggaccctggattctcacgtcaagcgttgtaccacataatgatggagatacagaggtgcactttcttgaacacttcttacgtgcaatcattagcattgacagtatagtcttacactaacttatactgcacgatcacctgatgagataca

SEQ ID NO: 96300 - DNA, 466 bp, Zea mays
  Clone ID: MRT4577_19339C.1
ctcctaagggcgattgggttcctcgaggccggccgggcttctttcttctctggacgccgccgcgtcgccccagccccaaaactgccgtcgtcctagctcacgtcgctcgtcctccgccacccctggctcccatcgcccggccaccaccgagccctcctcccgccatcactccgccgctgccgccgagcccttctccgtcgaaaggataattttttacgtattttatccatattttcggtggccgttatttaattgccgccgaagttagtatgtatttgtaattgtgcttgtttgattagggtgtgtgattagtattattgtttagttcggttccattaatgtattagtggcatatgtggttcagtgattagtggcatattgtatttgtgacattacttttgtattaatatatggtactattaaattattagttttataagcgaaaaaaaaaaaaaaaaaagcggcc

SEQ ID NO: 96301 - DNA, 1639 bp, Zea mays
  Clone ID: MRT4577_1933C.1
ggccggccgtggttcgcgggttctcccactctctctcttcctcctctcacgaggattcactaccacctccgtcgtcgccgccgccgccgcaacagcagccatgtccccgtcgtctcctcctgcttcactcctctgcgactccttgtagggggcttctgcctccgccatccagttgcttcgccactttctcgcgcgcctcctcccccctgcggccgcgacaccgcatccgcctcgtgtgcgccgccgagcagcccaacggtgccgcctctcctggctctggctctggaggcgacgccacggcaaacccaaccaacaacggactgcccaagaacaggagggttattctcctcgaatacgtcaaaaatgtccagccagagtttatggagctcttcataaaaagagctccagcacaggttgtcgaggccatgcgccaaacagtgactaatatgatgggcactttaccaccacaatttttcgctgtaactgtctcaacggtcgctgaaaatctggctcagcttatgtacagtgtcctaatgactggatacatgtttaggaatgcacagtaccgtctggaactgcaacagagtttggagcagattgctcttcctgaaccaaaagaagaaaaggattacgctcctggaactcagaaaaaggtaaccggggaagttatccgttggaacaaggccactggacctgagaaaattgatgctgtaaaatatatagaattacttgaagcagaaatcgatgagctgagccgtcaagttgctaggaaaacatcacaaggaagtaatgagctgttggaatatctgaagagtctagagcctcagaatttgaaggaactcacgagtactgctggcgaggatgtcgtctttgccatgaatgcgttcataaagcgcctgttggcggtctctgactcagagcagatgaagacagcagtctcggaaacaagtgcaagtcagctggccaacttgctgttctggctgatgatcgttgggtacagcatgcgcaacattgaggtgcggttggacatggagcgagtgctgggtgctcccccaaaggtcgccgagctaccaccaccaccatctggaggagagaacatataatacgcagttagaagaatagagccaacaaaccaacctggaattgtagatgtagccatgtaagaatgggctctgaaagatgttgattgaatcaacgattggctggtggcattccattgccttgctttgtactaatatacagcagcactagtaccataggtgattgacttgtcatggctgagtgaggaggcaaagatgcatatccttgaattgatactcttgtgtgcaaagaaatggcaatgcaaattggggaggaagctgttgtttgagctgaaattccagttccagtccgcccagacagacacgcagcagttccgagctcccctccgtcaagtggctgatccgcaaccacctgttggtgcataggctaaggttgagttgtctgtcttgttgattctacttgtcttccttctactccatgttggttaccaggagcgagggagggaaggaaggggaatcgataggattagggtgctgtttggttcacgtatttgtaatgtgataaataactgataatgttaaattatgtttgtttatct

SEQ ID NO: 96302 - DNA, 404 bp, Zea mays
  Clone ID: MRT4577_19340C.1
aaaaacctgggcccgtttaaaagcaacacaagacgaaaacaggggggcgggaaagcaaacccaaggacattgaggggctgttttggtaggggacgggctacaggatggcacgtaggggacacgacgaccacgacgacattgaacggggggacactaaacaaagggaacactagggggggcatgaactacttttttattatgggccagtttgatgcatgaaacaaacgtagctaggaaatttttgttacaaaaacaaatggatgttggtgatggccacgtaccctgcctttcaaagagggagctacctccactatgggtccatcgaaaagttaatcttggggcaatcaacggggggggtggtgggcccccccacggaaaccccccacttgccggggattttgggg

SEQ ID NO: 96303 - DNA, 248 bp, Zea mays
  Clone ID: MRT4577_19341C.1
cggatgagttcaaggtgcgtttggatgcagctttgactaaaatccctgaacgctcagatgcagacagtgcagaggccaaggaaggtgtaaaggcaacctggatggcagacggaacacagtggccaggaacatggtttgaccctgctgaaaaccataagaaagggcaacatgctggaattgtaaaggttatgttgaatcacccgggcgatgaacctaggtttggtggaccagcaagtgctgaaacccct

SEQ ID NO: 96304 - DNA, 313 bp, Zea mays
  unsure (1)..(313): unsure at all n locations
  Clone ID: MRT4577_19342C.1
cccatcttccgtgttagagcaaagtgaagagtttaaaggaggaagaagaaagaactgtcttacaccacttgagctcagacctctaaaccctgtatttcccttatgatgtcccctttttgagacactaatttttaaatacttactagctctgaaatatattgatttttatcacagtattctcagggtgaaattaaaccaactataggcctttttcttgggatgattttctagtcttaaggtttggggacattataaacttgagtacatttgttgtacacagttgatattccanattgtatggatgggagggaga

SEQ ID NO: 96305 - DNA, 1154 bp, Zea mays
  Clone ID: MRT4577_19343C.1
ggggcagtggccttgcggagagaggcacgcacggtgaaggacctcctgctgaccactgcgcgagcgggcgcggccgtgaaggaaggggcggtgatggcggcagaggagaggaaaaacatggtcgtcagctagctagcgatcgatggatcgatctacgtacgtacgtacgtcctggagcaagctatcagagcaagagaccggcggatagcccagcattaagcaggcacaagaattttttttttttttattagcatagcaacaaaagtggcttaatagatgttcagaaattgagcgacactacagtcaaagatgcacaacacatgacactagcttgtacacagtaaaattcttctctggtacacatcaggagaagaaacaaaactcctgcgctctcttatttaaccaagatcagggactatgaggtaatcctcgtcgtcggtgacctcgatccgggccccggtcggccgcgaaaccccggcgccgccgccgccgggggctttggccggcctggagtcaggcgtcgctgcagccggaagctatggcgaaagcgacgcggatgccggtggccaggtagcgctgttggttcccggagagcgtgcccgggacgtggatgggctcgtcgcagtcccggcagaagagcgcccggtcctccacgcagaagatgaacgccgctttctcctggcagacgtcgcagcgcgggagcttggcggagagcgcctcgagcgggaggcgctggtgcttgctggcgagcttgttggcggcgtggatctcgacgtcgcagcgcgcgcacagcgcggcctcgtcggcgcagcacaccaccgtggcagccgcgccctcgcacgcgtcgcactggatcttcatggccgctccacctctcggtctgtactcccagctcgccaacacccagccaacaacaaccagggaggcgagaacgaagaggataacgccactgatgagatgactgtggtggaggaagaagtggacggcaagggaggggaggccgggaggcgagtggtgcatataagtcgcctgcgcgagcacgcaactcgagcaatcagtgagctgccgcgcgagcttgtggtggaggactcgccggggagacttgtggccaggggctcccggttcgtctccctctgtgtactcggacgcgtggg

SEQ ID NO: 96306 - DNA, 439 bp, Zea mays
  Clone ID: MRT4577_19344C.1
cacacgcgtgctgttgttgactaaggcccattgccaccgccggctgtatccaacccgcgacggctgacagggcccgtcgacgtctactgtccaatcactacctacttcacatattgcagccgactatgagtggattttttaacaacgagagagtcacttcactctaacactcgctgagtccaacatacacactcgagtgaactcactaattcatctggagcggcatcataaagatcatactcgtgtgaactcgaatccctcatcatcagagcactcgattccctgataccttgaacacgcatattatccggtcttcaccatgcgctaccatatgacacgaaggcattcccggacgtgccataacctaacatcaactatcatcacctgacacacagatggctctcttatatatcaatgacagctcagcaatctcgagagc

SEQ ID NO: 96307 - DNA, 291 bp, Zea mays
  Clone ID: MRT4577_19345C.1
aaataattattggggccgggttttaacttttttttttttttaccccaaacgaaacaaccttacaacaacttttgaaaagggaaaatcaggtcttggtggccccaaccccaaacattcaagagctgaaagtaaattcccaggtgggggcttttttttggggcccccacggggccttttggaaaccccgaccgggtcccaaaaggggcctttgatttcagggaagctttggccccccggaccttggccccctttgggcgggggagccccttcctaaccttttttggaagcttt

SEQ ID NO: 96308 - DNA, 374 bp, Zea mays
  Clone ID: MRT4577_19346C.1
ccagagtctccctggggtggtcggcactagtcgtgaacttgcgatgctgctgtctgtggtcagcgtttccacggcacttaagggtcaacatttaaggaacactccgtcgtgctgaacccaagcactttgattgatggaatgctgaaaaaaaaacatgcgtgtggcccatgaaagcatggcaaggcctcccagaggttgagaacgtgtctccagaaactctgtatcatcttggtatactgatcgatcttggttgaatctaatcttctgttaccgaaaaattctgcggctgtcgggctcgaatctgtagacggctctggcaaggagtcccccgttgctggtttggttaattctttgttgggcgatcgatgaatgct

SEQ ID NO: 96309 - DNA, 808 bp, Zea mays
  Clone ID: MRT4577_19347C.1
acatcaaactgacctcatttatcaggctgaaagcatggccctgccttttataggtacatatgtgtccaacgtaagtgtcagtgcatcccatgatggcatacatacatattttgcgtacatacacatcacatgactggataattacatatgtccaacgtaagcgtcagtgcaccccatgatggcatacatacatattttgcatacatacacacatcacatgactggagaatcatgcagagatctctcatctcagccaagatcaggaacgatgaagtagtcctcgtcgtcgacgtccaagatccaccactatgaggtagtcctcgtcgtcggtgacctcgatccgggccttcttgctctcggaacccacgcgccgccgccgccggcggctctgggcggcctgtagtacgccgcgtcgttgggcgcctggtatccgaaaagctccggcacctccgccaacgtcctgctggctttgggcgcctgctcgtggaagaggtcgatgtcggcgaaccactccagctccttgaacccgagcgtcggctccttgtgcagcttgtcgctggactcgtagtcggagaactgcaggagctcgtcgacggcccagccctgcggcaggaactgcggcggcgagggcacctgctgcaccgcggcggagacggcggcgtgcggtggctcgatggtggccttgggcgggccgtggtgttgtcattcgtgggtctcccagccgtcgctgcaggcggaaacggaggcgaggtcgaagaggataacgcccctgatgactgtggtggacgaagaagtgcggacgcgtggg

SEQ ID NO: 96310 - DNA, 1978 bp, Zea mays
  Clone ID: MRT4577_19348C.1
ctgttaaaaacatcagtgtctcagactggtattagcatagcaacaaaagtggcttaatagatgttcagaattgagcgacactacagtcaaagatgcacaacacttgacactagcttgtacacagtaaaattcttctctggtacaccgtacacatcaggagacgaaacaaaactcctgcgctctcttatttaaccaagatcagggactatgaggtaatcctcgtcgtcggtgacctcgatccgggccttcttgctctggcgaaccccagcgccgccgccggcggcggctttggccggcctgtagtacgccgcgtcgttcgccgcctggtatccgaaaagctccggcacctccgccaacgtcctgctggctttgggcgcctgctcgtggaagaggtcgatgtcggcgaaccactccagctccttgaacccgagcgtcggctccttgtgcagcttgtcgctggactcgtagtcggagaactgcaggagctcgtcgacggcccagccctgcggcaggaactgcggcggcgagggcacctgctgcaccgcggcggagacggcggcgtgcggtggctcgatggtggccttgggcggggcgtggtggtcggagtcgtgggcgtcgcaggcgtcgctgcaggcggaagccgaggcgaggccgacgcggatgccggtggccaggtagcgctggtggttcccggagagcgtgcccgggacgtggatgggctcgtcgcagtcctggcagaagagcgcccggtcctccacgcagaagatgaacgccgctttctcctggcagacgtcgcagcgcgggagcttggcggagagcgcctcgagcgggaggcgctggtgcttgctcgcgagcttgttggcggcgtggatctcgacgtcgcagcgcgcgcacagcgcggcctcgtcggcgcagcacaccaccgtggcagccgcgccctcgcacgcgtcgcactggatcttcatggccgctccacttctcggtctctactcccagctcgccaacacccagccaacaacaaccagggaggcgagaacgaagaggataacgccactgatgactgtggtggaggaagaagtggacggcaagggaggggaggccgggagcgcagacccagcgggggcgagtggtgcatataagtcgcctgcgcgagcacgcaactcgagcaatcagcgctctgccgggcgggagcccggccccggccacgtggatgggctcgtcgcagtcccggcagaagagcgcccggtcctccacgcagaagatgaacgccgctttctcctggcagacgtcgcagcgcgggaggctggcggagagagcctcgagcgggaggcgctggtgcttgctggcgagcttgttggcggcgtggatctcgacgtcgcagcgcgcgcacagcgcggcctcgtcggcgcagcacaccacggtggcagccgcgccctcgcacgcgtcgcactggatcttcatggccgctccacctctctgtctgcggtctatactcccaggcccagctcgctatcctgtcctgtcccctcgcaagtcgcaacaacgagggacgcaggtgcgaaccccacgcgtccgcccacgcgtccgcccacgcgtccgcggacaaacgacaggcggggcaccacggacgtaattggagaggggggaagccatgccgggtacaacaacaggggaaatgggggaagcaaaaggaacccggacccgggggcaaaggattcaacacgccccccggtgggaagggggcttcgagggggccccccggggcgcgttggccgggcgggctgaaccaaaggcacgggcccttggggggcgaaccccctaacgggggtcggggcgggcggcaaacaaaggcccccggtgctaacttggattctgacttaaagggggtcaagcataaaccggcacacgggagcttcgcgccactgggttttaaaccaagcgcgaagaccaattgggggaaacaacgggtcccctcgga

SEQ ID NO: 96311 - DNA, 1641 bp, Zea mays
  Clone ID: MRT4577_19349C.1
aaaagcgccacccccattgttgctggtccttgacccgcgtcactgatcctttggtcctccagtccacactgttgggagcctcgccggtgttgttgccgtttgtacatggcttaatagatgttcagaattgagcgacactacagtcaaagatgcacaacacatgacactagcttgtacacagtaaaattcttctctggtacacatcaggagaagaaacaaaactcctgcgctctcttatttaaccaagatcagggactatgaggtaatcctcgtcgtcggtgacctcgatccgggccttcttgctctggcgaaccccagcgccgccgccgccggcggctttggccggcctgtagtacgccgcgtcgttcgccgcctggtatccgaaaagctccggcacctccgccaacgtcctgctggctttgggcgcctgctcgtggaagaggtcgatgtcggcgaaccactccagctccttgaacccgagcgtcggctccttgtgcagctgcaaaacacattaaacagagcaagaacgtgagacgggatccggtgggtgcacgcggacatggaccggagcttgcgctatcgtcttgccttgtcgctggactcgtagtcggagaactgcaggagctcgtcgacggcccagccctgcggcaggaactgcggcggcgagggcacctgctgcaccgcggcggagacggcggcgtgcggtggctcgatggtggccttgggcggggcgtggtggtcggagtcgtgggcgtcgcaggcgtcgctgcaggcggaagccgaggcgaggccgacgcggatgccggtggccaggtagcgctggtggttcccggagagcgtgcccgggacgtggatgggctcgtcgcagtcctggcagaagagcgcccggtcctccacgcagaagatgaacgccgctttctcctgcgaccgcgaagcaaggttagcttgcttgcgccgtacgtcgtgcgtgtagcgcatctgcgcatgccgccgccgcatgcgctggttagctaaatactagctagtgcgtgacgacgtacgtacctggcagacgtcgcagcgcgggagcttggcggagagcgcctcgagcgggaggcgctggtgcttgctcgcgagcttgttggcggcgtggatctcgacgtcgcagcgcgcgcacagcgcggcctcgtcggcgcagcacaccaccgtggcagccgcgccctcgcacgcgtcgcactggatcttcatggccgctccacttctcggtctctactcccagctcgccaacacccagccaacaacaaccagggaggcgagaacgaagaggataacgccactgatgactgtggtggaggaagaagtggacggcaagggaggggaggccgggagctatggtcatcgcaagagcgctggcaggaattttgggagctcatgagtgtccgccctcatattatgttgctatccgattttttaatttttctgtagctagtattagttgtagtatttcttttttcggacgcgtgggcgcgacggggcattgtaagtggcagagtggccttgctgccacgatccactgagatccagccccgcgtcgcacggatccgtctgccaaggattcagcacgcccccacgcgtccgcggacgcgtgggcggacgcgtggg

SEQ ID NO: 96312 - DNA, 454 bp, Zea mays
  Clone ID: MRT4577_1934C.1
cagaaatcgatgagctgagccgtcaagttgctaggaaaacatcacaaggaagtaatgagctgttggaatatctgaagagtctagagcctcagaatttgaaggtacatatacttgtagactgttacatccctatgaagacagcagaggatttgatgaaacctgtgctggtggttggcaatgtgaggctgacaaagggaagctgttgcaggaactcacgagtactgctggcgaggatgtcgtctttgccatgaatgcgttcataaagcgcctgttggcggtctctgactcagagcagatgaaggtgagggtgagggaatggtatgcatggcagtgcttttgtttgatttgaacttgaacttgtgtgtgtgtgtgtgtgcagacagcagtctcggaaacaagtgcaagtcagctggccaacttgctgttctggctgatgatcggtgggtacagcatg

SEQ ID NO: 96313 - DNA, 301 bp, Zea mays
  Clone ID: MRT4577_19350C.1
gggggtcaagggcctgcttaacccacttaaatactaaaacgcaccaggtattttactactagaagagaattagcatgaagtgggcaaaatactcacaagttgcattttttttctggtccgaacacatgctaaaaaaaaaaacgagggccaacatactttaacaagtggtgtttttgttcaacaagggtttccagttaaacatcttaaattaaccttggttgggggttaaaaaaattttttttttatactttacccttccaaaggcattttgatataggggctaccctttccgtaatttttt

SEQ ID NO: 96314 - DNA, 385 bp, Zea mays
  Clone ID: MRT4577_19351C.1
cggacgcgtgggaaaaaaaaaaaaaaaaaaaattaaaaaaaaaaaaaaaaaaaaaaaaaaaaaaaaaaaaaaaaaaaaaaaaaaaaaaaaaaaaagggggcccctttaaaaaaaccaaatttaactaacccggcaatgcaaataaaagcttttttaaaagggcaactaaaataaaatcaatggcccgccttttaaaaacgtggaaattgaaaaaaccttgggttaaccaaattaaatcgctttgaaaaaaatccccttttcccaagttggctaaaaaaaaaaaaggcccaaacaaatcgcctttccaaaaatttgcccaccctaaatggaaaatggaaccccccctgtaccggcaaataaagcgcggcgggtgggggggtaaccc

SEQ ID NO: 96315 - DNA, 635 bp, Zea mays
  Clone ID: MRT4577_19352C.1
ccggccgggaatcaccaccaccaacctagctctcatgtccgctgctaccaccaccaaagtcaacaacagctcttgtcgactaaaaatgtaaagacatattttgttgtcaccccatcccgctcctgatgctagccctccagctaaaggcaaccaccggcccacagagtagaagagctgatgaaaaagatagcgatcgacaacgtcgactccgagtacggctccaagaccaggaatcacctctgttccacgatgagcaaggacaacaagacgacggacctgaacgtgcgcatcgactgctgagctcgtctcccacaaggccaacctggcgctgtacggcatgatccacggcaactccaagtgcaccgagcacaaggacatcacggcgacggtcatgaactactggcacgacgactgcgacatggcgcacgtcgcctacgagaccgaagacaccaaggactcctgcgcctactgcgcctacgagaagaagccgcacctctacgagaactgcaacaactactgcacacgctcctgcctcttaaagccaagacgcttgaaatcgatgaaccatgcatgcatgtctgcatgcatgcgtccaccgagacgcgctactcagctcacgttctgaacgagaatat

SEQ ID NO: 96316 - DNA, 515 bp, Zea mays
  Clone ID: MRT4577_19353C.1
atcgcaatattattgtgaccagctgcttcataaaacgccagtcgagcaccatcgctggcacccaacatacattggccaccataagctcacttgcctctcttgtgcatgctgcgcgctacggcgacaccgcatcacacgctgctcatatgctcctatagcttaccttgtttcacgcgcacttttacacagcgtgctcctaccagatgcgaaaacgcacttctaacaccctacatgagcacagcctataggctccagctggcatttgaccttgagcgccctacgacactccaacaatcaagatgcactatcacatccttgacacttcgaagcatacatagcatcaaaacataacagcaccaccactacctcaccttgctgtaccacatattgatggctacccttagccagcatacttgcaacagcatgtcagccagcatgaaacccacgagctctgtcaaattggcgcaaccacactaccatcagccggatagctgctgcctacgctcagcaaacta

SEQ ID NO: 96317 - DNA, 250 bp, Zea mays
  unsure (1)..(250): unsure at all n locations
  Clone ID: MRT4577_19354C.1
ggggaacaacaacacanagacgaacccgaagagcgcaattaaggaggaaaccacaaggggggacaaggcgcgcaccgccgagagaacgggggcggagggcgccgagcacaacaagcacaaggcgcacgagaccaagcccagacagaacccgacgccacggcgcacggacagcaccgcgacagaagggcacgacccaccacaccagcagcaacccggggggggggcgggcgaagcgccagaacacgcacaa

SEQ ID NO: 96318 - DNA, 311 bp, Zea mays
  Clone ID: MRT4577_19355C.1
cccggtcgccccgcgtccgccccgcgtacgataactcccggccgccctcctctcggctaggaacttgcttcggacaattttgcacagccgacttgccatgaatattaatgcacgctgcgctctctgcatgcattttgttatatacttcgctagctatcaacagggaggagttctctggatgcctgtgattacaactgtatatgtgaggcttgatctttagaggtgtttaatacttttcagttgctcttagataacagagattggaatttcaaaagttgcatctattcattgacatcattatgcgaagtatg

SEQ ID NO: 96319 - DNA, 316 bp, Zea mays
  Clone ID: MRT4577_19356C.1
gagtgcttattgcaaaactctcgaaatagaccgaccgacaagggtttacctttaatttccactacgattcacccgcaataggtttttgaccatcagatacaaaaaatttcttcttctacccccttcccgggaagaaacaaaacattctttgcatgcttttttacctcctcatgcctgcaataggatatagtttggcgagtaactggggcgcagaacgtggcttcctccaaggtaaccactccgttgctcactccggcatccctggcgtggggggaacgggtcttgcaaagccgacgatcaaggtgatgccaggctt

SEQ ID NO: 96320 - DNA, 167 bp, Zea mays
  Clone ID: MRT4577_19357C.1
actttataccctattccttctacacttccaacttccaattctactatactttcaattaccttcaatacatcactctctttactctatatacctacatcaacaatctaattaactttattatattcatatatacattcaccctaccattatactactaactttaatct

SEQ ID NO: 96321 - DNA, 552 bp, Zea mays
  Clone ID: MRT4577_19358C.1
ctcagtctctcatctcgttccgtcactcccgcagtccagcagcacctatggcggcgagggtttgcgtcggcgactgagatccattgctgctcacgcgcccacgctccattgcgtccatccccactcgccaggctccatcggccatcgcctccatccccactcgcccaggctccatcgcctccatccccactcgctcaggcatctcgtcacccctctccatcgccgggacgtgtcggcagcggacccggagccggtgacgcggtctgcagctacaaaggagagaggttggcaaaaaggtaaactagctcttcgggctacgagtgatgtcttaattgggtgtaccggccttttcatttgccgcactaaggactagtttgtctataagatgtcctttggaaagaactacaatttaggatctgccatgacaaaaagattttattttcatgaattatatgttttttatgttttcccaagttatgtaatgtgtaattgtttcttatgaatcatgtagttttatttgcttaattatgtgctctaaataatttacatttt

SEQ ID NO: 96322 - DNA, 850 bp, Zea mays
  unsure (1)..(850): unsure at all n locations
  Clone ID: MRT4577_19359C.1
aagcgacgccatcgcgcaccagcgctgctggaccaccgcccgtctgacgcaaacccagccgtccagaaccgtcgtcgccgccgcagcccgtccttccaccacgctcgcgccgttgcgcgctcttagggttccgcagggtcgggatcgccggagatggactggagcgcggtgacggcggaggacctggtggacgcgctgcgggaggtggactggtccacgccgccgcggactgtctcggagttcttctcccggttcaccgtcccacgctcctattccaagtggaccagccgcctcaagtgcaacctctactactacaggacaaactatttcatcttgatcatgttcatccttgggatgggcttcctttggaagccagttgctatccttgctgcttttatgactggacttagcatcgcatttctcaatgatagttttgcagtcactttcaatgagaaagtcacaaggaccgtaagacagttttcaccacatttagctgcaaagatgaggccaccaataacggtgtttgtcatattcttttctgcagttagctgtatactctggttgacctcatgcagtcttctcacagtcctctgggcactcctcattgctctatttgcaactgtgctccatgcaagcttcagaacaccaaatctgaaagcacgtctgaatacattcagagaggaattccgggctgtctggcggaattatagtgagctntaaggtctcatttgtttctctcatgttcattggggtaaggaaaggtgtctagtgcanaaaacgtccatgctgtttgtgagttgcactaagagatctagtntgaaggtgaaacgccattggacactactacatg

SEQ ID NO: 96323 - DNA, 324 bp, Zea mays
  Clone ID: MRT4577_1935C.1
tgtgatgatatctgcagattcgtcttagcagtggtaacaacgcagagtacttttttttttttttttttctttttttttttcttttttttttttttttttttttttttttttggggggtaacctttgtattttcttgagacagtacaatgaaggcgtaacaatgtttgaggaaaaaaaaaaaaaagggacgtactacgcgggaggggggattaacaggggatcaattactcactaccacggaccaaagaatggggaagggcttaagggccaggaacaaaattgggacaacaatcggggggggaaaaaaaaaagggagggggtggg

SEQ ID NO: 96324 - DNA, 1389 bp, Zea mays
  Clone ID: MRT4577_19360C.1
gaggctggccgggaggaaggcaaggaacgcgggaccccggccggggcacacgcaaaattccccatcccccaaggaagccacgccctcgcgcaccagcgcgaccggaccacaccgcccgtctgaccgacgcaacccagccgtccagacgcgccgccgaccgtccttccaccaccacgcccgcgccgtcgcacgctccctagggttccgcagggccggggatcgccggagatggactggagcgcggtgacggcggaggacttggtggacgcgctgcgggaggtggactggtccatgccgccgcggcctgtcccggagttcttctcccgcttcaccgtcccacgctcctactccaagtggaccagccgcctcaagtgcaacctctactactacaggacaaactatttcatcttgatcatgttcatccttgggatgggcttcctttggaagccagttgctatagttgctgcttttatgactggacttagcatcgcatttctcaatgatagttttgcagtcactttcaatgagaaagtcacaaggaccgtaagacaattttcaccacatttagctgcaaagttgaggccacctataactcctgttcttcgcggtcgaccaagctctaagagatcaattcatatttgtgggcgacctcgctgggtgtttgtcctgttcttttctgcagtgagctgtatactctggttgacctcatgcagtcttctcacagtcctctgggcacttctcattgctctatttgcaactgtgctccatgcaagcttcagaacaccaaatctcaaagcacgtctgaatacattcagagaggaattccgggctgtttggcggaattatagtgagctttaagggtttcctttgtttctctcatgttcatgggtaatgaaggtgtctggtgccgttgtttgtgagctgtgctaggagatctagttgaaggtgaaacgccattgcacattacatggactacttgctctcttgggaggtgggattctggttgggttgactccgaatgcgatgctatgccagcacacgatccttcaagaacagtagttttctttcgtacttctccctaaccgagcattagagagaggacagcatgtaaaggatgtaaaaatgtacttgttctcgatcaaaaagtatgttgtttgttgaaattattactaatttgtattgcatcctcttttggatcatttgttaggtgactatcattttgcttcagcatttttgtcgagttagttacatcaagtgatactttaataaaaaaaaaaaaaaaaaaaaaaaaaaaaaaaaaaaaactctgttccccgtgcgggggggctaaaaaaaacttaaaaaaaaaaaaaaaaaaaaaaaaggccggcggtctaaaagaaccaaact

SEQ ID NO: 96325 - DNA, 375 bp, Zea mays
  Clone ID: MRT4577_19361C.1
aggacagtaaagtttgtagggttctaattaggccactaaagtaaagtttccatctttctgatgatgatgcacaacaccacacccacgtgataaacgaacggcatcgtcgtctcggctgccactggcagcaacacacacacaccaacaccactgccaaaagctcctccttttcagttttcccaccccggcccggccaagctcttcttctaccagcaggacattcccgactaaccgccgccgccgtcattccggttacgtgaccctgatggttcccagaaagggcgtcctcggcggcgagcccgtctggacctggtgctcgctcttccggccggtcgagatcttcagctccaggtctggtgcctgtccacttctact

SEQ ID NO: 96326 - DNA, 1235 bp, Zea mays
  Clone ID: MRT4577_19362C.1
agccggccgggagaccggaagcgacgccatcgcgcaccagcgctgctggaccaccgcccgtctgacgcaaacccagccgtccagaaccgtcgtcgccgccgcagcccgtccttccaccacgctcgcgccgttgcgcgctcttagggttccgcagggtcgggatcgccggagatggactggagcgcggtgacggcggaggacctggtggacgcgctgcgggaggtggactggtccacgccgccgcggactgtctcggagttcttctcccggttcaccgtcccacgctcctattccaagtggaccagccgcctcaagtgcaacctctactactacaggacaaactatttcatcttgatcatgttcacccttgggatgggcttcctttggaagccagttgctatccttgctgcttttatgactggacttagcatcgcatttctcaatgatagttttgcagtcactttcaatgagaaagtcacaaggaccataagacagttttcaccacatttagctgcaaagatgaggccaccaataacgtgggtatcttagtttctgatgtttcttttttctttaaattttattgttgataactacagagtgatgctaatatcatttttattagacctgttcttcgtggtcgaccaaactcgaagagatcaattcatatttgtgggcgaccgcgcagggtgtttgtcatattcttttctgcagttagctgtatactctggttgacctcatgcagtcttctcacagtcctctgggcacttctgattgctctatttgcaactatgctccatgcaagcttcagaacaccaaatctgaaagcacgtctgaatacattcagagaggaattccgggctgtctggcggaattatagtgagctttaaggtctcatttgtttctctcatgttcattgtggtaaggaaaggtgtcttgtgcagaaacgtccatgctgtttgtgagttgcactaggagatctagttgaaggtgaaacgccattggacattactacatggattatgggaggtgggatttgggttgggttggctccgaatgcgatgttatgccttagcacgtgatcccccaagaacaataatttttctttcaggcttctccctaaccgaacattggagaggacagcatgtaaagaaatgtaaaaatgtaccggttctcgatcaaaacttgtgttgtttgtagaaatttttactaattcgtatcgcatcatcttttgaacg

SEQ ID NO: 96327 - DNA, 232 bp, Zea mays
  Clone ID: MRT4577_19363C.1
ggagcggggggaatacgcaggatactctgcgtctggtgcgcctcaagaagagaaaaggggtgaatccccatatcacgatcagcaggcttactgacgcacccctccatatactccactcgtaaagcagcccttttggatgcaatgaaaagagaggttctggcccaggcaatagcgcattcaacatctgttccctggcatcggagaggaggatcacatcactggggctacttcc

SEQ ID NO: 96328 - DNA, 296 bp, Zea mays
  Clone ID: MRT4577_19364C.1
tcacaaccaaggagcttggaactgtcatgcgttcactgggtcagaacccaacggacgctgggctacaagacatgatcaatgaggttgatgcccactgcaatggcacgatcgacttacccgagtttctcaacctcatggcccgcaagatgaaggacaccgactcctaggaggaactcaaggaggcgttcacggcgttcgacacggaccagaacagattgatatctgccgcggagctgcgacacgtgatgaccaacctatgccagaagctgacactcgaggaagtacacgagatgatc

SEQ ID NO: 96329 - DNA, 204 bp, Zea mays
  Clone ID: MRT4577_19365C.1
ttttgggtacatttagacactgtcggtgcattaacagtagcacaacacaagttccggggggactggccataaaagccacagggacccaaattcaattttagtgaatacagacttactaccagtttcctttgaccacagacagggtatatgaatgaatcgaatttccaacacgtatggacacacagcgcggtcataacatcatgg

SEQ ID NO: 96330 - DNA, 591 bp, Zea mays
  Clone ID: MRT4577_19366C.1
tttttttttttttttttttttttttttttttttttttttttttttttttttttttttttttttttttttttttttttttttttttttttgggggaagaggcaatttatttttaagggaaaaaaaacagttttggtttaagcccatagggggacaaaacatcccgtttttaaaccggagggaaaaacccttttttttaaacggtaaaaaaaggcccccgacccaatgcaaaacaagccgggggggatcatgcacccaatttggaaggttggaacaagatccatttttgggagccccagttttggggcccataaagcacttgagctttggccagaatatggacatgctaatcgtttccgggttaactttttaaaaaaacgtccccttgaagggggacccaaaaaaaaataaaaagctttagggtaattttttttaaaactgctaatggttgaaaaatgatttggggggggattactggaattgaaaattttgggaagcactgatgcattcccacggttaatggaatggaaagaaaaatccccaagttaagcattaaaattccaaaaattttgcagaaaccgttggtggtgaac

SEQ ID NO: 96331 - DNA, 466 bp, Zea mays
  Clone ID: MRT4577_19367C.1
attgaatattcaaattaaaattttggaagcatgtgttcacgcgatcacattggaattgattcggtgttgaggttttatagagatatttccagtttttttttatgtaatacaaataatgaatgagtgtaaatgaaagtgagacttattctacaacaaattttgaaatgtaacatcaatccggacattttgaaatcaattagtgaatttaagtattttgaagctcaacaccgaatgagaagcagctttgatcccaatcatagatggtcagactggcaaaatgttcacatttcatgtctgaaatgtctgaatgaaaatatccaaatatattgtcatttttttttatcgcattgattttcataaaaattttggtttcaagctgattttcataattgaattagcaagccatgtaaatgcatatgaattgaaaaaaatcataatttgtgttatttcgaagcattttaaatgc

SEQ ID NO: 96332 - DNA, 293 bp, Zea mays
  unsure (1)..(293): unsure at all n locations
  Clone ID: MRT4577_19368C.1
atgtcngcacnaggctctggggggggcggcgggctaaaacacatcctcccacccaacggctgcacctcccccttctgttccaacaccaccctcaagaaggcgccgctggacagcttagggaagggaccctttagggggacatgtggggggacctgcacaacctgatcacagctgcgggggagcgggggaccaactttttgttgtgatcctttactacctttacggggggggggggagctgacgcacatatccttacgtccgccacaccaacccatctcgggaaccaactcttg

SEQ ID NO: 96333 - DNA, 798 bp, Zea mays
  unsure (1)..(798): unsure at all n locations
  Clone ID: MRT4577_19369C.1
aattcggcacgaggctcgcatgcatgtgagggccatagctcactgtcgcatgccctgctccggccgggaaccacacacacacaacaatcagtgtggccataacaagcagctagcgagagctccctgcgcgtccagccatggcaaccacgacgacggctgctaggaacaatggagaaggagaacagaagaggtggagggagaaaggaggcttcaagaccatgccattcatacttgggaacgacatctgcgaccggttcgccacggccggcttcggcgccaacatgatcacgtacctgacgcagcagctgcacctgccgctggtggaggcgtccaacctgctgaccaacttcggcggcacgtccagcctcacgcccatcctgggcgcgctcgccgccgactccttcgcgggccgcttcgggaccatcgtcgccggctccgtcttctaccagctcggcatgctcggcctcgtcgtgtccgcgctcctcccttcgctccgccccgcgccgtgccccggcgccccggcctcgtgccagcgcgcctccgggtggcagctcgccgcgctgtacctctccctcctctgcacgtccgtcggctccggcgggctgcggccctgcgtcgtggcgttcggcaccgaccagttcgaccgcgagcccggngagcagcaggtcaccgcggaggcggccggngaggtggcggagcgcaagcggcgctacttcaacctctacttcttcacgatggggggtgggcggngctgctggcgctgacggtgggtggtgtacatccaggacaacgtgggct

SEQ ID NO: 96334 - DNA, 645 bp, Zea mays
  Clone ID: MRT4577_1936C.1
acgggcgaacgaaagccggagggagcagacaaaaccccacttccacttctccgtcagaccatcacatctctgcgagactgcgaccctcccctgcctgcttcttcttcttctccaccgcaagagccgagccgagccgagccgggcctagagggaggacagcgatccatctaacgtctgcttgccggtctgcaatggactgcagctctgacgagtcgtcagagctaagcgagacagatatcgacgactacgccgacaagtcgtactcggacctcaagtccggcaagttcgtggcgaggctgggcagcgacaggttcaggtgcccgttctgtccggggaagaagaagcaggactaccgctacagcgagctgctccagcacgccgtcggggtgggcgcatccaaccgtgccgcgaaggtgaaggcgaaccaccaggccctggcgaaacttctcaaggaggaccacgccgacgcggcggccacactgccagcatggcaggccatcgcgctaagcaacgcgccgaagccggcgcaggaccaggaagcgttcgtttggccctggacgggcgtcctcgcgaacgtcccggccggacaagcccaggagggtggagctacactgatggagcagctagctgagttcaaacccgtgc

SEQ ID NO: 96335 - DNA, 766 bp, Zea mays
  Clone ID: MRT4577_19370C.1
cgggaaagcaaccattactctccccctcatcgctatctcagcctcagctcccgcaggcccgcacccggcgtcccggccctctccatccccaaattccgatggcctcggctccgcacgacgacgcggccaagggcaggaacgccgcgccgccggaaaaacgcaccagcgcaactatcacggaagccgatattcgcgtcgagttcgcgcaccacgacggcaccgtagcccgcgtcaacaacggcaccttcggctgctgcccggcgtcggtcctcgcggcgagggcgcggtggcaacggctttttctctctcagcccgacgcgttctacttcgactctctccagccggggctcgcccgctcgcgtgccgccgtggcgtccgccgtcggggcgggtgacgcctccgaggtctccctcgtcgacaacgctaccacggccgcggccatcatcatgcagcacgtggcctggagcttcgcggagggcgccttcgcacgcggcgacgtggtgctcatgctccactacacctacagctccgtcaagaagtccatccacgcgtacgtggtccgcgcgggggccaccggtcgtcgaggtgccgctcccgttccccttcgcctcggcgggtcgccgtcgtcgccgagttccgtgccgcgctcgcgctcgcccaggctgggggccgcagcgtccgcctcgccgtcatcgaccacatcacctcgatgcccagcgttctcctccccgtgaaggagctcgtcgccatctgccgcgaggagggc

SEQ ID NO: 96336 - DNA, 126 bp, Zea mays
  Clone ID: MRT4577_19371C.1
tcggtacagcctctcgcgtcacctaacaagcaaggagcactttggagcacttgcgggctgcgctcttcccgtccgacggtccgacgaggaacaagaaattcgattctagggagggagggcaggagc

SEQ ID NO: 96337 - DNA, 224 bp, Zea mays
  Clone ID: MRT4577_19372C.1
agcatatgcatagctagctctagtgctgcatcctctccgtctccagcgtcagcgtccctttccgtcgttcacctctagctagcagccacacgcaccaccgtcccgtcgcgtctccggcttagctcgccagtcacctccgcatgtcgtccatctcccttcatagtattcagcaagtaaagacagcttctgacgcgtcgtcgtcgcggttcgatcttcattgtggg

SEQ ID NO: 96338 - DNA, 675 bp, Zea mays
  Clone ID: MRT4577_19373C.1
atctcctctatagcctcacaacaatgccaccaccatccaagccacaatagctcgcccccagctaagctcgtagccataagctgtcatgcccatctcgtcgaagttcgactccctccccaactctagcgacaactctagtgagaaatttctctccttccgtttatcttccggggctacctagaacatcgttgtgatcggctcggcgagagcttcgtcgccgcgctttcgatttgccgatctgttctccagttcatcgtcaaaaaccgagatgtccaacaacagcgtgggatcaaagggcttgattggaaggagtagaggcgagttgacgaggaatctgaagcctaacttttgggtcaacatctggactacaaggttatcgcaagtgtaaggggggcttcggcttcgggatgaaggttttctctcgtgacagggtgaagatgtagcccgaaggtaataagaatggacgacgaagctatagccgaagagtttcagcttaatgtgatgacgaagcccaagtatgatgatgaccgaaaagagacaaagactattcagtccttaatgattcttgttatgcttatagatgaatgtcaacggcataaatgtacttttactcgggctatgccccgtacctataaatagatgaacagtagccccgtcctgttcatgctgttttgt

SEQ ID NO: 96339 - DNA, 305 bp, Zea mays
  Clone ID: MRT4577_19374C.1
ggacgcgtggccgggcggggctctcgcgcggagagatctccgagcatccttgctactcccggtatcaggtaaaccgatgggtgggcaaggtacaggcaacactgtctctgttcccctgctagggaaggcactgtccctctccttgtaagttttcctgtgagctctctgctgctgttcaaggagctttatccggtgatagtatcaaagcaccaagatgaagtccagcgcggttactacaaagggcaaggctatatttgagctcaagcacaagctggtacaagctgttaacaagattgcagacagag

SEQ ID NO: 96340 - DNA, 274 bp, Zea mays
  Clone ID: MRT4577_19375C.1
aattcccggatggatccactcgttcggccatggagagctcaatttgtgtttgttacgcggcaaccggaaccaaccctgtttctctatactgtgttggggcaacagacccggtcacactcatcttctcatggcgtgtcagctgctgcaacttccacaactcgaggacagtgctctgcctgtgcaagcataccctgcctctgtccatggaccataaaccaaacaaggaatatcaatattccaggaacgaggcccaaagctgcaaggtcatcaactg

SEQ ID NO: 96341 - DNA, 1296 bp, Zea mays
  Clone ID: MRT4577_19376C.1
ctaacatctgaaccgaggaatgggtttcacaagcaagctaaagccctcgaggcctggtgtgtccatgaagctccgagtccgtgatccgtgagtagcttctctccttagttaacttcacctacctcctccgttatctgccgcgattcggagtcctggttcaaagaaatttccccccttcattaatttctgtggttttgctcgcttgatttgcatgtgatccaatgttttcccatgcatcctgatcgatgcatttgtctccgccgcatgatgacattaggaggccaacgcagacagtccaagatggactcagtttcgtggcgagcttgaagcgcgtgttcgcctgcgagcctgacaagtacgacgagatcatcgccaccatgcgccagttcaagtccgggaggtcaatgaccgtccacaccatcctttgctattgcagtagtggctctggcttccttggatgctgtgttaactagggttcatttggtttctttgattgtcaggtcgatcgattctttattcgtcttgtctgtgaattgcagcattcgtagtgcggttgtggttgagcgtgtgaaggtgcttctggaaggtcaccctggtctcctccgccacttcaaccagttcctgccatggggttacataagggctcatggaccagtcgggaggatcagcgtctgatgcagccagggcagggaagcgcgtgtggctacctaaacaagcctaaacctactagctggtgctttccatcgcatgaatggcagaatgggacaagagtatctggttggcccgtcatgactgctattctgcattggcagtaccattaagaacatgtaatgctaaacatcagaccggccgcagcaacattgcagcattcgtagtgcggttgtggttgagcgtgtgaaggtgcttctggaaggtcaccctggtctcctccgccacttcaaccagttcctgccatggggttacataagggctcatggaccagtcgggaggatcagcgtctgatgcagtcagggcagggaagcgcgtgtggctacctaaacaagcctaaacctactagctggtgctttccatcgcatgaatggcagaatgggacaagagtatctggttggcccgtcatgactgctattctgcattggcagtaccattaagaacatgtaatgctaaacatcagaccggccgtatctttcttgcattatgtcatgtctgttccataatggtgaagccacctgactggcatcttctatatatcatgtatatatgcatgttcttggcaaaaaaaaaaaaaaaaaagcggcc

SEQ ID NO: 96342 - DNA, 1495 bp, Zea mays
  unsure (1)..(1495): unsure at all n locations
  Clone ID: MRT4577_19377C.1
tccggggtatctccaaggatggacagacccgcgagcatgctctccttgctttcacgcttggagtgaagcagatgaatgtactactacgcgggcaaagcatcggtgtctacctcattattttcggagtccgagtggcgaaacccgccgcagcttccactgggcagtgctccacaggctcatatccgattccgatccctaagacctcagccgctgcggcatccacggccaactcaagcgctggcaactggcaagggcagatgatctgtgtatagcactcgctaccttctcttgatttcccccctgaggtcgctgaccaagggtcctgtccgccatggatgcggagcgaagctctgcacgcagcgccacaccttttggtccgccgtccgatcgccaccgctagacgccacgcctgcgttgccttcccggctgaatcgccgattcccttggcggtctagtgccctgcggtcggcgccagacgccggcgaggtagccgcgagacacaggtacgggtgccgaacgggaacggctgctgcccgccgagccgtcgactgcctgcctggagccttgaccgcgcaagcgcagctgccgtgtgttgagtgctgagtcgccgactccaccaggtggccagcgattgctttgctgctccaggaaagaagccaaaaaaaaaaaaaaaaaacctataaacatcgattgaaagggaaaagacaatgccaagcctgaactgagaggcgcacactggatttcgcatcagttcatgtcgttccttacaccgtcaatttgacgaatcacctcgccacgccgccttgattttgttttgtcctccgcttctggccgggctcagttcagctgtatggtattggtatcgccatgtcaagcgacctctccacacgctcctcgccttcctcctccaccgcgtcgccttccgacgactcgcggcggcaggagcaaggccaggcggcgggtaacgccagcgggagccggcggtggcggtggcgcctcgggctgggcgcggcgtgggcgctggacccgcgggcgaggtgggtccgggactggaaccgcgcctacctcctggcctgcgcggccgggctcatggtcgacccgctcttcctctacgccgtgtccctgagcggcccgctcatgtgcatattcgtcgacggctggctcgccgccgccgtcaccgcgctgcgctgcggggtggacgccatgcacgtgtggaacgtcgccacgcagctccgcaccgccaaggcgccgccgggtaagcgcgtggccggcgacgaggagcagcagcagaccgtcgccgaggccgcgcgcaagctctccgaggacgcggcgtccaggagggggctgttgctggacttcttcgtcatccttcccgtgatgcaggtggntggtgtgggttgcggcgccggcgatgatccgcgcggggctgacgacgccggtgatgacgntgctgctggtgtcgttcctgctggagtactgccccagatctaccacg

SEQ ID NO: 96343 - DNA, 371 bp, Zea mays
  Clone ID: MRT4577_19378C.1
gtttatatgttagagacatcaaatgatctgctgggtatcttacgaaggagtgttcaaagggaccacgctgtcgactatgctctgcatgacctaaccactgttacacacctacagggttactacagccaatgaaatcctgtagagaaactctatgcatattttcctaagctaacagcgcaaatgccggggtgctctacctatggaatgcttcgtattgagagtttgaacttgacaccgatcggtatcaaccttaataaggtctgtcacactgtgaaggacctccacatgtccaaggctctcaactttgtagacacacatgttcttggatcacatagcgacctgctactcacatcaatggcttgatccaagtt

SEQ ID NO: 96344 - DNA, 924 bp, Zea mays
  Clone ID: MRT4577_19379C.1
gccggccgggctgggctcgcctcccgtcgcgttcttatccatccaccccgtccggcacccatttatatcctgtcgtccctccctccctccttcggccacaccgtgtcacaccgctgcttgcttgcttgcgatcgggtttggatttggggagcatcatggaggcctacttcttgttccacagcgggagggcgcacgagttcgcgtacgcggagcaggaggaggacatcggctcgccgtcggattccgaacccccgtccacgtccacgtcgagggagtccgcgggctcgtcggcggagctcgacgacgacgccacctcctccggctccggctccggctcggaccgcttcgagatgtccgccctcatgacgcagctccctcccttcaagcggggcctgtccaggttcttcgacggcaagtcgcagtccttcgcctcgctcgccgccgtggggtcgctagaggacctgcccaagccggcccggaagcgcctcaagccgtcgcggagctgcggcggcgccctcgacgcgcaccgcggacgcctcctctcgccgcgcaggcattattgcaccaagcccaccgctaggactaggaaggcagccgcgaggagcggcacgttgtcggttctcgcggccggcgcgccgaggatgccgccggcggtggcgagggccgagggcgtggccgccaaggttctgatcgtcagttgagccgcggatcggcctgcctgagctcaacatcgacgcacacactcgcaggcacagctagtacggaccgccgcatccacccctctgcctgaagctgttcggttttctttttgtttcccaatgcgtctgtggtctgatctctttgtaatgaaaacgcgcagctcaattagaatgaacttcagttggaaactcaaaaaaaaaaagcgaacatgtcaccatcaatcgc

SEQ ID NO: 96345 - DNA, 939 bp, Zea mays
  Clone ID: MRT4577_1937C.1
ggccgcttttttttttttttttttccctgaactcaaatgattcttgacagctggtactcaaccgtttcttcggagttcatggacagcagggacggaggaatttgacaactcctttcaccgagaaacaattttatgaccctttataatccgtcttatacagcaatagtgaaaaatgtccttatgtccagtcaagtgatgttgccaggcatcagtaggtgtccgttttcgctagtctataaggtagggttagggagcttcaactttcgttcttgaaagcaaatttgatgcgcctcctagcacgtggtattcccagccttgaacatcaactttgatcagaagaactctcagtatctagaacaacttcatccaaaggaattgtggaaacttcaacagcaatttctgcattagacttaatgctaactttgcaccatctacagatatagcactgttgtccagtcgaccaatcacccgaggaagtggttgtggcggtggtagaggagggctgggcaccggtagcggcgtcacggtggcgcttggagggctcggcggcgccggtggcctgctgctgctggcgctcccggcgcttggcggcgggcacccaggtggacttgacatgggtggggcagtcaaagcctcggctcttgcagcaggtgcggcagcgcatgtggacgcagtccttcttggcctggttgccgcagtcctggcagctgatggtgcctgcgccggcgccgctggcggagcccctgccgccgcgcgaggagcccgcggcggggtcatcgacgaagcggatgatgttgggggcgtagaagtggtggtggtgctcctgcgccgggtgaggcggccatagttggaagccgccgcgcggcgcggcggcggccgtgtagaggtaggcggcggcatgtcggtagcgagaatagggagaagcccaacgacccggcc

SEQ ID NO: 96346 - DNA, 181 bp, Zea mays
  Clone ID: MRT4577_19380C.1
ttaaaataataccatggggccggtctttcccctatcggccaagttttttaagatcatgataatggcaaacttaatgtgtaatacataatatttgtggttaacttttctatcataagaagtaactgagatatcgttactttcaactagccggtatatttactacaatgagtgtttgcgatat

SEQ ID NO: 96347 - DNA, 600 bp, Zea mays
  Clone ID: MRT4577_19381C.1
aacctctttcctccaccgctcacgcgcttcccttcccagatccccccaccctctcccctcccctcgccaccaaaccaccataccgagcagcctcagcttcattctcctctcttctcatttggtccccgcgactcgctccagccacatgccactgccccgtgctcgcctcgccgccgctgccattcctccccacgagctgccgtgctgatgatggacgacccgccgccctcctcgcggcaccggcttcccgtgacgccgccgccgccgccgccgccgctgcttctgcttctgttgctggtctccgtctcctgctcgctcgcccacggcagcccagcggatggaggaggactcggtgcagaggaatgaggcgcgactagggatgccgcttccgatgaactcagaaattcgcatccgagaagactactgcaggtatgcggtggaaaccacctcccaccacagatcctgcaaccgaggcacaggcatcacagaagagcaccctcgcctgctacgtcgccctcggcattcaccgctccatcaccatcgccttcagcttttcgcccatcgctagccccatcacatatcgtcaggcctctgccttca

SEQ ID NO: 96348 - DNA, 685 bp, Zea mays
  Clone ID: MRT4577_19382C.1
gttggactgagacgtgttggcgtgacggtgctaatgaatgctcgaaacctgtacactactacagcaccactcgtgtcgcggatgctgatcgcggtggggtcggccggtgattaagcgcctggtcgcgcttccggaggacgtccgaatggtgcgcgtgatccacgagctttgttgctcattcccacaatcccactaaacgcctgacacgcaatgcggagtacctcaccagtcaccaccagtcaccactcaccagcaacctcccgcaaatatgattcgatcaatttgcagccctatcgtgtatttgtgttcctacagttaagcaatgtgttgggggctcttgcccttaaataaaaaaaatcgcacgaagaaggtagaaatttggtcgtatatttagccgtaagatacataaaccatgaagcgataagtggggcgtggggtgtggggataaagaaaatatgcacaagatcgtatctctgccgaaccactttttcgtgtattttttcttctacgtataaacgagggagaaattggtggatacagagaactggggaataaactggataggagcacgcttgatgcagaagaaaaaggaagggttcaaaagggtgaagggcaggaaaagctgaaagaaagcatcaactggtccaaagatgggcaccgatgagcaagtgagcagctgcagcgc

SEQ ID NO: 96349 - DNA, 556 bp, Zea mays
  Clone ID: MRT4577_19383C.1
tttttttttttttttttttttttttttttattttttttttttttttttttttttttttttttttttttttcttaccgtttcctgtggttttccagttttcccggacccggggcgggccccggggggccccccggaaaccccgggcggggccccgcgggccccccccctctcccccacaagggcgcgccgcagtcacggcggggcggggagagacaagagggacaaaaagggccgcccggggggtaaaggaggcgagcccgcccaaaataaaacccaacgagcccaccggacgaaaaaaaggcaaaaaacggggggcccaaggggggaccaaaaacaaaaaaacgcccggggcccgccggcccgcttaaaaagcggaaaaccgggcgggccaaggccaaaaaaaaaaggcaaaacccggggggaaaggcccgccgggcccggggcgccaggggggaattgctctacaccggcgggcccggaaaaacgaaaaaccccctaacccgcgggccccggggagaaagaacaaaacccgccccccgggttggccccaaccggc

SEQ ID NO: 96350 - DNA, 173 bp, Zea mays
  Clone ID: MRT4577_19384C.1
agaagaacctggctggaccggagcatgaagttaaggatcttttggaggaagaattaggctagccgtgaaatgaaccggccgacgccaaatgccccggcttatggcgtgccgcgccagagattggcccgtccaagcccttagccggggctaggatctaggagtctctccacatg

SEQ ID NO: 96351 - DNA, 1592 bp, Zea mays
  Clone ID: MRT4577_19385C.1
aaaaacttggattgagtagggtgggttggtcggaagtccgacccacgcgtccgcgcgagacggtgccgcaccgcccgcccgttttcttcctcagcgccggcacgggggcacatccactccaccgcaactgagccatctcttctccttcctcctccgcgcttctgaatatggatccatccgagaacaagcagccacttctccgatgccgtcctcaatggccaaatccctcctcctccctccccagttcgtctccgtctcaccccgccacccccaccgcgccggattccccgtcctcaagccccgccgcgcctcgctgctggcagccaccggcggagacgtcacgcccgcgccggacgccgacagcggctccaacaccaaccctctcgtcgatgtgccccgcgcgctctggcgccgcaccctgcagcctctcggcgactatggcttcggcaagcgcagcgtctgggagggcggcgtcggcctcttcatggtctccggggccgccctcctcgccctcgccctcgcatggcttaggggattccagctccgctcccgcttccgcaagtacaacacagtcttcgagttcacgcaggcgtgtggcatctgcgtcggcacgcccgtccggatacgaggggtcaccgtcggctccgtcgtccgcgtcgactcctccctcaggagcatcgatgccaccgttgaggttggagatgataagatcatcataccacggaattcagtggtcgaggttaatcagtcgggtcttctaatggagacactcattgatatcacacccaaggatccactccctgcaccttcagtaggaccacttgacccagactgcaccaaagaaggtttgattctctgtgacaaagagaggatgaaaggacagcaaggtgtaagcttagatgcattggtgggaatatttacccgactaggtagagacatggaggagattggcgttagcaaaagctataagttggctgaaaaggttgcatctataatggaagaggcacaacctcttcttacacggattgaggatttagctgaagaaatgcaacctttgctctctgaagtccgtgatagtgatctgctgaaggatgtggagactatagctaaaggcctggccgacgcgtctgttgacctaagaaggctgaagtcgtccatgctcaccccagagaacacggatcttattaagcagtctattttcacccttatatttaccctgaagaacattgagagtatcagctcggacatctctgggttcacgggtgatgagacgacaaggcagaacatcaagcttctgatcaagtctctcagcaggctattatgattgtttttcaatgtgcagaacagaatgatggattgctttgctttgctttgctttgtttgagacaggaattgatgctggtagagtagggtgactgtctctcggtctcggtggcacagaggtaggaagagaaggcatagctaattaacgttccacgaggttttggttattctgcttctaagtttccgaaaatttcttgaatgaacaatcttgaaacaacatcaaaagagcagtcatgaggggagagatcggtctccctccctccttgttg

SEQ ID NO: 96352 - DNA, 1860 bp, Zea mays
  Clone ID: MRT4577_19386C.1
gacggtgccgcaccgcccgcccgttttcttcctcagcgccggcacggcggcacatccactccaccgcaactgagccatctcttctccttcctcctccgcgcttctgaatgtgaggaggcttacaacgcccggtcccccctaaatccaaatccagcttccgctttgcagggcacgacccccttcgcaactgactgagtccaaatccaaatccagttaccccactcaacctcttttgatttgatttcgcaggatccatccgagaacaagcagccacttctccgatgccgtcctcaatggccaaatccctcctcctccctccccagttcgtctccgtctcaccccgccacccccaccgcgccggattccccgtcctcaagccccgccgcgcctcgctgctggcagccaccggtggagacgtcacgcccgcgccggacgccgacaacggctccaacaccaaccctctcgtcgaggtgccccgcgcgctctggcgccgcaccctgcagcctctcggcgactatggcttcggcaagcgcagcgtctgggagggcggcgtcggtctcttcatggtctccggggccgccctcctcgccctcgccctcgcatggcttaggggattccagctccgctcccgcttccgcaagtacaacaccgtcttcgagttcacgcaggcgtgtggcatctgcgtcggcacgcccgtccggatacgaggggtcaccgtcggctccgtcgtccgcgtcgactcctccctcaggagcgtcgatgccaccgttgaggttggagatgataagatcatcataccacggaattcagtggtcgaggttaatcagtcgggtcttctaatggagacactcattgatatcacacccaaggatccactccctgcaccttcagtaggaccacttgacccagactgcaccaaagaaggtttgattctctgtgacaaagagaggatgaaaggacagcaaggtgtaagcttagatgcattggtgggaatatttacccgactaggtagagacatggaggagattggcgttagcaaaagctataagttggctgaaaaggttgcatctataatggaagaggcacaacctcttcttacacggattgaggatttagctgaagaaatgcaaccttggctctctgaagtccgtgatagtgatctgctgaaggatgtggagactatagctaaaggcctggccgacgcgtctgttgacctaagaaggctgaagtcgtccatgctcaccccagagaacacggatcttattaagcagtctattttcacccttatatttaccctgaagaacattgagagtatcagctcggacatctctgggttcacgggtgatgagacgacaaggcagaacatcaagcttctgatcaagtctctcagcaggctattatgattgtttttcaatgtgcagaacagaatgatggattgctttgctttgctttgctttgtttgagacaggaattgatgctggtagagtagggtgactgtgtgtgtcttggtggcacagaggtgtaggaagagtagcagctaattaatgttccacaaggttttggttattctggtaacaagtttctttttttttcttttttctttttaaaaaaactcagatcagtattgagctgttgtaggtcatatagtaggcccatttttcatcagttgatggatcgcccttgttggctgcctgagcaaatgcgcaactgattgtttctgttagcatgaacaaaaaaaaaaaaaaaaagcggccatgaggggaaagatcggtctccccccccccttgttgagctgttggtacttggtaaaccccttttttttcgtcaaataaaataaaatcaattgcatgctccccgccc

SEQ ID NO: 96353 - DNA, 1678 bp, Zea mays
  Clone ID: MRT4577_19387C.1
cttgtgtccagtcggggtgggagttgggctcgtgcagtgcagtgcagtgcactgcaggtgcagtcttgctcgcctgtcttcctcggcaccgggacagcggacctccaccgcaactgggccatctgttctccttcctcctcttcctccgccaccgcgcttctgaggaggctagggcgatgcaaccgcttccgctttgttattagcaaagggaaccgtccgagaacgggcagccaattctccgatgccgtccgctatggccaaatccctcctcctccctcaccctttcttctccgtctcaccccgcccacaccctcatccgcgcgccggattccctgttctcaagccccgccgcgccgcgctgctcgcggccacgcccgcgccggacgccaacaccagctccaacaacaaccccctcgccgcgctctggcgccgcaccctgcagcccctcggcgactacggcttcggcaagcgcagcgtctgggagggcggcgtcggcctcttcatggtctccggggccgccctcctcgccctcgccctcgcatggctcaggggattccagctccgctcccgctttcgcaagtacaacaccgtcttcgagttcacgcaggcgtgcggcatctgcgtcggcacgcccgtccggatacgaggggtcaccgtcggatccgtcgtccgcgtcgactcctcccttaggagcatcgatgcaactgtcgaggttgaagatgataaaatcatcataccacgaaattcaatggtcgaggtgaatcagtccggtcttctaatggagacactcattgatatcacaccaaaggatccactgcctgcaccttcagtaggaccacttgacccagactgcaccaaagaaggcttgattctctgtgacaaagagaggatgaaaggacagcaaggtgtaagcttagatgcattggtgggaatatttacccgtctgggtagagacatgggggagattggtgttagcaaaagctataagttagctgaaaaagttgcatctataatggaagaagcacaacctcttcttacacggattgaggctttagctgaagaaatgcaacctttgctctctgaggttaatgatagtgatctgctgaaggatgtggagactatagctaaaggcctggccgacgcgtctggtgacctaagaaggctgaagtcgtccatgcttaccccagagaacacagatcttattaagcagtctattttcacccttatatttaccctaaagaacattgagagtatcagctccgacatctctggtttcacgggcgatgagacgacaaggcggaacatcaaacttctgatcaagtctctcagcaggctattgtgattggtgtgcataatgatggattgctttgcatgggacggggaatggggaaatggttgctggtggggggtctctcggtctcggtggcacagaggtaggaagagaaggcatagctaattaacgttccacgaggttttggttattctgcttctaagtttccgaaaatttcttgaatgaacaatcttgaaacaacatcaaaagagcagtcatgaggggagagatcggtctccctccctccttgttgagctgttggtacttggtagacccatttttttacgtcaaataaaataaaatcaattgcatgctcaaaaaaaaaaaaaaaaaaaaaaaaaaaaaaaa

SEQ ID NO: 96354 - DNA, 361 bp, Zea mays
  Clone ID: MRT4577_19388C.1
aaaccaaagggtggagttactttaattcaacaagggagctagagttcttcacacttgaaaaataaatctcagctcaatcaatcgcttcggcaaatccacaccggttattaattaatgaacccaacgcagcactccagcaccagctactggtccttttgaggagcccaagcccactacgggaaaaaatggggaggctgaaccaacaaaaaaaaggggtcccaattcgaaccaacaaaggggccggggggtaaatttttcccagctagaccatcctgagcaacgcggggagcacgggaacgggggggtaaataacgggcccctgggacctggcaaagcggcaaatggcggcggcggaacggcc

SEQ ID NO: 96355 - DNA, 329 bp, Zea mays
  unsure (1)..(329): unsure at all n locations
  Clone ID: MRT4577_19389C.1
tttttcnttttttacctcatatttttttttcttcgggggaaggtttagatgtatattttgggagggtaatcaataaacggaccagctccaggaggaccaccccaacccttggaagcaaaaagccccgcccacagattataagtccctccaccaagggataccgatgtaacaaaatagtagctcatcttatccccaggaaaataccacgcatggagctaatatctggcaatgatgcctgcacggagcggttggttcatgacaacggggaagtccagcgctttcgccatttccaccgacacgccggccaccggggggcgccactccaaggc

SEQ ID NO: 96356 - DNA, 317 bp, Zea mays
  Clone ID: MRT4577_1938C.1
gagctcgagggttccttttttggctacattctatgtgcttcgaagcctctgcacttggttcagctggatatcctatggctgataacagcacattcctaggaaatgacccggatgatgatctggtgcttatgggtccagatgggagccatctgaaacctgacagtacctctgctgcactgggcttacttgaatgaagctcttaaagactactctgtggaatccacgaagacttctatgcgggggcacattgggcttataaaactgaccccttgacggggctgtggatgcctggcactacctatgggtccctttctgga

SEQ ID NO: 96357 - DNA, 162 bp, Zea mays
  Clone ID: MRT4577_19390C.1
ctaactgtacgataccgtgaaaggcaagctgtcgctgggggcgaggatcctgctggcggtcggcgtggggaacgtgttccggcgctggttctcctcgcccgtcggctgcggctgcgagcagctgctcacggcgtcgcagtgctacctgtcgaccacagccgg

SEQ ID NO: 96358 - DNA, 571 bp, Zea mays
  Clone ID: MRT4577_19391C.1
ttgtgcatatcccttcactaccagtcgtgccttgtgtttggatactgcaccttgtatcatcccttttcaccttgtatacccatttaagaccgattgccttgcgccctggaggaagatccacaagagtccaggtctggttatcttcaattgatttcatctcctccatcattgcttttctccagctcggactcctttctgcttcaccaaaagagaccggttcatcggcgcttactgcatgtaactcctcatctagcagcctccttgttgcataaccaggtggagttttggattccagtagtccatctaccttgcggaatctaagtggatcatcttctgctctataggcatctagatactcatcaatatttccctccggtggtgaagcaaactccacttcctgcatttcatcctcctcttccgaaacatgccctgtatcaacatgaggggtccgaggggacagacctccagctgaatgctcatcttcagattccccagcagttttctcatctccttcaggatgtgtctgctttctgatggcatattccattgtgaacacatcttgatcttcatt

SEQ ID NO: 96359 - DNA, 471 bp, Zea mays
  Clone ID: MRT4577_19392C.1
ctcgttgggggcccttctcctttttggccgccttcgagcggcggctgcctgcttcctccactgtcctaaccttgaccgagccgccgccgccagtatgaagggacccggcctcttctccgacatacgtgaagaaggccaaggcatctactcagtacaggactacacttacgacacatgaagctgaccatctacaccgacagccacctgtggactgggcctgactcccacagccgtgaagaaaggacggctttattctcttgatgaggctcagtaacaagacaagaaaccagtgttgacgtcaaaggggacactgaatcgaagatctatactacatagaccgggtgggacgcgttgccatgcgcaaagctgggcacttctgtgaagctgactgactacaattgtggaagagcggagcttgacacctgccatgagaacgcaagtttagtcactggagtcggcacgaagccttct

SEQ ID NO: 96360 - DNA, 463 bp, Zea mays
  Clone ID: MRT4577_19393C.1
gagacgtacatccaaatccatacaggaacaaccgacttggagccttcgagtttgacgctcgatgacgccgaccgccgaggccgaccgcgagtccgccagaccgccaccgccgaccggtctcaactctcaacctctcaggtatctctccgccacgcactcctctgcctcggtcccttcgcttcgacagcgccatcgcgccgtcctggatctggacgcgggcctgacgaccaccgacggccaacgcggcttctccaatctctgggctctggcgacaagcacaccagattgctaagtgatggaacctttatcagttcattcagttgtggcagcgaaacggaggagcgaaagagacgagactgattcagagagcaactcattcgacaagaatgatgacatgtctgaggatgagatgacagtgctaggtgggagaaatgagatgttgttagagttgatgaatgcaatg

SEQ ID NO: 96361 - DNA, 1026 bp, Zea mays
  unsure (1)..(1026): unsure at all n locations
  Clone ID: MRT4577_19394C.1
ttttatatgagttacctctatgacttcaaatcacgtccttatgtcgcgattctcaatgcaccataacccttctcaacttgatcaaccttgacttcttgtaagaacctcttttccacctagctttaggtaccttagtcccttgaccttctcccttgctctagtccttcaaaatcctttttgcctttgtcattggttcaaccaattgtctccaagtcatgcacattggtttttacttggcaatgtccatccttcaacatcacttgtgatatctataatccatatctaactcagcttatatggattggcacgaggatcacctgtgttgaactctacaagcttttcactaagttcttgttcaacacttaacagacttgttagttctataataatgttgtcatccaaacaccaaaacccactagggtctttcaatctccccctttaggtgatcaatggcaacattattaaagcttacaaatgatgagatttaaagcacaattttgaatcctatgacataaaatgctccccctaaatatgtgctttcttaaaaataccaactttggtcttaaatgccaatttgcacatacttaggctaaagtgcgagccattcctacatcctagcatccgtggggcataaaaatatccgtgatgctcatgacatgaatatgcacacattacaccacaccattaaagctttgcacaacagcaaagcaattcatacattatcaaagctttgcataacattaaagcataattatcagcatgattatcaatatacaccatataaacacattaaatcaacatacaccatataaacacaaattaaagtaatatcaacataatatcacattatcatcataatgtcacattatcaacacaatatagccatattatcagcatgataagcaatatcaacatctaatttataatgtccaagatccatgacttagactagtcactagattcgacggttntctcccaaatttataaatatcaacacacattatnacaacctggaggtagagcgcc

SEQ ID NO: 96362 - DNA, 278 bp, Zea mays
  Clone ID: MRT4577_19395C.1
ctcgtcgagcattccgaggtcctacagtcagtcgtattacagctgcagcaagaaagaataagcgagcgcctccctaacgctcgttgtcagcaagggccaacagcgccgcgtccagccgcctcaagtcgtccttctcgggctcgcggctcccttcgggcacgcggagcaccaccccgtcgtccgtggccgtcgccaccccggacgccggcggctgcccgatccgcgcgtccatctcctcctcacccaacccggcctacaacctgacgtccttccggttc

SEQ ID NO: 96363 - DNA, 249 bp, Zea mays
  Clone ID: MRT4577_19396C.1
gtggtccctgtctttttccttcggccgagccctccaggcgagcaccctcaaggcctgcgctggcatggtggagaacttctataaggctagagctgtcttcctcatcttgtgcacggccaactctgaggctaccctcgacacctacaagggtgatgctatcgccgacaccgacagcctacacgttattgactacaagtactgagatgcttctcttagcttgccccatttggaactgctgcctactaccta

SEQ ID NO: 96364 - DNA, 303 bp, Zea mays
  unsure (1)..(303): unsure at all n locations
  Clone ID: MRT4577_19397C.1
cggaacgcgtnggggtacntacaagcntctcatcngcaatggagtccaanaagcnctccggcgctgctggtnatcgcnatgctcgcgctctcctngtncccgctcgctctcgcgtgggagaaggcggaaccggagtgccactcgtgcgagtccggctcgccaccctcgaccggcggcntncccctgnctcccgtcagcatancgtcatcccgntgancctgtcagnatancgtcggtccccctggcccctgtcagatancgtcagtggccttgcggcggtgancttccttccattccgattgt

SEQ ID NO: 96365 - DNA, 403 bp, Zea mays
  Clone ID: MRT4577_19398C.1
tcgtttagcgtgtttgttacacatgagatcaacttttagagctgcgtgagattgttgatgtgtttgaggaaattttaagagtcaatcaagagattggtgtaaagtttcatggtgaagaccagaactgggttctcaatgataaaactgttcaaggacttgcacaggctcaaacacaagcacattatccctatgctgagactgatcgccgcgattggagtgcaccgtctagacagctgactccgacttatgaagaaaaatcttgggacaacataatggaggctaacgaagcctatgcctctagagataggcagcatgagcaagcttacaggcaatatcagttgaactcccattttgcttcgaaagctcaggttggtcctacctgtgctcttattaaggctgaggt

SEQ ID NO: 96366 - DNA, 242 bp, Zea mays
  Clone ID: MRT4577_19399C.1
cagcggatgactgatagaaccgagctaatcaaagcactagtattctaggcactcaacagcgaccaccatttgtaccccaggtctttcacctacttcaacacctctaaacgctttggtttaaacacccacttccgacacctattcggatctgccttgaaacaaatcggatctgaggacctgccagaccacggttgcggcctgaaaatagccgcgctgggttttcgccagctcgggcaacatgg

SEQ ID NO: 96367 - DNA, 176 bp, Zea mays
  Clone ID: MRT4577_1939C.1
tcctatctcccgttgccaccgaacgggccagcctctttcttcctattccagcatacacccccccctcctctttcttccgcttcatttataccaccttaccctttatgtcaacgcaccggtcctcctgacatattcaatcaccacatcaacatgaaacccaactccaacgctaatca

SEQ ID NO: 96368 - DNA, 680 bp, Zea mays
  Clone ID: MRT4577_193C.1
cctcgaggccggccgggccgggaattgactgcgcatatatatcctctcctcctactcgcctacctccacgcgtcatagctttctctcttctcgcagattacttccgccggccgtggctaccacccgtaggacgacgccatcgtaccgcacagcgatatcccatccacatcagctcaggcatcgatgcaccgcccaaacgcacggtgggagctgtactgcctagaccatgcgattctcgctgacgccgacatgcgcgccgatgagagcattggggaatgtgaagatgctgtcaacaccttcttcagtgagactggcgctgggaagcacgtgccccgtgctgctcttgttgaccttgaacccactgtcatctatgaggtgagaactgcgacctaccggcagctcttccaccctgagcagctcatcagagggaaggaggatgcagccaacaactttgcccgtggtcactacaccattggcaaggagattgttgacctgtgacttgatcgcatcaagaagcttgacgacaactgcactggtctccagggcttcctcggcttcaacgatgttggtggaggaacgggctctggccttgattccctcctactagagcgcctgtctgttgactacggtaagaaatccaagcttgagctcactgtgtacccttccccccaagatgctac

SEQ ID NO: 96369 - DNA, 471 bp, Zea mays
  unsure (1)..(471): unsure at all n locations
  Clone ID: MRT4577_19400C.1
cgcgcacgaagcncggatcgcgcagagcggccgcccatccnangaataaaatcctaaccccggnnnnannnnncaggggggcggcaaaaagcaccaaaccgccccgaggaaaaacccagaacaaanccggacaggagaaacagcacccagcgacccacagaccacgcgggaagaagcaagggccagcgggagccggggacgaacacagcacaaacaacggacacagagcgaccgggcaaacaaaaacacagaggggcaacaacaaacgagacgaacgaagagaaaccccccggaccagggaaaacaacacgggagcgaacaggaaaaccgggccgcgcgggccccaccgcgcaggacccccagagcccgcgggagnagccgaaaccgccgccacggaggccaccgccggagccggcaccaccaccaccggagccaccgccgccaccgaagccgggggcgccaccgacggaa

SEQ ID NO: 96370 - DNA, 393 bp, Zea mays
  Clone ID: MRT4577_19401C.1
ccaacaagcaacatagaaagtggaatacatttttatacaatagagcaacaatggcggccgggatattttccatccttatgctccttgctctttctgcatgtgttgctaacgcgaccatttttcctcaatactcacaagctcctatagctgcccttctttcctcatacctttcatcaatgaccgcttcagtatgtgaaaacccagtccttcaaccctacaggctccaacaagcaatcgcatcaagcaacatatccttatcgcccttgttgtgttaacaaatctccagccctttttttggtgcattcatttggtactaaccatctaggcacaactaatttattattctgggcctctgtgtgattaatctaatagtatttgcttgcttttatttcc

SEQ ID NO: 96371 - DNA, 757 bp, Zea mays
  Clone ID: MRT4577_19402C.1
ccggccgggaacaggtgttaactctcctccgcaagacacctggtttgtcaaaatgtctaagtgcaaattttcccaatgtaaaatttcttacctcggacatgtaataagtgaggaagggtggccaccgatgaagcaaaagttgaggctgtgttgtcctggcccataccaaacaatgccaaagacttgagaagcttcctcggtcttgcaggatattatcgcaagtttgtgaaacattttgccattattgcaagacccctgcacaatctgttgaaaaaaggagctctctttgtgtggactcaagatcatcagctagcgttctctactttgaaacaagctctcatttcagcacctgccttggcattaccaaattttgctaaaccgttttgcttggaaaccgatgcctgtaaaaacggtgtgggtgctgtcttaatgcaggagggtcacccactagcgtttctcagtaaacctttgggcaccaaaacacaaggtctgtcaacatatgagaaagagtatctagccattcttatggccgtcgaccagtggcgccactatctgttacatgctgaattcattatcttcacagatcaaaaaagcttgatccacttaagtgaccagaggttgaacactccatggcagcagaaggtatttacataattactcggcatgcagtacaagatagtatacaaacaaggttccgacaatagggttgctgatgccctatctagaagagcgcatgatattcctacagttctggcca

SEQ ID NO: 96372 - DNA, 301 bp, Zea mays
  Clone ID: MRT4577_19403C.1
acgcggactatgagagcggacgggccatacccaataaccaggtgcttggcaaaatcgagcgggccattggcctcaagctccggggaaaggacattggaaagcccatcgagaaggggcctagggcgaaatgaacacaaagcctcgaaatcagtgcgctccagctgatctcgttccgccggttccccttggccgccagttccgttctcctcacgggccgaacggaacaaggggtccagcttgcgggggacctccccagcccattcctgctgtcaaacaaacaaaaccttgcaaagcgcaaaaa

SEQ ID NO: 96373 - DNA, 404 bp, Zea mays
  Clone ID: MRT4577_19404C.1
cggcgacgaccgggtgcgacagcggagccgcggcttcttccccaaaaggggcggggagcgagcggcagacgcgcggagacgaggagcggaagaggccccgcacgaagcgcggggcgaacaacgaagccagcgaaaagagcaagaacggacacacccagacgaagacgaagaaggctaagaagagcaacgcggggggcccggccaaggacgaggaagacgagcggaacccggagaccaccaagaaccagggcacccgccggcgcaaccagagcagaagaggttttttttacacgcccgaggaggagggggagacaaccctgaacggcgcagccaaggagacgaacaaagagaaggcgtcacgccaccgggtgaggcccgccagcagagagagcaccaagaccgcc

SEQ ID NO: 96374 - DNA, 535 bp, Zea mays
  Clone ID: MRT4577_19405C.1
gcaaaccaagcaacactaagacttagatatatctgttacatatgcaccaatatgcgagtttatgagaccgtgcatcactacattgggaaaacccgccggcataactgccacaagggactgaaccacaagaacacgcggtggctgaggatcaataaacggtaaaacagggcggacaagtaggaaagacagatgctttattaacacggcctggcggggcggataaagcattagtgggctgtgcagctatggtccacaacctaacgaactttgcggatgtgctcacgcttgttctctctgaacatgatagctggttgagaggtcgcaggagaattacgggttggggtcacacagcaaggactgaatagaggtcaatattgccgcacattatatatagggctccactggatatgtaggatgtacaaacagatgctttcatccccatagaagattggatgaaacatcctataaacaaaccgaacagatggaggtgcgttgggggaaaattctgtgcattgcaaagagagatcgaacgtgc

SEQ ID NO: 96375 - DNA, 426 bp, Zea mays
  unsure (1)..(426): unsure at all n locations
  Clone ID: MRT4577_19406C.1
caagaagagggaagagcaccaaggaccaacggcgccacgccaggaaccacacccacccaagcgcagacgagggagaccccngccacggccacaccggggggggggngananancaagccacacncaccaancaaanncncaagacagaacacaacaaacaaaccccaacaggcaacgaacccaacgcngaggccaacgcgggggacccngcagccgcagcagggccaaaggacaacgngcacgcgcgcagacagcagcggaaaggnagcaagagcccgacgaccacccaaggacagaagaaggagnccaacaacagcaagaaccccaaagaacccaagaaagagaccngnagcaagggcacagcggaccaagacccagaacnaggacaggacaagcagcnccagagngagcagaacaagaacgaca

SEQ ID NO: 96376 - DNA, 286 bp, Zea mays
  Clone ID: MRT4577_19407C.1
aacggaaaaaaaatccataatatgccgagcccgacactcggatccccagttaaaagacggaacgtaaattttcatggcccgccactgggacttgccaacaccataaatgtaagggttggcccccgtttcagcaaaattaacatgggggcaccatctagcttagaacaaaagcatcttaaacgggtctgagccgcctaaatcttggtttccgctgactccgtctcctcagcctaaaaaagccttgtccgcaggttgagggttcaacacttttttttaattaacactc

SEQ ID NO: 96377 - DNA, 963 bp, Zea mays
  Clone ID: MRT4577_19408C.1
gggtacctcgaggccggccgggccgggattagcaaggcgatagataagaggaaggaaagaaagaacataggcagccgaagcgactgtcgcgaggcaaggccatcgtccgccatgacgctctccctctccacctctttcctccccatccccgccgccgcgaggaccaccgcccgcaccctacgctccgtcgtcccctcccaggggatgcgctgctcgatgcgcaagaaggggttgcacccggagatctacgaggacgcgaaggtgtactgcaacggcgagctggtgctggtgacggggggcaccaagccggagtacacggtggacgtgtggtccggaaaccacccctactatgtcggcgacacctcggcgctcgtggtcatggacagccagatcgagaagttccgcaagaagtggggccacatcaaggagtactggcccgaggaccagtggagggagatgcacccagacggcgacccggagttcgagcccgagggggacaactgattgatggctccccgtcttcctcacccggtgcgtggtcaccggtccagtttacatttgccctcttgaatggaattgagactctgtctgttcgcattgctctccaggtgttcggttaatgttcggaatggaaaatgtacaatactactacttcacgagatagggtcttgttgatcatgggcccccaaatacaatgtgctttctgcaatgcactctagggtagggtggtacgtacaatagtattgatcaaacaagcaaatgatcctggttcgaggaagtggatatttctcactaggagtatatgctagctaatgcttgactacagcttgagtcgtctgctgataacctgataccgcatactgtttgatcaaaactagcctcctgttgctaggtgatccaatttccgagtcatggttttatacaaccaattttccataaaaaaaaaaaaaaaaaaggccccta

SEQ ID NO: 96378 - DNA, 302 bp, Zea mays
  Clone ID: MRT4577_19409C.1
gggggaactttaggaaaattactggcatagaacccaaggaaacgcaaaatacacaccaaacgacaaaaggcccacatcagcaaggaagcctgccacctcacccctaaaaaccaagcaagcagaagggggaatagcaaactgtaaaatgcccgctaggaagcaaaaaagaaaatacatgtagaatggcataactcgaatcaaacccaaagaacgcacaccttgataaaatcacaaggaatatggccaagcaaagcgaacagacataagaggaggcagacaaccgctcatggcggacacacgaa

SEQ ID NO: 96379 - DNA, 391 bp, Zea mays
  Clone ID: MRT4577_1940C.1
aacacactggacccgcgtggggcctccgactgctgctaccgcgacgcgcatccgtcggcaagagcgcagacagatgaggaagggaagctgctactagacggtaggcgcggaggagggacatgagcgacgcgagaggccagatgcgggacatccgtggacgcaagcgcggggaaacacgccagaagaagctgcagaaggcggcaaaggggctgctgagtggccgagaacaacgagggggcaacccagctggcgccataacacagaccgagcgggtcgtcgcccaccctctgccgcacgccagtccaaggaccctgctacgcagtctgcggctaccacacacgtgcgccacgatcgagcccgtagaaggaacgacggcaacctaacaggggac

SEQ ID NO: 96380 - DNA, 390 bp, Zea mays
  Clone ID: MRT4577_19410C.1
ccgcgcgctcgtgtctagagacgaaacgaccgacatgtctctccctctatccgccgcagctgtcgccgtgcagtacacggggctgctggtggcagaaggaccccacgccctctgcctcaccgccatcacttagccgcaggtgagctccgccatcgagccctgactctcctaagcccgccacacaggttccgccccctctccgtcctgctgaagcgtacgcaggaaccttgctagagcaggcagcaccgcatgagaaagctgctccgactggaagtgacacaagaatagatccaagcctctcagcgggctacaacgccagccactccggcagcagcccctccaagagccgaggtagcatgccctacatcatcaccacatcaacctactgct

SEQ ID NO: 96381 - DNA, 1281 bp, Zea mays
  Clone ID: MRT4577_19411C.1
atggcgcagagagagaaaagagggacgcgcggggcaacggctcagcgcctagcgaacagggcccgcgaggcagagagagaagaggggagcgcgggcgaagaaactggcgccgacagatcctctatccaattccaagtgttagcagacttcatcgttgattggatgctaggggctcatgaagaaggatgcataatagacaccgaagcttggagagtgttttgtgatgggtcatggggaaccttcggtgtaggtgcagctgctattctaatctcaccatccaaaatcaaaacttgctatatggctagattggagttcaactgcataaataatatagcagagtacgaagcccttcttctggggcttcgaaagcttaaggcaatggagataagaaggacagttctcaaatctgattcacaagtcatcacagggaacattgataaaagcagcaaagcaagagacccgaagcttgaaaagtatcttgacacagtccgaagaatggaagcctctttcgaagtgcagtacttttcaaagtggatcaaagctaaacccctagttatgatcactttagccatggttcaaaagttcttctggcagaacattgtttgtcggttcgatgtgccgaaggctatcacggttgataatggaactcaatttgatgatgaaacatttaaaactttttgtgaccaaattggcacaaagatacactttgtatctataagacatccagaatacaatggattggtagagcgagctaacaacttcatcgtcataggaataataaaatcaatcttcaatctgccaaaaggaaagtggccagatgaattggtaaaagtggtatggaatcataacgctgttgtctcaagatcaacacggtttactctgttcaagcttttattcggggatgaagcaataacaccgaaagaagcaagatcaggatcaataaggactctagcttcggcagaggacgacgatgcttgcaaaatagcaaaatacactatagaaggggttagacttcaagcaatagaccgcatcaataaatatcaagccaaaacagtcaagtggagagagagaaaaagtaaggttaaagaatatcaagccaggacatttggtgcttcgaagagtagccaacccagacacagtggggaaattacaactcaagtgggaaggtcccttcttgatagtgtctttgtcaaaactcggatcatacagttgaaagatatggatgggaatgatgttctaagatcttggaatgcagatgagcttcgacagtattatgtgtaa

SEQ ID NO: 96382 - DNA, 138 bp, Zea mays
  Clone ID: MRT4577_19412C.1
cggatttccagttccaggctcgacccacgctttcgacgaggtttgcgcatgataaaaggaaatatgctgtaccttgcggaaaaattcctccgtatggttgaattgtggattttgtcaacaaaaaagggccagtggaac

SEQ ID NO: 96383 - DNA, 718 bp, Zea mays
  unsure (1)..(718): unsure at all n locations
  Clone ID: MRT4577_19413C.1
ccggccggggagtcaatccacgtagtcgaaccagccgtcaaaatgagcgcccaggcccttaacaagatcgctcccaacagcccctcgaggcagaacccttccgagctcgagacgagcatcgctcaggctctcttcgacctcgagtccaacacctccgatctcaaggtcgccctccgacctctccagatcgtctctgctcgtgagatcgaggttggccacggcaagaaggctattgtcatctttgtccccgtcccttccctgcagggcttccaccgcgtccagcagcgcctcacccgtgagctcgagaagaagttctctgaccgccacgtcctgatcctcgcttctcgccgcatcttgccccgccccaagcgatctgcccgctctcgcaacaaccagaagcagaagcgaccccgttcgcgaactctcaccgccgtccacgacgccttcctcgaggaccttaccttcccccgtcgagatcgtcggcaagcgcgtccgcacccaaggaggacggctccaagctcctcaaggtcatccttgacgagaaggancgnggggtgggtggttgactaccgcctcgacacctactctgaggtctaccgtcgcttgacaggccgcaacgccnacttcgagtccccccagagcggtcccgctgacttactaagtcggtgcgtctacttcagagatgaactagtagtacgaggaaaaaatacatgtctgc

SEQ ID NO: 96384 - DNA, 818 bp, Zea mays
  Clone ID: MRT4577_19414C.1
cggacccagagccaaatccagacaccaacgctcgtgcgggagagagagagagagccgaggtcagagtgcatctaccaacgccggccccgtccgcgcctggagctcgggagttcacgacgggttagcgtacttcgtgaggttgctggtgaagcgcttgtggccgattggggaggaataaaccactgtgtcgaccagaattcgtcgtcggtcgccggattccgccacgcactgtgggtgggtctgggcgcccttcggatctcggtgagcatctcccgtagtgataccccacaattaccgctgtttggtactgctttcggataagagtttaggcatgaggatcggagattcgggagttccggccatggcgccgccgtggttcactgggttgcgccgttggcgtgttcccagggggaagaaagggtctgggccgtccatctgttgatcgacggctagattagaattaggcgtacccctttcccggcgtgtgatccatgccatcgattcatccgcgggcggctacgatttcatcgcgccatcatcgattctggatcattggatcgggatccagtgaccccgatttcatatcgattcacgccgctctaatcctggtcgttcgtacttgatcagacgaccgagatctattaataccgttttgtgtaggtaattttgcgtaagagttcctcggaaatcatagattcaacacgcggtacgttgcagaggtaaactgagtcttaggatttttcatgtaataacccttgcacttcgcagtatttgtgcatgtagtacagagaaacaaaatactaaataaattcaattag

SEQ ID NO: 96385 - DNA, 656 bp, Zea mays
  Clone ID: MRT4577_19415C.1
ggccccgttcatttaagagaggaaagcgcttatcagagacatctgctgccggaaagcgcttgatcttcctatcgaagagcccgggcgatacgacgtggacgagacagaggtgtacgggaaggatcactatgacccagagaagccaatgtaccggtacgactactggggcgagcccaagaacacggagaagacgaagctggagcgggacgtggagcgccacaaccagcaggtggtcggcgacgcgaagaagtggtgcgagatgtcgtacgacgactacgtccgcaagaagctgcggttggaagcgagggaaaggcggaggaaggcggccgaggcgcaagagggcgaggaggagtacgatgacggcatggacctggacctgaagaagatgaccgatccacgcgccccgcacaaccggttttacatcacgaaatgaaaggttagagatagttgttggttgtgcaagaggttcgattgccttggttgttgttgttgggccgccgcctctggtgctgacattccgattggtcaaacgcgggggcgtgctagccacgctcagtacaagtattcagcatggaatctccagtattttattctatagatcggtagctgctgaagtctgaacagctgcaaaaaaaaaaaaaaaaaaaaaagcggcc

SEQ ID NO: 96386 - DNA, 2432 bp, Zea mays
  Clone ID: MRT4577_19416C.1
gagaattcggcacgaggtggcggcctccccagcggccgccgctaccttccttcaccatcacctcccctttcccagtcgccccaagacacttctcagaccacgcctccaccgcctcgccgcgtccatcaacccctcgtccaccgacgagacccccgccgcggacccaccggtcatcccctcgatcagcatcaagaacactgagcccgaggaggtcgcccgccgccgcagttgggtggagcacggatgggctccgtgggaggaaatcatgacgccggaggtcgcctttgcgcgccacagcctcaacgagggcgaggaggtgccgcttcagtcgccggagtccctcgaggctttccggatgctcacgccttcctaccggaagaaggtggaggctgagccaggatacctggagcgcctcttcgcgacgcgcgacacgcccgagcctctcgagacgacgtgggccggccggctcccgctgcggctcgtgccgccgcgggactggccgccgcctggctgggaggtggacccggacgagctggagttcataagggaggcgcacagggcggcctctgagaggctggacatggaggcggcggctgcggcaggggtgaccaacgtggagaagctggaggatgcgccacaggatctggcgctagagaggtacaaaatgttcctgaagcagtacaaggaatgggtggaggcaaaccgagataggttggagcaggagtcctaccagtttgatcaggattacttccctggcagacgaaaaagaggtaaggactacagtgaggatatgcgtgaacttccattctactatcccggacagatatgttacgggcaagtaacgactgttcacctctaccagggagcctttgtgaacattggttgtgtccatgaggggtgggtaccgataaaaggaaatgactggtactggatccgacatcacatcaagcctggcatgaaagtctacgtggagattctggccaaacgagacccttaccgcttccgcttcccacttgagatgcgatttgtatatcctaacattgatcacctaatatttaatagattcgacttcccaccaatatttcaccgtaaggaggatactaacctagagcagttgtggcgtgaagccggacggccacccattcctaggaaaaaacctttaaaagatatggaaaaggaacctttggtatcagaccatccttttgttgacacgctttgggaatggcataatgcagagcagatgattttagactacgaggaacaaaacccagataaattcaaggatacaacatatgagtccacagttgatgcaccctcaatcgatgaagaaaaaagagttgaatacaccgaaggatatttcaaagaaacgctgctaaaaaagaaagttgtgaatattagcatcaaagaacttgacctggatgctgcccgtgctgaacgccagctgataaaaaggctgaaaaaggaagccgaggagagaggggaggaatacaaggttaggaagctccgacgaaacaaagaaatggatgagtatgatctgatgcaatggcgccgttcatttgaagagagggaagcgcttatcagagacatctgctgccggaaagcgcttgatcttcctatcgaagagcccgggcgatacgacgtggacgagacagaggtgtacgggaaggatcactatgacccagagaagccaatgtaccggtacgactactggggcgagcccaagaacacggagaagacgaagctggagcgggacgtggagcgccacaaccagcaggtggtcggcgacgcgaagaagtggtgcgagatgtcgtacgacgactacgtccgcaagaagctgcggttggaagcggctgaggcgagggaaaggcggaggaaggcggccgaggcgcaagaggacgagcaggagtacgatgacggcatggacctggacctgaagaagatgaccgatccacgcgccccgcacaaccggttttacatcacgaaatgaaaggttagagatagttgttagttgtgcaaaaggttcgattgccttggttgttgttgttgggccaccgcttccgcctatggtgcaagagttgggggcgcttgatcaggtcgtctgacattctccttgttgacccaaccccattccgattggggcgacctggtcaaacgcgggggcgtgctagctacgctcagtacaagtattcagcatggaatctccagtattttattctagagaacatatcttgtgtatattgaagtttagtgcacatgttacatatattaaatcagtatcactcattttagatttagcatctctagttgtttgatatattttgttaaagacacgctccgacattgtgggtagtggtggacgatgttatttataaattgcaatgatcaaccatataagttagatttataaaaaaaaaaaaaaaacggacgcgggg

SEQ ID NO: 96387 - DNA, 959 bp, Zea mays
  Clone ID: MRT4577_19417C.1
ccaaatatgttagtacacaaaaaacaatgtactaagtctagaatcataccttcttgatgatttgcacttcatccaccattttgcacataattactcaattagtttgtgttggtcactttaatcaccaaaatactttagaaatggcccaagggcacatttccctttcaatctccccctttttggtgatttatgccaacacaacacaaagcaacacatagaagtgcaacattaattcaaataagaacaagaattgtttttttattcaaatttggcatatttggatcattctttgccaccacttggtttgtttttgcaaatcaacttcaatttcctatctctaagtcaaacacacttgttgagacataaagagagacattccaagagaaattgatcaaagattcaaaaagccgggtgtggacttctccctttttccccatttgtgttcctctcacatgaaggcttcttttcttccggaggctcagtttcaacccttctcgtttcactttttccttgataaacgtactctcatgctttattgcaataattaggccaacgacagtgatgatgccgtgcgcctttgcatgttgcaaaaagaatgttctacatctatggtgaatggctggttttcataaatggtgatgatcaatatatgtatcttgcacatgattagcaagttcacgtgtctgggtgactaatgcctgccgccaaactgagcgatataacgcatcattaatgacatttgttcaatctggactttaaacatttttccacttggagaatctattttgaattttggtatttcacttcttgggagaaagtttacatggtcaaatctcaaatgagcttcaggagctcacttcttgataggatgttcttcacctcggattgggaataactctttctcaattgtattttgcagaactcagcttctataatctcagatcactgtcctttgctgt

SEQ ID NO: 96388 - DNA, 198 bp, Zea mays
  Clone ID: MRT4577_19418C.1
gggggaaaaaaaaatgctatttgcttaccatagaaacccccttttacaaagaaaccccccccttacccccattggaacatgaataaattcccttattccacttttaaagggggattcatgtttgaagtacattaacccccggccctagctggttctatttaactattccgcgaaaaattcctaaaatcccccccaatc

SEQ ID NO: 96389 - DNA, 316 bp, Zea mays
  Clone ID: MRT4577_19419C.1
ctttctgtgaatttttttttctacttaatggctttacagtagtacactggtgccatggtaatgcaattttggggcaagtatcaacggtgtgaatgttcgttggtgtaccaatggcatgcatttggcaggagtgaatattctttacggatggaagtgtggtgtctgtgtttattagcccctcctctgggttaaagaaacagtggccagctgatgctgtttcttgtgcctactgtaattgattgtttgattttttatgataggagaaatgttcttttccggagataaaaaggacaaaaaaagggctggtcgcgcgctt

SEQ ID NO: 96390 - DNA, 318 bp, Zea mays
  Clone ID: MRT4577_1941C.1
cacgcgtccgtgtctcagaccatagcttatctactccagagcgcagaagacccgacgacacagaggggtgctcgtgcctcctctctggctctgtggagcgcactcaccatacacggcggtgggtgcaccaccgcgcggtatctaccgcgcgggcattgcacctcggtcactgcacctcgggcattccacgcggtcactgcgcgcggtcactgcaccgcggccaggccgcgcggttattgcgcgcaccatccactactactaaccgcggctagctatccagcaaccatgccggcacagcgatcaacccggcactgagga

SEQ ID NO: 96391 - DNA, 335 bp, Zea mays
  Clone ID: MRT4577_19420C.1
aggggtacggggccccccctgcgggagggttttttttttttttttcttctagctcatagataagcggcggcgggcgagcagagatgctataactatagctcggaaacgcacaaccaatcggaccaagcaagtttgagaggactaatggtaaaaccaggcgatacgagacatcacgctcgcaccgggatccacagcatacaaaggtagctggtaaccctgtcaggactcacgtgcgatgaaaataaacgaacaacgcatatcggccgcacatatctctagatctgacgggggcataggtggagactcgatctctatgaagaacttgcgacgcctac

SEQ ID NO: 96392 - DNA, 310 bp, Zea mays
  Clone ID: MRT4577_19421C.1
ttttcagtcatttcttgaacaagttcagtctctttgtgtgtttttgtttgagaccatttgccactcggactcagggcagcgaaatgaaggtgtcctgcgtgaaaggaagggtccatagccagattgtgtggagttaactgggaaccctaaagacaactggggggccgtgggggtacaaagcgacgttagggtcccgaagttaaactccgccgggggcagagctcacgcactaaatatactactccccgttggggttaggcatcggggaactgggtgtccactgagacgtaaccagggggggagagaaggg

SEQ ID NO: 96393 - DNA, 120 bp, Zea mays
  Clone ID: MRT4577_19422C.1
agctcgagccgcgaattccctgagagtcctctcacctcgcctccacgtctcacgctagaggatgcgagcagagaggatcgcagagagggaagtctcatacgggttaaggaagccatggag

SEQ ID NO: 96394 - DNA, 305 bp, Zea mays
  Clone ID: MRT4577_19423C.1
atcacagacaaaggacgcggtccccattaacaagccttggtgcccttccaacaacaaaagatgaccctgtctggaaccaaaatagatgagccccccgcaaagggcggaaccaatccaaaaagcccacagcccaatcctacggccaggcatgccaccggaaaaaccctgatgcgactgacaaagggttgacggaagactctgaagccggtgcgcactagagtacaaaccgccctccataactacatggggaggttgcaaaccttgcacaggggtccggcccaagcccaaggggccctgggcctggc

SEQ ID NO: 96395 - DNA, 794 bp, Zea mays
  Clone ID: MRT4577_19424C.1
gctcggcggcggctcgccctcgggggtcctcttcgtctgcacgcaccgcacgctcatggaccccgtggtgctggccgccgtgctcggccggcgcgtggcggccgtgacgtactccatctcccgcctctcggaggtcctctccccgatcccgacggtgcggctgacgcgcgaccgggacgcggacgcggcgcgcatgcgcgcggagctggcccgcggcggcgacgtggcggtgtgccccgagggcaccacgtgccgggagcccttcctgctccgcttctccaagctcttcgcggagctcagcgacagcatcgtgcccgtggcgatgaactaccgcgtggggctgttccacccgacgacggcgcgcgggtggaaggccatggaccccatcttcttcttcatgaacccgcggcccgtgtacgaggtgacgttcctgaaccagctccccgcggagtcgacgtgcgcggcggggaagagccccgtggacgtggccaactacgtgcagcggatactcgccgccacgctcgggttcgagtgcaccaccctcaccaggaaggacaagtacacggtgctcgcgggaaacgatggcgtcgtcaacgccaagccggcctggcagagccgcgtgaaggatgtcctcggcttcctgctccactaaccacattactttgcacggctctggactctgcgctcaaatacttcgctcaccgatttgattgagtttatactttacatttatttatacatgtaagtaagaataaccacacgcaaaaacatgtagtagtaacatacagtagtga

SEQ ID NO: 96396 - DNA, 540 bp, Zea mays
  unsure (1)..(540): unsure at all n locations
  Clone ID: MRT4577_19425C.1
ggggggggttggtttttttttttttttttttgtggttttttttaaacaaggacaggaactatttttatttcagggccaaaaacaaagcttaaaaacgaaccccaataaaaaaaaaacagggcgatattttgtccccagcccgcccccgccgggggggggggggagatggttccaccattcacgcgtcaccataccggcggcaaaaaccccaccagcgcgagcgcaagtagggcgggcgcggacaccccggccgggggcacgggggngttgggggacttggacgggcccgtggacgaggacgcgcccgcgccgttgtggccgcccggggacgggccgccggccttgggcgcaagggcgggcaagggggcctcggccgccgtgggggccttgccggcgaggacgagcttgtttttggggccgagggtgtccgcctggaacgcgtgtttgtggggggcgccgcccgggggaggagcgccaacctggcacacctggttaaggggctttatccccttgggcagtggaagattgccgtgacacccg

SEQ ID NO: 96397 - DNA, 257 bp, Zea mays
  Clone ID: MRT4577_19426C.1
cggacgcgtgggcaaatcttcggcttgttcctccctgttctgaatgaaagttgcagactgttagaatgctcaatgcgccttacattcaaatttcaaggcctgattgaggttgaaataaatacttgaaggccagatctgttccttatgtagcttgcttcccctcgtctaggggcggagggagcttctagttaggaatgctggattagtttgagaagttgcagactgttagaatgctcaatgcctagttctagtcgcga

SEQ ID NO: 96398 - DNA, 547 bp, Zea mays
  Clone ID: MRT4577_19427C.1
ttttttttttttttttttttttttttttttttttttttttttttttttttttttttttttttttttttttttttttttttttttttattaagcccaccggttgggggaaaataaccaaagggccaaaggcccggggggtgggcagaaagggttaacaggggaggcccaaaaaacggggcaaaaacacctgggcgggggcagggtggggggggacccgaacccggggaaaaaaaaaaaaaaaggcccccccctcacaaaaagggccatgggaaccaacacccaaacccttttttaacaaaaaacttcattcggggaaagggcccccaaaaaagggtataacccggggggaaagccatcaggcccccctgggacccaaaaaacccccaaaggggggcccccaaaagaacaaagggggttggccccacaaaaatttaggggcgacaggcccccaaaggcccatttggccccggccccaggggaaggggaaagacccccctttttctggcaacaaaaaccggggatttggtcccgggaggcgggcccccat

SEQ ID NO: 96399 - DNA, 279 bp, Zea mays
  Clone ID: MRT4577_19428C.1
gatcagaggcgtccgagcagggagtcgtgatcgcgtgccacagcaacgctgagttcgacgcccacatgaccaaggcccaggaagccggcaagcgggtggtcatcgacttcactgccgcctgatgcagtcgatgccgcgccatcgtccccactcttcgtcgatcacgaccaacaagttcactcaggtcgacgtcgtcaaggtcgacgtcgacgaagtggaggaattcatcgcggcctacgacgtctaggcgatgaagatctaccacttcgtcgagaaggg

SEQ ID NO: 96400 - DNA, 403 bp, Zea mays
  Clone ID: MRT4577_19429C.1
taagaacatctacgacgcatgcacgccgacgtaagcctggattcttttaaagtcaaccaatccttccgcgatttttgcgagcgaaaaagaaaccaaatggggccacccatagagaaagaggctaaatgggaggcgcgagtgtcgtcatggcttccattgtcgctatcacaagggccgatcctatacttcaatctatgcagaaattcatcttagatagcttcgctatacgtactgactgcggcctcaggcctgtggcaagctccaacggtctactcagatacaacaccggcgctacgctctgacaatactaggaggccgtgtcgcaagactgatatcaatacacgagtacaataggcgggacgagcggccgtaactactctgcgcgcactctgtactcagatat

SEQ ID NO: 96401 - DNA, 370 bp, Zea mays
  Clone ID: MRT4577_1942C.1
acaaaagaaaaatggcacatgaagtcacaaaatagtgcaactggtacaagaagatgcgtgtagaaaacacgacagttgttggtataatgtaaaattactgttcaaggcaaacttgacacattggtgattgatggttgaacgttgaagttaaatttcccaccgtgtgctaattatattgaatttttgcatatgacgcaagtccgtacttgtcatccaaattttgcctttttccctttcttcagattttccataaactttttgcagtgtagagagctaaaacattgtgataggatttgcaacaccgctcttgtcccaggcgaaggccaatactgatcgcaagggattaaagatgaaagcctgagacattatt

SEQ ID NO: 96402 - DNA, 455 bp, Zea mays
  unsure (1)..(455): unsure at all n locations
  Clone ID: MRT4577_19430C.1
tcgtcgtcaatggtgaccggcgcctcgggtgacagtccccaacatcggacggcgatccatcatgggcgacnntcgtctcggggtcaccgatcatccagacaccgtcatcnnggcgtcgtgcgacgacctgcatcgtccatcaggcccccgggactctccaaggntgaacatcactcggcgtgacccctgcggccccggccacggcgatcagcatncgtgcagcctagggccggtacaatggatgagaaggacgtcacttgatatcaaccgtcaagggactgcacgcttaagaagacgtgccaatgggcgtccgcatcaaggcattatgaggacgctgcctccgtgcctcaaccgcctgcaagaatccactttatgagaatatcaagaatggagggaactcgggcctaccccatcatcatncgacatgnaagtacttgccccaacaaggttatgca

SEQ ID NO: 96403 - DNA, 314 bp, Zea mays
  Clone ID: MRT4577_19431C.1
gggaaaggaaaccaaccaaccccaagaaaaaacctgggggggtttttttttaatgaaacaacattacgttttccaccttaacaaagcctttttatcgaccaaaatcgctaacagaaaaaaaattatattttccccacaagtttgggctcaaccagccccagatcaaagggggggaaggagtgaggagccccctttaccttctttttttccgcggggttcctaagtttgtttttaaccggcccaacctttttcgggttactgaaggggtttttgtccataaccttcccaaaattgggggcggggggggttgatcc

SEQ ID NO: 96404 - DNA, 361 bp, Zea mays
  Clone ID: MRT4577_19432C.1
aacacatcatctctggtgccgcgcctgataattcttattacttctaacttattaataacactatattgaatatctatgtttccaaccacctataacacattacatttccatatactaatgttatatttgtttacactactattctataaaaaaaatacaattacctataatacatatatcaaaatcacaaaaatatctcccctctattaaatcctactttacattcactttcctactatatcataactattctattatttcacctaaattcaattcactttccctctttttacaacctttttactttaaaaaaacctttctttacccaacttaaatctactttcattacattccctttttt

SEQ ID NO: 96405 - DNA, 340 bp, Zea mays
  Clone ID: MRT4577_19433C.1
aaacttcaatttagtgacatttaaataatataattatatttacattttattttaaaccaaaatgttttttaaacgaaaaataactttcttagtaccaggttctccagtttaaaatgttcccaggtaaaccggaaataaatacccacccaaatttcctggcccattttttaaaaaatggttcttttttgggagttttaggggggggggaaaaattaaaaattaaagttttttcttgtttaaatccccaaagtttttcgggttaaaaccccccgcttctctattatgtgcccctaaaaaaaaaagataacaacttttttttttttcttttttgagggttttt

SEQ ID NO: 96406 - DNA, 182 bp, Zea mays
  Clone ID: MRT4577_19434C.1
gggggaaaaccttaatcggcctaattcttgatggcgggacccgcgggcgcaaaagtaatccatccccatcatcatgtgggccagggcttatggggtcccctaaaaacaagcccgccctccatggggggggacctagcctattaactagccctaaaagggcccctgggcggacccgcgcgccc

SEQ ID NO: 96407 - DNA, 748 bp, Zea mays
  Clone ID: MRT4577_19435C.1
ctgcagcgcctggcccagatcctggccgacgccctggctcgccggcttctcctcccctgcgagggcctggcgggcgccctcatccacccgtccgactacttcgagcgctccggcggcgtccggtccgctcgccgtagcttcgctgccctcagccccttcctccacgccgccttcgttcgctgccaccaaccgggccatcctcggagcgatggaggacgaaaaggttgtgcgcatcgtcgacctgtcctgctgctcagctgcctcccacccctgccagtggctcgacctcctccacggcttcgtcgtccaaggccggcggccacccccggaagtacgcctgacagtcgtccacgacgacgacgacttcgtggctgccatgagggcggcgctagctaaggaggctcacaggctcaatatcccgttccagttcaaccacgtgctagtagtgcgcggcggcgggctggagaccatggacttgcgcggcgacttccgcgacgtcctaggggtcaaatacggcgaggcggtcgccgtcagctgttgcctgcagatgcaccgcctgctcgcggtcgcggctgatgacgacagtgccagcagcagctcagctctcggccagctccagaacatggcgacgaccgcagccgcgcagctgaagcagatggcgtgcagcagccgcagcccggcctccatactgaactatccgcggacaccggccccgcagtgccagtgccaggacgcggaccacaacgcc

SEQ ID NO: 96408 - DNA, 332 bp, Zea mays
  Clone ID: MRT4577_19436C.1
ggtcgacacacgcctctagactgactcgtatgaccacagtctccatcacccgcctgcctgagcccgctgcaacgactcagaaagcgcacgatcagcttcctgtaacggcaggggatgcagaggacccaaggaatgtgatagtaggcatgcacggcaccactttcggatctgcttctgctgatcagtgacatccggactgatctctctgacgtagctgcacgtaatcactgtgtgtacagcgatcgagttgatggctccgtgtacaaccagcacggcatcttctaccgctgcagcgatgcttcaggaatgatgtgccgtgcatgcggatacgg

SEQ ID NO: 96409 - DNA, 3193 bp, Zea mays
  Clone ID: MRT4577_19437C.1
cgcgtgtgagggcgggagagcgcgcggggctagggtttccacgaggggtgatggaagcagaggctgccgcggcggtagtggcgtcgtccgcatctgcctcggcttccgcgggccggtctcgcccatctagcagcgccgcccaggtcaccagtaattcggctgtgcgagctggagaagaaaatgctgcctccctctatgttttatctgttattgactcgttaaaaaagaggattaccgcagatcgtttgacttacattaagaataggataggggagaacaagactaatatcagcagctatacacagaggacttacaatttatcaaaaaataggcaaattagtacatcaaagggtactgattcagcatcaaatttgctcacaaaaaggcaagatgatgcgctatgcaccctgcatagtcttgatattattccggttgacaaagatggtggtacttttcaagacgaaagtcctttctcttcatctaatgttatgtttggtggaaatcttggtcccaagaatgctattattagaccaattaaactaccagaagtgccaaagcttccaccttatacaacatggatatttttggacaggaaccaaaggatgacagaagaccaatctgtacttggtcgacggaggatttactatgataccagttgtggtgaagctctaatttgcagtgatagtgaagatgaagccattgaagatgaggaggaaaaaaaggaatttaaacattctgaagatcacattattcggatgacagttcaagaatgtggcatgtctgatgctgtactgcaaacgctagctcgacacatggagcgggctgctgatgacataaaggccaggtatgaaattctgcatggtgagaaaactaaggattcttgcaagaaagggactgagcataatgtcaaagtggaagatttgtactgtgacaaagatttggatgcagcattggattcttttgacaatctcttctgtcgacgatgtctagtgtttgattgcaagctacatgggtgttctcaagatttagtatttcctacagaaaaacaaccagcttggagtggcgttgatgacagtgtaccctgtggtattcattgccataaactggcatctgaaccagatgctgctgctggtgctgatcacatgctttttgatgttgaggagccaactcactcatcagacaatgtgatgaaccagccaggttcaaataggaaaaagaacggctccagtggaaggaagactaaatctcaacaaagtgaaagctcttcaactgcaagagttatctcagaaagcagtgattcggaagtacatccaataagcaataaatctccacaacactcccctagtccctcaaaagttaaaattgggccgaaaggtggaatcagaaagattaccaatagacgaatcgctgagagaattcttatgagtgtgaagaaaggacaaagggaaatggcatcatctgattctaattttgttagtggatatcttttggcaagggacatgaagcttaggtctgatacacgaaatggaaataaggaattaattgtatcctcacaacagagttctccaagcacaagaagttccaaaaagaagagtacacctcaaattgggaacagctcagcttttgctgaggctcataatgattcaacagaggaagcaaataaccgtcattcagcaacagatggttacgatagttcaaggaaagaagaattcgtcaatgagaatttatgcaagcaggaggtgtacttgagatcatggaaggcaattgagcagggacttcttgtgaaaggattagagatttttggaaggaacagttgtttaattgctcggaaccttcttggtggaatgaagacgtgcaaagatgtttttcaatatatgaattatattgaaaacaacagtgcctctggagctcttagtggtgttgattctcttgttaaaggatatattaagggtactgagttgcgcacaagatcaagatattttagaaggcgaggtaaagtccgtcgtttgaagtacacctggaaatctgcaggttacaatttcaaaaggattaccgaaaggaaggatcagccttgtcgacaatataatccttgtggttgtcaatctacatgcggaaagcagtgtccatgtctttcaaatgggacatgttgtgagaaatactgtgggtgtccaaaaatttgcaagaatcgttttcgaggatgtcactgtgcaaagagccagtgtcgcagccgccaatgtccatgttttgcagctgacagggaatgcgatccggatgtttgcagaaactgttgggttgggtgtggtgatggtacattgggagttccaaaccagagaggagataattatgaatgccggaacatgaaactgcttcttaaacaacaacaaagggtcttacttggaagatcagatgtctctggctggggagcattcctcaagaatagtgttagcaaacatgaataccttggtgagtacactggggaactaatctcacacaaagaagcagataagcgtggaaagatatatgatcgtgagaactcatcgttccttttcaacctgaacaatgagtatgttcttgacgcatacagaatgggtgacaagctgaaatttgccaaccatgcccctgacccgaattgctatgccaaggttatcatggtaactggtgatcatagagtgggcatattcgccaaagaaagaatcctcgctggtgaagagttattctacgattaccgctatgagcctgacagagctcctgcttgggcccgtaagcctgaggcgtcgggagcaaaggatgatgggcaaccgttcaatgggcgtgcaaagaagctcgcccaaaacaaccgaggctgaatctgatttgattctttcattgttaggacaaatttggcagccattcaactaatacaaggaacctgtcattcataggccccaatttatttgaactcgtcattgtaactcgtatgtgcttgaattctccatggcatctggtcctgccatccgtagagttaggtcccgtttgttttgaggaactaaaaattaatccctctattttagtcacattgagtctctagattgtcaaacggcgggactaaaacaaagactaaactatttgtctctagtacctcaagccatgactaaaagggaataaatcatataaattttatttttatccttcctttaaaaaaaaaaaaaaaaaa

SEQ ID NO: 96410 - DNA, 312 bp, Zea mays
  Clone ID: MRT4577_19438C.1
gccggccgtttcgagacccacgaagatggaaccacaattgaagacacaaaagagaagaacattgacgagacgcgaacataaaggtaaagacaaagacgataaccatggtgatgatgatgacgatgatgatgaagaaagccatcaaaatcaaacagaagattagccatctcgctgctctacatatgaagtcagttcctattgtagcttatagttattgttttgcacaagtatactctatgacagagctaattcgtcttaataaaaagaaaaagaaacttatcaaagcaaaaaaaaaaaaaaaaaaggccccta

SEQ ID NO: 96411 - DNA, 650 bp, Zea mays
  unsure (1)..(650): unsure at all n locations
  Clone ID: MRT4577_1943C.1
gtcaaccaccgcgagctccatctccatggacgcctgctctctcgtccaccgccatctgccacgcccactgcagctcccgctccttgcgcctccaactcccagccggcaccggccccgcgtcgccagcgccttggtctgctgctgctgccccgccgccgcggcagaccaccaccaggaacggccctgggagtggtacgaccgcgccatccagtcccacgcggggtccgacctggcgcgctccctaggacttctcgccgacatgcaagcgtccggggggcgccctagcggcagcgcgtacgcgcgcctcatccgcgcgctgtcccgcgcagggcgcgcgctggaggccgaggcgctcctcctcgagatgcgccgcctcggcccgcgcccggaagccgcgcactacaacgcgctccttgagggcctgctcgccgccgcgcacctccgcctcgccgacctcctcctcctccagatggccgacgacggcgtcgcgaggaaccggcgcacctacacgctcttgctaggcgcgtacgcgcgcgccggccggctcgaggactcgtggtgggtggctcgggagatgaggcgctggggcattcncctcgaaccggcgggtatagcatgctcgtgcggctgtacccggacaatggcatgtg

SEQ ID NO: 96412 - DNA, 252 bp, Zea mays
  Clone ID: MRT4577_19441C.1
gtccctgagaagagcttccttggactggggtgctctgctgctctgggggtttggcccagaaggaacccctacccagccctgtccacccaccccagcgttcctgggcacccctctgggagcttcctcttggtcccaggagctgcggtggtgtctgccccctgcactgggctctgtgccctgtgggtgttcaggagactggactgtctctgctcctcatgcaaaccttgtgggggaagcaatgaccaggagcag

SEQ ID NO: 96413 - DNA, 3060 bp, Zea mays
  Clone ID: MRT4577_19442C.1
gcgacttcgcgtgtgagggcgggagagcgcgcggggctagggtttccacgggtgatggaagcagaggctgccgcggcggtagtggcgtcgtccgcatctgcctcggcttccgcgggccggtctcgcccatctagcagcgccgcccaggtcaccagtaattcggctgtgcgagctggagaagaaaatgctgcctccctctatgttttatctgttattgactcgttaaaaaagaggattaccgcagatcgtttgacttacattaagaataggataggggagaacaagactaatatcagcagctatacacagaggacttacaatttatcaaaaaataggcaaattagtacatcaaagggtactgattcagcatcaaatttgctcacaaaaaggcaagatgatgcgctatgcaccctgcatagtcttgatattattccggttgacaaagatggtggtacttttcaagacgaaagtcctttctcttcatctaatgttatgtttggtggaaatcttggtcccaagaatgctattattagaccaattaaactaccagaagtgccaaagcttccaccttatacaacatggatatttttggacaggaaccaaaggatgacagaagaccaatctgtacttggtcgacggaggatttactatgataccagttgtggtgaagctctaatttgcagtgatagtgaagatgaagccattgaagatgaggaggaaaaaaaggaatttaaacattctgaagatcacattattcggatgacagttcaagaatgtggcatgtctgatgctgtactgcaaacgctagctcgacacatggagcgggctgctgatgacataaaggccaggtatgaaattctgcatggtgagaaaactaaggattcttgcaagaaagggactgagcataatgtcaaagtggaagatttgtactgtgacaaagatttggatgcagcattggattcttttgacaatctcttctgtcgacgatgtctagtacgcttgactgtaactttcagatattcttttctaggacctgtgtgctgatggacatttctgctcattggtgatgctgataggtgtttgattgcaagctacatgggtgttctcaagatttagtatttcctacagaaaaacaaccagcttggagtggcgttgatgacagtgtaccctgtggtattcattgccataaactggcatctgaaccagatgctgctgctggtgctgatcacatgctttttgatgttgaggagccaactcactcatcagacaatgtgatgaaccagccaggttcaaataggaaaaagaacggctccagtggaaggaagactaaatctcaacaaagtgaaagctcttcaactgcaagagttatctcagaaagcagtgattcggaagtacatccaataagcaataaatctccacaacactcccctagtccctcaaaagttaaaattgggccgaaaggtggaatcagaaagattaccaatagacgaatcgctgagagaattcttatgagtgtgaagaaaggacaaagggaaatggcatcatctgattctaattttgttagtggatatcttttggcaagggacatgaagcttaggtctgatacacgaaatggaaataaggaattaattgtatcctcacaacagagttctccaagcacaagaagttccaaaaagaagagtacacctcaaattgggaacagctcagcttttgctgaggctcataatgattcaacagaggaagcaaataaccgtcattcagcaacagatggttacgatagttcaaggaaagaagaattcgtcaatgagaatttatgcaagcaggaggtgtacttgagatcatggaaggcaattgagcagggacttcttgtgaaaggattagagatttttggaaggaacagttgtttaattgctcggaaccttcttggtggaatgaagacgtgcaaagatgtttttcaatatatgaattatattgaaaacaacagtgcctctggagctcttagtggtgttgattctcttgttaaaggatatattaagggtactgagttgcgcacaagatcaagatattttagaaggcgaggtaaagtccgtcgtttgaagtacacctggaaatctgcaggttacaatttcaaaaggattaccgaaaggaaggatcagccttgtcgacaatataatccttgtggttgtcaatctacatgcggaaagcagtgtccatgtctttcaaatgggacatgttgtgagaaatactgtgggtgtccaaaaatttgcaagaatcgttttcgaggatgtcactgtgcaaagagccagtgtcgcagccgccaatgtccatgttttgcagctgacagggaatgcgatccggatgtttgcagaaactgttgggttgggtgtggtgatggtacattgggagttccaaaccagagaggagataattatgaatgccggaacatgaaactgcttcttaaacaacaacaaagggtcttacttggaagatcagatgtctctggctggggagcattcctcaagaatagtgttagcaaacatgaataccttggtgagtacactggggaactaatctcacacaaagaagcagataagcgtggaaagatatatgatcgtgagaactcatcgttccttttcaacctgaacaatgagtatgttcttgacgcatacagaatgggtgacaagctgaaatttgccaaccatgcccctgacccgaattgctatgccaaggttatcatggtaactggtgatcatagagtgggcatattcgccaaagaaagaatcctcgctggtgaagagttattctacgattaccgctatgagcctgacagagctcctgcttgggcccgtaagcctgaggcgtcgggagcaaaggatgatgggcaaccgttcaatgggcgtgcaaagaagctcgcccaaaacaaccgaggctgaatctgatttgattctttcattgttaggacaaatttggcagccattcaactaatacaaggaacctgtcattcataggccccaatttatttgaactcgtcattgtaactcgtatgtgcttgaattctcc

SEQ ID NO: 96414 - DNA, 402 bp, Zea mays
  Clone ID: MRT4577_19443C.1
ctctctcgtccgacgtgtcgctcagctgttgcactgttggtagggcctgtcccacccaaccaataccatcaaatattattgtgtgtcgtcgtaacgcacgggcatcgtactagtcttattatatgtttttataagatgctcacaaactgtgctcttattttcagcgcttcacatgtcttggtggaaaacttcctaaaggtgtcttgcttgtgggccctcctggcactgggaaaaccatgctagctagggctattgctggtgaagctggtgttcctttcttctcttgcagtggaagcgagtttgaggagatgtttgggggagttggagctcggagagtgcaggacctttcttctgctgcaaagaagagaactccttgcgtaatatttattgatgaaatagacg

SEQ ID NO: 96415 - DNA, 745 bp, Zea mays
  unsure (1)..(745): unsure at all n locations
  Clone ID: MRT4577_19444C.1
ttgggtacctcgaggccggccgggatcgacttcccacgtcacctctatctctccatgcaccaccgcctactctctacgttctcttcctcccaaacaatcaaaccgcgcaccgatgccacactccctgaaccagccaaccataagaccgctcctccatctaacagctgctgatgatgctgcatagagtgcatgaaagtgtactctattcactgtccactgccacgcgacctactcatccatggcattctctcaacatccgtcctgatgctcctgccgcctctactgttgcaccaccacatcacaaaggcatagcaaaacaacccatgacactagccaagaccactgcactgtaccaaggtccagcaaataactggactcatcagctgcataccctcacaattatgggttccctccaaggactctttgggaagacaatgaaccaacggatgcgatatgcctgatgccagagactgtctgtctctgtgtccatcctgccagcctcatcaatcggccttatgcccatgattgaccacggtgaaaaaaaaaacaaaataataacagtctgtactgatgatcctgaatatacgaactactacgacatcagtgagctgtctcctcatcgtctgccagacatcaagcgaagtctttgcaagattataacaccgaatganaataacgaggctgctgtccatgcattcttgcctgctaccacagctcgagaggncattcaatactccatggatct

SEQ ID NO: 96416 - DNA, 402 bp, Zea mays
  unsure (1)..(402): unsure at all n locations
  Clone ID: MRT4577_19445C.1
cggcgacagccggattgaccaacgacgccggcgcgggggggtgggggcccaggacaaagccggncccgcggccgccacaccgccgccgaggagcaccacccaggaagaaaagaagnggaaccaaggggaagagaaaggcaaccgcgaagccaccgccaaaggaagcggagggacaagccagacacggccgggggcggggcagacagcaaccacggaaggagcgaggagngccgaaaagacaagaagaagcngacaggcgaagcagcnagaacaaccggacaagaaaacgacagcacaacggnnaaagcacgcaccgagccgaccgananacacagacngaaaggagggacgagcgggagcgcgcaacacagaggaaggcgacaangagacgggggcaagccc

SEQ ID NO: 96417 - DNA, 459 bp, Zea mays
  unsure (1)..(459): unsure at all n locations
  Clone ID: MRT4577_19446C.1
aaaagataaccccaaaaccccgccggtgcccacctgcgtacgccatggccnaagaggggcgcccttgcgcttccgcggcccctccgagggccggggccaccgcgaccggggggtgctacaattcccaaccccatcgggacccatcggcagcctcacacaccgtgctcctcccctcctcgcctcttctccccgaactccctcctctccacctgggggggcggctccagcctcctcctcccgcaaaccgcgcgtcgggcggccgcgcaacaccttccggggggaacagggcggggacctgcctccgtccctgtgcctccccgcgccggggggcgctcctcggcctgcgcggcgacccgggggaacacgggggggcgcgcgacgggctctcggggctcccggacaccggtctccccggcggggggaacaccctcccctcccggggggggcaccccggcatcg

SEQ ID NO: 96418 - DNA, 1109 bp, Zea mays
  Clone ID: MRT4577_19447C.1
aattcttctcgagctctgtacccgccggccggccggggcggctcgctcgcagcgccccgctagaatccaaagccaaaaccccaatcgcacaggagagaccgagagagaggttttccatccatggctcccggcgtcgcttccgtgctggtcccgcaggagcccgtcctcctcaaggacatcctcgcctcaccgtccccctgcgggaacaccgctgtctccgcccgccacctcttcggcaacggagtcgcgccgccacgctcctcggacgacggcatcaaggacgccgctgccgaccgccacggtgaccgcgacctctccatccccaagatcttcaccggagacgtgctggacctgctcgacgatgctgcgaggctggacctgatgctggcgctgacgggggacggcggtgcggcgtccatggccggcttctccgcgcgcgggtggtgggtctcgaaggaggatggcgacgcggtgcagctgaaggtgccgatgccggggctggggaaggagcacgtgaagatgcgggtggagaaggacgccctggtgatcaagggggaggccggcaaggacctcgagggcgacgacgacaagggcccggcgcggtacagctaccgcatcggcctctcctcccaggctttcaagatggaccagatcaaggctgacatgaagaacggcgtgctcagggtcaccgtcccgaagatcaaggacgaggagcgcaaggacgtcttcgagatcaagatcgagtagggtgtgtgcatcggatgggtcctcccaggtctcctagttgcagtccatatccataccgtagttgcagtccatatccatatcgtagttgccatgagctagtcgtattagtagtttcaattactggagtgcagtagtcgtttctgttgcagagcagtcgtagtactagtagctttctggtggtgctccgtctctgcctgatctgaggcagcgtttacctttctgttggtcttgcaaagttcagttccctggatggcgacgatcactgacgatcttgtgatgaacttcaaatggtaatggaatctgcagttaataatcgacatctatatgaccttcctgtgatcgtaaaaaaaaagaaatataaa

SEQ ID NO: 96419 - DNA, 1657 bp, Zea mays
  Clone ID: MRT4577_19448C.1
cacttctgagtcccgacgcacgagctcccaagagctagccatggcgtccaccaccctctcctccgccttgacccttctatcccgccccttcaccttcccgtgccccgccgtctagctcaagaggtccttccacgccgcgccccacattcgacggggcccgcgagccggcgccgtcgcgtgcaccgccaccgagtcccccaagatcctggagctcggggacgccatcgtcgggtacccctcgaggccggccgggccggctgaaccgacaaacacagcaataattcatagttgaagacaggcacagggcgagaccgccgtcatggacactgagaccgaggggaaggcggcggcggtcgaggagatgagggagtggtgcgtcgctctccccaaggtggagctccacgcccacctcaacggctccgtccgcaactccaccctcctagaacttgcaaaacatctaggcgacaaaggagtcattgtttttgaagatgttaaggatgtgatcatgaagagtgatagatctcttccagagtgtttcaagctttttgatctgtttcatatacttacaactgatcatgatacagtaacaaggattgctaaggaggttgtagaagattttgctgcagagaatgttgtatatttggaaataagaacaacacctaagaacaatgaggcaaaggggatgaccaagaggtcttacatggatgctgttattaaaggtctgaaagcagttgaagatgttgatgtcgaattatttggttctaatttcagaacgaatgaaacactaagttctaagcttttggatggtgtcacaaagaaaaagaagatatatgttaggctccttcttagtattgatcgccgcgagacaacttcggctgcattggataccgttaatctagccatggaaatgatggaccaaggtgtcataggcattgacctttctggcaatccagttgtgggggaatgggaaacatacctgcctgccctacaacatgctaaaaatctgggaatccccgttacaatccactgtggagaggtggcgaaccggaaggaaatccaagcagtgctggacttttgccctcagaggctgggtcatgtatgctgtctgaatgatgtagaatggaagaagctcaagtctctgatgattccggtagagatatgtttaacctcgaatgttatgacaggaggtgctccttccctagagcttcaccactttgctgacctctacaatgcgaagcaccctttgtccctgtgcacggatgattccggcctgttttcgacaagcctctcaaatgagtattacctcgttgcaacaactttcggcctcagcaagttcgagctgttccagctggcccaggatgcagtggcagtttgtttttgctgatgatgtggtgaagaagtctctgaaggaggtgttcaagcatgctgaaaagaggctgctcatgtgggatgaacttgctgcaccaagctagtgtacgtacccgttatgagatcagtatgtatcaacccaattgtatgatttatatatggttgtgtaacttttcgtttatgcacctattatatgtgtaccgtttttcaacgtcttagtagaaggtcccgctcgcgcaaccattggacacacaacccagttgttgatatctacgcattaagctaagca

SEQ ID NO: 96420 - DNA, 503 bp, Zea mays
  Clone ID: MRT4577_19449C.1
aaaacaagattgggcccccggggaaataaaaaaagggcttgggccccataaaagcccccgacgtaaacccaacattaagctggcggtcccaaaggggccgggggggaaacggaaacaaaatctggccgggccccttactggaaagcaacaagttggtttcgcagcaccgggaaaaaacaaaactggaacgacttaaaagggggggtatcccggtaaaaaaaacagccccaaaaaggggctatcttcctttggcttcccctgggggaccgggaaggcgagtttttttggagctgtttttttggcaaactgggacccgggggaggccgggtcctcctaaacccactgccgaagctggcccccgttgcggggaaaaagggccccaaacctgcggatgtcggggggaaaaaaaacacccccgggccaacaggggcaccgtaaaaaaaaagttagtaagggccattgtttttttgttttgccgaaaaaaggggaggcgttcctgcccc

SEQ ID NO: 96421 - DNA, 307 bp, Zea mays
  Clone ID: MRT4577_1944C.1
gggttcgtgttttttttttttgggttttttttttttttttttgggggggggggggaaaaacttaacacacgggtaacgggccccatttttaggacacattttttcactttcattttggaggggaaacccccctaaaaataagggttttaggtttttacagggtcgtgatgggaaaaacacacatgcttttcattacaacttttctttacatacaattggtaattggaagaatattaacccttccctggccaggggccattaaaaaaaaaaattacagctggttgattttttaaaacgggagtggggg

SEQ ID NO: 96422 - DNA, 358 bp, Zea mays
  Clone ID: MRT4577_19450C.1
ggggccgccttttttttttttttttaggattaaaaaagggtataatgcatgagaccgtgttgctagatccgtttgatttagttaagatggaggagacctaggtgcctatataatgggacatcagcgcattgggcaacgcagatctttaatagtgcaaaccatgtagtgaacaacaacaagaagaagaatacagcaggattccggagtagcatgagacgtagtgtagagcgcctataatctatgaatggcagaagagcatggtataatatactagctactaggacccctgagaaagccagaaccaggatatggggcttttatttggagagcaactatggagatctgtgaaagcggatga

SEQ ID NO: 96423 - DNA, 406 bp, Zea mays
  Clone ID: MRT4577_19451C.1
ctgctaacaatgaagtccgggtgaaggagtgccatcctgactgttcccactcctcgtcatcacatcagacgactcggcggcctacaccctaccatatcgcttccacctctataccaccgtaaggcagcactactctgcaacaactgccacgcctgcccgtctatttatggggaggattcagacatgtctcacatggaaatcgacgccacccttactaaactccacaagcgtccaatacccagccacttcttgacgcattgacccgtctaacacatccatagcacatgtttccatggacctcaacatgcacagctgaagaccaatttcgtgagcttgaaacagacctcaggaaaaaagctgacgagcttaataatccatgaaacgaggtcccggagaccatcacaaa

SEQ ID NO: 96424 - DNA, 477 bp, Zea mays
  Clone ID: MRT4577_19452C.1
tcgctagcaatgaacaagtgcaccaaaacgctaacctgattgatcacaatgctgttgctgagcccagtactcgccatgaccaccgagccgaacccactgcaggacttacgcactaccgaccttagcggcctgccatcaccgaacttctacccatgacagcccacgatgaaggccgcaaaccacctgctgacattgatgaagatcgacaagacagtggaccccctgcccgacccaagcagttccaacatgacgaacctacacacatatgaacgggtccaagagcaacccactcagcgtacccagtgaaccgactctgcttcacgcgcgaaagcccaaactggccaacctgctacctcagcgccgactacagtcgtaaactcacaccttgccggctcctctagcccaatgaatccattgccaaactcctctaacaagaactacataactacagggcttcacccagggagaccagcccat

SEQ ID NO: 96425 - DNA, 228 bp, Zea mays
  Clone ID: MRT4577_19453C.1
atggaggtttctcaccggggaagaagaccctcgccggagccgaggagaaatccgtcgattgccggagattcggggatccaatcgacgaaccgaacgcgctgcgacgaagccttcgacgagacgaacgcagcgggtgttacagccaccaacatcgccgtcaccaaaggcctcctcttccccaacgtcggccacaagtgcctcatggcaaagaacggtaagaagaagaag

SEQ ID NO: 96426 - DNA, 459 bp, Zea mays
  Clone ID: MRT4577_19454C.1
aaccagcaggaaacaaaaaccaccacttttggccaaaacattgggtcattttaagggacaacggcccacttattatatttgacttggcttttccatggaacggggaaacaaaagacacacatgccttttggaggattaattaattcacgttccttcacccttttcgatcccaaagacaaggaaatgccttacataacccgtgagcttaatttccgcggacacaaatggtggcgtaagccccttcgctgttgttgactgggtcacagatgtggtcagcgaggttctctagcgggcccttttcggtgacgatggcctgtacgaaaaagccgcccatggaaaacatggcgaggcggccggccttgagctccttcaccttgagctcggcgaaggaactcgtgtcgtcggccaggccgacggggtggaagctgccgccagggtacagcgggtcgacgacctccc

SEQ ID NO: 96427 - DNA, 681 bp, Zea mays
  Clone ID: MRT4577_19455C.1
ggccgcttttttttttttttttttggggacacatcccaaatgatagattaatttcaatgatagtaggagctttggctacagaggaataatgatagtgagggaacgggtttggtaaaaagctcaaacaacaactccagcagcaaaattgccatcgacaccggtgttggcaccaatcggaagaccaacaggaccaccgaaggtggcaccatgcgccgaagttggtagtgccaccgacaccgacaccaataggactaccgaagccgtcaacaccggcaccgagcttcgcattggcacctacattgacagcaccaagcccagcaccggcacctacattggcgccagcgtcaacaccaagaccgccgatacctgatccggtgacacccacaccagtaccaatggggccactgattacgccaacacgaccgcccacggggccaacgaatccaccaacacctgcaccgaggttggcattggcgcctacaccgacagcgccaagcccgacgccgacgcccacattggcgccagcgtcaacaccgaggccgccgacagctggaccggagacgccaacaccggcaccaatggggccaccggtcacaccaacacgggcgccaatggggccaccgaattcaccgggaccggcaccaacgttagcgttagcgcctacaccggcaggaccaagcc

SEQ ID NO: 96428 - DNA, 198 bp, Zea mays
  Clone ID: MRT4577_19456C.1
tatctgaaccggaccgaatttagaatcagtacaatcctgcactagacctggttatcacccttgaaggatctgtttcaatccatacaactaactgatatatatcacatgatgatgataatatgtatattcatggtgacacctttgctctttgaacatgttgtaatctattgtgtaattgcaaaagaatatgttaattac

SEQ ID NO: 96429 - DNA, 684 bp, Zea mays
  unsure (1)..(684): unsure at all n locations
  Clone ID: MRT4577_19457C.1
aatgaatatatacataccctacacacgttctattcacctcacncgataaagttgatacaggtttaatggtaaaatgaatcacaggaatcatttgaatgacaaaaccaggaatcacaccaancgaagttgtatcaaccatacataaaatgaatgacacaanttatatcaattgtatcggtgaatggtacaattttatcaattttaccactcattttacatgatcaaacatgaaccactatgcatcaaagaatttacaatccagaaggacccccatgaatgatagacaaaacncatatggagaccagaaattttagcatttatcagcggtgtctcatcttttgctattaaccttactatttttaaatacatgtacataggccttcagttgtgccactgaatagtagaagcaactatgcactgtaaacttataattatttaggacaatgccccctttaaatatggcatgaaaccacagatgccatagtccatagtttagaagagaggtcacttaactatttttctttttgatggacctttttctgtatgcctgctactggcctccataaagaggtgttgtatttggtccatctttgggcctaaacttttgttaagtgcgtgttcaaggtaaaaatacatatgtcatcattttgtccaaaaaaaaaaaaaaaaaaaaaaaaaactcga

SEQ ID NO: 96430 - DNA, 407 bp, Zea mays
  Clone ID: MRT4577_19458C.1
gaaagatatggcacaatcaagcactcaagaccaagcgactaagctagatgctgccggccgggagctcatcacaacctacgatgagcttaatccaactctggtcgatgaattatgggaagagccaagcgctcttgagttcttgcagtatgttgcgaggaatcggccatttgttgtaagaaaaggtgctcaagactggactgctgttcaaaagtgggactcgcactatcttctcaatgttcttgggaacagtctcgtcaatgtagcaatcactcctttcggcaacgcatatgcagtgttgaaagaagaagatggttcactatcctatgtcaggccactcgaacggctcgagcctttcgacatggtcatccgctacatttcagagcaggagttgaatcagtcaggaccta

SEQ ID NO: 96431 - DNA, 400 bp, Zea mays
  Clone ID: MRT4577_19459C.1
acttttccctccctccctccgctcaaccccaccccagcgccatggccgcctcctcctccgccgccgcccccgccgacacgtacgacatcccgtgggtggagaagtaccgccccagccgcgtcgccgatgtcgtcggcaacgccgacgccgtcagccgcctcgaggtcatcgcccgcgacggcaacatgcccaacctcatcctctccgggcctccggggaccgggaagacgacgagcatcctggcgctggcccacgagatgctcgggcccagctaccgcgagggagtgctcgagctcaacgcctcggacgacagggggcttgatgtggtgaggaacaagatcaagatgttcgcgcagaagaaggtcacactgccgtccggacggtacaagatcgtcatact

SEQ ID NO: 96432 - DNA, 328 bp, Zea mays
  unsure (1)..(328): unsure at all n locations
  Clone ID: MRT4577_1945C.1
cattctctgcgggccatgcaaatactacggggtgtaagacaagcacaactccggcgcaccgaggctatctgtggattccgccaactcccattggggggggggggggggggtcatccctctccactccccaatcctccctttcctatttcatattacaattcactttccttctttttacaacttccttactggtaaaaccctgtctttccccatcttactcnccttgcnntgcatccccctttcccctgctggcgctntcncgaatagggcgcggccggtcgccctttgctacggttgcccagcctgttgtcgcttggaccctccgtgt

SEQ ID NO: 96433 - DNA, 661 bp, Zea mays
  unsure (1)..(661): unsure at all n locations
  Clone ID: MRT4577_19460C.1
cccctgctcgtctgtaggagacggcggcggccagctccaggagatgcacgtggtcaacgacggcaacggcgacggccccggtggtccgcgacggcgaagaccataaatttgagatgagctaagtgttgatgatggccgaaccggagacgggtgatggcttacccgagactttgttctcaaccaagccgaggatgcctccaccacccaatgttttcacaataactgttagacttgcttcttatgtcgccaagcttgatgatggaagcgagcaacccgtcttcaaggcagtcccaatccagtgacaagaaggatgttggctgcggcgttggctgatgaggaaacacatgcagcaccacaacttgaagttgttgccactcccagtaggcacatgatcactatgccacatagtcttcaaggcagtcccaatcctgtgacaagaaggatgttgactatggcgttggctgatgaggcgtcccagcaacctaccacaaccgttgggaacaccatgattgcatatgacatgtcctcgagctcaagggctagaaagttgaccccgaagagaaggaagagctagtgttgtgattgatcttctatgttctctatgcttttagttatagtttgccagacttgccatncctactttgtgtggaacaatgcatca

SEQ ID NO: 96434 - DNA, 197 bp, Zea mays
  unsure (1)..(197): unsure at all n locations
  Clone ID: MRT4577_19461C.1
cccacgcgtcctgccacgcgtncgtagatagcacaatagtgtaccaacaatggcagcttaaatattttggcttcctatgcttcttggtctttcttgaagggcttgttccgggaccatttttccaccatggttacaagcttctattggtttccttctttccccgttccttttaacaaagattgttggggtatttgaaa

SEQ ID NO: 96435 - DNA, 142 bp, Zea mays
  Clone ID: MRT4577_19462C.1
ctcgttttacttggttatcgctcgggcggcgccctccttacttgttggtatgctggtactggttgctccgtgggactttgcgggggcttggggcttctacacctggtcccggtgtcgccgcttgttactgcgcttgtgtctg

SEQ ID NO: 96436 - DNA, 590 bp, Zea mays
  Clone ID: MRT4577_19463C.1
ggccgcttttttttttttttttttggatattatatttacattatttcttaggttctaattgtattttgctacgagtaatatcgcgttttctcatccctacataaggtctatcatgatgttttagtttccagtccaccaaacatagttgttggtttcctctggggtgtcatagatgagcttgctgctcgagttctctggcctctcagggaagacgttgaagtcgatatcccagaccttgaggtccttggccttgacggtggagccctcctcggcccagatgccgaatccagtgctgtcagtgcgggcagggtagatacgggtcgtgagccagaagcggtcgttcacgtggatctcgaccagggagccatcaacaaagatgtccatgtgcagagactcggtggtaccgttggcgaaagtgtacgggtagaagtagccgagcatggtgtagttggcaaactcgacaatcgtagatgagtgcgaacggtcgacgctgatggtatagttctcagggctgtaccacacaacggtctgctcctcgtgattgggcgactgcgcaatcacgacaccagcagggccggtgaagtcggaaa

SEQ ID NO: 96437 - DNA, 563 bp, Zea mays
  Clone ID: MRT4577_19464C.1
gcctgaagtaccggtccggaatcccgggtcgacccacgcgtccggagatctatcgtatcgtatcgtatcgtatcgagctagttcatggccccttgtggcttgtaccgtgtggtgtgcaaggcgcgcgtacgtcctgtgtctgtgacgctatgaatgaaatgaaaaatcagagcaaaagtttgttcgcaaaaaaaaaaaaaaaaaaaaaaaaaaaaaaaaaaaaaaaaaaaaaaaaaaaaaaaaaaaaaaaaaaaaaaaaaaaaaaaaaaaaaaaaaaaaaaaaaagggggggccgttttaaaggatccaagtttacgtacccgtgcatgcaacgtaatagtttttttttagggccacctaaattaaattaattggccgccgtttaaaaacgttgaaactggaaaaacttttggtttaccaaatttaatcgctttgaaaaaaatccccttttcgccagttggggaaatagcaaaaaggcccgaaccgatcgcctttccaaacagttgcccaccctaattggcaaatggaaccccccttgtaaggggccattaagcgcggggggg

SEQ ID NO: 96438 - DNA, 842 bp, Zea mays
  Clone ID: MRT4577_19465C.1
tgggtaccctccgggccggccgggaactacaatatggttggatttgctaaagtctatgatgacagaggtagagtggcgtttgagcaaatatgtgccaacagaggaggaatacatgacaaatgcatatttaacatttgcattgggtcccattgtattgccagcgttgtattttgttggaccgaagatcccggagtctattgttaaagatccagaatatgacgagttgttcaagctaatgagcacatgtggtcgactcttgaatgatgttcagagtttcgagagggagcacaaggagggcaagctgaacattgtttctctcctcgttcttcatggtggctccacgtccatatcagatgccagaaagaaattacagaagcccatagacacatgtaggagagacctcctgagactagttcttcgtgaagaaagtgttgttcctaggccatgcaaggaattattctggaaaatgtgcaaggtctgctacttcttttactcgagaattgatgggtttagatcaccagtggagagggccaaagaagtgaatgcagtgatcaatgagccactaaagctacaagaaaaccatacacacatgtctgttttgtgagaggaaccaaatgtcgatgtgacgttttcatttgatttagtaggtgtgctttctatataagatagttcgctaggtgactgcatcaggtggtgcgtaaaaacttagcacattggtaatgtataggagttggcccatatgtatgtttgattgtggttggtgagtttagtattattttgaaatttaaaagggtgacaccactgtagaactagcatttaaaaaaaaaaaaaaaaaagcggcc

SEQ ID NO: 96439 - DNA, 837 bp, Zea mays
  Clone ID: MRT4577_19466C.1
ctcggccgggtatgaatctagaaaaggcaaaacgacttgtcattcagagtattaaacactgacagattttcattggaaatttgtgttttatctcttaactagatttggttagaatggaactgcgtattgctcaattttattttttgtcatactcgaaccaaaaggaacctacaacctagtactgtttctaataaacataggcatatacatctagatttggtttgctactcaatagaaagtaaaattcagactaagctagcatgacataattcagaactaaccctgccttagctattgcattttacctagattgtatctgtcccaatcttacctatacagcctattatcatattgtatcgaaattgtatgaactaagtcccacagaaactagaggaataaaggtaaaaagtatgtcaaaccaaccttctaaaatatgaatttgtgccatgcaatcatagaggcttccaaaaacgtcatattagctggagaatgttctttgttggattaccttgtactctagaaaaccgatgtttttttttttgcaaacttacagtcctcatgtatgtttgttctcttcctggtgtttgatgcatttctggaaaaccttgattgtaggatgtcttagctatctatgtatgcgggtataactagttagttattcaccattgttcttctgcaaccacttaatgcttcatctggtgctgcattcttccaactgtatgttttgctgacatcacaccaggtggacacatttttttttagattttcatatctgctggttttcttgaaatcctcaaatcagtgaaggtgtacctcccagagaaaatccatacattc

SEQ ID NO: 96440 - DNA, 552 bp, Zea mays
  Clone ID: MRT4577_19467C.1
gtacaagctttttttttttttttttttttttttttttttatttttattttttttttttttttttttttttttttttttttttttttttttttttttttttttttttaattttttttttttttatacaaaaaaaggtctctgggggggggggggcccccaaaaaagggtgaaaggttaaaaaaagcaaggaggaaaaaaggaaactggaaagggggaaacaatagggttgggggaaaaaaaaacgggccgggaggcccctaaaaagggggaattaaaaagggggaattttcaataatgtaaaaggcatagggggaaaaccccccccccggggaaggttataaaaggggaactatataaaattttcctcccgctaaattttccacccaaaaataagaacccaaaaaataaggggcaaaggcttaggtggctaaagggggaaaccactaaaagtaaaaaaattaacatcaatggccgctttaaaaaaaaaaaatttgcccccgggggtccttaaatgaaacccccaaaaaataagggggggccgcccgggtaaaa

SEQ ID NO: 96441 - DNA, 555 bp, Zea mays
  Clone ID: MRT4577_19468C.1
tgcggaagcaattacataaacttacatttatttagaaagtaagatcaagttacttattacataccagagctataaacgagtgctgagtagtattattacacatattaagggaggcaaaaactcctcccgatagctttaaaaaaaaagtcctatatggaggaccacgtcctcccgcatcttcactcttgtttttcttcttttgataccaccttggagcaaaagcaacaaaaatttgtcgcttcctcacctgagactccaaaggtggtgttgtcttctcttcagggacttccacttcttcttcgcgttctgagatgattacgaaacaagcttcatacgggccagcaactccctagaatgttctagctatggtgtgatgaatttggtggctgtggtaatcacaaacacaggaagacagcgcacacagctctggacagtgccaacttagtggcagcgggagaggagctttggcttgcaatacacatgaatccctcacaccactgcaagctttggctagaacaccagggcccccgagtacctgcccgggcggccgctcga

SEQ ID NO: 96442 - DNA, 595 bp, Zea mays
  Clone ID: MRT4577_19469C.1
aaagaaatgcggaagcaattacataaacttacatttatttagaaagtaagatcaagttacttattacagaccagagctataaacgagtgctgagtagtattattacacatatcaagggaggcaaaaactcctcccgatagctttaaaacaaaaagtcctatatggaggaccacgtcctcccgcatcttcactcttgtttttcttcttttgataccaccttggagcaaaagcaacaaaaatttgtcgcttcctcacctttgtttatagatgagttagtctcaggcccgcagatgttaaagtagagacgagaccctgcctgagactccaaaggtggtgttgtcttctcttcagggacttccacttcttcttcgcgttctgagatgattacggaacaagcttcatacgggccagcaactccctagaatgttctagctatggtgtgatgaatttggtggctgtggtcatcacaaacacaggaagacagcgcacacagctctggacagtgccaacttagtggcagcgggagaggagctttggcttgcaatacacatgaatccctcacaccactgcaagctttggctagcccacgcggccg

SEQ ID NO: 96443 - DNA, 461 bp, Zea mays
  Clone ID: MRT4577_1946C.1
aaacaaaaaaacactacccgaaacctttccatttcccaactaaaacccttcaaaaaaaacggggtgggccccaaaaaccccaaattttggattaaaccggggggcatggccccccaacaggggtgggaacaaaaccggtttcacttttcctacaaaaaaatgcccccgggggggaaaagtaaaccataggggaaaaaacagggggtacatgcttggggaaccctcccaggggaggccactagcccactacgggggggggggtaacttttggtaacccttttttttcttgggaagcttgatcatggggccaatcctaaggaaagaaaggggagcccccggggaaaaaggaaagattttaaatttggtaaacggggggtttataaccccaaactaaagggggggggaaaggaaccccttaaaaagggcaaggccccaccttgaaaaaaggtgcttggcggcct

SEQ ID NO: 96444 - DNA, 653 bp, Zea mays
  Clone ID: MRT4577_19470C.1
ggggaaaaaaaaacaaaaaaaaaaaaaaaaaaaaaacattataaaaaaaaaaaaaaaaaaaaaaaaaaaaaaaaaaaccaccggttggtgcttttccggcgccgcccccatggggaaggacatcggggacgcgttcggggccaagctccccggcgccgtgctcggacaggggtacggaatgacggaggccggcccggtgctgtccatgtgcctggcgttcgccaaggaaccgttaagggtaaagtcggccgcgtgcggaacggtggtgcccaacgccaagctaaaaatcgtggacccgaacaccggaaggtccttcgcccgaaacctgcccggggagatctgcataaggggccagcaaatcatgaaaggttacctgaacaacccggaggcaacgaggaacagaatcaacgccggggggtggttgcacacgggcaacgtcggtttcgtggacaacaacaacaagattttaatcgtcgacaggctaaaggagatcataaagtacaagggcctccaggtggcccccgccgagctggaggcgttgttaataacccacccaggcatcgccgacgttgccgtcgtcggaaaacaagtggagccgaagatcgggaaaatcccggtggccttcgtggccagggccaaagggagcgacgacg

SEQ ID NO: 96445 - DNA, 582 bp, Zea mays
  Clone ID: MRT4577_19471C.1
acataaacttacatttattatttaaaagtaagatcaagttacttattacagaccagagctataaacgagtgctgagtagtacacatttcaagggaggcaaaaactcctcccgatagctttaaacaaaaagtcctatatggaggaccacgtcctcccgcatcttcactcttgtttttcttcatttgataccaccttggagcaaaagcaacaaaaatttgtcgcttcctcaccggggcttgacttcgttcacaggtgagtcaggctcggactcgcagatgtcgaagtagagccaagtctctgcctgagattccaaaggtggtggtgtcttctcttgagtcacctcactctcttcttcgttttctgagatgattacggaacaagcttcatatgggccaacaactccctagaatgttctagctatggtgtggtgaatttggtggctgtggtcatcacaaacacaggaagacagcgaacacagctctggacagtgccaacttagtggcagtgggagaggagctttggcttgcaatacacatgaatccctcacaccactgcaagctttggctagaacaccaggccaga

SEQ ID NO: 96446 - DNA, 149 bp, Zea mays
  Clone ID: MRT4577_19472C.1
agagtaacagtagcatatgaatacgatacatcaattctgtgaatttcttaacatatttagtacagagtcgataaggggggtataagaatgaatagtaagatattggttcaccaaacttgttaatgtttacagattcatctcattattta

SEQ ID NO: 96447 - DNA, 171 bp, Zea mays
  Clone ID: MRT4577_19473C.1
ttgtctgctcccttcctggccccccatcacctaccgatttccactgaacgagccacggccttttactactccttgtaccacaattatctactcccactattacaaccttacatatatttatcaatggccctttcattctattttttctttactttctatctctcccacttt

SEQ ID NO: 96448 - DNA, 432 bp, Zea mays
  unsure (1)..(432): unsure at all n locations
  Clone ID: MRT4577_19474C.1
ctgcaggncgactctagaaacgtaccttgttacatgatttgtatcttttgcttgtttggcacataatatttcactcactttgtgttggacacttaatcaccaaaacattatagaaatgacccaagggcacatttccctttcaatctccccctttttggtgatttatgccaacacatcaaaaagcaatgcaaaacatgcaacatcgattgaaattgaagaccaaattgtttttgactctaatttggcatatttggatcattctttgccaccacttggtttgtttttgcaaatcaaattcattttcctatatctaagtcaaactcacttgtttgggcataaagagagatattccaaaagtgaaattgaacaagatccaaaaactcccccttttttccataattataaattctccccacaagagatcaaattttg

SEQ ID NO: 96449 - DNA, 1928 bp, Zea mays
  Clone ID: MRT4577_19475C.1
tcgctgcagtgcagcggcagctgtgtccaactaccaagtcaaggtgaccgttgggctgggtggcacgagacgcaacaaaacccttgtcagtcgcccgagccccaaggctcgcacccacgccagcggcaccgcacccccacccacctcggcggcgagtccgagccccaggaacgaagggcgatggcggcgatgatgatggccacgtccgagtcaaagtcccctgcccgcgtgctgaggcggctggctggcgccgcggtcgccgccgtgctgctccgccgcaccttcagcgcctccaagtgcaagacggaggcgcggatggcgacggcgcggatgaagctgctgcggaaccggagggaagcgcaggtgcgccagatgcgccgcgacattgccgcgctcctccgcgacaaacaggaggataccgcacgcatcagggttgaacatgtaattagggaacagaactttatggcagccaacgagatcattgagctcttctgcgagctgattgttacacgccttcctatcatcgcaaaacagaaggaatgtccagcagacttgaaagaaggtatctgcagtttgatatttgcagctccaaggtgctctgaactccctgaacttggtcgcatacgtgacatttttgaaaagaagtatggcaaagattttgtttctgctgcagttgacttgcgcccagatgctgctgttaacaaccttctgattgagaagctgtcgattaagaagccttccgggcaaattaaactgaaagttctgaaggatatagcaaaagagcatcagattgattgggataccactgagagtgagcaggagcttctgaaacctcctgaagagttgattaaagggccaagtacatttgttgaagcttccaacatgcctgttaagactattctgacaccatataccgtgcagccagatccagttaacttcagctataggtgttcggatggcaaatatgatgacaggggcactatgcaattcaaagatgcagcttcagctgctcgagcagctgcagagtctgctgagagagcagcatctgctgcaaaggccgcagctgattttgccaataataacaaccatccatttgatgaagatgaagattgcaaagcttcaactcatgaattcactcatccccgcaagagacagtcgatgagcaactcgagtagatcctccatgaaagaagatgcaaatgcctttgatgaacaaaaacctcatgaagggaaaacatacagtacaagaaggttcagtggaaagaaccatgtagaatatgacaaagacggctaccctgcagatttggactctacgaagacacggagaaggaactgccgtgctgctcggaaggtgcactcagagataaagtttgatgattctgagggactgtgttcagaatccgaaggtgaaaatgatgtggagattcagtctgtggaaaggccattgcctcctaagagtgagctgttttcagaaaaccgtcactcagaagacgaagagcatgatcaagatttccctgaattgccgaagacaaaccttcattctcgtgttcatccaaatatgcctcttgactatgaaactctcactgcacgctttgaggctctcaaatctggcaagcttccgtagtgcaacaaaaagaacagcatcactggatgttacaattccttcttgctgtttctgtataatatgacatgttatagtagggtatagtgtctaatgattttgattttggctgagcctacggatttgtcgtttcaaactattgctgcatttgaactgttcgggtatataaaggttggttgaaatgataatttgaactgtttctgcgatctgttcaagtctagcagtcttgttgagtctgaagcaacacctcatggactgaaagaacgaggcaaactcatcaccaattcatcataaaactttactatggc

SEQ ID NO: 96450 - DNA, 179 bp, Zea mays
  Clone ID: MRT4577_19476C.1
gttaggctcattcatcgaaacgcactcagagagaaggtaacgaaaaagattttgatcacatcatagcaggcaggatcccttacctgattatgaattatcatcctacctttaaactcaggatatgactcaaagtcttacccatactttacctataatgactagctacgattcttctccat

SEQ ID NO: 96451 - DNA, 364 bp, Zea mays
  Clone ID: MRT4577_19477C.1
gggagggtaaaaagggtttctcctgggaaaacggggggaggagcccaaggacctttcaagagtttgcccccccttcttatttttcgacaagacatttactttccctaaaaaattccaaaagggttaaaaccccaacctggttttttttttagtgccggaattttttaaaaacaacaagggttacacccgggttttcccacatacccccctaaactcaggggggctttttactttaactgagcgaattttggacacattttaaatacccccaatttcccttccatggaggtcatttcaacctttttgtttgattcaaccgggaggcaacggttgggacatgcaacaccaaaattgggccttgggg

SEQ ID NO: 96452 - DNA, 443 bp, Zea mays
  Clone ID: MRT4577_19478C.1
tctttcatggctctcagatctttcagttatacttgattcctacgtccctttggagtgctgtaccgtacacctggaaggtaggtaggtaggtgtacttatctcggagatcgaggcagtaatcgggacaacagtacacgtcctctcatggctcatgctcgcagacatcgagagtccggccgatctatggtctggcgctcacttaatgagtcagtcactacagtgcgatgcctgatccgtccgcggacgggcttccgtcttctcaccccactgacgaggaggtcatgctgcactacctcatgaggcatgccgtctccatgtgcgtgccccgtccccctgattgtcgagggcaagatctaccaccgtggtccttgggatctcggtggctagggattgttcgacgaccaagagtgttgattcttccttccccggcagcgaaagtgccc

SEQ ID NO: 96453 - DNA, 318 bp, Zea mays
  Clone ID: MRT4577_19479C.1
aacataaaaaaggtaagaaaacctattcaataaaaaaataaagcactacaaacaacggggacggaccctaatctccagtggccatgaccctagatcgccatacatgtgcgactgacatctactagatccaccatacaagtgaatcgctctgcatcatactggtccgacccgctctattctcgtctactaccgcatatactacgccagcgcctgcattatccgcggcgctttccaagcagtcggcatctgcccgcggatgaacaagcaacttgacagttccaagtgtggcaccgtccgatggaactgttctcaacttta

SEQ ID NO: 96454 - DNA, 575 bp, Zea mays
  Clone ID: MRT4577_1947C.1
atgggcgagttgaactacttccttgggttccaagtgaagcaactcaaggacgacaccttcatctcccaaacgaagtacactcaagatcttctcaagcggtttgggatgaaggacgccaagcccgcgaagacaccgatgggaaccgacggacatgtcgacctcaacaaaagaggatctggtatccaaaggggtctacctttgacttaattggatattcagactccgattatgctggatgcaaggttgataggaagagtacatcagggacgtgccaattcctaggaaggtccctggtgtcttggagttcaaagaaacaaacctccgttgccctatccaccgctgaggccgagtatgttgccgtaggacagtgttgcgcgcaactactttggatgaggcaaacgctccgagactttggctacaatctgagcaaagtcccactcctatgtgacaatgagagtgcaatccgcatggcggataatcctgttgaacacagccgcactaagcacatagacatccgacatcactttctaatagaccaccatgtaaggaaaatggacccagggccatttggctaa

SEQ ID NO: 96455 - DNA, 619 bp, Zea mays
  Clone ID: MRT4577_19481C.1
ccttccgggacctgtcccgccaggctctccccacccttctccgttcgccctggcctcagcgccgcatcctccgcgatgcttgcgcgccagtctccgctccgtgtccgccgcccacgctcccccgtccccgcctcccaccaaagatcgatcaaggcggcgatcttctccgccagggccttcgcgctggcggctgtccgtgcgcaggggcagcatcacggcagcgggctcttgaaccaccagaacttctactcaccacgcatggcaatctaccctctgtgatcgccactgagaacgtcgacgcgctgctcgggcagggcctcctcgtcgcgcggctcaagccacacaggattttgttttcgatgagctggatgatgtgctgcgctactaccctcagggctaccatggtgtggaccgcgaaagccagcccgtgtacattgagaagctagggaaggtggatcccaacaaactcatgcagatcacctctgtggatcgctacatcaagtaccatgtccaggagtttgagagagccttcagggagaggttcactgcctgcacattggctgccaagaggaacattgactccaccactaccatcttggacgtccagggtgcggggttt

SEQ ID NO: 96456 - DNA, 2020 bp, Zea mays
  unsure (1)..(2020): unsure at all n locations
  Clone ID: MRT4577_19482C.1
gccgaggacgccgacgcgctgctcggccagggccgcctcgtcgcgcggctcgagccgcacagatttttcatcagcagctcgattcttgatcttacaatagttggtattgattatacagagggtgactcgaccctacagggtcagcaacctcactatttgaaaacaagctgcaaaccaagcctagatcatgggagtcccgtgtacctgctgggacatacaggngaaaaaagaactggtgattggtgagggcaaggtggttattggcacagacaacctcataaaactctcagccgagggggtgacatggtgtcctgggtctgctcgttttgatgcccaagggaacctagctttcatgatctgtgatccaatgaagctggcctcttctcccaccgcaagatcatcctcggcatcctcatcctcatcacattcatggaagaaggatcagccaatgcaatttgggattcccatatctgtagtttgtgattggttatatcagcactggcagggcagcttggacgaggttagcaagccaaagttacctcttgttcggctgatgtccagcaggagtgatcactcaagcacctcgttcactcgtcgtcatgtgttcaagcctgacgatgagaacgatgatgcatccgtttgttcaaagcctaaacatcagcaggtatcaggtagcacagccactgcaaggatttcacatgaagcaaatcctatagttgatctgcgcacaagctgtgagcagggtgttacgactccagaaatatatgaatcgccaaggcgaagttcttgtcaggctcagaagaacgctgctgcaccaattcaactcttggacatcaacttcccacccagggttccaaagactatatttctaccattgcctctgaagcaaatgctttctgatgagaacaatgttgaaacgtcgaagccaaaatatcggtcaaaagacaatggcttcccatcagggctgatatggcaccgcaatattgaggctgagtgtagggaccctccggtagctcttcagcatatggattgcagcagcgagggacagtcgagctcatcacctgctgagataccggagtatggatgccaagaccagtacgatagcgaggaggaaacaatgtactcagctgaaaccatggaaagcaggaacattccaagccccagggagaaacatgtggggaggagccagagctgtgttacctacagcaggtggagctctccaaggacctcatcaatgcagaatggaaccttgcgaaagcagcatacactgatccctgtgcggaagacgcactcgcagaacacgactcttccgcagaggagtcatgactacttaagcccaacagtttcctcagccatgaagaagaggaactccatggaacagcagcaggccacaaagcctcgacggagcaccatacagtcttctccaaaatggatgttttgatggttctatctagatctggttttgaggtggaaacaatgaagaaagcaagtgcctactcggtgaaaactactgctcctatgtttcctactcaaaacttacatgtaagtctgctcccttccctcagttctctacttctctccctgggttcctgtgtgcagaatggcatggataaataaagagaaccaaaaaggaaaagaaaagcaaaaaaatcttcccaaaagattccagatgaaatgtgttgaaggcggcatttgtgaggtgcgatgaggactgttatattcctgccgactttagtgttcagcttacaattttcaactaaacatttttaaaatgttttttttgggattttgctattcacccaaagccatgatgcctgtaatcattttgtttgctaccgcctgcggccttatgtaccatgtgtgtcaccctgaattagcccaggaaataggttgagagttggctcccaagtgagtttttttttcccccccccccccttgtccccagtgttggctgtgtcccatactataaagcaatgtaaaaagcttttatttgaatgatgcggcaaagttcattgtggtc

SEQ ID NO: 96457 - DNA, 380 bp, Zea mays
  Clone ID: MRT4577_19483C.1
aagggcaacaaacaaagggctttcatgggaaaaagttaaaaacccaccattgaccacataaggtttacccgagacattctcaagcaaaggggctcccaaaatacttacaaccatttggacaacataaaggagacataggagtagaccccaccaaacttaggcatcaaaagaaccagccccttcttacttgaaggcccactggttctccctggggatctccttttcctcctcaggggggaagtcattcttgatgttgaagggcttgcgaatctcttctgggggcttgcccttgaacatggcaacaacagtttgacaggtcagggcgagcaaacccttgaagttcaaatagtttgcagccaaaatgagggccaaaagcgggg

SEQ ID NO: 96458 - DNA, 1098 bp, Zea mays
  Clone ID: MRT4577_19484C.1
gaggaatcgagcctggtgttctttatccagctgtctctgttgagcagtttcacgaaccccatgcttataagttgaatttcctatcaatcaaccggtttgagaggaaaaagaatcttgatcttgccatttcagcatttgctttgctccgttctgctgcttggactatacctggtgatgctctacaagaagcaacattaacagtggcaggtggctatgataagcgtctcaaggaaaatgttgaataccttgaggaactcaaaagactcgcattgacggaaggggtttctggacaggttaaatttgttacatcttgctcaacatctgaaagaaacgagcttctctccaactgcctctgcgttttatacactccaaaggatgaacatttcggtattgtacctcttgaagccatggccgcccataagccggtaattgcctgcaatagtggtggcccagtggaaacagttgtgaatgaagtaacagggtttctgtgtgatccctctcccgcagaattctccaaagccatgctgaaacttgtgaatgatcatgatcttgctgttagattgggtgaacaagcacgtgaccatgtggtgcaaaaattctcgaccaagacatttggtgatctcctcaacagctacgtcttgaacatctaccatgagaggatggaatgatctataatactgggtcagccatgccatatgaaaacaatttgttcaatacaaggttttttttgcacctttacgtctaatctgattttgatagacacacataatgacaatgacactccattgaagccctttggcatactatagtcactctatgatctgtatattgttttcaattataacatcaaatttggcttggtccatcctggagtctggaatggagctggagtagagatgacaatggggacctgattctctgtgtggaattcctttattaggagatgaggaagtttcttctccgatggaaatgtaaatggaaaaaaattatccccggggatagggatgggaatggggaagcattctccatcccagttctccacgtgatgatgttttcatgtaatagtttatgataaaaataaataattagtttgttaag

SEQ ID NO: 96459 - DNA, 259 bp, Zea mays
  Clone ID: MRT4577_19485C.1
ggaagacgttactttgaagtggatgttggctaaggaaccggatgggatgtaggagtctgtatggccgatgctgcgatgggtcctgggatgaagcaagagcctcagtctggattctggactttcggatgtgcagaaagataagctatgtagcgcttacttctcccccaacttcccttcatctgcatgagcagtccctgcctgtgggaatttttctggactatgaagccggagttgtatccttttataacgggaatactgg

SEQ ID NO: 96460 - DNA, 334 bp, Zea mays
  Clone ID: MRT4577_19486C.1
aaagcgggccgggtgggtgcccttttggggttatttaacccacaaaaaaaaaccggggggggaaaaaaacgggcccaggcgggggcttaaaacctaggggcttgaaaattaaattaaaaccccccgggccctcaaaaaaaaaacttctaaaaaaaaactaaatcttaaaaaattcggacggggggccagaccccgggaccaaaaatcctttgccatgggggataaagaaaacaagcccttaatccccgggaaaaaaaaggctgaaggaacccgccccgggtttgttttccctgaacgaaaacccccccagcccgagggcctgccccttgacacc

SEQ ID NO: 96461 - DNA, 2201 bp, Zea mays
  Clone ID: MRT4577_19487C.1
gccggccggttccctcgtggcgggccgggccgggggccgataccccgtctcccctgccgcccagcccaccgccgcccctccctcgagttcccctgaacgccgcccctcaagatcccctagacgccgcccctcaagatctcgggacgccgcacctcagttttcctggacgccgaccctccctcgaggtcctccgtgtagatccgccacctctcccttgcacggactcgcgcccatctgtcgaggtcccctggacgccgcgcccacccctagcgcctatcttgccaaacaccaccaaaactccagaggagttgccccaccagggagttttggagcagagcagctctaggtggagcagagctatgccaaacacgcttgtcccaaacaggacctgagacgatccctttggcctcggctctcgtcttgtgagtgtgtaatctcggattgggaactcgactgcggggtcggagaagatgacggcggcgggaaaagttgccggcgcttcgtcggggacgaggacgaagcggcttaagattgccgtcatccacccggatctcggaatcggtggtgctgagagattgattgtcgatgcggcctgtcagcttgctgcccacgatcatgatgttcatgttttcacatcacatcacgataaaaaacgctgctttgaggagactctttctggtttgtttccggttactgtacatggggatttcctgccccgccatgtgttctaccgctttcatgctgtttgtgcttatcttcgctgcatttttgttgcgctctgtgtgctactcagatggcccttctttgatgtcatattggtagaccaggtttctgttgtgattccactacttaaactaatggcatcatcgaagataatattttactgtcatttccctgatctgttacttgcacaacatactagtatgcttcgggggttatatcgcaagccaattgacatgattgaggaaatcaccactggtattttcttttggctgatttgattcttgtcaatagcaagttcactgcagcaacttttgcaaggaccttttctggtttacatgctagaggaatcgagcctggtgttctttatccagctgtctctgttgagcagtttcacgaaccccatgcttataagtaacttcatgcttgcatatctccttacatttaggttgaatttcctatcaatcaaccggtttgagaggaaaaagaatcttgatcttgccatttcagcatttgctttgctccgttctgctgcttggactatacctggtgatgctctacaagaagcaacattaacagtggcaggtggctatgataagcgtctcaaggaaaatgttgaataccttgaggaactcaaaagactcgcattgacggaaggggtttctggacaggttaaatttgttacatcttgctcaacatctgaaagaaacgagcttctctccaactgcctctgcgttttatacactccaaaggatgaacatttcggtattgtacctcttgaagccatggccgcccataagccggtaattgcctgcaatagtggtggcccagtggaaacagttgtgaatgaagtaacagggtttctgtgtgatccctctcccgcagaattctccaaagccatgctgaaacttgtgaatgatcatgatcttgctgttagattgggtgaacaagcacgtgaccatgtggtgcaaaaattctcgaccaagacatttggtgatctcctcaacagctacgtcttgaacatctaccatgagaggatggaatgatctataatactgggtcagccatgccatatgaaaacaatttgttcaatacaaggttttttttgcacctttacgtctaatctgattttgatagacacacataatgacaatgacactccattgaagccctttggcatactatagtcactctatgatctgtatattgttttcaattataacatcaaatttggcttggtccatcctggagtctggaatggagctggagtagagatgacaatggggacctgattctctgtgtggaattcctttattaggagatgaggaagtttcttctccgatggaaatgtaaatggaaaaaaattatccccggggatagggatgggaatggggaagcattctccatcccagttctccacgtgatgatgttttcatgtaatagtttatgataaaaataaataattagtttgttaagagatc

SEQ ID NO: 96462 - DNA, 395 bp, Zea mays
  Clone ID: MRT4577_19488C.1
ctgttgtagctggcatgatcatacaggctggtagatgacatctccaccagatcaagacaagccatcccctaagtgcaagtgctgacgtggtctccctgacctacaagatcgtgatctacgatcacgggatcaatagggacggtggtgatgagcaccgctactgtctacacctatgatttcagggagagagagaatggatcacagtgcacgcagctcgacgttgaccaggttggctgcatcaagtacatgcaccatattctctataaaggatgccttacaccttaaggacccggagcacccgcaccatgtcatgagcatcaacaagagtctttcctgtgccggcgctgatatgctccacattggattgaaggatcactatgacaagaataaggaca

SEQ ID NO: 96463 - DNA, 768 bp, Zea mays
  unsure (1)..(768): unsure at all n locations
  Clone ID: MRT4577_19489C.1
ctcgaggccggccgggcgccgataccccgtctcccctgccgcccagcccaccgccgcccagcccaccgagttcccctgaacgccgcccctcaggttcccgggacgcagcacctcagttttcctggacgccgaccctccctcgaggacctccgtgtagatccgccacctctcccttgcacggactcgcgcccctctgtcgaggtcccctggacgccgcgcccacccctagcgcctatcttgccaaacaccatcaaaactccagaggagttgccccactagggagttttggagcagagcagctctaggtggagcagagctatgccaaacacgcttgtcccaaacaggacctgagtcgatccctttggcctcggctctcgtcttgtgagtgtgtaatctcggatcggaaactcgactgcggggtcggagaagatggcggcggcgggagaagttgccggcgcttcgtcggggacgaggacgaagcggcttaagattgccgtcatccacccggatctcggaatcggtggtgctgagagattgattgtcgatgcggcttgtcagcttgctgcccacgatcatgatgttcatgtcttcacatcacatcatgataaaaaacgctgctttgaggagactctttctggtttgtttccggttactgtacatggngatttcctgcctcgncatgtgttctaccgctttcatgctgtctgtgcttatcttcgctgcanttttggtgcgctctgtgtgctactcagatggcccttctttgat

SEQ ID NO: 96464 - DNA, 1306 bp, Zea mays
  Clone ID: MRT4577_1948C.1
tcggctcccaattattgtggtgaatttgataatgctggcgcaatgatgagcgttgacgaaactttgatgtgttccttccaaattctgaaacctgctgagagaaaacaaatttatggggccaaacaaaatgtgagatagtgaacccattttgcttccagcagctctgaggtcagttaatcctgtttcaatattttgtcctgctgatttacttgctccacacaattgttgaatcacatcgtttatgcatttgtgggttgtgctacatatatttatgagagaattctacgtgtttaaagaaaaaatgctctcccatctctaccacagaagtgtctttccctctggtaccccaattcatttttttacatctactaccactgttgtctgtttttgctaacttgggcattaactgtgacaggaaaagaccaatttaacccgtgtgctctagtttcctgctagatttgtttccctttgacgccacacactggcaaagcatcgctgctatttttctctgtagtacagtccaacatggttgaaagcaactgctacaaatcaagagtactagagattagcgctcctactttaccagaagctcacaatgtcataaagtttcttggaacaacattagcaggacaagcttaattttctttgatccttcaccccgattcccaaagaccaccataatttgcagactactactcctttagtttactgattacatctttaatgtactgattacaactcctctgtatcaaaacaacacacaagatcttataagaaaccgcagtggtgcagtctgcagctaatctagtggcatccaaaacaaacctaaaaagcagtacttgttgtagcactgatgatcagaaatcaagcagatgccagtgccaccttgctgctgtcgggcctgtagaccacaggtaaacagataccaggcgcggtcggggtggcgcctggtggcatcacagtgctgggggggggggagcagttttggtgcagctccatcggactctatgctgagtggtgtccgagggaagcgaaatctaacagcacatgggcaacttggactttgaattatggtaccagagcacatgggcaacttggtctttgaattatggtaccagagaaaaacactactgtagtagagatgggagagcaaccttttttatgctacacatggaattctctctatgttgtattgtttgccaaatttgcagtttgtaatatcatagatttatgatttacttgctctagtgcaatgttgtagcgacaagtcaatttattctgcaaggaatgacaagtacatatgcac

SEQ ID NO: 96465 - DNA, 760 bp, Zea mays
  Clone ID: MRT4577_19490C.1
agcaagatgtaacaaaattaacctgtccagaaaccccttccgtcaatgcgagtcttttgagttcctcaaggtatccaacattttccttgagacgcttatcatagccacctgccactgttaatgttgcttcttgtagagcatcaccaggtagagtccaagcagcagaacggagcaaagcaaatgctgaaatggcaagatcaagattctttttcctctcaaaccggttgattgataggaaattcaacctgtacaaaagattgttgtctactttagctaagccttaatatgataatggtaaaaagatctgtttagtctataaactgaataagttagacctaaatgtaaggagatatgcaagcatgaagttacttataagcatggggttcgtgaaactgctcaacagagacagctggataaagaacaccaggctcgattcctctagcatgtaaaccagaaaaggtccttgcaaaagttgctgcagtgaacttgctattgacaagaatcaaatcagccatacctgatattcgtaaaaggtaaccgctacaattataatgctgctggatgccaagacacatagctaaacaaagaaaagggaagaaaaaatagcaggtactcagaatactgtaccagtagtgctttcctcaatcatgtcaattggcttgcgatataacctccgaagcatagtagtatgttgtgcaagtaacagatcagggaaatgacagtaaaatatatcttcgatgatccatcccgccgcctgagg

SEQ ID NO: 96466 - DNA, 430 bp, Zea mays
  Clone ID: MRT4577_19491C.1
attagccatctatcatatcagactttttatcttttttccaatcttgagcccatgaagggcctacgggtatcgttggaaaacttatgtaaagacgtataaatgttccacggcctatccatactgctgccaaaagaaagccaccaaacataccaggagcgatagcctatctcccactgagcccaaatttatgaaggcgtctaccaaaggctatgtacctaaaaaggccaacacaaccgataacatgggacacgccaagaaattactggagaacaagaaagatgagatgaccatacatgggcaccatctgaaatttaagagaaggctctttaccatgatggataacgtgcgcactgcctatgacagtgtgaccgacgttgccaacaagcaagcaaacgcccccaacggcaggtgcaaaagcagcaaatctaac

SEQ ID NO: 96467 - DNA, 569 bp, Zea mays
  Clone ID: MRT4577_19492C.1
ctcgaggccggccgggagacttatcacgagtagtcagcgggcgtcgtcgctaagcatccctccccgtcctcagtggcgggctccgcctcgctgctcgtcttcgcgctcgccttggtctctgacccgaactggggcggccgcgaggccgcatcagaggacgagctcccagcatccagtcaactctcctccatgctggcgagcgaggactacgaggtatccgagcccatggtcgacgctgaggcgccggcgcgcagcgctcactggataagaggctgtctaggcggagcatcatgagcatgtgttcgaagtcgtccgcctgccttgatcaccggctgcaacagcaccaacgactctggttgaaacgccaacacggaatctaccgtgacgcgtctcacaagcttccttgtgctggacacggcgcaaggcgcgaacaggcagcgagacatcttgtcatcttgcccgcatccgcagaggtggccagggaggcgggagaggagatgcccgtggccgagccggacccggatcgctctctcccggacagcggaggatagggggaggtggctattaca

SEQ ID NO: 96468 - DNA, 1443 bp, Zea mays
  Clone ID: MRT4577_19493C.1
cgtccggaggtactggtttcaggaagttttctacaacagaggcagctgatgcagcaatttctgctgccagtgttgctcctggcttaggaatttctttaaagagcaggccacttaatgtcatgaaagcgatggacaaggagtcagctcacaaaaaggcacttgagaaggcaaagactgaggtcgaggatcgacggaacctatacttggctaaggagggtgaaatacttgctggaataccagctgcagaaggtgtgtcagatgctgacatgaataaacgtaattggttagctagaaggaaagcggagatgcttcagtctccaaaatttcatgtgtcgagaacaaggcttatcatctacaatttgcctaagactatgaccattaatgacgtaaagaagctttgcagagaagcagtcatttctcgtgctacaaaacaaaatcctgtcatccggaaggtgaatatcctgaagaatgaaaagaaaggcatacagaagcattcacgcggtgtagcctttgttgattttcaagaacatgaacacgctcttgttgctctaagggttctaaacaacaatcctgaaacttttggttcagaacgtcgcccaattgtagagtttgcgcttgaggatgttgaaaaggtgaggcttcagaagattcgaatggaacggcatcgcaagtcagcagcagaaactgcagaagttcagcagaccccttcaggggatcaacctgcaagtgaaggccgtaacgcagataacagcaggactttcagaaaaggaaacaagcggaaatcacacagtttaccatctaaaccctccgactctgttgaagggctggccaaggatcctctagttcctggagttcgaaacgcgaaagctgcaaagagagcaaggaagtcaaatgtggggaccattttgccggaccgaggtctaacagctgcaaccccaaacactgctcagaatcaagttgcgtcaagtgagcttgatcaggcagctgctccaaagaaaagaaaaaacagaaaagacggtcaggcagagcaaaagagaggaaaggttacaaaaaggacaaggaaagaaccttccggggaaggaggcgtggacaagtcgctggtggagcagtaccgtttcaagttcttgcaacatggtgtgagcaagaccaagaccaagaccaaaggatagttgacttgggaactgtgggaagtgggattgatgttgaagagcagcacggtgtctcggaccaccgtataacgtttcgaagagcaagtctccacaaactttctgaggccaaaatttcgattgtgatgcttaatagttttgtgtccatctgtactgatatttataactgatctagttacagccgtatgattatgaatcatcttatcatacaccgtttatggcttcatgatgacctgcctgtgtctgaaattcctgagttggtatttctaacggaaac

SEQ ID NO: 96469 - DNA, 247 bp, Zea mays
  Clone ID: MRT4577_19494C.1
gtaatctgcactgcggatagccttagtggtaaaacactgtttttctctgtcataatggctgcacagacagaattggtgcattctcatcagaatcctcagtaaatgggcaagtagcaaatgggagatggcttgaaacttagcatgtgattcacattggattatggaacagtggatgactgtagagtgttactggtcttttcccgagcagacttaagattgctataagatggcagaaacaggtaatgtc

SEQ ID NO: 96470 - DNA, 236 bp, Zea mays
  unsure (1)..(236): unsure at all n locations
  Clone ID: MRT4577_19495C.1
agcacggccggaaaagcaaaagaatgggagggggaatacaagaggcgaagagggggaaagcaataagcaagcgacagcaaccctacaccactactactggtcctacacctttttttttttttttttttttggtttgctacccgtacacggaaggccccacgggacttggagcacacagccggaggcccccgcgaacgggngtcacccctcaccgctccccggggggggggtggggg

SEQ ID NO: 96471 - DNA, 158 bp, Zea mays
  Clone ID: MRT4577_19496C.1
aagaattcaaggtttgttatcaatctggatccaaaatttggattctcacttattgagatgtactatgccatttgctcgtatatacttagtaccaacaatgtggtgcttcatgatgtcttttggtttgagctgttaaatatttcttaggtccttaactc

SEQ ID NO: 96472 - DNA, 526 bp, Zea mays
  Clone ID: MRT4577_19497C.1
aattcggcacgaggtgccagtgcaacagaacacgcaccacacgggcgcagactgcagagacaacagatcgatcgtccaatggcgatcggcgggtcggaggccggcgggggaggcgcggggagcatgaggagcgtgctggtgacgggcggcgcggggttcatcggcacgcacacggtgctgcgcctgctggagcagggctacatcgtcaccgtcgtcgacaacttccacaactccgtccccgaggcgctcgaccgcgtccgcctcatcgccggccccgcgctctccacccgcctcgacttcatccgcggggacctgaggaacaccgatgacttggagaaggtgttcgctgccaggaggtacgacgccgtcatccacttcgctgggctgaaggccgtgggggagagcgtcgcgcacccggagatgtactacgagaacaacctcatcggcaccatcaacctctacaagagcatgaaggagcacggctgcaagaagctggttttctcgtcatccgccaccgtgtacggtt

SEQ ID NO: 96473 - DNA, 1460 bp, Zea mays
  Clone ID: MRT4577_19498C.1
cacgcaccacacgggcgcagactgcagagacaacagatcgatcgtccaatggcgatcggcgggtcggaggccggcgggggaggcgcggggagcatgaggagcgtgctggtgacgggcggcgcggggttcatcggcacgcacacggtgctgcgcctgctggagcagggctacatcgtcaccgtcgtcgacaacttccacaactccgtccccgaggcgctcgaccgcgtccgcctcatcgccggccccgcgctctccacccgcctcgacttcatccgcgtaagtaccgaagccgcggtgcgggtccgttcgcatgagcctttgtttgcctttgccccgcgccacgctgattgaattggtctctcgatcgcgctgtgctgcatgcccgtcgcgtggggtttttcagggggacctgaggaacaccgatgacttggagaaggtgttcgctgccaggaggtacgacgccgtcatccacttcgctgggctgaaggccgtgggggagagcgtcgcgcacccggagatgtactacgagaacaacctcatcggcaccatcaacctctacaagagcatgaaggagcacggctgcaagaagctggttttctcgtcatccgccaccgtgtacggctggccggaggtgatcccatgcgtcgaggactccaagctgcaggccgccaacccatacggcaggaccaagcttatccttgaggatatggcgcgtgactaccaccgcgcggacacggagtggagcatcgtcctgctgcgctacttcaaccccatcggtgcgcacagctccggcgagatcggagaggaccccaaggggataccgaacaacctgctgccctacatccagcaggtcgccgtcggcagggctccccgagctcaacgtctacggccacgattaccccacccgggacggcaccgcgatcagggactacatacacgtcgtcgacctcgccgatgggcacatcgcagcgctcaagaagctcttcgactctcctgatataggttgtgtggcctacaatctgggtacagggcgcggcacatccgttctggagatggtggcggcgttcaagaaggcctccggcaaggagattcccaccaagttgtgccccaggagaccgggtgacgcgacggaggtttacgcgtccactgagaaggctgaaagagagcttgcatggagggcccaatatggaatcgaggagatgtgcagggaccaatggaactgggccaagaagaacccgtatggctactgcggcggtgcaaaaaaatagcgtaggttcgtcgcaatgaagaattgtcgatagtagttctcttctctacactaatcaatggaacatgtaataaacacggaccacctaatctctactagtttctatggtttccactatcaaaaaaaaaaaaaaaaaaaaaaaaaaaaaaaaaaaaaaaaaaaaaaaaaaaaaaaaaaaaaaaaaaaaaaaaaa

SEQ ID NO: 96474 - DNA, 491 bp, Zea mays
  unsure (1)..(491): unsure at all n locations
  Clone ID: MRT4577_19499C.1
ctccttcaagcagctatagctagcataattaactcatgggtgcatagagatatgccgccgacgacccatatctatgggtccctccccttgcactgcatcttcttcttcctcctcctcgacctccttcaattattcctagtgtttgcttctcccttccttgacctttgcttggaaccattgatagttacttattgggcatggagcacgtcatctcaatggaggagatcctcgggcccttctgggagctgctgccagcgccagcgccagagccagagccggagcagcctccggtaaccggcatcgtcgtcggcagtgtcatagacgttgctgctgctggtcacggtgacggggagggtggcggcgacatgatggatcagcagcacgccacagagtggacctttgaaaggttactggagaggaggctctgacgaccagcacaccgncgccggtggtggtggtgccgaactcttgttgctcagcccgcctaaatg

SEQ ID NO: 96475 - DNA, 1987 bp, Zea mays
  Clone ID: MRT4577_1949C.1
atggatcctaaggggaagggaattgtgatcaacgacaaggagaaggagtccttcgtcaacgagccaagggatgacaagtccaataactcgggctcgggccacaagcgaagagatgggaagaagaagaagacaagacgcatcaaggagatcgtctactacgacagcgatgagtcctcttcttcccaaaaggacgacgaccacgacaaacaaaggaaaccggttaattcgaacttttcatttgattattctcgtattccacatagttcgaattcgcatttgctttccattcctcttggtaaacctccacattttgatggggaggactacggattttggagtcacaaaatgcgtagtcatttattctctctccatccaagcatatgggagattgtagagaatggaatgaactttgatagctcggatagccctatgtttattaatgaacaaattcataaaaatgcacaagctactactgttctcttagcatctttgtgcagggaagaatacaataaggtgagcggcttggacaatgccaagcagatatgggacaccctcaagatctctcacgaggggaacgacatcaccatgctcaccaagatggagttggtggagggcgagcttggacggttcgcgatgataaggggcgaggagccaactcagacatacaaccggctcaagacccttatcaacaaaataaggagctacggaagcacgcgatggacggaccacgacgtcgtccgactaatgctcaggtcctttaccgttcttgatcctcatttggtgaataatattcgtgagaatcccaggtacaccaaaatgtcgcccgaagaagtcctaggaaaattcgtcagcgggcgaatgatgatcaaggaggcaaggtatgtggacgacgccttgaatggaccgatcaacgagccgcaaccttttgctctcaaagccacagggaacaaggaggcgctactcagcaaggtggcgcaaattgaggcggccggtcttaatgaagaagaaatggccctcattatcaagagattcaagacggtgctaaagggtcgcaatggacagccaagcaagaccaagaccaaggggaagcgctcatgcttcaaatgcggtaagcttggtcattttatcgctaactgtcccgataatgaaagtgaccaggaaaaggggaacaaaagagaaaagaagaagcaatacaagaaggcaaagggcgaggcgcatctaggaaaggagtgggactcggattgctcctcctccgactccgacaacgaaggactcgccgccactgccttcaacaaatcggctctcttccccaacgagcgtctcacatgtcttatggcaagggagaagaaggtgagtactcaagactccacttatgcttcttctagtgatagtgagtctagtgatgatgacatagattattcatgcttgttcaagggcttagatagatctaagatagataaaatcaatgaattgattgatgcattgaatgaaaaggataggcttttagaaaagcaggaggatttattgtatgatgaacatgataaatttgtagaggcacaaaaatcatatgctttagaagtaaaaagaaatgaaatgctttcttatgaactatctacttgtcatgaaaccatttctactttacaaggtgttaacaatgatttaaatgctaagttagaagtagcaaataaatctaattcttgtgtagaacatgttaagatttgcactaggtgtaaggatttcgatgttgatgcctgtagtgaacatctagttttaatttccaaattaaataaggaagtggctagtcttaatgcccaacttaagactagcaagaatgaagttgataaaataaaatttgcaagggatgcctatacggttggtagacacccctcaattaaggatggtcttggcttcaagagagaggccaagaacttaacaagccataaggctcccatcttcgtcaaggagaaagggaaggcccctatggcta

SEQ ID NO: 96476 - DNA, 292 bp, Zea mays
  Clone ID: MRT4577_194C.1
cctgctttccttgcttaccgaggctatcattaaacaaatacctcgccctcttgcgcctgggcttaacatggcgggaaaattccctaccttggagacacaccatgaatcccttgattccaatgttaatgagacaaggctacacgtaagccccagctggagaaggtgctttgcatgggtgctgctgttgccaactgcggcatggatgataagcaaatcttccaaaacgtgcaaatgaaagacaactgactcgagacgctcttgaaaaagaatcggcagaatgtgagatgcttgc

SEQ ID NO: 96477 - DNA, 165 bp, Zea mays
  Clone ID: MRT4577_19500C.1
actagaggaattcggcacaaggcaaacaccaaagtcgagccagcgaaccaccccgctcgcacacagaagctctcgaactatcagtgagaacttgacacgggagttccggccagaccaccatggaggcgccgtcggtaccgaggctcatgtatctggactctcccc

SEQ ID NO: 96478 - DNA, 414 bp, Zea mays
  Clone ID: MRT4577_19501C.1
tcttttttttgctatcccaaatagctgccaatacttgcatcacatttaccttaacgataggccaacaggctatgacaaatcttcctgtgaacccatcatgtccagaggctttgtctgacggtagctctataatggcttcaaaggctactttttctgaaatcggtgagtccagatcctccaaatgatgagagggcaggcccaggaacctgatgattaatagtgacagatctatccagtcttggtccctataggctactgttgaaattatacaccagcatggctccgtcagcatgatcagtatatacattatgtacagatgccaagtcagccacaaagttcttcttatttatatatctggcatgcatatggaattgttgggcagttcgaatcaccctatctgagccagctgattct

SEQ ID NO: 96479 - DNA, 317 bp, Zea mays
  unsure (1)..(317): unsure at all n locations
  Clone ID: MRT4577_19503C.1
tctggaatctggaagtcaccggatccacaacaggccccactggccgcgtccagcctccacctgtataggacggcgcctgctagttcagaaggcgcatgggtgtagaggaacgagtcccgtgcggtggncatcctagaattncctaactgggggggccaccccttttnctatcgtgccacgatggattgggagcgacggncctacggnagngtgggctagggatggagactatgggggccggtttcgcgttgggaccatgatgttggtaagtttggttaatgatttatttatntacagaacctaaggtgccgacactt

SEQ ID NO: 96480 - DNA, 409 bp, Zea mays
  Clone ID: MRT4577_19504C.1
aaagctggcacgcctgcgtgtgccggtctgctattacacggacaaagtatatttgaggataatgggatgacgcgtgtgcaaattaggggttctagcacctatccaatttgtacgcagaggtatagagcattgggccgacactgtacaactgcatttatgaatcataatgaggttcgggacacatccataatctatgaggcacaacatactaacttatatttctgagataagacactatgctataacattacccatttccaggctcttatgtttcaccaatatgatagcgtgaacaatctcatcatgtaaataattatgcatgatgatacttacaatataaccaaccatggatatttcgttgatttcattaaatacactaaattctagctctccaatcaagatttaccat

SEQ ID NO: 96481 - DNA, 203 bp, Zea mays
  unsure (1)..(203): unsure at all n locations
  Clone ID: MRT4577_19505C.1
tatattgtagataagatantggcccacacatcctaaccgattacaaggtaccttgagaaattgcaaccaaacaataattgcaactaagcgaaacaactaattggccctgactgctcgtcttcgatcactttttttggnntnagatnnnnnccatncnaaaacttnctnatatccttcttcttgacatggcatttctggttgat

SEQ ID NO: 96482 - DNA, 505 bp, Zea mays
  Clone ID: MRT4577_19506C.1
ccccgggccccgcccacgcgttggacgaaaagccagattctgctatttctcacgctatctcccactcgcggcgccggcgactacaccattgaaacccacaggccacacagcgcaggaacaaaaaacggcggcgcgataagaagggcgccgctgttggcgccgggccggcccgctcccgagcggtgtccttcttcaggtccgccctccggagcaacccctctcacttccccgccgcgccgcgtcggactgcggaccccttgggcttgcgacggtgctgctcagctgctgctgctggggtcggggctcgtgctcgggcgacgcgggatttgagtcgccattattggatttttcttccattgattgcgaacattttgttctggcccggtaagcatctcgcgcgcgctcgacacggaggccggacccaaggaatctcacgaggtagctgtggttgccaggggcatggtacatgtgtacaaccagacggccgcccataggccacatgagc

SEQ ID NO: 96483 - DNA, 504 bp, Zea mays
  Clone ID: MRT4577_19507C.1
gccccacacccacacgccgctcgacctcgtcccgagatctctggcgcctcccatgaatccccagcccctccgcctcggcgcgctcttggcggccctcgtgcttgccgccggcggcgggtggtggggccgtgcggaggcgtcgatccacacctacggccgcgagtcgttccgcgaggtgggcaacgctttcctcctctccggcggcagcgagggcatcgtcgccgacggggccgatctcgccgcccccgactcctccttcatcaagtttgtgaatgttactttctggaggaacgcagaatcggcagaatcacatgcaaaaatggcacatagtacaggcttggtgcaagctattttatttgaagcagctgacagggataacattggaggttctgcctatggtggacagaggtccatttgttgcacccctgaccttgctaaactagagggctgcaaacaaggtgaagtaatcaggaggccatcttctgatgatccagattggcctgt

SEQ ID NO: 96484 - DNA, 101 bp, Zea mays
  Clone ID: MRT4577_19508C.1
cgcaaggacattgcagagagttagttgtgcgaccgaagatgtggggacacatcggcaaaatacctatcatcggcgacctgacgggtagcaacaagaatgcg

SEQ ID NO: 96485 - DNA, 500 bp, Zea mays
  Clone ID: MRT4577_19509C.1
tcgtggccgggcgggacaacctttccccaagtagcccggcctgggactccagtatctcgcgccctagtcgcagctggtttcgcactgaaccaccgacagacactgcggcggccttttcctcctccgccgggggcgccgccggttcccctcctgccaagccgcccgccgttctccaccagcttcacgccgggcagccgggtgtcggcgaggaaccccctgatgagcaggaacctggagaggaatggcaggatcacctgcatgacgcctccccgggactggctgcgcacggacctgagcgccatcggcttcgggctcatcgcctggctggggccgcccagcgtcccgccccctcaacgcaccaacctcacgccgctcttcttccccagcaccgcccagccgctgccccatttccccacgcccccgcccgcccacccccccccccccgctgccgccaaccgccgccgccccccccgaccgcccccccgcgccccccccccccc

SEQ ID NO: 96486 - DNA, 233 bp, Zea mays
  unsure (1)..(233): unsure at all n locations
  Clone ID: MRT4577_1950C.1
tgcttatttatggatggncnacaggaagcgtgtgttgttgaagttgcaggggggccgcgctataacggcaaacacgggccgagaaagagcgaagccaacgagcggcgtatttagtgcaccggatgtggcaaggggcaggggacgaacaaacagaacacatgcttcacctgcgaagctatgctgccaacaccgatgtccatttacacgccctgggctcacaggtatagcagggg

SEQ ID NO: 96487 - DNA, 441 bp, Zea mays
  Clone ID: MRT4577_19510C.1
gggaggggaaaccaaaccaaattaatagcccaatctttttttttaaaaaatgggggcaaggggggggcaaaaaaaaaacaaatcaacccccccgaaagggggaagggtttattcaagctttaacacttaaaaaaggaatttgcaaacccattttaaaattttttgacccaaaaaaaatggggggatgggaaaaccccaaaaacattgatggggaaaaccttagggtgactattctttttgggcaaaatggtttttggaaaatataaaaaaaaacccttctggaggtgatcgaattttaactccaaaaaccctcatttaagtgaccaaattttttgtgaacctttttggtggagggaaattggcaaacttccaaaaaaaagcccacttggcatgtccggcctttaaaaagggggcaagagggttaaaaaagctccgggtttt

SEQ ID NO: 96488 - DNA, 152 bp, Zea mays
  Clone ID: MRT4577_19511C.1
cctctaaagttctcgaacagctggatcttaaccttcaacagcggcccatataaagcattactttaaaatcctcttcctatggcggttatcttacgattctgaaccctgtgtttgaggatcttctataccttgtgataaagaaaaccctgacc

SEQ ID NO: 96489 - DNA, 284 bp, Zea mays
  Clone ID: MRT4577_19512C.1
aggcattgtggatttttgcagggcacggcgtaacacacacaggaggtttacatgcgaagggttattagatccttccggtcgaggccaattatcagctgaccctccgatgagcacattcgcagcgggccccaaaccgtgtggtgctgagggactcctatctatccctgtgcatacacgaaccataggccacaaaggtacacagaggtaatgtctgtccctaaacatttatagattgcccaaaccagcctgaattgatgcgcttattaagagaacccttcacggga

SEQ ID NO: 96490 - DNA, 612 bp, Zea mays
  unsure (1)..(612): unsure at all n locations
  Clone ID: MRT4577_19513C.1
ccggccgggnaatatatttcaaaaaaaaaaaaaaaaaaaaagaaaaaaaaaaaaaaaaaagcggccctcgaaaataccagattttgaataatattcccgcgggtcccatgcggggtagaccccccgaggtcaatttatgtcccctgcgggtcaaagcaaagcggtgaccatgagcgcgaaagttagatacagggccgtgaaaaggccaaccagtaggaccgcccgggggagccacctggaggtgaaccccccgggcgccctgaaggggttgtaggctgaaaacctgtccaccctcatgttttaatgaaccggccagggctcggggatgggcttcatgaagatgaccggcggttgccctaccaccccggcggacttgatgcggtcggcggtggggcagccgttagcgctatccgtggagtcgacggtgggaacaaacatctccggggaggcacgggaacccggccgagacattctgcgacttagagggcggcaaaatcaccctgacccgaggaatcccgcactggtgggggcatttgatggggtccaccgcggtgagcttcatgctccgattctcgacggagggaaaggcgacggaacccttcgggattataa

SEQ ID NO: 96491 - DNA, 138 bp, Zea mays
  Clone ID: MRT4577_19514C.1
agaacgagcaaaaagaacgaggaggagaagcggcgcgtcctggacaagcggaccccggctcaagcggccttcgagaaaatgcaggagaagcggcaaatggaaaggatcctaaagacggcatccaaaacccacaagcag

SEQ ID NO: 96492 - DNA, 423 bp, Zea mays
  unsure (1)..(423): unsure at all n locations
  Clone ID: MRT4577_19515C.1
gtgggtgtggggggggggtttttattttttttttttttttttttttttttttttttttttttttttttttttttttttttttttttttttttttttgagaaaaaaacaggggaattcttacttaaaaggaaatttcaggggatttaaaacttttggggggagagaggggccgggaaaaaaaaatactttataatggggcccacttgaaatggggggaagaaaaccccaccgactgagctagggggattcctggtcccccccatttgaaaggggaaaaataactttcccggggggtaaacttaaaaaaacaaaattttcaggggggggattgggggaagttccaatttatatgcaaaaatgtaaaaaaaaaaaaacctaaaaatataaagggttaaggtttnttcccaaaggaggggccttttg

SEQ ID NO: 96493 - DNA, 712 bp, Zea mays
  Clone ID: MRT4577_19516C.1
acttttgtgcaattttcagccatgggccgccacaaacggagtcgagctgccagaacagcaagcgcaaccagttcagaacgtagaagagcaccatgcagacgagcaaaacgaagacgacgatattgacgacttgttcgacgatgacgatgagattgtgccagaattaatttcaggcgaccatggcgactttacaaaggcctacaatcgccagcgaaaactgaatgatgccaacataccagacgaccacaaacccaagacgaaccctcaaaagccgtcagcaaatacaaacgcttccatcgatgatcaggttgcctcactcgcgaagcatgcaagcaaaatccggcttactgggcgaatgacgggagcatctggtggcaatgcaagggacaaggataaggcagatcgcgccacgactgagcaggtgttggatcgaaggacgcaaatgatcctgttgcaactgatcaaccgcggcgtcatttccgaacttcacggtgtcatttccaccggcaaagaagcaaacgtctaccatgccatgtcagagccgtcggaggatggcgcgccccctgtccatcgcgctgtaaaggtctataagacctccattcttgtcttcaaggatcgcgcaaagtatgtcgagggtgagtttaggttcagacaaggatacaataagagcaacaaccgcgccatggtgagaatgtgggcagacaaggagcgc

SEQ ID NO: 96494 - DNA, 2257 bp, Zea mays
  Clone ID: MRT4577_19517C.1
cgcagcccaagcagcaggcgcccagcagcggcattgcaggttgcagcaaagagagagagagagagagagagagagagctcacgagcctcccggcctcccctacccccctcatgcgccgcaagaagcacttggaccggggtgggggcggcggcggaggtggcacggagctcttcatctgcttcacctcgcgttcctccgctgcctcagccatttccgtcgccggcggcagcgcgcactcttccctccgcccctccagctcctccaagctcctcagccccggccgcggcagtgccagcgcaagcggagctgaggcagtgccggccccgcctctgcacccctcactcagccgccgcctccgcaacagcggcagcctcaagggcggccagtccccaatgttcccccccagggcaagaaccagggctgggtgcaccagatcccggtcaacatctgcgaggcactcaagacatttggctcctgcgggggccgctctctctgctcatcgtctcggcctggcgaagccggcgagtggggtgcgctggcagcacaaattgttcggaaagatgccgagttggaggttcctttgggagaagttacagagatggaaaaccaagggccggacatggtggagttggtggtcagtgaggaagaagttccaggacatgagaaagttgacgaagagatgatggggaggagatcaatcaacagctattctccctcggcagctctgaaagaggacaccgccaaattgcgagggttgaataggaggaagtgtgttagcactaggggcagggggtcgtcagccggtgatagggttagcagccgcctccccctcagggatgagctggagctaatgcgctgccggtcagacccagttcgcatggctgctcttgccacccgcttctgcgggtctccagctgcagctaccgtggagcaggtggataatgaggtgtctgggtgcctcaacgacaatgaggaagaggggaaagaggaagctggggctgaggctgagccagtggagtgcaaagaagaagctcacggttcagttgtttctgtcacagacttgaaatgtaaagagtgtggttgcgatgaaaatggtggcgctgaaacagaggagatagatcaagcaaaagcagaagctgaagagcgttctaaatgtggagatctagtggaagaaaaggagggtgcatcatgcagagtaggggtggagggagcacaaattgttcggaaagatgccgagttggaggttcctttgggagaagttacagagatggaaaaccaagggccggacatggtggagttggtggtcagtgaggaagaagttccaggacatgagaaagttgacgaaaagatgatggggaggagatcaatcaacagctattctccctcggcagctctgaaagaggaccgcaccaaattgcgacggtggagtagcaggaggtgtgttagcactagtagcagggcctcatcgtccagtgatagggttggcaggcggcacagcttctcggctgagatggaggcacggcgttctagcttctcgagcttgaaggattcaaggagagctagtttcaccattgatagagatggccggaggtggagcttctcgattgaacaggagcatctcgttgcggagcctaaggtgctgatggcatccagaaaggggaagaagactaagtcttctgagccagagtcagagaaagattgtgatgttgttgctccaaacagtgtagaggaaggacaagaatcctgtgatgatggaaaggaagaagaaactaccgagaatgcagaggaagaaggaaaaacacattatgcggaaatcaaccaggaagtagagaaagtagagtgtactcctcctacctgtgtttccctctctctctctctcttttgtctttgtctctctaaggtgtgtacttctattttcatttaattttgttgcatttggtacgtttagaggaaggacaagaatcctgtgatgatggaaaggaagaagaaactaccgagaatgcagagggagaaggaaaaacacattatgcggaaatcaaccaggaagtagagaaagtagaaactagagcagaagagtgtgaaggtggggccggaccagtgatacagaggaggaagaagagtggcgagttaccagattgcctcatgttgatgatgtatgagccaaagctctccatggaggtctccaaggggacatgggtctgcagcactgacttcgtccattggaagcttaccagggcaagaataactacccccacag

SEQ ID NO: 96495 - DNA, 979 bp, Zea mays
  Clone ID: MRT4577_19518C.1
aagcttaagcatggcacaactccattaaatattacacatctttacctacacatcaaaaggggcagaatttaagctggtgttatccagagccacatattggacaagattctgaggctctgtctagtggctgcatgtgtctagatgttacaaagcatcacataacagcacaaatcaatatcaaagaacctatctcatatagtaacttaacaacatgctattatttggtgctgtccacacatcacataacagcacaaagcacaatcgaagaaccactcgctactattgcacaacaggctcacaaactcaatcactcactacctaactacacatcacattccagcagctgtctggcagggatcagaacccgactccagttgcgttcagtggcagatggcggtccttccagaagcaagcatcgggtgccaaccgcgctgatgatcgcatcggctctgacttgcaccttttcagaacgaacggggcgtaggctgccgcattggtgaccggcggcaactccagcttcggcttctgttctgtggtagctggtttgagtgccagtgtcttctggacaactggacatggcatgggcacagctgagttcaccgtcgatggatctttgctctcttgtacatctttcacaacggtgctgccttcagcattctccttttttacagtctccactgttccagtagcaaaagccttctgttgcctgtggttgtagttattcttgccctggtaagacttccaatggacgaagtcagtgctgcagacccatgtctccttggagacctccatggagagctttggctcatacatcatcaacatgaggcaatctggtaactcgccactcttcttcctcctctgtatcactggtccggccccaccttcacactcttctgctctagtttctactttctctacttcttggttgatttccgaataatgtgtttttccttctccctctgcattctcggtagtttct

SEQ ID NO: 96496 - DNA, 1364 bp, Zea mays
  Clone ID: MRT4577_19519C.1
aattcggcacgaggcaggttgcagcaaagagagagagagagagagagagagagagctcacgagcctcccggcctcccctacccccctcatgcgccgcaagaagcacttggaccggggtgggggcggcggcggaggtggcacggagctcttcatctgcttcacctcgcgttcctccgctgcctcagccatttccgtcgccggcggcagcgcgcactcttccctccgcccctccagctcctccaagctcctcagccccggccgcggcagtgccagcgcaagcggagctgaggcagtgccggccccgcctctgcacccctcactcagccgccgcctccgcaacagcggcagcctcaagggcggccagtccccaatgttcccctccgggtccaccggcggtggccgccgcggccggggcggattcgaacctgccgaaccctcgtctcccaaggtcacctgcatcggccaggtccgcgtcaagggcggtaagcgcaagcccaagcacgcctccgccgccgcgctgcgctcccgctccaggcgcggcggaggcgggagcgcagaggccagcttccgccgcgctggcgacgaccgggaaggaccccagggcaagaaccagggctgggtgcaccagatcccggtcaacatctgcgaggcactcaagacatttggctcctgcgggggccgctctctctgctcatcgtctcggcctggcgaagccggcgagtggggtgcgctgtccaccgacgcacaccgtggtaagaagcgggggcagcgcgctcctgctgggggtagctggctgtgcggtgctgctgtggcgaggtgcctcctggcgatccaggaggaggaggacgacgacgaggtcggcaagggagccgcggttgtgccggcagaagagatgagggcatcggacgggtgggatgtcgaggaggagaagactgtgatggtaggggaagtggaggtggagaagaaagatgagatcttggtggtggggaaggaagaagaggggagggtgagcgtctgcatccccccgaggaatgcactgctgctaatgcgctgccggtcagacccagttcgcatggctgctcttgccacccgcttctgggggtctccagctgcagctaccgtggagcaggtggacaatgaggtggctgggtgcctcaacgacaatgaggaagaagaagagaaggaagaggaggctgaggctgagccactggagtgcaaagatggagctcgctgttcagctgtttctgtcaaagacttgaaatgtgaagagtgtggttctgatgaaaatgatggcgctgaagcaggggagataaatcaagaaaaggcagaagctgaagagagttctaaatgtggagatctagtgg

SEQ ID NO: 96497 - DNA, 2013 bp, Zea mays
  Clone ID: MRT4577_1951C.1
atggatcctaaggggaagggaattgtgatcaacgacaaggagaaggagtccttcgtcaacgagccaagggatgacaagtccaatgactcgggctcgggccacaagcgaaaagatgggaagaagaagaagacaagacgcatcaaggagatcgtctactacgacagcgatgagtcctcttcttcccaaaaggacgacgaccacgactataaaaagacgatatgggacaccctcaagatctctcacgaggggaacgacatcaccatgctcaccaagatggagttggtggagggcgagcttggacgattcgccatgataaggggagaggagccaactcaaacctacaaccggctcaagacccttatcaacaaaataaggagctacggaagcacgcgttggacggatcacgacgtcgtccgcctaatgctcaggtcctttaccgttcttgatcctcatctcgtgaacaatattcgtgagaatcccaggtacacgatgatgacgcccgaggaagtgcttggaaaattcgtgagcgggcggatgatgatcaaggaggcaagatacgttgacgacgcattgaacggtccactccacgagcctcaacccattgctctaaaggcaacgaggagcaaggagtcgcttcctagcaaggtggcgcaaattgaggcggccggtcttaatgaagaagaaatggccctcattatcaagagattcaagacggtgctaaagggtcgcaatggacagccgagcaagactaagaccaaggggaagcgatcatgcttcaaatgcggtaagcttggtcattttattgctaactgtcccgataatgatagtgaccaggaaaagggaaacaagagggaaaagaagaagcattacaagaaggcaaagggcgaggcgcatctaggcaaggagtgggactcggattgctcctcgtccgactccgacaatgaaggactcgccgccaccgccttcaacaaatcggctctcttccccaacgagcatcacacttgcctcatggcaagggaaaagaaggtttatgcatccgggggttcaagctggattatcgacaacggatgcacaaaccatatgacgggggagaagaaaatgttcacctcctacgtcaagaataaagattcccaagattcaatcatattcggtgatgggaatcaaggcaaggaaaagtccgaaacccaagggactctcaaacgcttcctcaggagagctcaaaatgagtttgagctcaaagtgaagaagataaggagcgacaacggatccgagttcaagaaccttcaagtggaggagttccttgaagaagaggggatcaagcacgagttctccgctccctacacaccacaacaaaatggtgtggtagagaggaagaacaggacgctcatcgatatggcaaggacgatgctaggagagttcaagacccccgaatgcttttggacggaagccgttaacactgcttgccacgccatcaacagggtctaccttcatcgcctcctcaagaagacgtcgtatgagctactaaccggtaacaaacccaatatgaagaagatgttccgacggccgctatacgaaccatggcgattggtgatgtgcgaccacaggaacaagaagagcaagatcaaccttcttcctcaactatggtgcatcccccaaccgaagatgacgaacaggttgttccaaatggatgtgaagagcgctttcctcaacgggccaatcaaggaggaggtgtacgtggagcaaccccctggcttcgaggatgaacggtaccccgaccattcttgtgaagagtttagcagggtgatgacgcagaaattcgagatgtcgatgatgggcgagttgaactacttccttgggttccaagtgaagcaactcaaggacggcaccttcatctcccaaacgaagtacacgcaagatctgctaaagcagtttgggatgaaggacgccaagcccgcaaagactccgatggggaccgacggacacaccgacctcaacaaaggagattttttgtga

SEQ ID NO: 96498 - DNA, 598 bp, Zea mays
  Clone ID: MRT4577_19520C.1
tcggtctttctagcttctcgagcttgaaggattcaaggagagctagtttcaccattgatagagatggccggaggtggagcttctcaattgaacaggagcatctcgttgcggagcctaaggtgctgatggcatccagaaaggggaagaagacgtcttctgagccagagtcagagaaagattgtgatgttgttgctccaaacagtgtagaggaaggacaagaatcctgtgatgatggaaaggaagaagaaactaccgagaatgcagaggaagaaggaaaaacacattatgcggaaatcaaccaggaagtagagaaagtagaaactagagcagaagagtgtgaaagtggggccggaccagtgatacagaggaggaagaagagtggcgaaataccagattgcctcatgttgatgatgtatgagccgaagctctcatgggaggtctcaggagacatgggtctgcagtactgacttcgtgcattggaagtcttaccgggaaagaataactacaaccacaggcacagagggctctgctactgtacagtggggactgtaaaatagagaatgctgaagcacaccgtgtgaagatgtacagagagcaa

SEQ ID NO: 96499 - DNA, 682 bp, Zea mays
  Clone ID: MRT4577_19521C.1
gcgtatacactcctatagggcgattgggttcctcgaggccggccggggggacacaatttaagaagagccatatttgaaacagttaagaattcatatataagagtgcatatatatatataatcctgccaagacaaaggtaatggagtcgtcacgcatgttccagccggccatcatcctgcttctcctgctcattgtgaccaccgatgtggcgcaggcggcgagggaatgcgagaaggacagcgagcgattccttggggcatgcatggcgtcggacaactgcgccaacgtgtgccgcggtgagggcttctccggcggcaggtgcagcaccttccgccgccgctgcatctgcactaagccgtgctaaattaacctactcccggcagttcgatggtggacgtttattctatttattggcttacttgattttttcccccctaacaataagaaaacgcacgtgctggcatgtacgttgtgttgtatatgcttttcttgctggcttcatttgctgattactgatgagttgtaaggtccctgcacgatccatttcacatggatatgatgcttaattgtattcctgcttatatggtatgtatatttaattaattaatgatggaccatcgagtttattttgaaaaaaaaaaaaaaaaaaaaaaaaaaaaactaaaaaaaaaaacggccatac

SEQ ID NO: 96500 - DNA, 376 bp, Zea mays
  Clone ID: MRT4577_19522C.1
gagggcctcattagtacgagaggaccggtacaagcaggtctcaaatgatgcgacggtggtagtgacctagcgagagccgggactgcacacagcggcttatacttaatcgctaacacttggcaccgtagctgcatcactagagtggtatctcttgaataggctactagctcataacggggccatttattcaccaggtatggatggctaacaagcgattcacaaagcacattttttaccaagggtctggtatctcacttgtacaccaggggcctgagcatatgcatctatccacgatgatgattgttctaccctaatgcatgatgcagtccaaacaggatgtgctcataccatacagacactgtcactgttcaatgtt

SEQ ID NO: 96501 - DNA, 381 bp, Zea mays
  unsure (1)..(381): unsure at all n locations
  Clone ID: MRT4577_19523C.1
tttcttatttctgggaagcccanacgtcggncaaaaanctttattgttggactatgnctcattntggttctatttgaggaccccccctctggtgggttgttggttgagccctgctgggtttgtccttgcccgttggtttgttggctggggttggtgcngttgtttgggggtgcctgcgtttggcgctccgtgctggtggaacggcnncctctgtggttgtgtcttgatggttgctgggctcccacctgcttgctggctgtttggttgttgttgttgctgctgtcctttgccggtgagttctttgctgctcgttggttgtttggttgctgttgctgtgggtcggccgccggttgctgtctgtttggtgggtgttgttgttgc

SEQ ID NO: 96502 - DNA, 482 bp, Zea mays
  Clone ID: MRT4577_19524C.1
cctgcgaaaaagggagaaaaaaaaaaaaaaattttcccaaaaaaaaaaaaaaaaaaagcccaaaaaaaaaaaaaaaaaaaaaaaaaaaaaaaaaaacccccaaatgaagaaaaaaaaaaaacaacaaaataatcaacaccgaccaccacgaggggggcccccgcaactaattcccctaataacgagtcttatgacgcccgcccgctggccgttttttaacaacgtcattgctgaaaaaacgctgggggcaccctacttactcttgtggcagaacatccccctttcacctggtggaataataaagaggacgcccacagacaatccttcttaacaaaatgcgcgtatgcaggatgaagaaagccagtagcagccctattattttgccattccccgccgtaaaattgttgccccagcccatttttttttccaccagtaggccaaaggcaaaaaccccccttacgccgtggtgaaaacgacttttt

SEQ ID NO: 96503 - DNA, 151 bp, Zea mays
  Clone ID: MRT4577_19525C.1
acctgacatgggggttcttttttggacatgggggtttacatctacaaacagtttgcacaaattggagactacacatgcaacccacaaatataggggaagaaaaatatactatatagatctacatacacccagcaggtaccagagtggctca

SEQ ID NO: 96504 - DNA, 140 bp, Zea mays
  Clone ID: MRT4577_19526C.1
tcggtccccaagcaggctaatggcggcgatgttgctgctgccgaactcgatgatgtatgggaggatgttttatggtttcctcggcacgcagttaccttagacagagaatgtatccataggcagtgtcagtttcataagat

SEQ ID NO: 96505 - DNA, 459 bp, Zea mays
  Clone ID: MRT4577_19527C.1
ggggggccttaaacgggtttacaaaacccagggaaaaagggcaagcgtgcataaattttttaccaaccggaaacccccccaacaggggaaattttccttccccgggggcattaaaaaataaatcgatttaaatttctttcccccaaggaggccacttccaaaagtcaactggcaaattttttttaaagggactaacctcccggaaaaaatttaaatataaaaaaccccccttttaaaaaaacttttattcggggggccaaagttttaaggagtcccataaaccaaaactgcctttttggagggggggcccccttaaaagttgtgcactttggcccaaaaaaattgcccaagggagccttcccccgaactttggttttttggagggggggccctccttaaaaatggtgggccccgggccaaccaaatttccaaaggtttttttttttggggccccccctt

SEQ ID NO: 96506 - DNA, 196 bp, Zea mays
  Clone ID: MRT4577_19528C.1
acttggcgggctaaaggcgaaaccgacgtgctcccggggggggcacgacagctgtgtggagcgagatctacatgcaatggcgaggaacatgatgatggtgcttgtcggacacattaacgcggggcccatgtttgaatacatcaacatcaactgcaataaacaccatatggtgagatttctgcaccatggccgattt

SEQ ID NO: 96507 - DNA, 232 bp, Zea mays
  Clone ID: MRT4577_19529C.1
tttatatttttggccttgcaaaccccgaggatgggaatgggaaaacctaatggttaaaggatcgcacatctgtttcatactatggagtggatggggggatataattacgaaacctctttagcccaccaaccaaaaaatatggaacactttgaagccacgtgataaacaaggacttacaagggtaaaaaacgctacataagctaaagggccacctttgtgatgtttggaaaca

SEQ ID NO: 96508 - DNA, 3885 bp, Zea mays
  Clone ID: MRT4577_1952C.1
atggatcctaagggaaaggggatggtgatcaacaacaaagagaagaagagggaaaagaagaaggcttacaagaaggctaagggcgaggcacaccttggaaaggagtgggactcagactgttcatcgtccgactccgacaacgaaggactcgcagcctcggccttcaacaaatcgtccctcttccccaatgagcatcacacctgcctcatggcaaaggagaagaaggtaaacactcgaaagtctacttatgcttctagtgatgatgaatctagcgatgatgaaatagactatgctagtttgttcaagggcttagatagaactaagattgataagatcaatgagttgattgatgccttgaatgataagaatagattattagaaaagcaagaggatcttttgtatgaagaacatgataaatttgtaagtgcacaaaattctcttgctttagaagttaaaagaaatgaaatgctttcatgtgaattgtctacatgccatgaatctatttctagcttaaagagtatcaatgatgacttgaatgctaagttagaaatagctagtaaatcaacctcttgtgtagaacatgttatgatttgcaataggtgcaaagattttaatattgatgcttgtagtgaacacctagtttgcatttctaaactaaatgatgaagtggctagtcctaatgctcaacttaagactagcaaaaatgaatttgataaattaaaatttgcaagggatgcctacacgattggtagacacccctcaattaaggatgggcttggcttcaagagggaagccaagaacttaacaagtcataaggctcccatctccgccaaggagaaagggaaggcccctatggctaatagtgctcaaaagaaccatgctttcatataccatgataggagatattctaggaatgttcattatgatagaagttacaatgatgttgtttcacatgccatgattgcttcaagttcttctattatgcatgatagaagtttggctaggaaaaatgtcattcatcatgtacctaggaaaacaagtaatgaaccttctacaatttatcatgcttgcaatgcttcctttgctatttgtagaaaggacaagaaagtggttgctagaaaattaggggcaaaatgcaagggagataaaacttgcatttgggtccctaaggctattgttactaaccttgtaggacccaacaagagttgggtttatgcatctgggggatcaagctggattatcgacaacggatgcacaaaccacatgacgggggagaagaagatgttcacctcctacgtcaagaacaaagattcccaagattcaatcatattcggcgatgggaaccaaggcaaggttaaaggactaggaaaaatagcaatttcatccgagcattccatttctaatgtgtttttagtagaatcgctcggatataacttgttgtctgttagtcaactttgtaatatgggatataattgcttattcacaaatgtagatgtgtcggtctttagtagaagtgatggttcactagcttttaagggtgtactagacggtaaactttatttagttgattttgcaaaagaggaggccggtctagatgcatgcttaattgctaagactagcatgggctggttgtggcatcgccgtttagcacatgtggggatgaagaaccttcacaaacttctaaagggtgaacatgtgttaggtctaacaaatgtgactttcgaaaaagatagaccttgtgcagcttgtcaagtaggtaaacaagtgggaagctctcatcatatcaaaaatgtgatgaccacatcaagacctctggagttacttcatatggacctcttcggacccgtcgcctacctaagcataggaggaagtaagtatggtcttgttaaagttgatgatttttcccgcttcacttgggtattctttttgcaggataaatctgaaacccaagggaccctcgagcgcttcctaaagagagctcaaaatgagtttgagctcaaggtgaagaagataaggagcgacaacgggtccgagttcaagaaccttcaagtggaggagtatcttgaggaggaaggaatcaagcacgagttctccgctccctacacaccacagcaaaatggtgtagtagagaggaagaacaggactctcattgacatggcaaggacgatgcttggagagttcaagacccccgagtggttttggtcggaagccgtgaacacggcttgccacgccataaaccgggtctaccttcatcgcctcctcaagaagacttcgtatgagtttctaaccggtaacaaacccaatgtttcatactttcgtgtatttgggagtaaatgctacattctagtgaagaaaggtaggaattctaaatttgctcccaaagcagtagaagggtttttgttaggctatgactcaaatacaaaggcgtatagggtcttcaacaaatcattgggtttggttgaagtctctagcgacattgtatttgatgagactaatggctctccaagagagcaagttgttgatcttgatgatgtagatgaagaagacgttccaacggccgcaattcgcaccatggcgattggagatgtgcgaccacaggaacaccaagagcaagatcaaccttcttcttcaacaatggtgcaacccccaacacaaagtgatgaacaggtccatcaagaagaggcatgtgatcaagggagagcacaagatgatcatgttatggaggaagaagcacctcaagcccctccgactcaagttcgagcgacgattcaaaggaatcatcccgtcgatcaaatattgggtgatataagaaagggagtaactactcgctctagactagttaatttttgggagcattactcttttgtctcttctattgagcctttcagggtagaagaggccttgctagatccggactgggtgttggccatgcaggaagagctcaacaatttcaagagaaatgaagtttggacactggtgccacgtcccaagcaaaacgttgtgggaaccaagtgggtgttccgcaacaaacaagacgagcacggagtggtgttccaaatggatgtgaagagcgctttcctcaacgggccaataaaggaggaggtgtacgtagagcaaccccctggctttgaggatgaacggtaccccgaccatgtgtgtaagctctctaaggcgctctatggacttaagcaagccccaagagcatggtatgaatgccttagagactttctaattgctaattctttcaaggttgggaaagccgatccaactttattcactaagacttgtgacggtgacttattcgtgtgccaaatttatgtcgatgacataatatttggctctactaaccaaaagtcttgtgaagagtttagcagggtgatgactcaaaaatttgagatgatgggcgagttgaactacttcctcgggtttcaagtgaagcaactcaaggtcggcaccttcatctcccaaatgaagtacacgcaagacttgctaaagcggtttgggatgaaggacgccaagcccgcaaagactccaatggtaaccgacggacatgttgacctcaacaaaggaggtaagtccgttgatcaaaaagcataccagtctatgatagggtctttactttatttatgtgctagtagaccggatataatgctaagcgtatgcatgtgtgctagatttcaatccgatccaagggagtgccacttagtggctgttaagcgaattctgagatatttagtcgctacgccttgctttgggatctggtatccaaaggggtctacctttgacttgattggatattcagactccgactatgctggatgtaaggtcgataggaagagtacatcggggacgtgccaattcttaggaaggtccctggtgtcgtga

SEQ ID NO: 96509 - DNA, 253 bp, Zea mays
  Clone ID: MRT4577_19530C.1
attcggttcgtggtgtatttcactctgctgctttttttttatacatggttcaatgccacatgcaggggggatttcttttaccgtggccgtgggcgaaagaaaagggtggaataatgaccaacaagctcggagaccaaatccactagacaaatgatgagcacaaacaaagtgaagtggactggctcactgctcatcctcatccttggctcaagctatgcgagtgctgagcctcagatgaatacaaagtaatttc

SEQ ID NO: 96510 - DNA, 406 bp, Zea mays
  Clone ID: MRT4577_19531C.1
gcgggacgccggtccggattaatattgacggctcgacgcgctcatttgtcggtggccgctcttttttttttttttgagaaccacaaccgctatgcgacttggtagctacttgaggcaccttgatgcaatcaacggaatatgcgggactggctccttacctcgggtcctaggacatcccaaatactaaatgacaactgagaatgtgttaatcaacgcatgactatgggagtgcttgcaacaaataacactgcttgaccaatatgcaccttacaaaaatagacgcctaaacacacctgataaactagatggactcctacatcctgaactgaattatcacccggagcttctgtcttgctgataacatatcatgtcatgccaaccacggtcaagaatgagtgacgtatca

SEQ ID NO: 96511 - DNA, 3183 bp, Zea mays
  Clone ID: MRT4577_19532C.1
aattcggcacgaggccccttcctgtccctccctggcgagcctccaaatcctcctgcccccaaccgatcccagagttcgcggtcccccccatccatcccactcccaccatcatcacccatccgccatcgcccggccccgcctctctctctctcctccgtccccctcgtcgtcctctgctttttattactcttctccactcattagcttttggttgttgttggttggttcccttcttgcgagttgcgagaacccacccccaaggcgacgacacacacacagagagaggcaagggacggagagggcgaggacgccagccgcagtgggcgcgccacaagcggagcggggggcgcacgcacgcacgcgactctcccgagatccaagacccgcgagatccgcttgccctcgtcgccagccagagcccggagcggatacgtgtccatggcggccggagaggagcaagaagagttctttgactccagggaggtgctgtcgccggcgtccgtctcgtcgtcgccgtcgagttccggtcgccacgacgacggcgggtggctcttcgcccagcagctgctcgaggtctgggtccgggacccgggcagcgtccacgagcgccgccagaggttcgtcaagtccctgggcctcatggatccgagcccccacggcgcgcggcccggcgaggagacgtgctcgaggcctgaggccagagaagaaatcctaccggcaagccccagcaccgagctgttctcggccgtccctacctttgcgagcatgggaggggagccgacagcctccggcggcgacggcgctggcacggaagaggagccggagtgcgtgttcaagaacctggacgatggcacagtgttcgtggtcgacgagatgggaaaggacgggagcttccggagcctcagggagaggctctccaaccggacagtaacagctgcagaattcgagcaggcctttggctcatcacctttcatccgtgagctgatgaggagggtggacgattccgacgaaccctccaccccggagaagactgtgctgaggagaaggaggcggcggcggattgggtggctacgaaggctgggcatcggtgtctgtgttgtcgacgccgacgcagaggaggaagacgatgaggtcaattcgacatcatccacttcttcccggggttgctctaggaaggttgattgggtcaaggtgagaccttacaagaagcggtcaaaggaattatctgcagtgtacaagggccaagtcatcaaggcacatgaaggtgctattgtgaccatgaagttcagctccgatggccagttgctggctactggaggtgaggatggggttgtccgcgtttggcgggtggtggaaggcaagaggcctgatgaccgtcattttgttgacgatgatccttcatgtgtgttcttcactgtcaatgaaaattctgaattggctcccatcaattcctgcgaagggggtaagggcaagcacaataacagctcaaaggtggctactgatccagcttgtgttgtgattcctcaccagacctttgcgctatccgaggaccctgtgcatgaattccgtgggcaccatgatgccatcttggatctttcatggtcaaaaaatagggaattgctttctgcgtccaaggacaaaactgttcgattatggaaagttgggtgcgatagctgcctgaaggttttctcccataataactatgtgacatgtgtacagtttaaacctaccaatgacaattatttcatcagtggttgtattgacgggatggtacgtatttgggatgttcctagatgcctagttgtggactgggctgacagcaaagagataattacagcagtttgttaccgtcctgatggaaagggtgcagtggttgggacaataacaggaaactgccattgctatgaagcatcagaaaaccatctagcactggagtcacaagtccccctgtatggcagaaagaaatctccacttaaaagaatagttggattccagtattgcccatctgatccaaagaaactgatggtgacatctggtgactcacaagttcgcattctcgatggggctcatgtcgtttccagctacaaaggattacgaagtccaagtcaagtccctgcagcatttacaccagatggagatcacattattgctgctagcgatgactctagtatctatatgtggaattatgcaaaccaacttgccccagtcacgagccgtgtgaaaaccgtatggtcatatgagcacttcttctgcaatgacgtgtccgttgcaataccatggaacgccttgcctgcaaggagttctatttctcttgcttgcaacatccccctttcacggcaagaggtctctgaggagctccacaactcgcaagagtctgtgtcatgctgcagtgctgaaggctcacctaaagctgatagctcgtgccggctgccatccggcaatttcactcttagcaatgcattctccgcggagttggcaccaagggggaaagcaacatggccagaagagcagctgccatcatctgattcagtgacaccgtcgtcgtcgtctgctttgcgtaaatctcagtataagttcctgaagacttcttgccagagtgccgccacgcatgcctggggccaggtcatagtcactgcaggttgggatggaaacatcaggtcgttccagaactatggtttacctatgcaagtgtgacacatggtacaagacatgcatctctttgctaattgcttggtcagtggggtatcccaggaatggcagacgagaagtcgcttgcggaactttttacgcctccaggaacttggtttgctgaagggcgacgccccgtccagattatggttacagtacaaagagtttacatgggtgtgtggctgtgctgtgttgctcgtggaccagaagttgtatgtagtccagtggtcctgcgagatctcggcggcacattgcgagagaagggccggggaagatggatcccctcgcagacccaactaactttgcgcgaagagtggttgtatggctgcaatttcattgcattgctgtttgctgcttttctttgttttggcctccctttggggggatctgcagtaaatatatatagagtggatggatgaacatattttgtttgctcgattgagttcccctcgccctgatgcaaggcgagcgggggaggtagttgaaaccaccaaa

SEQ ID NO: 96512 - DNA, 260 bp, Zea mays
  Clone ID: MRT4577_19533C.1
agaatattaattaggtcgggaagtgatcaatctttaacagcccgatacaacgtaacacaaactattcaaaaaaatattagtacacaatattgcttaggaaaaaatcccataaacaagtaataaagaaaacatgtgtatagcaacaatattataccatgaaaagaacaatcctacattgacaacctttatattcttttgtcactttatctctagaaaaccatattgattttatgatcaagtcggtccttaaccggttccat

SEQ ID NO: 96513 - DNA, 387 bp, Zea mays
  unsure (1)..(387): unsure at all n locations
  Clone ID: MRT4577_19534C.1
atttcttaggtttcggcgcctcagtgggacgaaactcactggctccctctcctcccccagtccgcggcgctcgcttccgttcacctcggccccgcggcgaccccttcgaggggcgacgaggacganntgctgcggcttcttcccgctttcctccccctccgcctgcaggagggggttttgatctaaaaagaatctctttggagtgggtcattgacatttcaacaagctggtttcaattgcagcaacaaatcttgatgggaacttggctggccaaaaggttggaaggtattccgtggtcaaaggaaagggttgactttctattcattctattctggccaagttcaacaaattaaaattccgaagatcttgagtgaaccaaaatggatc

SEQ ID NO: 96514 - DNA, 187 bp, Zea mays
  Clone ID: MRT4577_19535C.1
ggccggcaaggaccgggtcgccacgatgggggggagcgcgccgaacacgaggtagtagaacacctccatggggggccggaaagatcccgagggttggaaggggaaaagggtggggggatttggggggtgggcgggtggcgattggttaggatttatacggggcaccggcttaactttttcgtcgtcc

SEQ ID NO: 96515 - DNA, 356 bp, Zea mays
  Clone ID: MRT4577_19536C.1
ggagatttcccctacatacgggtatgtcgcgggcggccgttgagtgcacagacacatcaaggaatcatcgaggctgctctgaaaggtgcaaatgatatccatatggatcctgggcccgtgatctattagagcgccaacgaccttatcagaagaatgctgaatcctatcccattatatcgcttaacacaacatcaagaactatgtcatccatggattgaagaccatgcagatgctcctaatcctccagctaatccatctgtgcctgtacacataaaacattaatgcactatgaataacatatacgaagatggactggcagagagattgctgcaagccattaccaggaggatattgca

SEQ ID NO: 96516 - DNA, 405 bp, Zea mays
  Clone ID: MRT4577_19537C.1
ggaaaacaacaagaccctggagaggggggtaaaaacggggggaaaagggggcccgacatgggggtatataacacgagaaaaggaacaaaggggggggggaagggggccaaaaaaaaaaaaaattttttgaaaaccagggataaaaacccaaacattttaaaccctaggaccgagctttgcctaaatggaaggcccaaaaaaaaaagggaaaggaaaaaaccataatttttgggggtaacgccccaaggaccaattgactcgccccagggaaaaaaatcgggaaataattttgggggcaaaaaatttggggggtaccaagggcaagggaaaaaaaaaaaaagggggccaccactcccctgaaaaaaaaaaagaaaaatttggggaacccggacccgggggcggacc

SEQ ID NO: 96517 - DNA, 577 bp, Zea mays
  unsure (1)..(577): unsure at all n locations
  Clone ID: MRT4577_19538C.1
gtacccaaggatagccctggccctgaaaaaaagcgtcgtaagactcaagatgaaaaagaagactagtaatgttataaagaatctcgctactctcaattttaagaattcggaggatacatgctatcatgaagattcagaaatggtgccaagtccagggagagcatcgccggttgttgcttctgtacaatctcataagaactttgttgatcatgcagatttagaaattgtgccatctcatgagaactctgttgatctacatagtgtttacatggcacatgtattggaaagaagcagacaaagcatagtagtggacatattggactacaatatacctgaatctacttttgcagattgtttgctacctacaggtcatatgcacacagatgtattttatttacaatgccaactgttgtcaaaggattggaaggataaagtaattcttagctggaaagctactcaagaactgattcatcaagatattggagttaaggagctggacaaggaacttactgcagaggttatgaacaaagnggatctggtttgtgctttgttttatatacaggagagttttttcaga

SEQ ID NO: 96518 - DNA, 299 bp, Zea mays
  Clone ID: MRT4577_19539C.1
ctctatctgaatagcaaggggtgcactacagaaagaatccgaaacctttcatgaacaagaattagaaaaggaggaggaggaggaggacgagaatgcaaaaaacaaacacactaggttcgaacggagactgagacgctacttaaacccaaaagcctatgacacctcatgacggaacaagttttagccgaggagacggatccgggcatgccaacgcagagcatcctccatggccaaagcgatgcatggccccctctgcttaactattgaagccattagcggcattctgatacgctaccaga

SEQ ID NO: 96519 - DNA, 3651 bp, Zea mays
  Clone ID: MRT4577_1953C.1
atggatactaagggaaaggggatggtgatcaacgacaaggagaaggaatccttcatcaatgagccaaaagacgacaagcccactgactcgggctcaagtcaaaagaagaaggatggaaagaagaagaggcgcatcaagaagattgtctactactacagcgacgaatcttcctcttctcaaaaggacgacgaatacgaggagaaaaagaaaacggttaactcgaacttttctttcaattattcttgtattccgcataattccaatgctcatttgctttccattccacttggtaaacctccacactttgatggagaggactacggattttggagtcacaaaatgcgtagccatttgttctctcttcatccaagtatatgggagatagtagaaaatggaatgcaatttgatagtttggataattctatgtttatcaatgaacaaatccataaaaatgcacaagctactactgttcttttagcatccttgtgcagggaagaatacaataaggtgagcggcttggataatgccaagaaaatctgggacaccctcaagatctcgcatgaggggaacgacgccaccatgctcaccaagatggagttggtggaaggtgaactaggaaggttcgcgatgattaggggagaggagctaactcaaacgtacaataggctcaagaccctggtcaacaagataaggagctatgggagcacgagatggacggaccacgacgtcgtccgacttatgctaaggtccttcactgtccttgatcctcgtcttgtaaactctattcgtgagaatcctaggtacatcaagatgacgcccgaggaaatactcggaaagttcgtaagcgggcgaatgatgatcaaggaggcaagatatgttgatgatgcattgaatggcccaatgccgatctacgagcctcaaactgttgctctcaaagcaacaagtagcagggaggcactacctagcaaggtggcgcaagttgaggtggccgggctaaatgaggacgaaatggccctcatcatcaagcgcttcaagacggtgctcaaaggtcgcaaggagcatcccaacaagagcaagacgaagggaaagcgctcctgcttcaagtgtggtaagattggtcactttattgctaactgtcccaacaatgatagtgatcaggaacaaggaaagagcggaaagtgggaaaagaagaagacctacaaaaaggcgaagggcgaggcacaccttggaaaggagtgggattcggattgctcctcgtccgactccgacaacgaaggactcactgcctcatccttcaacaagtcggctctcttccccaacgagcatcacacatgcctcatggcaaaggaaaagaaggtacatactcgaagtactgttacatatgcttcttcaagtgatgatgagtctagtgatgatgaagtagactacacaagcttattcaaaggtttagatagaactaaaattgataagatcaatgaattatatgatgctttgaatgagaagaatagattgttagagaagcaagaggatcttttatatgaagagcatgataaatttgttagtgcgcaaaattctcttgctttagaagttaaaagaaatgaaatgctttcatgtgaattatctacatgccatgaatctatttctagcttaaagagtattaatgttgatttaaatactaagttagaaatagctaataaatcaagctcttgtgtagaacatgttgtgatttgcaataggtgtaaggattttaatgttgatgcttgtagtgaacacttaatttccatctcaaaattaaatggtgaagtggctagtcttaatgcccaacttaagactagcaaaaatgattttgataaactaaaatttgcaagggatgcctacaccattggtagacacccctcaattaaggatgggcttggcttcaagagagaagccaagaacttaacaagccaaagagctcccatttccaacaaggaaaaggggaaggctcctatggctaatagtagtcaaaagaatcatgcatttatttatgatagaaaaatttctagaaatgttcatcattataggagttgtaatgcttatgattcaaatgccatgtttgcttcaagttcttcctttgtgcatggtagagatatgcctaggataaatgttgttcatgtttatgcatccgggggctcaagctggattatggacagtggatgcacaaaccacatgacgggggagaagaagatgttcacctcctacgtcaagaacaaagattcccaagattcaatcatattcggtgacgggaatcaaggcaaggttaaaggactaggaaagattgccatttcattcgagcactccatttcaaatgtgtttttagttgattcgctcggcaagaacgtgatgaccacatcaagacccctggagctgctgcatatggacctcttcggacccatcgcctacctcagcatcgggggaagtaagtatggtcttgttatagttgatgatttttcccgcttcacttgggtattctttttgcaggataaatctgaaacccaagggacccttaaacgctttctaaggagagctcaaaatgaatttgagctcaaggtgaagaagataaggagcgacaatgggtctgagttcaagaaccttcaagtggaggagtaccttgaggaggaaggaatcaagcacgagttctccgctccctacacaccacaacaaaacggtgtggtagagaggaagaacaagacgcttttagacatggcgaggacgatgcttggagagttcaagacgcccgagcgattttggtcggaagccgtgaacacggcttgccacgccataaaccgggtctaccttcatcgcctcctcaagaagacttcgtatgagcttctaaccggtaacaaacccaacgtttcatatttttgtgtatttgggagtaaatgctacattctagtgaagaaaggtaggaattctaaatttgctcccaaagctgtagaagggtttttgttaggttatgattccaatacaaaggcgtatagagtcttcaacaaatcatcgggtttagttgaagtctctagcgacgttgtatttgatgagactaatggctctccaagagagcaagttgatcttaatgatgtagatgaagatgatgttccaacggtcgcaatacgcaacatggcgattgtagatgtgcgaccacaggaacaaacggagcaagatcaaccttcttcctcaacaatggtgcatcccccgactcaatctgatgaacagcaaaacgttgtgggaaccaagtgggtgttctgcaacaaacaagacgagcacggagtggtgacaaggaacaaggctagacttgtggcaaaaggttatgcccaagtcgcaggtttggactttgaggagacttttgctcctgtggctaggctagagtctattcatattttgttagcctatgccgctcaccattctttcaggttgttccaaatggatgtgaagagcgctttcctcaacgatccaatcaagaaggaggtgtacgtagagcaaccccatggctttgaggatgaacggtaccccgaccacgtgtgtaagctctctaaggcgctctatggacttaagcaagccccaagagcatggtatgaatgccttagagactttttaattgctaatgctttcaag

SEQ ID NO: 96520 - DNA, 254 bp, Zea mays
  Clone ID: MRT4577_19540C.1
gacgcgtgggctgggttctcagagatcgttacaaagcctggttgtttctaataggaatgaccaagggtattgtttgaaggatggcttgatttacaaagggcggcaacttgtggtcggccaaaattctgctctgcaaaataagatcatagctgctttacattcttcagttgttggggtcattcaagcattcatgccataccaaaggattaataactcttttgttggaatggtttaaagatagctgtagaatcctt

SEQ ID NO: 96521 - DNA, 1741 bp, Zea mays
  unsure (1)..(1741): unsure at all n locations
  Clone ID: MRT4577_19541C.1
ggaaatgctcattgaagagcttatcggaaaggctacatgctatactttgcagatttgtggtcatggtgtttggtattcattataaactgccatctatattagtgtcgggatcataggaatgtggatagcaagaataatgacagggttgtcgtacctgaagggtgtacgtgtgaatgtgcatcaaacgaataaattatatttcgtttgtttaaggctacatggcatactttgcagatttgtggccattgtgtttggtattcattataaactgccatctttatttgtgtcgtgatcataggaatgtggatagcaagaataatgacagggtattatgtactattaaatttccatattccatgcctttgcgtcagttgtctttgccccttgtatgagtatctttgttgttgaacaggttgttctacctgaagggtcaaaggatatcgaagtttcagctccctttccaacacagcagcagcaagaggttaagtattcacaccttgacattgtcggaagaccagttgttgtcttggagaaacctgatgttattccagagcataatttgtatttccaggtttgtcgccagattcatttttgggtaatttgtttggataacggttttatgaaaagggtaacttgtgcttctattgttggtcggaccaaataatcagttgatgaagtattggttcccaacacacataacagcactaaaagctgcagtatgaaatgcttacttgagctacttctagtgagttaaattgtttgtttatagatagataccaactggagaaaacttatttgatgaatcatttgcaatatgcaggtttgtttatagatacataccaactggagcaaacttatttgatgaatcatttgcaatatgcaggtttactacagattcaacaacatatccttgctcagagagccgttgatgctgattactggtttcttcctcctgtttgtggcctgtattgtttacatgcgtactgatatgtcaatatccaagagctctccttcctacttggccaagctgcaatgggatgaggtgcaagcaactgttcagaaaatccagggtatctttgagcaatgcttagcagttcatgataaactggaggcctcattgcgggatttgtctaggacaggagacattcagtcttgcaaggcagctcgtaaagctgctgacacgcagtttaaggagctatcgaaagatctgaagccactgttggcgactctacagtcatctccccagtcttatcagatattgccaaaggtagaggacttgatcgtaaaggagagagagatgcaggagaagctcatgacaaggcattccaccgttgtcgacagctttgagaagaagctgcgcgggcaagatgtagagaacaggattgctttgcagcagcagaaaattgctgccctgaggcaggaggttgaatctcttttagagtacattagtgagatttgagcaaatgagtgctgctgtggcgtgatacatctttagcgattagactgcctttgtttggtttagggtttaccccaatattgaaatctactactctgagattgtgtcggtaaccatctagtttcccagttgagagacctggaagttgcaatgaccttgtaacatgataatcagtgtaattctggagctgactaaatttttgcatttaatatcaatatcacaggaaccgtccaaaaaaaaaaaaaaaaaaaaaaaanaaagtactctgcgttgttaccactgctt

SEQ ID NO: 96522 - DNA, 214 bp, Zea mays
  unsure (1)..(214): unsure at all n locations
  Clone ID: MRT4577_19542C.1
cncactctantcctatccactgcggcctggacgcgtgcgagagacttgaccaancagcngcagcangantggngcntctgnngctgtncggnatgccgntgtccnccaacgtngtgcgcgtggccaccgtgntcaacgagaagggcctnganttcgngntngtccccgtcgacntcaccaccggcncccncaagcagcccgacttcntcgccct

SEQ ID NO: 96523 - DNA, 1745 bp, Zea mays
  Clone ID: MRT4577_19543C.1
cattgggtacctcgaggccggccggggctcagacacttgctatcagattgcctggtggaagggttgaatcatacacaaggcatccaaacgcaaaacttgtggattcagaactgaaatatggaccatttcatgaccttcccccgttctcctacttacctgtgattgtgcattttgagaacaacaatccttttgcagttgcaaaggaagttataagggagattgagatatctcactggggaaatgtacagattacggaacactacaacattgctcatggtggtgccagactcaagggtgaattttccaggattgattatcaatctagaccttacgtaaggggtgtttcatcttttagacatcttattgcaaaactgcctccaagggcacactctatttattaccgagatgagattggtaatatttccacatcacatttgtggagtgattctatgaagacccaactggaaatagaaccaaggtttccattgtttggtgggtggcaaacaaccttcactgttggttatggtttaccacttgaagactttgttttctattctgatggaaagagatttctcaatatcacatttggttctccattggaggaaattctcattgaaaagcttatcgtaaaggttgttctacctgaagggtcaaaggatatcgaagtttcagctccctttccaacacagcagcagcaagaggttaagtattcacaccttgacattgtcggaagaccagttgttgtcttggagaaacctgatgttattccagagcataatttgtatttccaggtttactacagattcaacaacatatccttgctcagagagccgttgatgctgattactggtttcttcctcctgtttgtggcctgtattgtttacatgcgtactgatatgtcaatatccaagagctctccttcctacttggccaagctgcaatgggatgaggtgcaagcaactgttcagaaaatccagggtatctttgagcaatgcttagcagttcatgataaactggaggcctcattgcgggatttgtctaggacaggagacattcagtcttgcaaggcagctcgtaaagctgctgacacgcagtttaaggagctatcgaaagatctgaagccactgttggcgactctacagtcatctccccagtcttatcagatattgccaaaggtagaggacttgatcgtaaaggagagagagatgcaggagaagctcatgacaaggcattccaccgttgtcgacagctttgagaagaagctgcgcgggcaagatgtagagaacaggattgctttgcagcagcagaaaattgctgccctgaggcaggaggttgaatctcttttagagtacattagtgagatttgagcaaatgagtgctgctgtggcgtgatacatctttagcgattagactgcctttgtttggtttagggtttaccccaatattgaaatctactactctgagattgtgtcggtaaccatctagtttcccagttgagagacctggaagttgcaatgaccttgtaacatgataatcagtgtaattctggagctgactaaatttttgcatttaatatcaatatcacaggaaccgtcatcttttggactgaaaaaaaaaaaaaaaaaacggccgtgcgatctaggcggggccgtaggattgtggcagggcattgtgtactgtcaagggtccttatgtccttgcctttgcgtcagttgtctttgccccttgtatgagtatctttgttg

SEQ ID NO: 96524 - DNA, 663 bp, Zea mays
  Clone ID: MRT4577_19544C.1
cctcgagccggcgggatgggttcttctgcttggactccatgcgaggacgacaatggcgatcgccgccgtccccgcctccctccccttcgtcctcctccctccgcggctgttccgcgggagggcggtgaggtggccgcgcccgattagggcttcggcgtcgagcaacgccagtgacgttgcaggcggagagcggaagtttggggctctggtgagcagggtgggagatctgagggcgctcgtcgcctccgtgcctcctgctgttgcttcgatgcagaaaaacattggcccaaattttgttgctggtttctgtgttagcatggcatttgtggctgctgctgcaagacagatctccttaagaagtcgagagcatgttagtaaaggttctgttgctgatcttgtaaggcgtggacagttaaaatcagggcaacgagggatgtatgtcactatttcctttaagttgcattttgtattctcactgatgcattgctgggtttatggatgcttgattatcgtttgaactatagcctctgtttcaacgatcgtgttttaacgtaagacttggttggtcatgttttaacataagatttgaaagttgaaacttgtctatgtgacttggttggtcaaaaaaaaaaaaaaaataaaaaaaaaaaaaaaaaagcgggc

SEQ ID NO: 96525 - DNA, 144 bp, Zea mays
  Clone ID: MRT4577_19545C.1
ggccggggcgacccacacgtccgctagtccgcccggcctcttccgactcggagcgagaaatcagcagcatcgccgctgtcttccttattttttctacaatgcaaggcggatccagacacatcgtctatggtggcctcaagtacc

SEQ ID NO: 96526 - DNA, 418 bp, Zea mays
  Clone ID: MRT4577_19546C.1
gggggaagcttcccttcaaattccctttaaagggagctttttttgttggtttttttttttttttcaaccccaaaacaaattccgcttttaaagttacacttcaattagcccgccccttgcccttgcagttccccttcccgcccaacagggaagggttttttttttttttttcaaagggacagaaaccctttaaacccccccacacacggggcaaacttgacaattcgggaaaattcaaacccttaccaaaaaaaattttccggtccacaatttttcggaagattttttgaaaaaaacaaacactttttaaaaaaaaaattttaaaacacttttttttccccaattttttaattttcaaagggtttggggaaaaattcccccacttttttaacttttgttgggttccccccaaaatttt

SEQ ID NO: 96527 - DNA, 681 bp, Zea mays
  Clone ID: MRT4577_19547C.1
cctttccgtccgttctgcttgggcgacggcgattcctgcatcgcatcgcctccaattcgggctgcggcggctacggcggcggttcctgcgtcgcccgcctcctccagcggctgcttggcggcgtctccagctctggggaagaagcaagcggctagcggctctctcccggcgcccatggtggacatcagcgagtgctcgccggtgcccgagtccgtgccggcgcacccggaccccgcgtccgtttctccggacgcctggcggcgcttcgagaccgccgcgctcgccgtggtgaacaagatccagcccaccgccgcctccgaacacctccgcgccgccgtcgtcgactacgtccagcgcctcttctggttccaagcccggtatcaggtctttccatttggatctgttccattgaaaacatatcttccagatggagatattgacctgacattatttggccctgctatttctgatgagaatctagcaaatgaagtatgcactattctaaaatcggaagagcgaaggaaagattctgaatttgaggttaaagatgtccagtatgtccctgctgaggtcaagctggttaaatgtttggtacaaaacattgttgtagacatctcagttaatcagattggtgggctgtgcacactatgttttcttgagagggtgatcacactttggaaa

SEQ ID NO: 96528 - DNA, 355 bp, Zea mays
  Clone ID: MRT4577_19548C.1
tcacggatgcctccattggcatccattagtgcatccctcagcaattgttttcaggtaatctccgattgccagtaggtgtgcaggtaatcccgtaccctttccactgcaatccgactggcctgttctcctccggcgtgcccccccttaccatcagcgacaatgtaaaatcgtccctctggatcaaggtaaaaactatcctgattggactgacaaactagaccgggatgcgtggatccgggaagcctacaactaacaactgacataaacactacggggacaggccttagaacatcgcgttcggtgatagtgggcagagagagagtgcttgtatgctaaaacatacggacctgtcttt

SEQ ID NO: 96529 - DNA, 624 bp, Zea mays
  Clone ID: MRT4577_19549C.1
ctccatagtagcatttagcactgcctgcctgtccggtgcccggccatgtcgtcgtcgttgtcgctgcgccgtctctgcttcgtgctgccgatggacgctgacgaggccgtcccaccggcgtcccacccggaggggccggcgcggcgcagcccggcgagggtggcgtccctggacctcgagacggccgggtcgtacgcccgcaccacggccgtccgcctgttgtcgtgcctccgccgctggcggccccggccctgctgccgcggcgacggccggtgccacgacgactcgccggaaaaggcggcggcgttcgaggacatcgccggcgtggtcgacgacgtcgccggcaggaagcagctcgcgggcggcgggcccaggatattcagctactcggagctctacatcgggacgcgcgggttcagcgacgcggaggtgctcggcagcgggggattcggccgggtgtaccgcgccgttctgcccagcgacggcaccacggtggccgtcaagtgcgtcgcagccagcagcgcgggcgcccgcagcgacaagtcgttcctggccgagctcgcggccgtggccaggctgcggcaccgcaacctggtgcgcctccgcggctggtgcgtgcgcgcc

SEQ ID NO: 96530 - DNA, 349 bp, Zea mays
  Clone ID: MRT4577_1954C.1
gttgttatctcgtcacctacatatctccggctcgccgacggcgtcgacgactactactccttcgaccgatagaggcgcccgtagcgaccataccgatgtgtatgctgaagtgacatatgtcgaggtggaactggttgggggtagtccatttcgggttcgagcagcctgagcctgcgcgccggcagcgacggagttttgcacatgagttgagatggcaaacaattcccaatccttcgcaggggcctcgacttcgaaccaactattcgatggctggcagcaagagcgggcccgccccgggccaggcagccaaggacaagaagatggcgttcggggaacagctggtcttgga

SEQ ID NO: 96531 - DNA, 865 bp, Zea mays
  Clone ID: MRT4577_19550C.1
aattcggcacgaggtcattcccttcccttcccttccgcccgaagtctccacgctccctttctcccgtttaaaaccttcgcttcgtctcgactctacttggccgggcacttcctctcgcccagtcctcgctcacgtcaaaccctagggccccgggcctcctactcgtaggctcagatccaatgggcgcggcgccgtcgacgccgaggctgggcgcggcaggcgcggcgccgtcgcccagcgcggcggagcagatgttcacggcgctggtcggcgagaaggcctacccaatctcctccgagttctggaagcagctgctcgagctgcccctcaccctgcagtggccgcgggaccgcgtgctgcaggcgtgccacgccttcgccgagaataactaccaaacaaagcatcttgcaaagattttgatccatttggtttggtgcttgcaagagtgcacatcaacaacttctgtatcttctgtcgtatatcggagggcgatcaatgcggcatacatatcatccatatttctcaagttcatcattgaaaacgcaaaaaccgacagttggcaagagctatgccttgtcattgacaggagtgagaaggggttggaaaactttcctgcagaaaacactgtggagtattttctgataagaggtgtgctggaatatattggtagtgtgggtgtaagtccggagtcatgctacctacatcatgaactcctgaacttgatgctagttcttatgtcaactcagttatgttctggaccatctccagaaccaaagatgtgcatcctttcattgatgcagctatgcttcagacagctccgtagtggcttcagtagtgcagaaattgttgcttaattttgtaacac

SEQ ID NO: 96532 - DNA, 437 bp, Zea mays
  Clone ID: MRT4577_19551C.1
gcggacacaggcgtgggggcgcggggcggtggcgctcttgatgacaccattcaatcgccgcgcggactacgcctcttgtcccgacctgctccgcgccagctcatccgcctcttatacgatcactctcgctcgcctctgacgccacttcacctcttctgcttccttctacccagcatacagcgccagacaccatacccacacattcatggaggaggaacaagaagaccttaggcatggctcaccagataatgtccgtgctgttataagagctaacaaaaagagctacaggcttgtgcagatcattgcatcctctgaagatgtctacaacattttgcgcagcaaatatctgtcaccaaatgggatgcaagattcttctctcaaaggaagaaatggaacaggattcctttatggagctcgtgttggcattggggctaaac

SEQ ID NO: 96533 - DNA, 2719 bp, Zea mays
  Clone ID: MRT4577_19552C.1
tgctgtcggttcacggcgctggtcgggagaaggcctacccaatctcctccgagttctggaagcagctgctcgagctgcccctcaccctgcagtggccggggggcggcgcgccgggcggcatttcttcgtctcgcccaatcctcgctcacctcaaatcctagggccccgcgcctcctactcggaggctcagatccaatgggcgcggcgccgtcgacgccgacgttggacgtggcaccgttgacgccgaggttgggcgcggcaggcgcgccaccgtcgcccagcgcggcggagcagatgttcgcggcgctggtcggcgaaaaggcctacccaatctcctccgagttctggaaccagctgctcgagctgcccctcaccctgcagtggccgcgcgaccgcgtgctgcaggcgtgccacgcctttgccgagaataactacaaaacaaagcatcttgcaaagattttgatccatttggtttgttgcttgcaagagtgcacctcaacaacttctgtatcttctgtcgtatatcagagggcaatcaacgcggcatacatatcatccatatttctcaagttcatcattgaaaatgcaaaaactgacagttggcaagagctatgccttgacattgacaggagtgagaaggggttggaaaaaattccagcagaaaacacggtggagtattttctgatgagaggtgtgctggactatattggtagtgtggatgtaagtccggagttatgctacctacatcatgaactcctgaacttgatgctagttcttatgtcaactcagttatgttctggaccatctccagaaccaaaggatgtgcatcctttcattgatgcagctatgcttcaggacagctccgtagtggcttcagtagtgcagaaattgttgctcaattttgtaacacggccgaaacttcctctaaatgcttcgcaccctgttttctctgatgatgctaggcctggtgttctgcagcgagttggctcagcagctgcaaatgtcgtcttattgccatattatactttcaactaccttgtaagctcaactcctgagggtgcgacaagtcaattggcagataacagtttacttgttctgcttatcatgatccactaccgaaagtgcttttcaactaatgagtccattccaaccaacaacgtatacacgatggactcaaataccaatgacaaggatgctccagtttttcatgataacccttattgcaaggcattaaacagtgctaaggacattcaatatgatcgtgctgatgttgaaggaaatgctcaaaatggacctgttgtcaggttgtcttttgcattgttgtttgatgctcttggaagattcttaaatgatgagatcccagttctgttgctctattctttggtccatgggaactgtgactttcaggaatacgtcttggttcgaacagacttggatactttgttgatgcctatcttggaaacgctatataatgcatcaaggaagacttcaaatcagatttacatgctgttgattattctcctgatcctcagtcaagattcaaccttcaatgctagtgtgcacaaattggtgcttcctggtgttccttggtaccatgaacgcctgatgcatcaaacttctatgggatctttgatggttgtaatactaattcagaccatcaagtacaacctctccaagctaagagatgtctaccttcacacaaactgtcttgcaattttagcaaatatggctcctcatgtgcataggctgagtgcttatgcatcacaaaggctagttagtctctttgacatgctttctcgcaagtatgccaaactagctgagttgaaaaatgacaagtctctgaaagttatatctgatcaaatggaagcagacaacatcgcagatgatatgtctacagagcttcacatatatacagatttcttgagaattgttctggaaataatcaatgcaatccttacatatgcattgcccagaaatcccgaggttgtatatgctgtattgcatcgacaagaggtttttgagccatttaaaaatcatccacgttttaatgaactgcttgagaacatatacactgtattggatttcttcaatagtcgaatggacatgcaacaattagatggggaatggtctgtggataaagtgcttgaagtcatcaataaaacttgccgttcatggcgcggagaagggatgaagatgtttactcagttgcggtttacatatgagcaagaaagccaccctgaggaattctttatcccatatgcatggcgccttgtcctgtcacggggattctccttcaatcccagcgccataaatctcttccctgtggagattcaccttgaagatgcaccagccggtgaacaaaaggtttaggaagaatggtccgaaccagagttctgacaaggaacataaaggcatatttttgttccattgtggcaaagagcataatgtaaataggcggcatataccaggtagtagtcgaatgtactcattcttttgtattaaaatagttctgttgtttcataatatgtgtaagagggggaagagggtggacgaattgtgcaagggttcagagattgtgctattataggtggtagattactatatgtaggctatacacaattctttcataagttattgttgtattgtacccttaagctgcaaggccttgtggccacgctggccactcttatgcagttgtaaactctgcgatcttgtcttt

SEQ ID NO: 96534 - DNA, 393 bp, Zea mays
  Clone ID: MRT4577_19553C.1
aaaaaacaaaagggtcttattcggctggggcctcaaaccgaaaaggggtaatacgggggggggggaaaacaaaaaccattagggacccgggccggggggcccaaaaaggaagcttaactttcccagcctggggaagcaaaaaattctccgggtaaacggccctgggcacaacacccatttggggggagtacttgggccccgccatgaaaaccttgatcaaaaggggagccccctggtcggaaaacttccccccccgggggaactaatggagcaacccccccccggtggaaagctccaagacgagggaaaacttggggggatcctcaaaaacggccctgagcgggacaacccccggggggcccgagaggggctgcataaactccaccttggggg

SEQ ID NO: 96535 - DNA, 728 bp, Zea mays
  Clone ID: MRT4577_19554C.1
aggacctgggaggtcactcgctttttgtgggaaggaacaatgcggtgtcgatgtatggagggggtgtgccaggactgaggggcaactgtgtctactggattggtgggcgtggtagggatcaaggcatggtttttgacatggaatctgggaggtccacgccgtgcagggttcctcctgttggctttttacctgggcatccgcatagcacaatctgctggtatttcttgagcgatgtaatgagcatcaataactgctacagcaatagtgtcagcagcagcaacagcagtggaggaagaaaaatttatcaaactcgagcaagagcacgagcagatcttgcacaagacatggaagaatgactgcgtcgccgaacttctcggcgacataatgagtaccaccaagcaccttggtgggaattgagttattgcttgtggtcttgggagttggagtttgatttcaaggcggagcaaaatcttacagagatggctgaggaactgcctcatctgtagcctgtttcttaaaataatgtccagtttctttacttgcctgtagcctctataagtttgtatgcttattccatgtaaccagataataattattatctttctatactcaattttcatgttgtgtttaaataattcaatggattatgtaatatttttggtgttggtaatgttctgaattttactaccaaaaaaaaaaaaaaaaaaaaaaaaaaaaaaaaactcgag

SEQ ID NO: 96536 - DNA, 358 bp, Zea mays
  Clone ID: MRT4577_19555C.1
cgaggcccgttcgggcacgaagccgagatcgagcagctacctctccgatccgatgtcctgagcgagcgagctgagctgagctgagctgaggactcagcctatataatacctagagtacaccacaacgacgacgacgaggcacgcatatatacacgcggcggcggccagatccatcttggtatacacgtaatatatatacacgcacgatgggcagcgccggcggcggcgagagcgagctggagagcccgctgctgggcgcgtcgtcgacggtcggcggcggccacggcgagacggcggtgagcgggcagctggagagcatcctgggcgacgcgtccgtgccgtgggggacgcggatggc

SEQ ID NO: 96537 - DNA, 547 bp, Zea mays
  Clone ID: MRT4577_19556C.1
tttttttttttttttttttttttttttttttttttttttttttttttttttttttttttttttttttttcccaaataaatcccaaccaaaatattgattatttctaggaaacacatcccggtttgagggccccattataaagtccatttaatatgaaatcaaaaaaaaggcccccccaacgaggggttgctcccacaaaaaggcagggttcataaaaaaaaactggttgtatggaaacaattgttgctgctgtaggaaggcaaccaccaagggattaccccctgccaggggataaagaaagggttgcccctgttgaaggcccccaccaaagttcaacacaaccagttggttaaatgaaaccacctgttgcaagaaggcaacagggtttcccacagctagctgagtcaaagctggaacaatctgttgcaacaactgttgttgcaggtatgtaggtccattaaccatagcgaggagggctaaaaaaaaccacttgttgctgttgaaggtaggcggcagggtccaccatggctagttgactaacccctgg

SEQ ID NO: 96538 - DNA, 498 bp, Zea mays
  Clone ID: MRT4577_19557C.1
tgggctccctgctcacatgcatatgggtctgtggctgctgctcggaaccgactgtagctggagctgctccaggctgcgaagctgctagctgtgcaccagctggatgccctgttgcttgagccacagctgcctgcgcccgtgttttagccttagccacatgagctcgtaacttatcatcttgcatattaatgggcatcaagttcatttgcatagtcctgatctgctcaactagcttgatggttggatttttctcaaattgaaagagagatcgaaaattaagatgctctttccttaacccatctagctcatgtagcattctaagaaggcttatactgtcaccagaggcagaaaggctctgactgtctttatacacatactgtgtctgaagggtcataatctgactttcagtaataaggctctttgcctgcctatgcactagatgaatctccttcttcatcggatcaccactatgtatgtttgtctccatacgaacactat

SEQ ID NO: 96539 - DNA, 325 bp, Zea mays
  Clone ID: MRT4577_19558C.1
ggaaaaaccgacccgacgcacgcgtacggtcggatactgtctgtttcctctctccttttactcactggatctacaaatccaggctatcgcccatcttcagaattcccatccccccaccaaggactctcccctatcccaaggactcatgcctttcgccctctgacgtgacaactcattccatcccgctattaaagcctgttccaaggttgtcaattccgatgtaacgcggcatgaatttctaaaccaacatcgtcccttagttcctaaacgagtctctggtagacaggacttcgtctcatacactgtcagcctaaccggtcacaaa

SEQ ID NO: 96540 - DNA, 283 bp, Zea mays
  Clone ID: MRT4577_19559C.1
aggactcgagcgactatgaggctacgaatgagcgtatcgaactacagagccaactttactagctctacacaagacacgatgacactcgatcgaggacttgcctcggtggaagcatatcatggagcacctagtacaggaaaggttgccatattaaccagtctaatctggacaggcgtcagcccaagactgctcgacggactgtgcacacatgacagctcaaaagcagggcaagccatctccagctgtttaccaagaaccttcacccgcacaataggcttgaact

SEQ ID NO: 96541 - DNA, 4293 bp, Zea mays
  Clone ID: MRT4577_1955C.1
atggatcctaagggaaaggggatggtggtcaacgataaggagaaggagaccattttcaacgagccgagggacgacaaagctactaactccggctcgagtcaaaagaagaaggaagggaagaagaagaggcgcatcaagaagatcgtctactacgacgacagcgacgagtcctcttcttcccaaaaggacaacgacgacaacgaccacgagaaaaagaagacggttaactctattttttctttcgattattctcgtactcatttactctccattccacttggtaaacctcctcactttgatggagaggactacggattttggagtcacaaaatgcgtagtcacttgttctctctccatccaagcatatgggagatagtagagagtggaatgcaatttgatagtactgatagtcccatatttatcaatgagcaaattcacaaaaatgcacaagctactactgttcttctagcatcattgtgcagggatgaataccataagttggtggaaggcgaactaggaaggttcgcaatgatcaggggagaggagccaacccaaacttacaacaggctcaagaccctcgtcaacaaaataaggagctatggaagcacgcgatggacggaccacgacgtcgtccgcctaatgctaaggtctttcactgtccttgatccacatcttgtaaacaatattcgtgagaatcctatgtacaccaagatgacacccgaggaaatacttgggaagtttgtaagcgggcggatgatgatcaaggaggcaagatacgttgatgatgcgttgaatggcccaatccacgagcctcaaaccgttgctctcaaagcaacgaggagcaaggaagtgctacctagcaaggtggcacaagttgaggcggcagggctcaatgaggaagagatggccctcatcatcaagtgtttcaagacgacactaaggggtcgcaaggagcatcccaacaagaacaagacgaagggtaagcgctcatgcttcaaatgtggtaagattggtcattttatcgctaattgtcccgataatgatagtgaccaggaacaagagaagaagagggaaaataagaaggcctacaagaaggctaagcgtgagacacaccttggcaaggagtgggactcggattgttcgtcatccgactccgacaacgaaggactcgccgcctcggccttcaacaaatcgtccctcttccccaacgagcatcacacctgcctcatggcaaaggagaagaaggtaaacactcgaaagactacttatgcttcttctagtgatgatgaatctagcgatgatgaaatagattatgctagtttgttcaagggcttagaaagaactaagattgataagattaatgaattaatcgatgccttgaatgataagaatagattgttagaaaagcaagaggatcttttgtatgaagaacatgataaatttgtagaggcacaaaaatctcttgttttagaagttaaaaggaatgaaatgctttcttgtgaactatctacttgccatgagaccatttctagtttaaaaagtgttaatgatgatttaaatgctaaactagaagtagcaaatagatctaactcttgtgtagatcatgttgtaatttgcaataggtgtaaagattttaatgttgatgcttgtagtgaacacctagtttctattgcaaagttaaatgatgaagtggctagtcttaatgcccaacttaagactagcaaaaatgaatttgataaattaaaatttgcaagggatgcctacacgattggtagacacccctcaattaaggatgggcttggcttcaagagggaagccaagaacttaacaagtcataaggctcccatctccgccaaggagaaagggaaggctcctatgactaatagtagtcaaaacaatcatgctttcatttatgcaattgcagactatcgaaaaatagtcattaatcatgtgcctaggagaaatgttcttgttcctatgaacacccctcgcaccttctacaatttatacatcgcgttgcaatgcttcctttgcattcgcatgaaggataagaaggtctatgcattcgggggctcaagctggattatcgacagcggatgcacaaaccacatgacgggggagaagaagatgttcacctcctacgtcaagaacaaagatttccaagactcaatcgtattcggtgacgggaatcaaggcaaggttaaaggactaggaaaaatagctatttcttccgagcattctatccctaatgtgtttttagttgaatcgctcggatataatttgttgtccgttagtcaattatgtaatatgggatataactgcttattcacaaatgtagatgtgtctgtctttagaaggagtgatggttcattagcttttaagggtgtattagacggcaaactctatttagttgattttgcaaaagaggagggcggtctagatgcatgcttaattgctaagactagcatgggctggttgtggcatcgctgtttagcacatgtggggatgaagaaccttcacaaacgtctaaagggagaacacgtgataggtctaacaaacgataaatctgaaacccaagggaccctcaagcgcttcctaaggagagctcaaaatgagtttgagctcaaggtgaagaagataaggagcgacaacaggtccgagttcaagaaccttcaagtggaggagtaccttgaggaggaagggatcaagcacgagttctccgctctctacacaccacagcaaaacggtgtggtagagaggaagaacaggacgctcatagacatggcgaggacaatgcttggagaattcaagacacccgagcggttttggtcggaagccgtgaacacggcttgccacgccataaaccgggtgtaccttcatcgcctcctcaagaagacttcgtatgagcttctaaccggtaacaaacccaatgtttcgtactttcgtgtatttgggagcaaatgttatattctagtaaagaaaggtagaaattctaagtttgctcccaaagctgtagaagggtttttgttaggttatgactcaaataaaaggcgtatagggtcttcaacaaatcatcggatgaagaagacgttccaacggccgcaatacgcaccatggcgattggagatgtgcggccacaggaacaaaaggatcaagatcaaccttcttcctcaacaatggtgcatcccccaactcaagacgatgaacaggttgttccaaatggatgtgaagagcgcttttctcaacggaccaatcaaggaggagctgtatgtggagcaaccccctggcttcgaggatgaacggtaccccgaccacgtgtgtaagctctctaaggcgctctatggacttaagcaagccccaagagcatggtatgaatgccatagagactttttaattgctaatgctttcaaggttgggaaagccgatccaactttattcactaagacttgtgatggtgatctttttgtgtgccaaatttatgtcgatgacataatatttggttctactaaccaaaagtcttgtgaagagtttagcagggtgatgactcagaaattcgagatgttgatgatgggcgagttgaactacttccttgggttccaagtgaagcaactcaaggatggcaccttcatctcacaaacgaagtatacacaagacttgctcaagaggtttgggatgaaggacgccaagcccgcaaagactccaatgggaaccgacggacacgtcgacctcaacaaaggaggtaagtccattgatcaaaaggcataccggtctatgatagggtctttactttatttatgtgctagtagaccggatattatgcttagcgtatgcatgtgtgctagatttcaatccgatccaagggagtgccacctagtggctgttaagcgaattcttagatatttagtcgctacgccgtgcttcgggatctggtatccaaaggggtctacctttgacttaattggatattcagactccgattatgctggatgtaaggtcgataggaagagtacatcggggacgtgccaattcttaggaaggtccctggtgtcgtggagttctaagaaacaaacttccgttgtcctatccaccgctgaggtcgagtatgttgccgcaggacagtgttgcgcgcaactactttggatgagacaaaccctcagggactttggctacaatctgagcaaagtcccactcctatgtgataatgagagtgctatctgcatggcggataatcttgttgaacacagccgcactaagcacatagacatccggcatcactttttgagagaccactag

SEQ ID NO: 96542 - DNA, 507 bp, Zea mays
  Clone ID: MRT4577_19560C.1
aaaaaaccgaaattggggggggtttggaaaaacaggtttttgaccctgggggcggttgggaggttttccttggcgggggaaaaaagggccgggggattggagtttttttggcccctgctcctagtagggttaaaaaagcggggttttgtaataattcggggggcccccccttcccccagcggggggcattccggttgccaaggggggggcggcctaaaaaaagcccctgggttggggttggcctagcattgggacccctgaagggggggcaagaaacgtaatcccccccaccttttgggaaaaaggccccaagggagggttttcccccgggttttccacaagggccccccttaaagtggggcctagttttggggcccctttttggggaaaatttacccggttggccccctcccttttgggccaggcccttgagggggtctttttgggggatcccctgggcaagatagccggaaatgaacttccccacattatccttgttgaccccaa

SEQ ID NO: 96543 - DNA, 282 bp, Zea mays
  Clone ID: MRT4577_19561C.1
acaaaaaagaggcaaatgtgcggggaagttttttttttttttttttttttttttttttttttttttttttttttttttttttataaaagtataaatgtattaagagttcatttgtattttaacaaaaaacattggtcaaagttatattttggagaccgtgtcgttgtcctaaacgacaactaataggaaaccggagggagtacgtacgtacgtatgtactacagtagtacgtagggctcgtttcccggccggcctcgaggatcccaattgcccttaggagtg

SEQ ID NO: 96544 - DNA, 120 bp, Zea mays
  Clone ID: MRT4577_19562C.1
gcgggcacggcagcagttgctacctctttatcctttcctaccgcaagccaagctctctgtctgggactaccctacagcacgatcggagtccaagtccattccatccatacccactcgaca

SEQ ID NO: 96545 - DNA, 700 bp, Zea mays
  Clone ID: MRT4577_19563C.1
ttgcgccgccgcactccccagccttctgccgcaactgtgccgtgcagctctgtgccttctgctgtgccttccgctgctccgtgccgcaactgtgccttcccaacctccgccgccagcactccccaacctccgaagtgcagttgtgccgacgttccgccgtgcagctgtgccgacgttctagggattcagccgctgctcacctccgaagttgatggagaacaaccgcaacctccgagacttcttctcccaagccgggtcttcctcctcggctaggatcccccatggtcgcgaagctcccgaagaagatctgggcgtcttctaccagacgcagttgtctcggccaccgtctatcagtgccccagccactcgtctacacattgaagatctggatctcaactcccttggtaatgacttcccaaatttttcctcctaccaagaagtactccagtcggatggtgctacaccctacctagggttgcctccctcaggtcgtggaattagaacagggcgcacaccctgtcaatttccccgatccagtgcgggagccatgagatccagaggtggctcacaagtttttcgtggtcgaggtggatctaggggatgtcgtggaggtcgaggaagggccacagttactcgtggtggacgctctggtatcaacccaaccactgaccatgccctttgttcaagatctggaacatga

SEQ ID NO: 96546 - DNA, 404 bp, Zea mays
  Clone ID: MRT4577_19564C.1
aaagattcatcactcctaccgttgtgaatttagcttctaagcagcccccctccgctcgtcgggcgaactctctgatccaatttcacaatcccttcttacacgaactccctaacatttctctgtactttcgtttaacacacgcgccttttactagcttcaattctaacttataggcgttcactcataatccagcacactgtatcttcgctccacttacttttcaaccaaactctatgaccaattattttaatcaaccgctcctctagtactacgttaaattactatcgcttctcgttcatcacaatcttaatactaacctttttcactacttactaaacccacctcacgttccctatttttgggtgaacaattcaacacctttttaattctacttcacaattata

SEQ ID NO: 96547 - DNA, 797 bp, Zea mays
  unsure (1)..(797): unsure at all n locations
  Clone ID: MRT4577_19565C.1
atcgctctctcctcccgccttccgccgccagcactcccaaccttttgccgcaaggatctggaccgctgctctgcgctcgctgctctgtgcccactgctctatgcccgctgctctgtgcccgctgctatgtttcccctactcgcgcccgctgctctgtgcgctgccaccgcctcgctttgcgctgccaccaccacactatctgccgctgctctgtgcgccgtgcagctgtgcccagtcgtctgcttctcatctactgctgcgtgagggattcagctgctgctcacctccgtagttgatggagaacaaccccaacctctgagacttcttctcccaatcctcggctaggatcccccatggtcgcgaagctcccgaagaagacctgggcgtcttctaccagacgcagttgtctcggccaccgtctatcagtgccccagccactcatctacacattgaagatctggatctcaactcccttggtaatgacttcccaaatttatcctcctaccaagaagtactctagtccgatggtgctacaccctacctagggttgcctcccttaggtcgtggaattagaacagggcgcacaccctgtcaatttccccgatccagtgcgggagccatgagattcagaggtggctcacaagtttttcgtggtcgaggtggatctagaggatgtcgtggaggtcgaggaagggccacagttactcgtggtggactctctagtgtcaacccaccactgaccatgcccttgnntcatatctagaacatgaaagaagaaaatgattggacgctcgatc

SEQ ID NO: 96548 - DNA, 416 bp, Zea mays
  Clone ID: MRT4577_19566C.1
tacctcctcggaattcccgggtcgacccactcgtcctcggactcttgggaaaaaaaaaaaaaaattaaaaaaaaaaaaaaaaaaaaaaaaaaaaaagaaaaaagaaaccaaaaaaaaaaaaaaaaggccacccatttataagatcccaacttaactaccccttcattccaaataattactttttttttagtgcacctaaattcaattccattgccctttttttaaaaccttcttacttgaaaaacccttgccttacccaaattaattccctttaaaaaaattccccttttcccaacttgctttattaccaaaaagccccgacctattcgcctttccaaaattttcccaaccttaattgccaattggaacccccctttaaccgcccatttaaccccgccgtttttgttgtttccccc

SEQ ID NO: 96549 - DNA, 544 bp, Zea mays
  Clone ID: MRT4577_19567C.1
aataacagagtgtatagagataaatgtcataaatcatcagagtatttattacatagcggaagacttattacaaaataaaataataaagataaaacgaactaaggatcgttggcgccaatgtcaactgagaaacgccacctagatcagatcaaactcctcgctttgtggctcctcctgaaccacctgttcttctccttcaatgagctcctgctcagctacttcaatctgctgctcaccaggatcctcggtcacgggttcttcgacaacgagggtcgcagtgcagggagaaccacggcgaggagcggctccgcggtcgggcgcaactccggtgatgaattccctgggtcccgacgacaaatccttagcgttggccttcggaaaccttccccacgactcggcgaagcttgcgagcgggcgattggcacccaagcggaggcgctggtgtgaatcccacggcagcggcgtgaatctccctctcagctcacggcgattgcaggacggcggtgggaatacgacagtgtgggcgagaccctagggagctttc

SEQ ID NO: 96550 - DNA, 342 bp, Zea mays
  Clone ID: MRT4577_19568C.1
cccggactggctggtgatggcatgctcggtgtccgatctccaggacaccttcacggggagcaatctgcgctgatatggtgagcgcttatataaggtggcctactacagtcatgtaaaggctacaggccctcaaggctaaagacgcccaaaagatatccgcgcacactgaagaggctgttggatcgctctagcatgagcccgatgcacacgtggatcatacgagcgacactacgacttcgactgccagaactgactctggccttacgatattgaagatctgatgcatgcatctacgactagagtgtagcctacaattgctttcaaagacatgtatcactgtct

SEQ ID NO: 96551 - DNA, 432 bp, Zea mays
  Clone ID: MRT4577_19569C.1
tctaaactcttcatatcgatactttctcagattgagatctgcgacagagcgctgcgagctctactaggcctaaagggcttgaaattcaccgcttgccatcctacgcatactcttaccgcaatgtgatgcctgcactgtgcgacaaatatcatgccattgcttgagattgtctacgattaggattgtctgataaaccctaaccatactatggatgagactatacacttgatgagtatacttcatacttggactgactagccaatgctggagctcctgataagctgtctattgtagttcagagatactctgccttcggatgcagtcaaatctgctaatgaacaccaagacagattgaatcatcgtggactaatgaatccaccaataaccgatcaacatgtgaacctttcatccaccctgtcttatttcagcaac

SEQ ID NO: 96552 - DNA, 2679 bp, Zea mays
  Clone ID: MRT4577_1956C.1
gtttatgcatccgggggctctagctggattatcgacagcggatgcacaaaccacatgacgggggaaaagaggatgttctcttcctacgtcaagaacaaggatccccaagattcaatcatattcggtgacgggaatcaaggcaaggttaaaggcttaggcaagattgcaatctcaaatgagcactctatttctaatgtattcttagttaagtcgcttggatataatttgttatccgtaagtcaattatgtaatatggaatataattgtctattcactaatgtagatgtgtctgtctttagaagaagtgatggttcattagcttttaagggtgtattagacggcaaactctatttagttgattttgcaaaagaggaggccggtctagatgcatgcttaattgctaagactagcatgggctggctgtggcattgccgcttagcacatgtggggatgaggaaccttcacaagcttctaaagggagaacacatgataggtctaactaatgttaccttcgaaaaagttagaccttgtgcagcttgtcaagcagggaaacaagtgggaagctctcatcatgccaaaaatgtgatgacaacatcaagacccctggagttacttcatatggacctctttggacccgttgcctatctaagcataggaggaaggaccctcaagcgcttcctaaggagagctcaaaacgagtttgagctcaaggtgaagaagataaggagcgacaatgggtccgagttcaagaacctacaagtggaggaatatcttgaggaggaaggaatcaagcacgagttctccgctccctacacaccacagcaaaatggtgtggtagagaggaagaacaggacacttatagacatggcgaggacgatgcttggagagttcaagaccctcgagcgcttttggtcggaagccgtgaacacggcttgccacaccatcaaccgggtctaccttcatcgcccctcaagaatacttctttttgggagtaaatgctacattctagtgaagaagggtaggaattccaaatttgctcccaaagcggtagaagggtttttgttaggttatgactcaaatacaaaggcgtatagggtcttcaacaaatcatcgggtttggttgaagtctctagcgacgttgtatttgatgagactaatggctctccaagagagcaagttgttgatcttgatgatgtagatgaagaagacgttccaacggccgcaatacgcaccatggcgattggagatgtgaggccaatggaacaaaaggagcaagatcaaccttcttcctcaacaatggtgcatcccccaactcaagaagatgaacaggttcataaagaggaggcgtgtgatcaagggggagcacaagatgatcattgggtgttccgcaacaaacaagacgagcacggggtggtgacaaggaacaaggctagacttgtggcaaaaggttatgcccaagtcgcaggtttggactttgaggagacttttgctcctatggctaggctagagtcaattcgcatattgttagcctatgctactcaccattccttcaggttgttccaaatggatgtgaagagcgctttcctcaatgggccaatcaaggaggaggtgtacgtggagcaaccccctggcttcgaggatgaacggtaccctgaccacgttgggaaagccgatccaactctttttactaagacttgtgatggtgatctttttgtgtgccaaatttatgtcaatgacataatatttggttctactaatcaaaagtcttgtgaagagtttagcagggtgatgactcaaaagtttgagatgtcgatgatgggcgagttaagctatttccttggattccaagtgaggcaactcaaggatgggaccttcatctcccaaacgaagtacacgcaagacttgatcaagcggtttgggatgaaggacgccaagcccgcaaagactccaatgggaaccgacggacacaccgacctcaacaaaggaggtaagtctgttgatcaaaagtcataccgatctatgatagggtctttactttatttatgtgctagtagaccggatattatgcttagcgtatgcatgtgtgctagatttcaatctgatacaagagaatgtcacttagtggcggtgaagcgaattcttagatatttagtcgctacgccttgcttcgggatctggtatccaaaggggtctacctttgacttgattggatactcagacttcgattatgctggatgtaaggtcgataggaagagtacatcggggacgtgccaattcttaggaaggtccctggtgtcacggagttctaagaaacaaactttcgttgccctatccaccgctgagaccgagtatgttgccgcaggacagtgttgcgcgcaactactttggatgaggcaaaccctcagggactttggctacaatctgagcaaagtcccactcctatgtgataatgagagtgctatccgaatagtggaaaatcctgttgagcacagccgcacaaagcacattgacatccggcatcactttttgagagaccaccagcaaaagggagatatcgaagtgtttcatgttagctccgagaaccagctagccgatatctttaccaagcctttagatgagcagaccttttgcaagttgcgtagtgagctaaatgtcttagattcgcggaacttggattga

SEQ ID NO: 96553 - DNA, 651 bp, Zea mays
  Clone ID: MRT4577_19570C.1
attcaacctagggtttatcttccgccgccgccgccgcaaaatcatctccctccccctcgcttctccaacatggctcttcagatcagcaagaagcggaagttcgtcgccgacggcgtgttcctggccgagctgaacgagatgctgacccgcgagctcggggaggacggcttcgccggcgtcgagatccgggtcacccccatgcgcaccgagatcatcatccgcgccacccgcacccagaacgtcctcggcgagaagggcaggaggataagggagctgacgtcggtggtgcagaagcgcttcaactttccggacggcggcgtggagctctacgccgagaaggtcctgaaccgcggcctctgcgccgtcgctcaggctgagtccctccgctacaagctgcttggtggcctcgccgtccgaagagcatgctatggtgtactccgatttgtcatggagagtggtgcgaagggctgtgaggttattgtgagtgggaagcttagggcacagcgtgccaagtccatgaagttcaaggatggctatatgatctcttcaggccatcctgtcaaccaatatattgatggagctgtgaggcatgttcttctgagacagggtgtgctgggtatcaaggttaagatcatgcttgactgggatccg

SEQ ID NO: 96554 - DNA, 836 bp, Zea mays
  Clone ID: MRT4577_19571C.1
tccaccgccgccgcccgcgtcctccattgtctcccaacacaatcaattgccgaaaccgctccgttggtgagtcgccaagttttgacgctgcaccatcatcgacttgtagggatcaagggccaacggcaacgccgaatctaaggaatcagatctacgattaatccaggaaaaagtcagaccatgtccgcccggttacaagaatgcgacgagcaaaggggaaaaaggatgccaaagcgtggccgtgagcgactttaccttgtctttgatgactggtgccatggatacagcatccgcatggtaaacttgttgcagcatactgctggctcaggccatccagccccggtgcatttttccgagcctttctgccgcataatggcgcctctcgtgtcgtacttcacgtcagcctttggctctaagattttggcggtgttttccagagatcccgaagctgactctgagagctacttcccaatgttggacgttcgctcgcggtgcgtcacctttgcccctgggcagggatgtcctattcctcccatctactacctacctgtcggcaacgagttattcagtctgagcttctgctccttcgagatgctctgctcggaggagctctccccccggttgcaggatcagtcttgcggcatgggttggtcatggaaacagctctctgagaaacgccattctatgttgataacgtcacctcctactctttgcatcctcaagaacggaccttcctcttcagcaccaagactggcgccactgaggccacctacacctttgacaccgagaaacgttcatggaaactccttggctattggaagctgccctttgctggc

SEQ ID NO: 96555 - DNA, 238 bp, Zea mays
  Clone ID: MRT4577_19572C.1
ttttttttttttttttttttttttttttttgttttgttttttgtttaaaaaggataaacctgtcttgttgtgaaaagagcgaattacacggggggcccgaaacggcaagggaacgaaaccagccgggtcgaaaaccccaaaaaacccgacccttgggcaaaaccaaggggggggccccccccacgaagggcccccgcccaacccaagaaaggcacagcccccgaggcggggcctaagg

SEQ ID NO: 96556 - DNA, 275 bp, Zea mays
  Clone ID: MRT4577_19573C.1
tagcgatgaacactatccaagtgtatacaatttaggacgcagttagactggtatttaacacttagcttgtgctgtaatttaccattcttgtaacttagtatgaaaaggctatggctgttgtctcctggaattcggaatgccgtaccatgtttcgatccaagtcactcctttagacatgacttcatgggggcttggaagactcaagtgttacttgatggacattgtgactgagagtcaggggagcaaatggtgcaaggggcttgatgacacgaggc

SEQ ID NO: 96557 - DNA, 340 bp, Zea mays
  Clone ID: MRT4577_19574C.1
gtaaatctgaaagaaaatcccagttcttctgcccacaacataagaagctagaaaagagggaaaaaacaaattgattatttaaaaaataaaataaaaaaaatgacaaaatctaaaaaataaagagctaaaagcctaaaaagcttaaaatacaataaggacatgccactgccgctggactttataaatggcgatgctgaatttgatatgtttgcggatgacttgtacaactttgaccttccaaacaacgactcaagcttgttttcttcactcccaacatgcgatccagctcctcctctccaccctctgaaatgtcagtctttgcaggggggctttttatttt

SEQ ID NO: 96558 - DNA, 103 bp, Zea mays
  Clone ID: MRT4577_19575C.1
ccgtcgactacgtctgctgcacctgaagcgctgtccatcgcccaggagactttcgacacgaaccattagctgcaggggatacagtagacgtggatcatgctgg

SEQ ID NO: 96559 - DNA, 655 bp, Zea mays
  Clone ID: MRT4577_19576C.1
cccccaagccgccgccgcaaccctagagcctcgcctccctcctcccctctcccgggcgcctccaccccccgcctagcggcgcgaagcgaccatgacgttcaagcggaggaacggcgggcgcaacaagcatggccgcggccacgtcaagtacatccgctgctccaactgcgccaagtgctgccccaaggacaaggctatcaagcgtttcttggtgaggaacatcgtggagcaggctgctgtgagagatgtgcaggaggcttgtgtgcatgatggatatgtgcttcccaagctgtacgccaaggtgcaccactgtgtgtcttgtgccatccatgcccacattgtccgtgtccgctcgcgtgagaacaggaggaaccgtgagcccccgcagcgtttcaggcgcagggatgatggcccgaggcctggacagggtggcccgccccgtgctggtggacctggtggcgcgcctgctggcgctggtgccgttcctggtgctcctgctccccgtgtctagtttgggaatgcttccgtgatatggagccagccctagttttactcgtccctggatattgaactattctacctagtttttgctgcaatcggttgtactgaaagttggttggtcaagcacaatttgtgatcaggtctttatgttttg

SEQ ID NO: 96560 - DNA, 312 bp, Zea mays
  Clone ID: MRT4577_19577C.1
gtgtctgcgtcgtccactgagatcagggatcggcggcggggtatggcgagggagcgacgggagataaagaggatagagagcgcggcatcgctccaggtaccgttctccacccgccgccgcttttttttcacgtatgctgctgagctctccctgctctgcaatacctccttcacgctgataggtttgtcctacacggggtagctctcctattccgcccggtccattatgtataatatcaccctcaaacccgacttacattccaaaaatccacccatggacaaacatccttcacttgacttgaacttagatcat

SEQ ID NO: 96561 - DNA, 562 bp, Zea mays
  Clone ID: MRT4577_19578C.1
ggccgcgggttttttttttttttttttgtttttttttttttttttttttttgttttttttttttttttttttttatatatagggataaaaggatatcatcggggaccaaaaaaaatatggttacagaagatggaatcggatcaaccaaaatgcaggtagacacacgtacgtacatgatcacaaagactgacgcccaacatgcatagagagatagcaaactgaaaaattttgtttctttttttttgacacacaccaatacattacctatgtatggcagacaacttggcctcccttattattgttcaaccaccaccacagggtaaatagataataattatatccatggtccttgatcgatgtgatcagcagttgcaggggtggcaattgcatttgccacctcaccatgaacacgggggcgggctagtcggactccgccggggtctttacaaagtggggcgcggtcttctttttcggggccacgctcgaggacagacggaggcctgggcgggggtgctggtctcctccaggtcagggtactttttgcagtacttgcagtttgagc

SEQ ID NO: 96562 - DNA, 451 bp, Zea mays
  unsure (1)..(451): unsure at all n locations
  Clone ID: MRT4577_19579C.1
ccagtgtgaatggaatatnnctgcagaaaaattcgccctctagnncgtggtcgccggcgcgaggcgaccaagnccnttttttttcttttattttattttcttttattttattggttttattttttttttttttttttttttttctttctggtctttccctttaaagggggaattccaaccaaccgccccgggcggccagccaaaccgggcacaaccccaagggggggggaaccaagggaaaaaccccgccccgcgaaaaagggggagccgttcccaagcccaaaccacatcaccggacaaaaaaacggaaagcacaaaaacgggggacccaaaagggggagccaacggaaaaaaaaaggggggggccccccaaaccctatcccacccgaaaaactggcgcgccccccccccccccgaaaaccaaaaaacaaaccgagagggcccgtccaaa

SEQ ID NO: 96563 - DNA, 1834 bp, Zea mays
  Clone ID: MRT4577_1957C.1
atggatcctaagggaaaggggatggtggtcgacaacaacgagaaggagtctatcttcaacgagccaaagaatgacaagtctaccgacttgggctcaagccacaagcgcaaagatgggaagaagaagaagaagacgaggcgcatcaaggagatcgtctactacgacagcgacgaatcctcttcttcccaaaaggacgacgacaacgactacaggaagacggtcaattcgaacttttcatttgattattctcgtattccacatagttcgaattcgcatttgctttccattcctcttggcaaacctccacactttgatggggaggactacggattttggagtcacaaaatgcgtagacatttattctctctccatccaagcatatgggagattgtagagaatggaatgaaatttgatagctcggatagccccatgtttattaatgaacagattcataaaaatgcacaagctactactgtgttgctagcctccttgtgcagggacgagtacaacaaggtgagcggcttggacaacgccaagcagatctgggacaccctcaagatttctcatgagggaaatgacgttaccttgcttaccaaaacggagttggtggaggccgagcttggacggttcgcgatgataaggggcgaggagccaactcaaacatacaaccggctcaagacccttattaacaaaataaggagctacggaagcacgcgatggacggaccacgacgtcgtccgactaatgctaaggtcctttaccattcttgatcctcatttggtgaataatattcgtgagaatcccaggtacaccaaaatgtcgcccgaagaagtcctaggaaaattcgtcagcgggcgaatgatgattaaggaagcaaggtacgtggacgacgccctgaatggaccaatcaatgagccgcaacctcttgctctcaaagccacaagaagcaaggaggcgctacctagcaaggtggcacaaattgaagcggccggacttaatgatgaagagatggccctcatcatcaaaagattcaagacgtcgcttaagggtcgcaagggacagtcaagcaagaccaaagccaaggggaaacgctcatgcttcaaatgcggtaagcttggtcattttattgctaactgtcccgataatgatagtgatcaggacgaagggaataaaagggagaagaagaagcattacaagaaggccaagggcgaggcacatatcggaaaggagtgggattcagattgctcctcctccgactccgaccatgaaggactcgccgccaccgccttcaacaagtcatctctcttccccaacgagcgtcacacatgcctgatggcaagagagaagaaggtgagtactcgagactccacttatgcttcctctagtgataatgagtctagtgatgatgatgacatagactattcatgcttattcaagggattagatagatctaagatagacaagataaatgaactcattgatgcattgaatgagaaggataaactcttagagaaacaagaggatttattgtatgaagagcatgataaatttgtagaagctcaaagatctcatgctctagaagttaaaagaaatgaaatgctttcttgtgaattatcttcttgccatgagacaatttctaaattaaggagcattaatgatgatatgaatgctaagttagaaatagcaaataaatctaattcttgtgtagaacatgttatgagttgcactaggtgtaaagattttgatattgatgcttgtagtgaacatctagtttcaatttccaaattaaaagatgaattggctagtcttaatgcccaacttaagactagcaaaa

SEQ ID NO: 96564 - DNA, 222 bp, Zea mays
  Clone ID: MRT4577_19580C.1
aaaaaaaaaaaaaaaaaaacaaaaatttattctaacaaaaaaaaaaaaaaaaaaaaagaaaggttctaaccaaaagggggtcggggccacacatcacacttcctcttacatacaacatattacaactcaatttacgtccttcttaaataaaatcaacttcccctacttttccatcgatcatactcataaaccccttaacatccccattttaatcaacttcct

SEQ ID NO: 96565 - DNA, 4115 bp, Zea mays
  Clone ID: MRT4577_19581C.1
gaccctcgaggccggccgggcacaatccgaggatccgaatccccgacgcaacccttgcgtggtggcgtcaccacccaaatcccaccatccggatctgccgatccgccgccgccatgtcccgctcggagcgccgcctcgcctcggccgtggtgcgccttcccggccgctccagggtctccgcctcgccatccccgcgccgccgctcccagtccccatccccgcgccgcgaccgccgccgccgcgaccgctccccgatcccttaccgcgatcgctccccaagtccatatcgagcccgtcgccgtgaccgctccccgagcccttaccgcgatcgccgcgaccgctccccgagcccttatcgcgatcgccgccgccagtggtcaccctaccacaacgaccgcggccgggaccgtgaccgggtcctgcccgtccgtagcggcgggggcgcctggtccgatgacgacgacgacgacaaggaactccagggcctcagctacttcgagtaccgccgcctcaagcgccagaagcttcgcaagagcaagaaaaggtgcatctggaacatcacgcccagcccgccccgtgttgaaggcgacgaggagaactacggctacagcgacgtggaagaggagaaggtatctccgaaggcctcgccggaggctagcgaggaggagagcaaggatgcgtcggagtcagaatccggtgagtctgatagcctctccgagtccagcggatcggaagcttctatgaggaagaagaaagggaggaataaaagtcgccgtagtagcaagcgcagccggcagcgccaccgccaccgctcatacagttcggagattgaggacgaaagcaagagcgacgatgattctgtgggctcttatgattcggaggagtctagggataggagcaaaaagaggtcgcgcaggcataatagatctaagaagaggagcaggagctccaggaggaagaagaggaggagccaggatacagcatcggagcaaagctctgaggaggaagaggaggaggatagtaagaaaaagaataagggcttgaagaggaagcggagcaagcgatctgattctgaagaatcggtcccttctgatgccactcctgatgatgtaaaagaaattgaagaaactaaagtgccagaaattgatccagaagcaatcaagttcaaggaaatccttgaggcccagaagaaggcttccttggagaacgatatgcctgttggtccaatgccacttccacgcgcagaagggcatattagttatggtggtgcacttaggcctggagaaggtgacgcaattgcacagtatgttcagcaagggaagcgtatcccacggcgtggtgaggttggtctgtctgcagaagagattcagaagtttgaggatctggggtatgtgatgagtgggagtaggcaccagaggatgaatgctatccgtatcaggaaggaaaatcaggtttatagtgctgaggataagagagcattggccatgtttaactacgaggagaagtcaaagcgggagcacaaggttatggctgacttgcagcgcttggtgcagagaaccattggccatgatgtgggaccttcacatgatccatttgctactacagatggttgagtaatgatttcttgttcaactagtcacctgtatcaggtgtgctttacctgtttgtgtttccttccctacattgtaattagtgtttttgaacttgcctagttatgccgcaaattgcttatgacattttgcatgtgaaccatagtaaaaaagagcatattattagcttgtacggcatagacacaactaaacgcccatcagatttgcacgtactgctggacggtcgggcgcgggagctggccacgggccggctggtggcgctcaagaaggtgcggttcgacagcgtggagcccgagagcgtgcggttcatggcgcgggagatcctcatcctccgccgcctccgtggccaccccaacgttgtcggcctcgagggcatcatcacctcccgctcctctccctccatctacctcgtcttcgagtacctcgagcacgacctggccggcctcagctcctcccccgacatcaccttcaccgagccccagatcaagtgctacatgcgacagctgctggaggggctggcgcactgccatgcgcgcggggtgatgcaccgggacatcaagtgcgccaacctgctggtgaacaacagcggcgagctcaaggtggcggacttcgggctggcgaacctcttcgcgccggcgccggcggcgccgctcaccagccgggtggtcacgctctggtaccgcccgccggagctgctcctgggcgccacggcgtacgagccctccgtcgacctctggagcgccggctgcgtcttcgcggagatgcacgcgcgccggcccgtcctgcagggccgcaccgaggtcgagcagatccacaggatcttcaagctctgtggctcgccgcccgaagacttctggcgccgcttggggctctcccacggcgccgtcttccgcccgcagcaaccttacccgagccgcctccgggacaccttcgccgcgtccatgcccgaccacacgttccgcctcctcgccacgctcctctccctcgaccctgccggccgtggcaccgccgccgccgccctcgacgccgagtacttcacgacggcgccatacgcgtgcgagccggagagcctgcccaagtacgcgcccaacaaggagatggacgctaagctccgagaagaatctagaaggaggagcaaccttccgagccaaggcggcgaggcggataagggtctgtcgagggggcacaagagcatgcggctgcaggacacgaaccagagccacgtgcacgccgaggaatcgctgcccgttgtggccgaaaacggggtgacaatggcggggaacgacggcgactcgcggctgttcgtcgacctggagcccgttccggccatcagcaagcggcacggcggcagcgtcggcggcgaccacgcggcgccgtgcgccagggctaggaccatgtccaccagcttcaaggagccgccttgtgtcgccgaacacctccctctctctggccccgtgcagctcgcggcgtccaccggcttctcctgggccaagaagccccggcccgacgccacgacggcggcggtaactgtgacgatgcggagcggctccatggggccagggaccaacaggaacaacaacagcggaggaggagacggagcaagaaccacctccggctccggcgccaccgccaccgccacagcagcggcggcaccatacgaggcggagaagcaggaggtgatcaagcagtgggcacaggtcgctgacgccttcagcgcctctgaagcttacaacagcaggttgaggcagacgcttgacgccaagcagctcaagactggaatgatgcacaaggggaaggtgaacagggtggacttctcagggccgctgctgtcgcagccccggcgcatcgacgagctcctgcacatccacgagcagcagatccggcaagctggtcgccggccatggttcatgaaaggcaccgaggaggaggagcactgatggcagagacacggcatggacacaactaaacgcccatcagatttgcacgtacttaccacagagcaagagaagatgctggaaacatatcaaaggagttggaccgtgagctagctctcctgatgagcaggtgttttttcagggccggggacagacaaacgagtcggcctcatgccatcagggaagagctcagatggaagctgctgtagtggttttcaggtttcatgcaaccagaatttgctctacgcctctacctgaactagacaacaatgttgttgttgttggtgttgtataagatctttttgtgctcgcttgtgatgataatatgcatgacaagctccaaaatgtggtttccaatttacacatagcaaggctactacagatggttgagtaatgatttcttgttcaactagtcacctgtatcaggtgtgctttacctgtttgtgtttccttccctacattgtaattagtggttttgaacttgcctagttatgccgcaaattgcttatgacttttgcatgtgaaccatagtaaaagagagcatattattagcttgtaaaaaaaaaaaaaa

SEQ ID NO: 96566 - DNA, 361 bp, Zea mays
  Clone ID: MRT4577_19582C.1
actgaataatccgaacgctcttgccacagtatggctacagggtatccagagagcgttactaaaacatgcatcctctccccaaaaacacaagatacacatttgtgtatgcacactatacaaaatgatgatgctcgattctagtgcaagcaagcaagcctgtgatgctcaattgaccgacagcatgagatatttattcacaccggaatacatattgccttgcttgacatggtgcaaaggatgtgatacaggctttgtcacaccacaggaatctgatgatcccatagctgcaggtcttccacgtgatcatcaaaatgtatcacagcctctacctgatcatttgatccccgcattctatcctcat

SEQ ID NO: 96567 - DNA, 704 bp, Zea mays
  Clone ID: MRT4577_19583C.1
attgggacctcgaggcggcgggaaacccttctactatgccggtatggggatcgtaccatcatgttgccgacaacttcctctcggtgctttcctcctccactcaccacctcgcctcttcctgcgagtctctggacacaacctctgtcctacccgactcccttcggagagatgggacactggtaccacacatcgcatagcgcatccagagttgcagtgtgggtgccgccttaccccctcttaccacaacacatccagaagtagtttctgagagtatacaacagatcatcatggtcagtgaaggccgtgagagcttcttttgcaatcggcacatctggaggaacggaagatgaggtagcgtaccacctgactgaggggctcctcttgaggaatctctgttgaaggaactagcaggtgacaggaaaacttttcgcgcggtaatgtaattacacatctccaagcgggaggggaggaatcctgtgctcttgggaaatctcaaatggtatactttaatcccatgcatccaccattgacataagctgaacagtaagcccttgattgcgctgataatgagatattgcacatgagtgaggatggagatagatatgtcggtcatttgctactgtggatatggtcagatgacgcatcagactgctcatacagtcctggattcgatctgattttatgatgagaaagatagtgtactg

SEQ ID NO: 96568 - DNA, 1365 bp, Zea mays
  Clone ID: MRT4577_19584C.1
atggacatagcaactgccaagttttttgcaaggttgtctgtcgttgttcacaaggctctgctgcaagcagcagcagcagaagccacgccatccctgcaggctgagccacaggtcgcggcagcggcagcatccaatgatccgtacgtccaaccatgtcgcgcagttcaagtgcgacagcggccgccgcgccgtgcgcgtgggggcctcctcaccaacaccaaccgaccagccgacgcgcggtgcgtgcgtgtgcgtgtgcgtgaaatgggcaccgaaatactagcaggtcgcacgaggatagaccagcggccgcacggtacaggaactgacgccttaatggagggcaatcgtccgcctgccggctgctgcctgctctctgactccacgagatctgcacatattcagttgttctacgtattcagtggtttgttatattatgtcatcaagattgagaaagtatccattaggaagaggagcctgccattgggaattctgaagaagaacgaggaaatgttgatcctaatgtcgatgataacaattctgcaacacgatgtattatacgctgtaaataaagtgagcaaaaagttgcaatcaccaactatgtgcattgactctgctttggatcttataaaaggtatgacagaatactttgagacatacagaattgaggggttttctaattctctcaatattgccaaagctattgcaaaagatttggctgtagatgcatcatttccagtaaagcgccatatagtgaggaagaaacaatttgatgagagtaattctcaagaagaaattctagaagctgagagggctttcaaagttaaatactttttggttttggttgacatggcaatcacctctttgaaaacaagattcgaagaactattgatatttaaaggtgtattcagatttctattgagttcaagcaccctgaagtcattaaatgatagtgaacttcaagagtgttgcattaaatttgcagacactttctctcatgatggttcatctgatgttgaggtacttgatctgatttctgaattaaagattttgaaattcactttgccagatcgcacattatgtgctatggagatttttgagcatatcagagatgtgggttgttatcctaatgcatgtattgcttatcgaatcttattcaccgtgcctgttactgttgcatctgctgaaagaagtttttctaaattgaaactattgaagaattatttgagatcaacaatgagtcaagagaggctaaatggtctagcgacattatgcattgagaagaagttattggacgatatcaatattgatagcatactcgatgtctttatatcaaagaatgttcgaagaaactttataagatga

SEQ ID NO: 96569 - DNA, 2662 bp, Zea mays
  Clone ID: MRT4577_19585C.1
gccggttcatcaaagtacgccgcaaagacatcagcccagccttccccaattccggccacacccgctacgcctgtggtgccgcctgccgcctccccttcctcttcgcttcccgtgcaagcttcaccgccgccatctcctcctcccgttgcgatgcttcccctttcgcgccacggttcctctatccccgccttccctgcccgctccggctcttgcacctgaccaagccaatccgccaatctgttccccttttccgtacgagaggtactatcgccggccatttcgattcggggctgatcggatcggcggctgatgggtcgcgatgctgagaatacttctcctccggtgtcctcgtcggaattggagcaggaagacgacgacgactgctacctaagcgatcagggggacgatgccctagaagagtctgttctccatgttctcgaggacgagcacctcgaggactgccattggtccgcctcatgcgtgatcaccaaggaatccctcttggcagcgcagagagaggatcttaggaaggtgatggagctgctagggttgagggagcaccatgcccggacgctcctcatccactaccgctgggacgtggagaggattttcgagcttcttgatcagaaggacagggatagcctcttctcggaggctggtattcctcttcagtacaccaataatgctggcccaacctcctcagcggaggtgacctgcaatgtttgttatgatgatgtgccaccctcgtgtgccttggagatggactgcggccacagctactgcaatgattgttggactgaatatttcattgtgaaaattaatgagggtcagagccggcgtgtcaggtgcatggctccaaagtgcaatgctatttgtgatgaagcaataattcgaaaactagtcattgcaagacacccagatatcgcagaacgctttgaaagatttttactggaatcatatattgaagataatgatacagtcaagtggtgcccaagcacaccacattgtggaaatgctatacgcgtcaagggcgatatttattgtgaggtggagtgcacatgtggatgccagttttgttttaattgctctttacgagcacactcaccgtgttcctgcatgatgtgggagctctggatcaagaaatgccgtgatgaatcagaaacagtgaattggataacagtaaatactaagccctgtcccaagtgtcacaaacctgtggagaagaatggtggctgcaacctggttgcatgtatatgtggacaagcattctgctggttatgtgggggtgctacaggtagagatcacacatggtcaactattagtggccacagttgtggcaggttcactgatgatcagactaagaagacagaacaagcaaggcgagacctctatagatatatgcactaccacaatagatacaaggctcacaccgactctcttaagcaggaagcaaagctaaagaatgagatccaggggaagatatccatttcagaaaataaggagtcaaagataaaagattattcttgggtcataaatgggttaaacaggctattcagatcaaggcgtgttctttcctattcgtatccgtttgcattctacatgtttggtgatgagattttcaaggatgagatgactcctgaggaaagagaactgaagcagaatttatttgaggaccagcaacaacagttagaatttaatgtcgaaagactgtctggtttccttgagaaagattttcaactttttaccgatgatgaggtcatggatacaatgaagcatgttataaatcttcccaatgtggttgataggctctgcaaacaaatgtatcaatgcattgagaatgatttgttatatcctctacgcacacctcacaacattgctccatacaaatctaagggcattgacagggcctcggagctcaatattagttgggatcctggtgaacaaagttcacagtcaacaaaacatagccaggatgaacacaggaacaaacaagcatcaaatattttgggtaaacgaactcatgaattgcatggttcgagttcttctaacaagcgagagagggtagatgttaacggtggtggtggtggcactttttgatctcaacgtgccagctgaagtggtggacaagatctgaaacttcattatctgatgggtgatggcacattcctttgaactgtacagctgacttaagcttcgtcaccaacataaaggaaaaaatactgttcttttttgctgccttaccaccatagagtacctgcatgtcaaatttttaccctggtgcttggatcccaaggtatagagtagcttttaagttatatgttgtatttcatggcatgatctgaagccaatgttcatagttctgatgaagttgtacccctcaagcaagatgaggatattttggaatagaaccatgcctgtgttgcaaattccagatataatgtatgcagcatggtgaaaagggaattgtttgttgagaagaatgtgagtgattatttcctggcaaatgggtggttctattgacaatgaagacaatgactgattcgtcgtattaaatgtgcactttgtttgttgcaactggcaaccatcttgtttctaggacagttttgtattcaacctgtgaaaatcccggttttctgggcacacattccagatttttatggct

SEQ ID NO: 96570 - DNA, 426 bp, Zea mays
  Clone ID: MRT4577_19586C.1
gtggaccatcaatcatctattcatctgtagtatgtatagagcacccaaatcactatctggcggcatgcaattcatctaacgtccaaaaaccatgaagcatggtgccttgtggttcattgcttctcatgtgctttagtattcaagctgtttcttagtacacagcacaggacggctgcaagctgcggtcaacaacaaagatcatgagctagcaacatcactccacatacaactatcattgcacaaagaacatacaacatcaaccgaccaccacaacattcaccagcagtcagcaacctccaaccaacaactaagttcactatgcaacgcacataaaacagtcagcatacaactaagaagtctcaatgttcaactaacaacaatcaacaacacgcagcgatcactcaccatacaacaactaacaacagc

SEQ ID NO: 96571 - DNA, 159 bp, Zea mays
  Clone ID: MRT4577_19587C.1
ctgcattggctaagtatgggccatcgaaaaagctcttaaaagccagtttgagacccgtatttacctttacaacctgcttctgcatggctatggtgcgacatttaactttatctgcgcttgttcccactgctatcatccaagggcccaggacttttaaca

SEQ ID NO: 96572 - DNA, 635 bp, Zea mays
  unsure (1)..(635): unsure at all n locations
  Clone ID: MRT4577_19588C.1
agcgcttctcttgctctcagttctcgtcgttgctttctcacaagcactcgatttccactctgccaccgcaagaaccgttggagacagcttctggcttgaagatggagaatgggtctgttgatatcactggaagaaccgatttggtctcctctgtcatcgaactttctctcggagtttctcatccaggttatccttgttattattcagtctggggtgatgaaactcaactcactcatggaaccttcgaaaacgttgcgaacaacattatcccacttttaacaggaacagttgatgcttcttctgtttcaatgttgaccgttaaaacaaatggatgtgttcttggtcgatatgctgtcccatttacctttggtgattcctctggatacaatgttcaaggatcagttgaattagttgacatcagtccaacatcntcattagttacatccttctttggaaacaaccaccttggatacaacgctgctcctctcacaattcctgataattttgatgattgggtagcaagaatgctctatgttagacaaactgattttgattgtcaattctcatccccagcatgtgatggagcaccaaatgaacattcttggttcttatataaacgcttgaacttttttttc

SEQ ID NO: 96573 - DNA, 164 bp, Zea mays
  Clone ID: MRT4577_19589C.1
gactagctctagctctcacgctcttattaatcaataaccagctaatcgctcgtgctctgaggggaggcctcgtaattacagaacactatcaagagagtggactcaagtcataggtccagtatagaatgcgcggatacttgtcttagtattacttaatataatct

SEQ ID NO: 96574 - DNA, 642 bp, Zea mays
  Clone ID: MRT4577_1958C.1
atggatcctaagggcaaggggatggtgatcaacgataaggagaaggagtccttcgtcaacgagcccaaagatgacaagcctaccgactcgggctcgggccacaagcgaaaagatggaaagaagaagaagacaagacgcatcaaggagattgtctactacgacgacagcgacgagtcctcttcttcccaaaaggacaacgacgactacgacagacgaaagacggcaacaaggagcaaggaggcgctacctagcaaggtggcgcaaattgaggcagccggacttaatgatgaagagatggccctcatcatcaaaagattcaagacggcgctaaaggatcgcaagggacagccaagcaagaccaagaccaagggaaagcgctcatgcttcaaatgcggtaagcttggtcattttattgctaactgtcccgacaatgatagtgatcaggaacaagggaacaagagggagaagaagaagaactataagaaggcaaaaggcgaggcgcatctaggcaaggagtgggattcggattgctcctcttccgactccgacaatgagggactcgccgccaccgccttcaacaaatcggccctcttccccaatgagcgtcacacatgccttatggcaagggagaagaaggtgtaa

SEQ ID NO: 96575 - DNA, 211 bp, Zea mays
  Clone ID: MRT4577_19590C.1
atcatcattcccagtatgcatgccagcaacacgatggtttcccaccgaaccagatcgggccctgattgatgccacgctaagcgaagagccgtacacactgcgcgactaaagactggtcacgcccgactaagacgacaccctccgcatgaagagtagatgagcccgatgaccagtcccacgagagaaaacacgataccggccctaacaagag

SEQ ID NO: 96576 - DNA, 324 bp, Zea mays
  Clone ID: MRT4577_19591C.1
accacacgttcgccctcgcgatctcaccctcctgtgctcaatcaaaagggatagctctacgggggcctactacttggatccgtgccttatcaccattgaactaggatacgactcatatttcctatatatctacgactcgtacctgatacaccaagctagtactgctctgcaatattaatcaatgactctaaacgtatcttggtacatctacatgtacattctacaactaggctctaacctcctgcacacacattatcacatatttgatacccacaattcatgactcgcacataagctactgagaccccatcggttactctacta

SEQ ID NO: 96577 - DNA, 468 bp, Zea mays
  Clone ID: MRT4577_19592C.1
taaccgtacctcattgacgggaaccatgctccgtactggttagcgtgttagacgatcgtctgctgctgttgctgatgctgcagccatgacatgtgatagatgctgcaacatggagcaccagctagggcggctggtgctgaagcatgtccgcgtgccatgtgtggctgcgcctcctccggtgctttttctctgtgataacgcaactgccggtgcgccgctggaagcggcgcttctacctggatgaatggtacctgtgcgcggccgtctcattgggatgcccataggtgaggcggccatctgaggcgaagctgggatcccggaaccacaaccaccgagtgtgtttcttctactaatggccggatgaggtagtatgctaccgatacgaccgcgagagggtgcgcctgtctttgcctgcgcaagagcagtgccaccgcgagttcagcctctgtttgcgcgtggtgtctgccc

SEQ ID NO: 96578 - DNA, 184 bp, Zea mays
  Clone ID: MRT4577_19593C.1
tctccttcttagcggccgcccgggcggggacgtctgatgtctatgccccagttctcgtcttacacacctctcacatctgctgcaaagattgctgtgctccctaccgagatctgctcgccgatccctcaaggagctggagaaggagcccaaatttctcaagaacggagctgctgttatggtgaag

SEQ ID NO: 96579 - DNA, 233 bp, Zea mays
  Clone ID: MRT4577_19594C.1
agcggaccgagacggctgcttcgcatgttgttatccgatgcattcgtcctgagcgctgacggggccactggcgaccactccgttcgcaacgactccagcacctacggtgaggtcctacagtgcaacatcattctcgatcgggagacgcagaggtcccgaggctccagcttatacaccttctccacggaggaggcgatgccgagcgccatgaaaggcatgaacgtgagggagct

SEQ ID NO: 96580 - DNA, 1413 bp, Zea mays
  Clone ID: MRT4577_19595C.1
ctcttcttctgtttgttcctttggtgtttccctttggctccatggcaggctcttcatcatacagcgttctccctgaccagaccatggacaacgatgatgcacaaattggagttgctaaaactcagggaaagtattggggcattttcatctgctggcttcttggaaatggatgtctatttgggttcaatgggatgcttactattgaagattactacgtgtacctcttcccgaagtaccatccaacaaggattattactctcacctatcagccctttgttctcgccacaaccgccatattcacatatcacgaggccaaggtcaatactagggtgcgcaacctggcaggatacacgttgttcttcttgagctcatttggagtgatcatcctggatgttttgtcttcaggaagtggtggaatcgccccattcgttggtatctgtaccattgctgctgcttttggcatagcagacggtcatgtccaaggcggaatgactggtgatctgtccctgatgtgcccagaattcgtccagtccttctttggcggcgtagctgcatcaggtgcaataaccgcggcgttaaggttcttcacgaaagcggtgtttgagaattccagagatggcctgcggaaaggagctatgctgttctcttcgatctcgtgcttctttgagcttctatgcgttctactttatgctctggtgttcccaaagttgccaatcgtgaaattctaccgttcaaaagctgcctctgaggggtctcagacagtcaccgctgaccttgctgctggaggcatcaaaagcctgccgaatccattggctgaggaagatggtgtggttgaacggttgaacaacaagcagttgctgcatcagaacatggactacgctctggacatgttcctggtctatgtcctgacactgtctattttcccagggtttctggcggaagacactggatcgcacagcttgggttcttggtacgtgcttgtcttgatcgcgagctttaacgtgtcggacctgatcggaagatacctgcctctggtcgagcaaatgaagctgacatccaggacggggctactaatcgcggccatctctaggttcctgctcgtcccggcgttctacttcacggcgaagtacggtgaccagggctggatgatcatgttaacgtcgctccttggactgagcaacggccatctcaccgtctccgtcctcaccgaggcgccgaaaggctacaaggggccagaacagaatgctctggggaacctgctggtgcttttcctcttggcaggcatatttgttggcgccgtttctgattggctgtggctcataggcaaagggtggtgaccgaacttaacttgttctccccaggtgtatatttattatgcaagctagcagatcatgcaatcaataaatcatttct

SEQ ID NO: 96581 - DNA, 714 bp, Zea mays
  Clone ID: MRT4577_19596C.1
cctcgaggccggccgggagcactattccacagcgacacccgacaccgccgtagcgatgatggcgtgcgctgttcaagaccacggacgagctcctccgtcgcagctgcggctacacctcctctggcaacccggagaggaaggcgaccatcctgggcgctgcgagatgaatcaagatagccgctctccctcactcatgaagttcaacccgctcgtcgcctccctctcactctatgatatcgtcgggaaccacggcgcagaggccgacgtcgaccacatgcacatctgcctcccggcctggagaaggaggtcagtgtgggacaaccgcatcgagaaggagatggaggtctccgacggcgacatcatcacagacggcgaggccaacaaccacaagatgactagggacaaccgcttcaacatcgacgtcgggatcgataatggtgtctgtgatgccatcgactagaactggctcaacgatcttgacaatatgatcactgatcactgttcactccgctgatgcgaatgtcacgaagggtttcaagaagattggaacttatgatgagaaaaacatgtttggtgagactactcatgatgccgctgatgctatgactctctatgcatggaaaagccaccgagccaggtactgaggtgaacgatcctggtgataaaggacacgggcccagtactatgccggcagtcaacacgcaggtgactcct

SEQ ID NO: 96582 - DNA, 867 bp, Zea mays
  Clone ID: MRT4577_19597C.1
ctcgaggccggccgggccggggttaattcggcaccaaccagctgcggagggaggaaacctagcggaacactgtgcaggtgacggcggcgcgctaccggtgacaggggatacggaggcatcgtcccctcctccatccccggcgcggcggcgccagcagccggcctgcaggcacacaagtggccacccttccaatggcggtggagaagtccagcagcggcacatcaactccctccaccacctccaccatggaccggtttcagaagattgtcctaagctgggattacctccgtctcatcgctgaatccaagggcggcaagcaggccaaggtgctgcagcatgtgaagaacacatacgtctcggtggctgagtaccttggtgtctttgagccactgctctttgaggaggtcaaggcgcagatcatccagggacgcagtaacgacgaggaagaatctgggatggactggaggaggggagcagtggggtcgtgcacggagtctgaggggttccacaagctctctgtggcggtggaagacaattttcaggataatgtgtcagagaatgatctactgcttatctccaaggagaaatttgaggagggatcgacccctaatgcatatgcatttgcattagtggagcagcgaggtggtggcatacatatttcacttagaacttttgtggcaggtgaaattcaaaatctgaatgttgcaaagcctgtgaagtctacaaggctgcaacattttgcttccattattgcaagtcaaaacagcttgctgtggatactgaaggtctgcagcttgtctacaataatggcggagttcacagctatgcattccgtagcttctctacccttttaaggatttgattctt

SEQ ID NO: 96583 - DNA, 157 bp, Zea mays
  Clone ID: MRT4577_19598C.1
aggccgcacagagctatttatacatggctagctcactacagcatatataggagagagatatttggcatagagaagcgaaaccgaacagaggacgagatggcccgctaggccacccccggaatcagcggtacggggcacaacagctacgacgatggcg

SEQ ID NO: 96584 - DNA, 269 bp, Zea mays
  Clone ID: MRT4577_19599C.1
gttattgttcgtattatattggctggcctgccgtatggggcaggcagctcgtgcgctctcggcagccggcactcaaatcggcaggaggcaaaacaagatacgtggctggattctggatgatacgaatacgattgcaaggtccatctacggggtgaccatatacgtacgtacgtacagatacatatgcgagagttgtttatactgcagggttccttttctcatgaaaagaaaaaaaacatcagacgtgaactacagtgagaatgtatgca

SEQ ID NO: 96585 - DNA, 5731 bp, Zea mays
  unsure (1)..(5731): unsure at all n locations
  Clone ID: MRT4577_1959C.1
atcccgtggttcggccgagaccaacgcttgcctactccacgttgtggcgtcccaacagacgagggttgcaatcaacccctctcaagcggtccaaagacccacttgaataccacggtgttttgcttgctttttctcaatcccgtttgcgaggaatctccacaacttggagcctctcgcccttacactttaagatcacaaagaaacacggagcaagggagggattagcagcacactcaagaaatcacagcaacaccacgcacacaagtcacaacgagagctcacaatacaactcaatgagttcaccactcaactagagctccaattgctatcgcaaagaatcaaaggcgcggaatcgatatcttggtgcttaggaatgttgtaggaatgcttggtatgctcctccatgcgcctaggggtcccttttatagccccaaggaagctaggagccgntgagagcaatctaggaaggctgatcttgccttctgtcgactggcgcaccggacagtccggtgcacaccggacatgtccggtgcccgatttctttccataaatggcacagtcgaccgttggcagccagagagccgttggcgcaccggacatgtccggtgcacaccggacagtccggtgcctccttctagccgntgnctcggccacgtgtcccacgcagatcgcgcggccgaccgttggcccgaccgaccgttggctcaccggacagtccggtgcacaccggacagtccggcgaattatagccgtacgtcgccggtgaattcccgagagcggtcagttcgcttgagccagcctggcgcaccggacactgtccggtgcttcaccggacagtccggtgctcccagactgagcagacttggcttagcaaagccatctcattttcaattggatttttcctgtttccagcacttagacacaatacattagtccataaaataatgtactaagtctgagaaacatacctttattcttgatttgtactttgtccaccacatgggcatagatcaacacaaaaacacttgtgttggcactcaatcaccaaaatacttagaaatggcccaaggacacatttccctttcaatctccccctttttggtgatttatgccaacacaacataaagcaactagaacaagtgcaatatcacttcaaataaaaactcaattttattttgattcagttttggcatatatggatcatcctttgccaccacttggtttgtttttgcaaatcaaactcaaaatcctatctctaagtcaaatccacttgtagagacataaagagaggttttccaaagaaaattgattcaatattccaaaaactccccctatttcccataatcaatacttctccccacaagaggccaacttttgacaaaagagacaacaaaagagatttgacaaaccaaaagctctattctactgttttcaaaatctctcaagtggtagctgatccatttatcactttggcctttattttctccccctttggcatcaagcaccaaaacgggatcaatcttggccctttaatcccattgcctcaccaaaatcttcaattaagagtacaaaggcaataagatcatagagatgaacttggaataagttaccctctcatcggagtgcagtggaagtcttgcatggtccaagttcacctttccctttcattccacttcgagactaaatcaagcagactcaagcaaatggttagtctcaaagggtcaagttgtaacacatctccccctaaacatgtgcatcactttgcaacggacttgtgaggtccagggagtgtttgtacaacttgagcaccataataagcaacaaaatgcagaatgaacctcctttgttgaggtcggtgtgcccgtcggtccccatcggagtcttggcgggtttggcgtccttcatcccaaaccgctttagcagatcttgcgtgtacttcgtttgggagatgaaggtgccgtccttgagttgcttcacttggaacccaaggaagtagttcaactcgcccatcatcgacatctcgaatttctgcgtcatcaccctgctaaactcttcacaagaatggtcggggtaccgttcatcctcgaagccagggggttgctccacgtacacctcctccttgattggcccgttgaggaaagcgctcttcacatccatttggaacaacctgttcatcgtcttgagttgggggttgcaccattgttgaggaagatgattgatctcgttcaccttgttcctgtggccgcacttctccaatcgccatggttcgtatagcggccgtcggaacatcttcttcatctacatcatcaagatcaacaacttgctctcttggagagccattagtctcatcaaatacaacgttgctagagacttcaaccaaacccgatgatttgttgaagaccctatatgcctttgtatttgagtcataacctaacaaaaacccttctacagctttgggagcaaacttagaattcctacctttcttcactagaatgtaacatttgctcccaaatacacgaaagtaagacacattgggtttgttaccggttagaagctcatatgaagtcttcttgaggaggcgatgaaggtagacccggtttatggcgtggcaagccgtgctcacggcttccgtccaaaaccgttcgggcgtcttgaattcaccaagcatcgtcctcgccatgtctagtagcgtcatgttcttcctctctaccacaccgttttgctgtggtgtatagggagcggagaactcgtgcttgattccttcctcctcaagatactcctccacttgaaggttcttgaactcggacccattgtcgcttcttatcttcttcactttgagttcaaactcgttttgggctctccttaggaagcacttgagggtccttcctcctatgcttagataggtgacgggtccaaagaggtccatatgaagtaactccaggggtcttgatgttgtcatcacatttttggcatgatgagagcttcccacctgtttacctgcttgacaagctgcacaaggtctatctttttcgaaagttagattagttagacctatcacgtgttctccctttagaagcttgtgaaggttcttcatccccacatgtgctaaacggcgatgccacagccagcccatgctagtcttagcaattaagcatgcatctagaccggcctcctcttttgcaaaatcaactaaataaagtttgccgtctagtacacccttaaaagctaatgaaccatcacttcttctaaagacagacacatctacatttgtgaataaatagttatatcccatattacaaagttgactcacagacaacaaggtatatccaagtgactcaactaagaacacattagaaatagagtgctcggatgaaataacaatttttcctaaccctttcaccttgccttggttcccatcaccgaatatgattgaaccttggggatccttgttcttgacgtaggaagagaacatcttcttttcccccgtcatgtggtttgtgcatccgctgtcgataatccagcttgagcccccggatgcatacaccttcttatcctttctacaaatagcaaaggaagcattgcaagcataataaattgtagaaggttcattcattactttcctatgaacaatatttcttctaggcatatgatgaacaacatttttcctagccaaatttctatcatgcataatagaagaactagaagcaatcatggcatgagaatcaaaagcatcataacttctataaatgttcctagaatgtttcttatcatgatacatgaaagcatggttcttttgagcactactagccataggggccttccctttctccttggcagagatggaagccttatgacttgttaagttcttgacttccctcttgaagccaagaccatccttaactgaggggtgtctaccaatcgtgtaggcatcccttgcaaattttagtttgtcaaattcactcttgctagtcttaagttgggcattaagactagccacttcatcattcaatttagaaattgaaactaggtgttcactgcaagcatcaacattaaaatctttacacctattgcaaactacaacatgttctacacaagatgttgatttattagctatttctaacttagcactcaaatcatcatttatgctctttaagctagaaatagagtcatgacatgtagacaattcacaagaaagcatttcattccttttaatttctaaagcaagggatttttgtgcctctacaaacttatcatgttcttcatacaaaagatcctcttgcttttctaataacctattcttatcattcaatgcatcaattaattcattaatcttgtcaaccttagttctatctaggcctttgaataaacatgaatagtctatttcatcatcgctagattcttcatcacttgaggaagcgtaagtactagtattatgagtgcttaccttcttttcccttgccatgaggcaggtgtgatgctcgttggggaagagggccgacttgttgaaggcggtggcggtgagtccttcgttgtcggagtcggacgacgaacaatccgagtcccactcctttccaaggtgtccctcgcccttagccttcttgtaagccttcttcttttccctcttgttcccttgttcctggtcactatcattatcgggacaattagcgataaaatgaccaatcttaccacatttgaagcatgagcgcttccccttcgtcttggtcttgttgggatgctccttgcgaccccttagcgccgtcttgctaggtagcgcctccttgctcctcgttgctttgagagcaatggtttgaggctcttggattgggccattcaacgcatcatcaacgtatctagcctccttgatcatcatccgcccgcttatgaactttccaagtatctccttgggcgtcatcttggtgtacctaggattctcacaaatattgttcacaagatgtggatcaaggacagtaaaagaccttagcattaggcggacgacgtcgtggtccgtccatcgcgtgcttccatagctccttattttgttgacgagggtcttgagccggttgtacgtttgggttggctcctcgcccctgatcattgcgaatctcccaagttcgccctccaccaactccatcttggtgagcatggtgacgtcgttcccctcatgtgagattttgagggtgtcccaaatctgcttggcgttatccaagccgcttaccttatggtattcatccctgcacaatgaagctagaagaacagtagtagcttgtgcatttttgtgaatttgctcattaatgaacatgggactatccgtgctatcaaagtgcattccattttctactatctcccatatacttggatggagagagaacaagtggctacgcattttgtgactccaaaatctgtagtcctctccatcaaagtgggggggtttaccgaggggaatggaaagcaaatgagcattggaactttgtggaatatgagaataatcaaaggaaaattttgaattaaccgtcttctttttctcgtagtcgttgtcatcatccttttgggaggaggaagattcgtcgctgtcgtagtagactatctccttgatgcgccttgttttcttcttcctcccgtcttttcttttgtggcccgagcctgagtcagtaggcttgtcatcctttggatcattgacgaaggactccttctccttatcattgaccaccatccccttgcccttaggatccat

SEQ ID NO: 96586 - DNA, 598 bp, Zea mays
  unsure (1)..(598): unsure at all n locations
  Clone ID: MRT4577_195C.1
nagccggccggggnaaagctcactaccctgtaacctccagcaagcttcagctagctctcattgcctccttgcaaggagtgtggagatggctactaggcccggcctctcgtggttcgtttgctgctgcctcttgcctggcggtacgccgcgggcagcgcggtgtgcccccaccgagggccgaagccccttttgggcccgcccccgggaaaaaaagggcagacgggcggcccccgcccccccccgaaaaggggccgaaacccccctttcccgggggggccccggaaaaggggacccccccccccccggacccccccggaccccccccccccccccccgggggcccccccccccccgggcgggtccccccccgggaccacccctggggccccccccgcgcccgccaaggcccccccaacgccccccggcccccccccctcgccccccccacaccaccgccgccgcccctcccccccaccacccccccccgcaccccccccccccccgccccccagcccccccctgcccctcccccccccccccttaacccccccgcccttctcccccccgtccccccccccccccccccgccccccctccc

SEQ ID NO: 96587 - DNA, 430 bp, Zea mays
  Clone ID: MRT4577_19601C.1
aaatggccaagcttttaatgctgaccaagtctgattattttgcaaataaacacatgaagatgctaagcccttcacccttgagcggcatgcacgattcactgaaggccctggaagaaaaaaagcaccagaaatattgtgtagcagggagacaaaatcaaggatgcaagttcgtgcagaatgatgaaacgagacccggctcaaatacagtacattcaaccgagccattactcgatgggggggatgagggttgcggcgactatcttggacaccctagaggcgacaagagggatcctcttgaggcttttcactacgggaatctctggtggcgtctccgactggaacggtcgtgtaaggaatctcaaccagcctggcaagcttcctctagaacttgggaggctccacacgctacgacaggaagggagaacctcgt

SEQ ID NO: 96588 - DNA, 313 bp, Zea mays
  Clone ID: MRT4577_19602C.1
ctgacacgtgggggaataaattatatgtcttattgcgaagctcattacggtgctcggtaaactgtgtcaggcacgagactctcgatgacttcgcagttctcgcgattatcgacgcccaattcagtgatcaccagttatttccttattccgcccaattagctggattagtgtgccaaatacaatgttggtaggcatgtgtgcgattacaatattgtaatcacttataaagatgtgcggtgctctatcaaacatgggataaagctagcctctaatcaattagctgaggacatgcgtaggctaatcgtatacaatg

SEQ ID NO: 96589 - DNA, 996 bp, Zea mays
  Clone ID: MRT4577_19603C.1
ggtacctcgcgggcccggccgggagctcctccagtccttctgctacacagaaacgccatcgcctccgcccaaaaaacagcctccacacacgacctaaatcttttcctgcccacgggcgactcccaaacccaacagcagcaagaaagccaaggaaaacactcatttccttcttccttccttctctaccatatagccaagaaccgaaggtagcttgcgacttggcaagctacaagttgggcgattcaagcagcaggatggtggcgccggtggtgatcgcgtcggcggggctgggcatgctggccggcgtggcgatggccaaccggtcccttggggacgggctcccggcggcctacaggtgtgacgcgcgcccgcgctgcgccacgtgcggcggctccggccgagtcgagtgcttgtgcaaccgctggtccgatggcgactcaggctgccggacctgcgcggggtcggggaggatgccctgccgcagctgcggcggctccggcaccggcaggccgctcccggcgcggctcaccgtccagcaccagaagccgccgccgccggccggctacaactgatggaataattaggtatccatatccgtggattgtataattcacgcgggaatatatatatggtgcaacccatccaggaaatcagttcaactgcgagatgattatgcatgtacatgcctcttcttcaagaccggttgtaatatattgtgctgaggacactcggtgtcgctgttgttcagttaatatgcaaattgcacagcacaagaaagaagaagaaaaactgtgttgaaatggtttttttctttagagatctaaggaaaatatatgattgagaagggagagctgtccgtgattctaaacacagttttgttgtatgtagttaattctggtggatgtaatgtatcatacacatgcttagattcgttaatatatagatgcacccacatgaacatgatttactgagattgaaaaaaaaaaaaaaaaaagc

SEQ ID NO: 96590 - DNA, 265 bp, Zea mays
  Clone ID: MRT4577_19604C.1
cggggagacagctggagttggagagattgagggccacggcagcctgggtgtgtctttgcttctcttcaggacgtgaagacgagccagtatccttggtgtgcactcagaagtcctcctgaagttctcagccagaccttctgaagatggagcggtctacccaggagctgtttatcaacttcacagttctcctgatcactgtgctcctcatgtggactcctcgtgaggtcctatcaatactgaggggccatgccacactcccgggagt

SEQ ID NO: 96591 - DNA, 364 bp, Zea mays
  unsure (1)..(364): unsure at all n locations
  Clone ID: MRT4577_19605C.1
tgggttgctttgtcacaggtgttaagagagagcgtggagacttttccttggagctnggtcccaagttggaggatnttagtaagccagtgaatttgattaactttctggtttgcttgtaggaacaatatgtgcattanagtatgttgtgtgcctatttacatgtgtgataaaggaccaggttgtgcttaaaaggtatgccaatatgagtgggaaggggaatgagttgtatggaagagaggatagataacatgtgaattagttttttgtatattaggtatttattgtgtgttttgtattattacatgttgttttattattgatatgtactgtttgtactgttgttgatgtttatggtaattgataa

SEQ ID NO: 96592 - DNA, 744 bp, Zea mays
  unsure (1)..(744): unsure at all n locations
  Clone ID: MRT4577_19606C.1
gtcggcgtagtctgctcttttattgggacaagggacttgattcaagaacatattgccttcagggtgtggccacttgcaggaaagtgggagatgccgaaggagaccatcaaagagtccgacgaaggcggactggtcaggctgaaatacacattcaaatacggggataaatttgttgaacccgatgacgactggttgaaaaacattgaaacattaagtgacgaactgcttggggcatattcgaaggccgagaacactgcgttatcagcagccttcggatgccgaaagaagaaaagactgaaccgggtatttgacgcagtcgggtttgtctaccctgattatcactatccgatactgggtcgcaaaagaaagaatacttctcttgcaacagaagctaccacaagtgccactagtgagccagcgccgcaaaggaaaaagatgaaggtgctcacccaccgagcgcgttttattgagccggccacagtgccagaatttattgatgaagtctctttggcctctgaagctacagaaccggctccagtgccgaagatagaagagaaatctgaagcgccttcagcagagaaggcagaaaaaccgagaattgaaggacaaaaaatattggaaatcttaagtccttcagcaaatgtcgaaacaagaaaaatccaaaagggcccattggtgagccgcgaaaaaaanattttnnannaaaaaaaaaagtgctctgcgttggtaccactgcttgcgggc

SEQ ID NO: 96593 - DNA, 751 bp, Zea mays
  Clone ID: MRT4577_19607C.1
tttccttctgctccttccaccgccgcgggcgacatggcgagcagagaccggtgctagggtttgcgccgccgccgccaccaccgcccactccattcccccgcccccctctccgtcgaccccagccactcccgagccctccctctgtcggatcgcatctccgccccagccctccgccgcgggaacccaggtcgcggcccaagctcgccccgacgcccagtcgccgccgagcttcgccccgaggtactcaaagctcctaagatggcggatgaggaacatgctcaaacctctcggaagagggttgcagataaacaaatcaacaaggacaatcctgagcttgatgatgactcaccggagcaagagggaggaacatttaagaaagctagtgaggaagtgatggcaacccgaaaaattgtaaaggttcggcgccagcagccgtcgtcagctccttcttccaatcctttctctgcaattaagtttaccacaagtgattccagtgttcaagcaagtattcctgtctcaaaacctccaccttctgatgtcacaacgtcaaatgtaaggagctcaactgagaaagctgatgaggtcagcaatggaagtgggaaagatgatgtcaagactgcagattctaatgaggtagcagagattcaaaaggatgaatcgggcctgaatgaatccaatgcagaaaacagtcaaatgcgccaatggaagcacactcttcacttactgaaaatgataagaaggcaggcagcac

SEQ ID NO: 96594 - DNA, 395 bp, Zea mays
  Clone ID: MRT4577_19608C.1
tcggactcgcgtacatcgagagatgcgtccctttgttaccttagttgaaaattcagtggcgctggggtatgtcgtgattctatcgttagttttctgctaaatcaacttaatgattgatcttaattatgtatggttgaggtgagagatcgaccatattagttctctgtacgtagtgaccgatctcgtatgaggacactatatgccagttttactgtgattattgatatgatcctcatgtaatcgatcgacatttagctcgatctgggaaggcgagaattatggaggacgtgcaatcgatcacagttcgcgtccactgatagcgtgctagattccggcatttcacagtgatactcatacatcttgcgatcgatctccagataatgcaccttgatctc

SEQ ID NO: 96595 - DNA, 399 bp, Zea mays
  Clone ID: MRT4577_19609C.1
ttttaacttttttagtatttaatatttatttcctgcagcccagacaaataaatggaaggtgaattgctatgtggaattaatctccaggcctcacggaaccttgagctggcctaaagtgtggccttcactattaacaagacttttaccacacaaaagtgtgggatttttttattaaaaaaaaccaaacaggcttccttcatgtaaaaacccaccaacacgccctaccaaattctggaacatgacatagccagttccacaggcacaaatcaggtcggtcaaagtccttaacaggtcccttctaatgggatggcttaacaacaggaagcatgtagccaaatcgtggggactcttttttctcttcggggccccctgaaatgtcttttcagggacaagctcacg

SEQ ID NO: 96596 - DNA, 523 bp, Zea mays
  unsure (1)..(523): unsure at all n locations
  Clone ID: MRT4577_1960C.1
tatctgcatgtctgggcggcaggtagtattgttccttcgatttctcgatctgtatgtttggngaattgcatgcactaagttatcgaagtgtgatgcataccgtacttttgtggtgtttaccatgttggtctagctccccctgtatgtatagccaaacgtgagatttggctttgtcataatttctttcaacatcttcctgtgatttttctttcttgtttttctctaaatttcacccttgttccctagaggttctttctcttgtttccgttgaaaaaatcttaaacattttggatatgcatatgagatggtaaaactgctcctagcctcccatgtttatgtgttcattacatcctaacaatgggtatggatctggttgntcagtccagagatacaagtttagtgatgttgctgntagtttgttggtttctttttgagntctttacaacaaaccttatgcctgtgatccatcaaatctaccaaaatattccccaagcagggaatacgatgctaagcttcgagatga

SEQ ID NO: 96597 - DNA, 1088 bp, Zea mays
  unsure (1)..(1088): unsure at all n locations
  Clone ID: MRT4577_19610C.1
cattgggtccctcgaggccggccgggaacctgtgcctcctctattctttcccttttcctcgtatccatcctccggcgtccgcccttctctcgcgcgcgccgaccgccgccgccaggtgccaggaagtcgtgggaagtcttcttcggcgacgagcacccgccaggccatatctctgcaatgggtgactacacaatccagattagcaccaagctcattgaccagcttgctcgtgatgacgagaaggtaaaacggaaagccaggaagcccaagcctaagaagaagcccaccgtccagccacatgaagagcccctggaattcccgagagaaccaaagacgacaagccttgctactgctcctgggtggcctctgcagcctccccctatgtttctgccagtgacccctgctcccccgccacccccggccacaatgccggaggtggaagccattcgttccgtcctgaaagaaagtgaggcgcttctcaagaagctggagaaccaggaaactggggcacgccaagagctcagcaagagagcaaaggagctgcacgacaaggagttcaagctaccataccagaaacccatgccctgcacccaggagagggcaggctgccttgagtgttacaagaccaatacaaaggacccgctcaagtgtgctgaagcagtcaagagatttgaggcatgtgctctcatggccatcaaaagtactgccgcaaaagctgattagtatgtagtccgtgaagctttgtgagttggggcgagctgatacgcggactctgttttttatcttttgaggcaattcaaataaccaaggattttcatgggacccactgtagatttctaatgccactgcactgggctacctgaggcagcgcaccttgagcttagcgatattgcatatgtttgttaaaattggtatatcaagttgctggtgcaaaggttttttctgaaatatatattgatcttgtgttggattggtatccactagctacgctgcatatttttgctgtgttctatggtgtcattattgtgctattgtcgtactcttgtgtgcatgatggctctgtttccctnnnnnnnnnnaaaaaaaaa

SEQ ID NO: 96598 - DNA, 309 bp, Zea mays
  Clone ID: MRT4577_19612C.1
tatgtgtttttaatcatcaccctgtattggttcttgaggcccattggtgctcgctctaccgagcccgcattctatacgacttttggcagcagggagcccttttaccccagctggagcagagccgacatggcgtaagacccttctcctttgtcctcccaggtcggagctgtgacatagcgcacgcaaattgcattcacattcattcctaggcgcaggaacttttaccccacgccatccaactacagaccggatccaattcgccctattcctgctggtccagaatattttgccacaagttcggcaatcccc

SEQ ID NO: 96599 - DNA, 310 bp, Zea mays
  Clone ID: MRT4577_19613C.1
gtgagtcgtcataaatcgggcaaggagcagggagacgacgacctgtgcacaacccgaactaggtatatctcctcaagccaggcaaggcactcctgcccatcgatggccgtcacaccgcctggaaggaacattcctccacgtacgactcttggtgcacgaaccagccaacaccaccattgtcaagcggtacgacactgacgacggtccgtattcatggaagtagtttgaaatggacgcctcttcgccttgatactggtaatctactcatggagtaagtcatgctgttacccgcacgacccctaccctcgac

SEQ ID NO: 96600 - DNA, 1847 bp, Zea mays
  Clone ID: MRT4577_19614C.1
gctcctctcttcctttctctctcgccgcaggcgggcagttcgagagggcgtgcgttgctcgaggggcggtaaatggcagcggcgacgacgaggggcagggccgacggtgacgccggcgccggcgcggtggtagatccggaagccgtggccaacgacgtccacgcgtccatcaacaacatcacggcccggcgaaatctcgggtacctgtcgtgcgggacaggcaaccccatcgacgactgctggcgctgcgactcggactggcacaacaaccggaagcgcctcgccgactgtggcacggccggggtgggcaagccggagtggttatcggacggcaaggtgtacgtggtgaccgacccgagcgacgacgaccccgtgaacccgcgcgagggcaccctccgccacgccgtcatccaggaggagccgctgtggatcatcttcaagcgggacatggtgatcacgctcagggaggagctcatcatgaacagcttcaagaccatcgacggacgcggcgccaacgtgcacatcgccaatggtgcctgcatcaccatccagtacatcaccaacgtcatcatccacgggctccacatccacgactgcaggcccacggggaacgccatggtgcgcagctccccgagccactacggctggcgcaccatggccgacggggacggcgtgtccatcttcggttccagccacgtctgggtggaccactgctcgctctccaactgcgccgacggcctcatcgacgccatcatgggatccacggccatcactctgtccaacaactacttcacccaccacaacgaggtgatgctcctgggccacagtgactcctatgtgaaggacaaggcgatgcaggtcacgatagccttcaaccatttcggcgaaggcctcattcagagaatgccaaggtgccggcacggctacttccacgttgtgaacaacgactacacccactgggagatgtacgccattgggggcagcgcggagccaaccatcaacagccagggcaaccgctaccttgctccgacgaacccgttcgccaaggaggtgaccaagagggtggagactgcccagaccgtgtggaagagctggaactggaggtcagagggcgacctgctgctgaacggcgcctacttcaccccgtccggcgcgggcgcctcggccagctactcgcgcgcgtccagcctcggcgccaagtcgtcgtccatggtcggcaccatcacctcggacgccggcgcactgtcgtgccgcaagggcgcggcctgctagcgcggatcgcgctccctctccagcaacaggaaaagaaacaggacaacaggaaactaagccacctcaacaccaccaccaccatggttacagtttcttcttcccttctttttaggggtcgcttttgacaagggttatattatatatatatatgatggtcctccttgatattttcaccatttgctcaacctcccccctgctcccgacatggaaagctacctggagcagcaggcgtgaagcgttgctgattggtcgctcggtctctctattagtcgtctgatctgagtgttgcgtgttgttccctctgcctacaagcaagtggtgtatgttgagggcagggggtgcgtgcgtgcgtgttgtgtgtgatacttactcacttggttgttgtgttgagaaaaaaagggtcagattgttagtagtggtagtactacatgttacgcctggacagactgggatggaatggatgtacaagacatggaggaatacccatgttcttaactcttcttcttcttcagtgaaaaaagctaaaacgttacagtttagctgaatattttgatctaaaaaaaaaaaaaaaaaaa

SEQ ID NO: 96601 - DNA, 356 bp, Zea mays
  Clone ID: MRT4577_19615C.1
ggggaagaccagcaagattacctgttccaaaaaaaaaaggttagggaaacgacattacaacggggggggacccccccttgttagaatttaggggggtggaaaaaaaaacaggttttttttggtttgggggcccccaccaaaaaaaaacctgggggggttttgggcaaacaccaccatacatttattggggccggccaaacattgtaacaaaagggagctgggggctttttttgctccacaagaaaaaatccccaatcttttttttttttaaggggggttcactggggccctgaacttttttccggggtaaaccgggggattaccgggctttttcttgtttctgagcaggtgggtga

SEQ ID NO: 96602 - DNA, 613 bp, Zea mays
  unsure (1)..(613): unsure at all n locations
  Clone ID: MRT4577_19616C.1
gtcgcccacgcgtccgaactgatgcaggtgatgctcctgggccacagtgactcctatgtgaaggacaaggcgatgcaggtcacgatagccttcaaccatttcggcgaaggcctcattcagagaatgccaaggtgccggcacggctacttccacgttgtgaacaacgactacacccactgggagatgtacgccattgggggcagcgcggagccaaccatcaacagccagggcaaccgctaccttgctccgacgaacccgttcgccaaggaggtacagtactgtagacattgtagtagctaggcacgatgcctctgccaatcagcgccggccaggccatttttataaccgaaccgagctgcaggtgaccaagagggtggagactgcccagaccgtgtggaagagctggaactggaggtcagagggcgacctgctgctgaacggcgcctacttcaccccgcnnnggggccgggcgcctcggccagctactcgcgcgcgtccagcctcggcgccaagtcgtcgtccatggtcggcaccatcacctcggacgccggcgcactgtcgtgccgcaagggcgcggcctgctagcgcggatcgcgctccctctccagcaaca

SEQ ID NO: 96603 - DNA, 605 bp, Zea mays
  Clone ID: MRT4577_19617C.1
ccggccgggctcctccgcctccatccgccccgcgtccagtgctcctctcttcctttctctctcgccgcacgcaggcagttcgagagggcgtgcgttgctcgaggggcggtaaatggcagcggcgggctcgtccgcggcgagggccaggagggcggggctcgcagccgccgccgccgcggcgctcctcgtcctcgtggtggtcgccgtcagcgcggcgctccctggcgggcgggtgagggtcctcgacggccttcggcaaaggagcacgtccgtggtggcgggaggcgcgaggcggtggctgcgggactcctccttgccggcggcgacgacgaggggcagggccgacggtgacgccggcgccggcgcggtggaggatccggaagccgtggccaacgacgtccacgcgtccatcaacaacatgacggtccggcgaaatctcgggtacctgtcgtgcgggacaggcaaccccatcgacgactgctggcgctgcgactcggactggcacaacaaccgtaagcgcctggccgactgtggtattggctttgggcgtaacgtcatcggtggacgtgacggatggatctacgtgtgcaccgacccgtgcgatg

SEQ ID NO: 96604 - DNA, 123 bp, Zea mays
  Clone ID: MRT4577_19618C.1
acatgtccggtaatgagggtcaccatttatcgagtccatcctcatatgctaatcctaaatagatggcatcctctcaactgatgggcttgcttcgccctctacaatgactagggttttatcaaa

SEQ ID NO: 96605 - DNA, 357 bp, Zea mays
  Clone ID: MRT4577_19619C.1
aatagagagacgatatgctgatcacattagtgagcaggcgctcgctgtgagatgaccacccctaaacatgtaagatggctctgcgcgagaacacgttggcataggacaatgcatcatccgaggtcgaccatagaccttaacccattagcactgtacactagcacctgcgactactaccgagatggctttcaccacgatcgtgtacggacgagctcaagaagaggaatgccatggtcgtgccccctgcggtccgcggacgccacaagaaggtcgatgatggccacaacggagtgggtggcaacgacatccccgtgcatatcaacggaaacaaacaccggggccggcacgcccacaacg

SEQ ID NO: 96606 - DNA, 216 bp, Zea mays
  Clone ID: MRT4577_1961C.1
attcggctcgaggtttcacgcacgatcgtgtttccatacagatataggtggaggctgggcatgatacttgtcatgggacacaccagaagctatgtaatcaatgcgggagccgaggaggtgtgcatggtcgccatataactgactggtgcgtggatactggccatgaccctgcagaacgccatgctgatgttacggatggacgagtgtcataaggag

SEQ ID NO: 96607 - DNA, 217 bp, Zea mays
  unsure (1)..(217): unsure at all n locations
  Clone ID: MRT4577_19620C.1
ggggggaaaanatttcttttttaaaagactattgagctggatacagaggctaacacagccgagagaatggatctgatctggatacacacagggattgtgggatgagctactaacaagaaatgcggggcacactcatattccaaaaatcgcctgaggaatctgcaatggttcgggaaatattagaactttaattaatgccagccagtgactgtttaac

SEQ ID NO: 96608 - DNA, 273 bp, Zea mays
  Clone ID: MRT4577_19621C.1
tggtcatttctcccagaactaacaccgagggacgtacgaattttatagagcctccaaggcaacacaccgccactgccacccacaccgtctcgtggccgccgaccacatcctaagccaccaaacctgctaacgcggagctgggcggcaaacgcggacctttgctaaacgggagaaacccgatccctgacgtgagcgactctaacatacaataactatgcggatgggcactggatcaagcaaaacacgggggggggggggggggagggactaaaa

SEQ ID NO: 96609 - DNA, 504 bp, Zea mays
  unsure (1)..(504): unsure at all n locations
  Clone ID: MRT4577_19622C.1
aggcaggcgacagccaagagggagaaccaccacacccagggcgggcagcgcgggaaccagagcggggccaagaaccgggaggaganccgcgacgagcacgggagcgacgccacgggccgccacgcgggggacacggaccnccagcncgagcgcgccaacgacaaccacaacgaggccagcggaggccgccgcgacccgcgcgccgaccgcacggaccgcgagcccgggaccacggacccccagcgcgccggacccaacggccagaacaaccgccccgacaacaacttttttttttccccccccccccccaacaactgggccaaggggcactacaccgagggcgccgagaacaaaaacaacaaccacgaggacgaccgcaaggaggcagagaaccgcgaccgccaccagggaacacaagccagccaccccaagggaggaggcaccggacccggcacgggcaccccacacaaccccaagaacaaggaggagaacccagacagaacg

SEQ ID NO: 96610 - DNA, 257 bp, Zea mays
  Clone ID: MRT4577_19623C.1
cacccactgtagcacaaggccttgcaaggcactctccgctgggtactcagcaactgtgctgtggacaagcgccaccagctatgatgccccctcagtcaggatttgctttccagcgacagcttggtccaggcatgacgcctgagggggcccatatgccaaagtattatgtggcggctgtacaacacggacaacagggtccacgcccatgtattacgcgtggagctggagaccaatgtcagcaacctgtgccaccattt

SEQ ID NO: 96611 - DNA, 176 bp, Zea mays
  Clone ID: MRT4577_19624C.1
ccgcagcatgcgacgaagatatctcttccatagtaggctcctagctcaatctacatgggcggctaactacaacaatttgacttgaagaacacaggcgttacatactttaatcgtttcgcaatacattccattaattatagctggcgtattagaaaacaggactgtacagatagata

SEQ ID NO: 96612 - DNA, 310 bp, Zea mays
  Clone ID: MRT4577_19625C.1
ggaagggaatggctccgctcttttttactcttcaaccaaacaaaaaatagggcgggcttgttctttttgccaaacacagaatagaacggcttcattctcaaatactggaataaagcttttattttctatttgactttccaaccaaacccatcattactggctctcctgatggtaatctcctttcccattccaccatgggaccaccttttccaatttagtattgggcctacccactaacaaacacaatggcatccccacaatttgaatcaactaattctttatcgtcggcaagcttcgaggcaaggatttc

SEQ ID NO: 96613 - DNA, 340 bp, Zea mays
  Clone ID: MRT4577_19626C.1
aaaagatgactagtcggtagaataagacatgaatccatacccaaaagcaagctaccacgtggacagtgcaatatacgatgcagagcattacacatgcgccactgtaaaatacgataaggcaatagattaacgacacggcgcaagtcatttaatctcttgataaacaactgttagaaacaactcatcagtgaaggggagcacaacagtaagcctgatcccggcgttcgtacgcgggagtgcgacgtcatagcctatctatacggagatcttacgtgaagagactggacgtgtctttacaatttcggacctggtaaaaccccacggttacccaacttaatgg

SEQ ID NO: 96614 - DNA, 907 bp, Zea mays
  Clone ID: MRT4577_19627C.1
ggctcttcgacttcatgcccacccgcggcggctacttcgtcggcaacgtcagccccgcccggatggacttccgctggttcgcgctcggcaactgcgtcgccatcctcgcctcgctcgccacgcccgaccaggccgccgccatcatggacctcatcgaggagcgctgggaggacctcgtcggcgagatgcccgtcaagatatgctacccggccatcgaggggcacgagtggcagatagtcacgggctgcgaccccaagaacacaagatggagctaccacaacgggggatcttggccagtgctgctgtggctgctcaccgcggcatgcatcaagaccgggaggctgaagatcgctcggcgcgcgatcgacctagccgaggcgaggctcgcgagggacggctggccagagtactacgacggcaagctgggtcgctacatcggcaagcaggcgaggaagctccagacgtggtccatcgcggggtacctagtggccaagatgatggtggaggatccgtcccacctcggcatgatctccctggaggaggagaagccgaccaagccggtgctcaggaggtcggcctcttggacagggtaaggtagtggcggccacaaagacggcagcaggacccgagttctggttctttgagctaacatctcgaatttctctgcaacttcttgctttacggctggggaagtaggcgtgtccaatgttttggtgggtcttccatgtatgaatctttctctatatgatatataagtcccgtcggcgaaataaggaaacaacgaaaagatttttcgtgttaaaaaaagggcaaaaaaagcgcgagctctatctattttatatctatttgctacagctcaactttaataataaattgttttaaaaaaaatataaaactgcttagatgc

SEQ ID NO: 96615 - DNA, 1202 bp, Zea mays
  Clone ID: MRT4577_19628C.1
atgttctggagctttcagagggatgggattcattggtcactgcacgtgcatgatatgcctgacgagcctgatcgatatggttcagagcttgtttcccattccacacataccggggttgcaggagttgctttgcgaggccgaacaaattttaggagagctagaagaagagagtactaggaagaagcaatgatacgtaggaaccaacacccatgttaccgcaagcaattaggtaactattgaactctggcatctacgctgcttggctgattcccaagaatgttgtttcgaggtatatataggacctcataattcttttagcaattaaggagtcgatagcttttattaagatgccacctgcagatactaatatgagtgcaccaataattctttttcaagtacttcgtgttttaggactcattgatattgcaacgaagcagttgcttgggcaagggtaggtactgttgctagggcttccactggaacatttcaggcatggattctgcaaaattgaagctatacatttatcaggcagatttcgggtatttatacgtaccgacgcaaacaccatatatgcccgatatagcgcactgcaaatccattttaaaaataagtttggaaaggagcaagactataattctgttcaagatgctctgcagaagtgtgtttcactttacaaagagcctcatacacgaaggttggtgaaaaatgctgccaagcaggactacatgatatgcctgacgagcctgatcgatatggttcagagcttgtttcccattccacacataccggggttgcaggagttgctttgcgaggccgaacaaattttaggagagctagaagaagagagtactaggaagaagcaatgatacgtaggaaccaacacccatatgggtggaagcatttgttaattgcaagttgtgagccatattttttcagttggtcgagatcgcccacctatatgggtggaagcatttgtttgacgaggtgctgaatcgagtgacgggttaaagagtttaatgcttgtttgcgcagtggtgttatgacgtggtcttcaacatagagtcctagtttctcggtggtggtggtccccaaaatagatcatgttgctgaaattttggatgctttttaaatcaaaatccttgacattggcgcccctgggtggaagcatttgtttgacgaggtgctgaatcgagtgacgggtt

SEQ ID NO: 96616 - DNA, 311 bp, Zea mays
  Clone ID: MRT4577_19629C.1
ctgggttctggcggtgtggacgacagcgccggagaccaggataggtccggatgcggatccggaccgaagctacgcggcagcggagaacctgtagagaacccagggccggcagagcacagcgacgccgaagaagcttcccagcccaaggacgtgacggacctgaacgataacagaaaaatgaacatggactcgctccgaggcgccggtcaggccaagcagtagatggatcatccgagtacgtgtccgggactgccgggagccactgacactgccccaagccgagccgcgtcgctgagcgcgtgatcacctca

SEQ ID NO: 96617 - DNA, 625 bp, Zea mays
  Clone ID: MRT4577_1962C.1
aatcatagatgcgatgtcggcttgccatcttcccttcgtccccaccaagaaccgataatccgccggggttaagatgtcggtatatcactacctcctatcagaggaccagctgctgacgcattcattcacctagatcgacctctacaacctcgccctgctgggaggtccatgcatactgaaccacccaatgatctgctgatgagtacatacgccgctcctccatcctccgaggacgctgacgaccactgcgttccatgactccatctgctacgtgctcgacatccgttgagaattccgcgtacaggacgaacctccttatgacatacaatcttttgtgtcttacattcaagcagacatcctgaatctcactgctgtgtggcaccctcacaaagcggatgatctcactgaagccgcctagtgcgtgatcacagtttctccttactcagctgaacgatctccacttctttgctgcagagctcatgaacgatgacgcccctgcggtattcgcctattacacggatgccgccactatgccgacattcctctatttctcacatgatactgaacgagatcatgtgctaggccagcccaagaaattacctacccatgtgactgtactatctat

SEQ ID NO: 96618 - DNA, 161 bp, Zea mays
  Clone ID: MRT4577_19630C.1
caagcctctaaagtgagtcgtattataaaaaaaaaaaaaaaataaaaaaagataaatcaaaaatggcggtttgcgcatgaaaggtatatggactttctatccttccaatcgagtcctaattggcggggaatctgttacctgcttttccgtaaatggccctt

SEQ ID NO: 96619 - DNA, 285 bp, Zea mays
  Clone ID: MRT4577_19631C.1
caggcctcacggtcttcgtcctcgcctcggcgtctcagcctcgcgacacgcgtggagctcacggcggcgaccgccagtgtagttcccggaggtcaatggaggagtcagtgccaatgtcagtaatcagcagtatttcaaacttccgcacgctgtctaccagcagtgtggtagacactgagctagtttagagatactgccggaagatcaatgaaatcctgggtcttttgaagctggtcctggatgaagttctcacccagatgagtctggatgataggatgcttgagg

SEQ ID NO: 96620 - DNA, 149 bp, Zea mays
  Clone ID: MRT4577_19632C.1
aaaggggatggttgtaaccttatatgattttcatctcgtgcaaaatatattggtacaggcaaaataacattttgctgatttcctccgatcttgctcatgaggtgtcctgacatactaaaatgtggtctgccagcatcaaaggaacctga

SEQ ID NO: 96621 - DNA, 223 bp, Zea mays
  Clone ID: MRT4577_19633C.1
ggtgggggccatgtgcggtcgctcgaggtcgggcgggtttcccataccaccagtaccacaccactccgtgctagatgaggacggtactgcggcacagaggtgcgacgtacgacgacgacgacgcaggcgccacacatggcatcccagttctccgccgccgcgccccgcttccacggcctccggggctacgccgcgcccaggctctgtggcgtcggcctctgcc

SEQ ID NO: 96622 - DNA, 179 bp, Zea mays
  Clone ID: MRT4577_19634C.1
ggcgggcggacttcttatttcttattcagatgggatggaattatgatattactttgcgtctttgatatcttgatttatcctccctgattgattgtaacttcattttgatggtggtgatggttaactctacaaaaaaaaaaaaaaaaagaaaaaaaaaaaaaaaaaaggcccctagggcc

SEQ ID NO: 96623 - DNA, 318 bp, Zea mays
  Clone ID: MRT4577_19635C.1
atattggtgttttttttttttaagggcgtaacaaaaaactgggaacccacacaaactgtcaaaccccctctacaaaatgccatatttaggggggcgttttaaaaccaaaatactgtttgtatgaaaagcgaaatattatttggcggttgaagcacatcttgaggaaagtggggccattaattcctaaaagcccttgaaagcctatgattacaaaaaaagttcatcctataatcccctctgaaaagctgaacggacattcgaaatactctcagacttgctgaaaggtaaaatacccaccccttaaaactggaataagcg

SEQ ID NO: 96624 - DNA, 498 bp, Zea mays
  Clone ID: MRT4577_19636C.1
acccactcgttcgtgcgagggcgccattggtcctctattttggttcggcgcgctcggagaaaaatcctttataatccccaggctgcgccggaagcttaagtgccgggtcagcctgtcccccaagggccccattgtgcttagaaaccttgagggccagggagggccccgccatgtacccgggcatgggttctggccttacttgtcgacttccttaatcgggccccatcacctattttaaccggcgcggggacctcttgcatcttaaacggttattaagcatatccttattggccttgtccttacaaaattccttgggccatcgaatttgaagcctgcccccaaggccggcgttggaaaaggcctaaccttggaaaccctttccttggaacccttcctggctcatttgaaaaatccgccaggcaaatggcccaatcaacggggcctgaaccaacggtaattcccaggcctccgggttgagttccgcctaacccctaattt

SEQ ID NO: 96625 - DNA, 549 bp, Zea mays
  Clone ID: MRT4577_19637C.1
aaatggggaacaaaaaacattaaaaacccccggccacaacattatggcccaaattaacccggtttttattaaaaatccagggcaaccaaacaacaaaaacaaccctaaggccatgacaaccttaaaaagccgggccacgcaaaagcccaaacacagaaaattcaaccccagggcacgggaacacccattattacaaggcaggaggcaaaggcaaaatttattcaaaattcttggggaaccagccgagcatgcccccaagggcttcctcagcacttttcagggcaaaggggccgacgggggggtttttaaagctccatccatgccccacaccggggaaaatctggaggaaggggccaacccctgagttaaaaaaaaggacctgcgcaaactggttgattatctccgggggggacatttcggaaaactgagccccgaggaaaaaaattgggccctggaccttttggatatggccaagggaaacaaaaaaagggggcaaaagcacaaaaccctggacccgggtaccttggccggaaacagcctaagggggaa

SEQ ID NO: 96626 - DNA, 1750 bp, Zea mays
  Clone ID: MRT4577_19638C.1
gggaccttccttcccctcctccgtcttccccaacccaaccacccgcaccaagccgacccagagagaggagagcctgcttgcctgcctgggctggactcccccttcgcctcctcctcgtccgatcggccgcgcccagctgctgctgctgctgctgctgcgcgcgccgccgcggtgagacccgggaggagcgccggtggtggtgggcgggcccgatggagtgggcgtcggccgcgtacacggccgcggcgctggtgtgcgccgcggcggcgagcgtggtcgcgctcgcgcacatctaccgccacctcctccactacgccgagccaatctaccagcggttcatcgtccgcatcatattcatggtcccggtatatgctgtgatgtcattcctttcccttatcctccctaacaacgcgatatactttaattctattcgggagatctatgatgcttgggtcatctacaattttctctcactctgcttggcatgggtgggaggtcctggtgctgtggtggtaagtttgagtggccgaaccctgaaaccatcatggattctgatgacttgctgttatccagctattcctctagatgggcgttttatacgaagatgcaaacaaggttgcttgcagtttgtgattctcaagcctattttggttgtcatcaccttcatactttacgcaaaaggaaaatacaaagatggaaacttcagtgtcaaccaatcctatctctacataactatcatatatacaatctcatactcaatggctttatatgcccttgcgttgttctacgcggcttgcagagatctacttcggccatataatcctgtcccaaaattcatcatgatcaaatcagtggtgtttctcacatattggcagggcgtcctggttttccttgctgcaaaatctcgatttatcaagaatgctgataaggctgctgatctccagaactttgtgttgtgtgttgagatgctaatagcagccgttgggcacttatttgccttcccctacaaggaatatacaggtcccaatgcccgcccttcacgtggtttcagagaaagccttcttcatgctttgaaattcaatgatttctaccatgacaccgttcatcagtttgctcctacatacaatgaatatgtgctctacaatcacaatgagggagacagtgcacaaacaaagtatccctcggggagcaccgccacaagtgggcagggtgtagagttggctggcatcaccgtggcggcctcaaacagtccagtgacatcaagcgtatcatccaaccaggcagatcaggaagaaacaatgacaaccccaatcaaggacaaagttgatcctcctggagggctctacgacctcacagaattgcttgatattgatctgtctagctacccagccaagcttcctgcagccaccgatgtaagaaaacaatgatcaagcttgatgagatgggctattggtagggttgttgcgattgggttgggggaaaatcgtgattattatttttttactgttgaagagtgccatagttaacattgtaaaaatgtgtgtattatttgttctgatttttccccccgttgaaggggggtttattcattgtcagcagttgctgccacacggcctccctcaccctgctctttattaaccgtgtaaaatgttgtgagcttaaggtgaaccttagtgtcaaggggagtctataccagtacaatattctgcgttaaaaaaaaaaaaaaaaaaaagcaaaccccccccaaaaa

SEQ ID NO: 96627 - DNA, 228 bp, Zea mays
  Clone ID: MRT4577_19639C.1
ggcaccacacctcttcctcctcttcctcctcgtagcacagctagcgcctgctccccttcgtctgtgatcctgtcttgccgcagcggcaagtgccactggggctccagctgctcctgcggcagctcatgccactggatgtcccctgacgtggagaccggcgccgcgcagcggatcacgacgatggtcctcgctgcggcgatgagcaacggcagcggcggcggcttcgag

SEQ ID NO: 96628 - DNA, 726 bp, Zea mays
  Clone ID: MRT4577_1963C.1
gccggccggtgccggaaaaaaaaaaaaaaaaaaaaaaaaaatttcccaaaaaaaaaaaaaaaaaaaaaaaaaaaaaaaaaaaaaaaaaaaaaaaaaaaaaaaattcctttccctccccttacaacccgggaggaaaacaaaggggggagttttggaaaactccaaggggtcccaaaaccccccccggccaaaaggggggtggccagggcccagcctttaaagggggcaagggttggaaatctggggccgggaaaaaaaaaacccaaaaaatttccccatttggaaaattttccccaccccaaaaccttgaaaagggccggggccccaagtaccccaaaaaccccccttctggaaaaaacaaggttggttaggacccaattttccaggacccccccccccccaaatttggcatggaaaaaattgaaaaaaaccaccccttgggtttttttggtggcccccagggggaccaaaaaaaaatccagggtgggggccaaaaaaaggtttgcctttcaggaaaaaagggccaaccccctgatagggctggtgggaaaaaaaagggtttttggaaaattgacccccaataacatggcctttggggggcccaaaaaattgggctcctttaagtttatagggcaccgggttccaacttgggggcccaataagttcggacaaaaccaacaatttttccaaggtactaagaaatttggttggcataattgggttttt

SEQ ID NO: 96629 - DNA, 118 bp, Zea mays
  Clone ID: MRT4577_19640C.1
ctcccggcttccacacacgggacttcacccgctcgcctttacttaatcagccatcctgtaggtcggtgtctcctagcttcgtactgcacatccttcaccgtcaagcgtctaacatcga

SEQ ID NO: 96630 - DNA, 341 bp, Zea mays
  Clone ID: MRT4577_19641C.1
atgctcctcttttttgggggttgtgggggggttgttcaacaaaaaacaagaaaccccccaaaaaacacgaggtttgcaataaaggggcctttaaaaaaaattttgggcccgaaggggccaaattttaaggggcctttctgaaaaaaaccaaaaaagggggggaaaattggttccaccccaagtttgcaaaagggcccccccccaaaaaatagctccccccccaaggcccgaaattttgggccggttttaaaaaaaacaccaccttttgctatgggggggtgttttccccccggaatttcacaccagaaacctgcggggccccccatttttttaaatcgggg

SEQ ID NO: 96631 - DNA, 624 bp, Zea mays
  Clone ID: MRT4577_19642C.1
ggccgcttttttttttttttttttccttttttttttttttttttttttttttttttttttttttttttttttttttttttttttttttttttttaaaaatccgggccaaattaattgggaaaaaaaaaaccacccaggaccaattaaaaaaaaaaaggccgaccaacaggcaggcccaaaaaaaaacggcacctttaaaaggaaggggggaaacccccaggggggccctttcttaagccaaaacataaggcggaaaaaaaaataaatttttcccctttttcaaggccccgggggaaacagtaaaaagaagggaccctggttcaaaaaaaaaaaggcccccacgaaaaacacccccccaaaaaccctaaaaaggaatgggggaaaaaacatggatttttaaagggcttaatggcccaagttttggggggtttttggggccccgggaggcgaaaacaggcgggcaaaaatttcaaaagggaaagggacacccttggaaaaccctggaaaaaaaaacttaaaccccgaaaaggtggcgggggctgaaaatttggaaaccaggtggaaaaagggcccttaaggggaaaggggctccgggtttgagaaacattttcgaacggggccggg

SEQ ID NO: 96632 - DNA, 454 bp, Zea mays
  Clone ID: MRT4577_19643C.1
cacgtgacgaggaaaattcagttgtcgtgagcgatgtacgttgggaatattgttatgtggtccttttctaaagaaaaaaaaatgttgacagtcaagggagaaaaaaaaaaaactaaaaaaaaaaaaaaaaaaaaaaaaaaaaaaaaaaaaaaaaaaaaaaaaaaaaaaaagggaaaaaaaaaaaaaaaaaaaaaaaaaaaaaaaaaaaaaaaaaaaaaaaaaaaaaaaaaaaaaaaaaaaggggggggccgtttttaaaaaaatcaaattttatttacggttgttaggaagttaaaattttttttttagggaaactaaaattaatttaattggcggttttttaaaaacttggtaattgaaaaaaccttgggtttaccaaatttaatggttttgaaaaaaatcctttttttccaagttgggataatagaaaaaaggcccgaacaaattccttttt

SEQ ID NO: 96633 - DNA, 378 bp, Zea mays
  Clone ID: MRT4577_19644C.1
ttttgatcggccctgccattgccaccggtaacaccgttatcatcaagaccgtcgagcatacccctctgtctggtctgtacgcctccaagctgatcggagaggacggcttccctcccggtgtcatcaacgtcatctccggtttcggacgcaccgccggtgccgccatctgcagccacatggacattgacaaggttgccttcactggttccaccctggttggccgtatgatcctccatgccggtggccagagtaacctgaagaaggtcaccctcgaactgggcggcaagtcccccaacattgtcttcgacgatgccgacattgacaacgccatcttgtggtccaactttggtatcttcttcaaccacggccagtgctgct

SEQ ID NO: 96634 - DNA, 1278 bp, Zea mays
  Clone ID: MRT4577_19645C.1
cgtgctgtcggggttgccaagaaacttattgtgcgatggagcaaatggcattggtggggtgaagctcgaacaaataaaggtggagctttcaggcatagatattagtgtgaggaattcgggcaaggaaggagaagggatactaaatcacatgtgtggcgcagactttgttcaaaaggagcgagttactccacatggatttaaccctgaagatgttggtgtcaggtgtgcaagtttggatggtgatgctgatcgactcgtctacttccggttgtcatcagctagtgacaatagggttgatcttgttgatggagataagatactatctctgtttgccctatttatcagagagcagctagatatcgttaataacaatggtggccaagcaaacaagtcattgtctgcaaggcttggaatagttcagacagcttatgcaaatggagcgtcgacgctgtttctgaagagccttggcctcgaagtggtattcactcctacaggagtgaaatatctgcacaaaagggccttggagtatgacattggtatatactttgaggcaaatgggcatgggactgtggtattctcagaggatttcatctctcaactagagtcattaagcaatgagctctcctctcaagctgacattggttcagcacagtaccacgctgtaatgagattgttggcagcgagtcagctgatcaatcaggcagtaggtgatgctctgagtggtttgcttttagtagaggctattttacagtttaagggatggtcatttcaggattggtgtggactatatagtgatttgcccagtagacaactgaaagtgaaagttaaagatcgaagtgtgattgttacaacagatgcagagacaaaagttagccaaccttctagtttgcaagaattgatagataaggagaccgccaactacacccacgggcgatgctttgtgcgtccatccggtacagaagatgtggtacgggtgtacgcagaggcatctacgcaggtagaagctgacggtctcgcaaaatccgtggcacaccatgtggaacgcctccttggataacaatttgcagccttgtttgcgactattgagtagactacatcctctaatttcatttctcttacattttgacctgtaacttatacaaaacgtgagtccaattttttgaattttgtgattgatatgcgctgaacagagatcttgtatcgagacatgatacaagatatttgaacgggtgtaaatcattccgtcgcaatactcattcttcttgattggttgccctc

SEQ ID NO: 96635 - DNA, 479 bp, Zea mays
  Clone ID: MRT4577_19646C.1
gagatatccattgtacgcgccctaatgatgtcagagatggaatctgcatatttggagcgtgatcaaatgcaatctaccagcttacgggatgagtttttgcagcattttcttcgtgaggaacctgttgttgggattgaatatgaagcacagttacaaaagactcttcttccccatatttcttctgcggaagtggcaaaatttgcagaaaacttttcaacggccagcagctgtgttatcaagatagttgaacctcgagctcatgcttctttggaggatctgaaagcagttgtgttgaaagtcaacagtatggaagaagataaatctatttttccatgggatgaagaacaaactccagaagaaattgttgcccaagctccagagccagggactataattgctaaagtggagcacccaggcataggtgctactgagatgatactttcaaatggcatgcggatttgttgcaagtatactgattt

SEQ ID NO: 96636 - DNA, 1289 bp, Zea mays
  Clone ID: MRT4577_19647C.1
gcacgatcctggctcaggatgaacgctggcggcatgcttaacacatgcaagtcgaacgggaagtggtgtttccagtggcgaacgggtgagtaacgcgtaagaactggcccttgggaagcgcaccaggactgcaaaaggctgccaagaccccgttaactaaggggggacaggacaaactgatgtgattagcaagcacgggcacggtaaagcagagagcctcttgctgttagtgaactaaggcgacggagaccgcgagggcggcgaactaggctgggcagcgatgatggcgacctcggccagcggcgtctccctcctcctcctcctcgcccatccggcgccgccaccgcaccccgccaacggcgccagcagcctgtggcgcggcggtggcgccgcgctagctcctcatcctgctcgcttcgcggccaagaggaggacgctccggttggttaacgtcagcgtcagctgcagcgccgaggcgctgcgctccgacggcgctggcgcggagccggcggtgccgcggtctgtgccggtgcgcgtcgcctacgagctgcaacaggccggccaccgctacctcgacgtcagaacggagggcgagtttagcgccggccaccctgaaggagctgtgaacatcccatacatgaacaaaaccggctcaggaatgacgaaaaacgctcactttctcgagcaagtgtcgagggctttcgggaaggacgacgagatcatcgtgggctgccaaagcggcaagaggtctctcatggcggcgaccgagctctgctccgctggcttcaccgctgtcaccgacatcgccggcggattctcgacctggagggagaacgagctgcctaccgtccagtgacggtgatttcagcctgcctcgccggcgtcgtaagtgtggttggagcttgcccagcgttttctgtccaagcctgtacatatgtcttcctgccttctgctatagttctggaataaagagtgctggggaatggaatggagcatgttgtaaagtaaagcacaacgagtaggcttctttcttttttacgtcatgcttcatctcatgcataggacattcttatctgctcggtactccctgcatgcggatttgttcatagtatgggtttcctcgtcgaactctgaaactagacaccttacccctctgaactctcaagaccactcagacgagtcagatcaccttctgtcttggtttggaatgattttatccttttttatagccaaaatcattaaatacatgagcagtccccatttctattaaaaaaaaaaaaaaatggacg

SEQ ID NO: 96637 - DNA, 864 bp, Zea mays
  Clone ID: MRT4577_19648C.1
tcctgctctagctagctttggtccccaaatgccgcaaggataggacatgacacagcaagctggaagatcaccagtcgcaacagtattagttaacaacgagggaaaggagaaactgatgtgattagcaagcacgggcacggtaaagcagagagcctcttgctgttagtgaactaaggcgacggagaccgcgagggcggcgaactaggctgggcagcgatgatggcgacctcggccagcggcgtctccctcctcctcctcctcgcccatccggcgccgccaccgcaccccgccaacggcgccagcagcctgtggcgcggcggtggcgccgcgctagctcctcatcctgctcgcttcgcggccaagaggaggacgctccggttggttaacgtcagcgtcagctgcagcgccgaggcgctgcgctccgacggcgctggcgcggagccggcggtgccgcggtctgtgccggtgcgcgtcgcctacgagctgcaacaggccggccaccgctacctcgacgtcagaacggagggcgagtttagcgccggccaccctgaaggagctgtgaacatcccatacatgaacaaaaccggctcaggttaaaaagaaaaagaaaaaaaagcgttgcttcatctgttctattctgttctgttcttgcgccgcctcggttctgaatgccacgcgcaggaatgacgaaaaacgctcactttctcgagcaagtgtcgagggctttcgggaaggacgacgagatcatcgtgggctgccaaagcggcaagaggtctctcatggcggcgaccgagctctgctccgctggcttcaccgctgtcaccgacatcgccgggggattctcgacctggagggagaacgagc

SEQ ID NO: 96638 - DNA, 206 bp, Zea mays
  Clone ID: MRT4577_19649C.1
caggcacaggtacagaatcccagtgtcgaccgacgcctacgcccacgcagtgcaccctatacccttctccatcgcccgcaatactactacagggaagggatcatgtttgcggggggcgtttcctcttcttccctatgcagttctgacgtgaaaaacataagccaatatcctcgggttattgctcaagagctgatgattgagccatc

SEQ ID NO: 96639 - DNA, 337 bp, Zea mays
  Clone ID: MRT4577_1964C.1
tcttctttcgagccggaaggaattaggggcagggtggaattctgtagaggcggcgccctctttatgcacgcatggaggacctgatcgtggaggagctcgtctccaacctttttacctacaaagagcagctactcgaggtcaagaagcttatcaaggagaaaaaggatgatgcttgaatttctgaatatattgatatggagaaggagctttcaagaggtcataacgttaaccgaagagattttggtatctgcaaagcatactgagagtgcccataatgttgcatgtctatcaccgactagcttttcatcttgtagtgcagtctgagggactggatgac

SEQ ID NO: 96640 - DNA, 338 bp, Zea mays
  Clone ID: MRT4577_19650C.1
tgttccaagggttcgtttattggttcggtccgaacacgagggcagggggctctttcagaaactaatggacggcatcagctattgccatgacagaggtgtgtaccaccgtgacctcaagccagagaatgtccttgttgatcggaagggcaccatcaagatctctgagttgggactaagggctctacctaaacatctagggagtgacggacttctgctcacaacatgtggcagacccaactacatagctcctgaggttctgtaatacagaggctatgaccgctgcttgtcagatctctggtcttggggcgtgatcctctacgtgatgctcgttggctgac

SEQ ID NO: 96641 - DNA, 1104 bp, Zea mays
  Clone ID: MRT4577_19651C.1
tcctgctctagctagctttggtccccaaatgccgcaaggataggacatgacacagcaagctggaagatcaccagtcgcaacagtattagttaacaacgagggaaaggagaaactgatgtgattagcaagcacgggcacggtaaagcagagagcctcttgctgttagtgaactaaggcgacggagaccgcgagggcggcgaactaggctgggcagcgatgatggcgacctcggccagcggcgtctccctcctcctcctcctcgcccatccggcgccgccaccgcaccccgccaacggcgccagcagcctgtggcgcggcggtggcgccgcgctagctcctcatcctgctcgcttcgcggccaagaggaggacgctccggttggttaacgtcagcgtcagctgcagcgccgaggcgctgcgctccgacggcgctggcgcggagccggcggtgccgcggtctgtgccggtgcgcgtcgcctacgagctgcaacaggccggccaccgctacctcgacgtcagaacggagggcgagtttagcgccggccaccctgaaggagctgtgaacatcccatacatgaacaaaaccggctcaggaatgacgaaaaacgctcactttctcgagcaagtgtcgagggctttcgggaaggacgacgagatcatcgtgggctgccaaagcggcaagaggtctctcatggcggcgaccgagctctgctccgctgtaagctaggggatggccggcccgactccatcacctcctcctcacaaattcgctcttgccgttctgcgactcgatgccagtcaatccaatcactgctaccgtgttttcagggcttcaccgctgtcaccgacatcgccggcggattctcgacctggagggagaacgagctgcctaccgtccagtgacggtgatttcagcctgcctcgccggcgtcgtaagtgtggttggagcttgcccagcgttttctgtccaagcctgtacatatgtcttcctgccttctgctatagttctggaataaagagtgctggggaatggaatggagcatgttgtaaagtaaagcacaacgagtaggcttctttcttttttacgtcatgcttcatctcatgc

SEQ ID NO: 96642 - DNA, 743 bp, Zea mays
  Clone ID: MRT4577_19652C.1
gttcgttgcatgattgctttgttagtcgtttgctctctcaatctctgccaagaatcttggctagcagctgtccctcgctttttattgatcgatcggtaagagctactacaatacacagtttgcaagtggtatacgtacgtatttgttcatttgccaatgcctaaatgataacataaccccagcccatagcacagcgattgatggatcaaagcatgtgtgttcgtcttcttgcctgaacccagattgactctagactccaaagaggtaacatgctgatcgacactagctagaatggttgatgcatggcaacttgcattgacatgtggctgtctcttatcaagacatgtgattctcttatctctctctcttttatataaaggtatcattgtgctgggcttaagaagttattctcctaagggctaacaaaacaatcatgcaacgaatcagtgttattgggggggggggggctcttcatcattgctgacctttacctggtcacttgggctcgctacaatgaggctcaaagcactctggtggccggttacctgcgacctcttctcatggagggtggtctgccgacaaacaccaagacagaaggaagctctttcaaggggctccattgatcctttacaccctagagagtcagatggattttgccccaaattgtttctctaggatagcagtggcatatcatcagatttattttcatgtctttgttgtatgataccaatcttgcatatata

SEQ ID NO: 96643 - DNA, 1406 bp, Zea mays
  Clone ID: MRT4577_19653C.1
ctcgaggccggccgggaacccatactagaactacagcatttcacaagacacaacataagcaatagccatgggagctgtgaagcatacattgaaaatgctttcatggctcctactcttcgcacaattggctgcggccaccacctccaagtgcacaaatgccacaaatgggactgagactgacagcctgggtgcaatgaaactgaagctgattgccattgcatccatcctcacagctggagcagctggtgtgctagtgccagtacttggccgctccatggccgcgctacatcctgatggtgacatttttttcgctgtcaaggcatttgcagccggtgtcatcctggccacgggcatggtccacattctgccagcagcatttgatgggctgacatccccatgcctctacaaaggtggcagtggtgggaacattttcccctttgcaggactcattgcaatgtctgctgcaatggccactatggtgatagactcactagctgctgggtactaccgccggtctcacttcaagaaggcacggccaatcgacatcctagagatccatgaacaaccaggagatgaggaaaggtctgggcatgcacaacatgtgcatgtgcacacccatgcaacacatgggcattcacacggagaggtggatgtcatcagttcaccagaggaggcttcaatagctgacacgatccggcacagggtggtatctcaggtccttgagctcggaattttggtgcattcagtgataattggggtgtccttaggtgcatctgtgaggtcatcgaccataaggcctcttgttggtgcccttagcttccatcaattctttgaaggcattggcctgggtggttgcattgtgcaggcaaatttcaagttgagggctaccgtcatgatggcaatttttttctccctgactgcacccattggcattgcattagggattggaatttcatcaagctacaatggccatagcattacagcgttcattgttgaaggagtgttcaactcagcctcagcagtaattttgatctacatgtcattagtcgatcttctggccacagatttcaataagcccaaactgcagacgaatacaaagcttcagctgatgacatatcttgcacttttcttaggtgcagggatgatgtccatgcttgctatatgggcatagattttcagaccatcaaaggatggctagagttgaagaaataagtttatttgtccaagagttctccattttctcaaacaagatgcccttggtgaagggttcatcatattaatccacgagttctccatcttccgtacgatatagcctcagatagtccttttgtacttcataatgtgagattacatgatttgtcatttgttggcatagtccattatcctaaagctatgatagtcaaaat

SEQ ID NO: 96644 - DNA, 386 bp, Zea mays
  Clone ID: MRT4577_19654C.1
aattcatacttttgatgtatttctcttctctggcatgtggccttgagttattaggagaacatgaatgcatatgcctgccctcaccttcaagcaatgcaatgcttgcatgcatatcccaataacatgcatacgtatatgatatagctagctatggatgatcactacataaacataagataattattcctgatcgtacgtctttaattttgtcatgccacctaattcccacacacatatcttctcttccagcctatatagctcgtatagtatctatatataaacaccccctgctccctctctctagcatcccctcatcctcatatctctctctctctctctaatttgcaggattccattcttcatttctctctttcattattccgtag

SEQ ID NO: 96645 - DNA, 435 bp, Zea mays
  Clone ID: MRT4577_19655C.1
cttgctcgctgcgtcggcgcctccgaatcggcgcttcgtacccctgacccaccgataatccgccggcgaagagaggctggtttatcacgatcacgtatctggtggctggctactggcttgttgattcccctacaaggagctcgagaacggcggagtgcgtgagggccagtcagagggcagcagcctgggaactggtgaaggggaaattggagccacttcagccgccgatgatggtgaagaccattagcgtagatgatagatgtgggaagggggaagatagtgtcgacacattgcggcgacgggaggaggctctgttggacaagaagtcactggtgttgtacgtgataatatacattgagaatatcaatgaatgtgatggagacggagaaaaagaatgagatgaaaaaaatgtgcctcggccgcttccaatattcc

SEQ ID NO: 96646 - DNA, 155 bp, Zea mays
  Clone ID: MRT4577_19656C.1
tcgtccacgcgtccgtacctttatgtgcacattttccatatgtgacccccttctccatataaggtgaacatattttactcttttgggctccttgtaatttcattagtaaaatctctacttaattattaatgctgcatagttaaaaatttataaaa

SEQ ID NO: 96647 - DNA, 584 bp, Zea mays
  Clone ID: MRT4577_19657C.1
tcgagcttcccccccccacccaccccccctccccccccacccctccccctccctccccctccccctccccctccccccctcccccttttttgggccataaaacccgacaaacttgtaacaaatgctcaggcaacccacttttttacccaacagcccaacccagttaacttaatgggtggccacgggggcttaagggcaagcccccccctgaccacatatcgggcccttttattattatttcacaaggttttggggaggttttttaacccggggggggacggccctttaaggcccccccaaagcccaagaaccttttgtttaaattcaccccggggggccgaggatcccaaaagaaacagggccgccagggtttccggggcttttggtgagctcgggccccccctttcaaaaaaattggggggcaggggaaacaacaacagttttgccaatgattgggtttgccccacccaggggaatcgggctggcggaaacattaagggtggaaaccccttttggtccaggtggaaaatttccaaaaccaccgggggggggggttctaatttttgggggccccatgttccttg

SEQ ID NO: 96648 - DNA, 540 bp, Zea mays
  unsure (1)..(540): unsure at all n locations
  Clone ID: MRT4577_19658C.1
gcaaatcggcacgatctgacattctgacaaaaacacgagatacatttcattgtattacaacaacacacggagcagcaccagaagacaacacgaacaccacgacagacgcacacctgaagatcggacacgcacgaaaaggcatggcctaggatgctaaccacacaaacgaccgtcaatggaaaggctaaacagcggtctattaatacaaacaacatgggacacactaagctgaccaatttgcctaatcctacttgatggcacggtgtagcgatgggactgcaataagccttcgtctctgagaccaaatgatctctcttaccatttaaaacactgacaagctaacgattatatacagtcgacggatacttcgcggcgagtaccgactcctacttctggttcctgctcccattcctatggcagcctcctctcagctctaacagctgctgcgactagaacttcttgttgtaccagaagacgcccttgcggttctcgntctcgactaagatgcactccctggcctcctccaggtcaccttggcac

SEQ ID NO: 96649 - DNA, 631 bp, Zea mays
  Clone ID: MRT4577_19659C.1
agagagagagagtctcaattcccaaacggccttggccttcttttctcgcgggcgcggactgcttcgttttatacacagcatgaggcggggttcataggtggtggtggtacaacatggccaacgtcccggtgatgtccgatgcagcccacacgccgaccgtgctgccaggcgccgcccagcggtaccggcaacgctccgaaggcgccgtcgtctcgctccatgcctccgcctcctcctctggcgccggcgccggcggggcgctcgggatcgggacggttgtagggaaggtgcccgcgccatctcgccgccagccaccagcagcctctgcctgaccctgaccagacagagtggtttgccgcccaggcgatgggacgctcgcttcttcggctatcctcacacgcttcttcttcgtcgcctcttgcagcaggcagcagagcttcgctgggtccatgtcaattccgcccgtcacttccaccctcacctctcccgcctctgcctctgccgctgctgcagcatcagctctctccacccctgtacctccactttcaatgacgcagccagccagccagacagcagacgtgtagtagtagtagtacgcagtacacgacaaaagcacgtacataccttgcga

SEQ ID NO: 96650 - DNA, 1628 bp, Zea mays
  Clone ID: MRT4577_1965C.1
cggaccgggccgggcctcccgggccacaactccacctaaaccgaacgaaaaggctagaagctagctagccaagttattagctactacatactagtggccggccggacacgatcgatgggaaggccgccgtgctgcgacagggcgggggtcaacaaggggccatggacgccggaggaggacatcgtcctggtgtcctacgtccaggagcacggccccggcaactggcgcgccgtgcccgtcagcacgggcctcatgcgctgcagcaagagctgccgcctccgctggaccaactacctccgccccggcatccggcgcggcaacttcacaccccacgaggaaggcatcatcgtccacctccaggccttgctaggcaacagatgggcggccattgcttcttacctcccacagagaaccgacaacgacatcaagaactactggaacacccacctcaagaagaagctccggaagcagcaagccatcggcgccatcttcgcgccacctcccccctccgaacccaccgccggccatgccgattgccgtcgtcacgacatgacccgctcctccaaggacagccacgcttgcctggccgacagcacaccagcggctgatgaggtcgtcacccagctcatcgcccagcagttcgccgccaccgacggtgacacctcgtcgtcgtcgtcgtactcgtacgcctccagcacggacaacatctccaagctgctcaacggcttcatgaagagcgccttcgccggcgcgggacgacgctaccgacaccatcaagacttcctcggccattgacatcgaccctttcgaccacaagtccggcggggcactactaccaccacccaagaagcggcagcagcagcagcagcatctgtcctccatagagaactggttgttcgacgatgccactgagcaggtcgttgtccagctgatggaggagatctccggcggctcatgctcagttcccatgctgctttattagcaccaagaaaaagaagcgaacatgcatgatagccgatcgatagatgtgacttggataggagaatgaatttgtgcatgggtgcaagttacccagctgataggagaattttatatacacccatatgcatgtttcaagttttatttacacaaccatgagccatgagataagaacaatatatatgcatagtcaatcaaaactcccaagcgagaggcacctcaaagaactcaaaaaaaaaaaaaaaaaaaaaaaagacaacgcctggtccaacaagtcttggtgacctggtccggccttccagatgagttggctacgtgggaggatcaggaagccttgcatcagcgctttccattggctcctgcttggggtcaagccggctttccagggtgagggaatgtcacgagctcatccacaccacacaagccacatgaacctgaagaagcagcaaggagaggagagcgtgtccgtcggacaaatgtgagaattactgggcctgaatgggtgtagtgcgttgaatgggccactgttgggctggctttgtaggattcctgtgtgacccttgtaatgggagatagttaaactctgcagtagccagggagatgaggaagaaagaaatagacactgctcctatctacctcctccttccttc

SEQ ID NO: 96651 - DNA, 304 bp, Zea mays
  Clone ID: MRT4577_19660C.1
ctcttccttgcgggaccccaagcaccagcgcggcgggggtagcagggacgccatcgaccatgggtgtttgaacgaacaagacgatctccaagggaaacaagggctgcaagaaaaagaccgccccccctttatctaacaaggataggtatgacatcaacgctccgtccgtgttcattttgcgctacatccggaagactctcgtatccagctcacagggctcctgcattgcttctgtggggctgaatcacacaatcttttagggtcggctatctgatctttagagcgacgaggatcaagcttacac

SEQ ID NO: 96652 - DNA, 591 bp, Zea mays
  Clone ID: MRT4577_19661C.1
ttttgtggtttttattttatttttttgttttttaggatttttttttttttttttttttctttttttgaggaccccgagtgggaaaaaatttaaaaatcttctaaactgtttttggtgcgggaaaaaacggtaaaagggaccccctggaaaaaacatgaaaaatgtggatgctctgtgagtacctaaaaaaggtgaaaaatacttgtttggggcccccaaccaaaaagggaacggtgtggcaacccctgattttaagttttgatctttggccggggaaaaaacggtccatcccccctttggcttaaaaaaaaacggggggggggggggaacctttttttgggggggaaataaacgaaggggggggggcgaccaaaaaacctttgggggaaaactttttgctcgggcttaacttcggaacaagcccggggggggaggttttatggctgcccccaaaagggtaaaaaaagagggggggggggacctccttaagaaggtggagaccgaacacggggggaagtttttgaacgattttcacacaaaaaaattattctgtggggcgggggggaaacactaggttttccttgtacctga

SEQ ID NO: 96653 - DNA, 1607 bp, Zea mays
  Clone ID: MRT4577_19662C.1
ccggccgggatctgatctcatctcctatcttccctctctctcctccccgtcgtctgccttctctgcccggcaagaccgcctgcccatgtccgtggcgccgtgcgcgcttctcctgccctgcaatccgcttcctcagcgcagctccgatccgccaccgccgccccgcccgagccgggatcggccgaccgatcgtgcgacgagaggcaggcagcggaacagagcagcggcccgcaaggcgattgttctattctgccctgttccagcgttccatgcatggatgccaaggaactcatctcacagtccgacctgcagtcgttctaccagcagcaacaacagcagcaccgtgccttcggcggccaccatagcccgtcctcgctggctgggatgcactccgtcatccgacccatgcccaacatgaatatgagcccaactgctatccttaactccatcagcgggggttccctcgccggcatgcagttccagatggacccgcccccaccattgctgcacaacatcaacgccaccggcgctgtcacaccggcccctgcggagcctctcaagcgcaaacgaggaaggccgcgcaaatacggacctgatggcaccatgaggcaacaacaacaacagcaacaggccgcgtcatcgcagcagcagcagcagcagctcgtcgctacacaaccgaggatatgttctctatcatcgggtcccgacatgctcggcagctccggtatggaggaccccgcgcattgggagcctcgaggccggccgccgggcaccggcaagaagcaccagccctcgacctcacaaggtccaggcaatgcgttcgccggttcggctggaacgagcttcactccgcacatcatcacggcgtctccttcagaggacgtggcggcgaagatcgttgcgttcgccagccagtcgtcaaaggcggtgtgcgtcctctcggcgatgggttccgtctccagggccgtcctccgccacccggccgacggctctcccatggcgagggttcacgcgtcgccgcagccgtacaagaaccctgctgtctacgagggtttctacgagatcctgagcctaaccggctcgtacaacctggcacacggcggcggcctcagcgtcacgctctgcagccctgagaggaacgtgatcggaggcgttctgggcggcccactggtagctgcaggcaccgtgcaggtggttctggggagttttcaccagggagggtcgagatccaagtccaagaaagccgggaagcagcagcaggcggcggccttcagccccgactcgctcaccggcggccaggaggcgtcgcccagctccgggcacaaccaaaatctaacgccgccgccctccgtgacgggagggtggcccacctccggcatatttgacaccagaagttccagcattgatatcaactcgtctagaggctagctcattcgtcgatataattccagctcgacagaaattttctgttttcgcacaagaatacccaaaaaccatacttcgaaatagcttattcgcttctttcttttgagtaattaaattcgtatagaattcataggcatcgctcagactcaaaagcggccattattctttcacaatcccttcgt

SEQ ID NO: 96654 - DNA, 1672 bp, Zea mays
  Clone ID: MRT4577_19663C.1
ttctcttatctgtctatcttgatctcgtccgctatcttcttcctcctagattctttcttccgcgcgccctctctctctctctctctctcctgccttctgcctgcggccggcccatgtccgtggcgcccctcctgccctgcgagctgcttctccagcgaaaaggctgctgcgccttgacgcagcaccgatccaccgccgcccaacccttgcgttctgtccggcagctaggtagcgagctgcgcggtggctgcgaccggaagcagggaggggaacagggcagcgaacgccgggcgattgccttgcttgcctgtgtgctccgcccggcgcgagttggtcggtcgttccatgcatggatgacaaggaacttatctcacagtccgacctgcagtcattctaccagcagcagcagcagcaccaccgggccttcggcggcggcggcgggcagcatagcccgtcctcgctggccgggatgcactccgtcattcgccccatgcccaacatgaacatgagcccgtcggcgatccttaactctatcggcgggggctccttcaccggtatgcagttccaaatggacccgccgccgccaccattgctgcacaccgccgccatgggtgcctcggctcctacctccacccccggtgccgtccccgcgaaccccacggagccggtcaagcgcaagagagggagaccgcgcaaatacggtcccgacggcaccatgaagcagcagcagctcgtcgccgcgcagccaaggatagggccgtctggtcccagcatgatcagcagcgccgggatagaggactcttcgcagaagaagccgcgcggccggccgccgggcaccgccaagaagcatcagccctcgccctctcaaggcaatgcgttcgccggttcagctggaacgagcttcactccgcacatcatcacggcgtctccttcagaggacgtggcggcgaagatcgtcgcgttcgccacccagtcgtcaagggcggtgtgcgtgctctcggcgatgggctccgtctccagggccgtcctccgccacccggccgacggctctcccatggcgagggttcacgcgtcgccgcagccgtacaacaacaaccctgccatctacgaggggttctacgagatcatgagcctaaccggctcgtacaacctggccgagggctcacaacaagaacagtgccagggccagggccagccgagcggcgggctcagcgtcacgctctgcagccctgagaggaatgtgatcggaggtgttttgggcggcccactggttgccgcaggcaccgtgcaggtggtactggggagttttcaccaaggagggtcgagatccaagtccaagaaaggcgggaagcagcagcaggcgccagcgccggccgccttcagttccgactcgctcaccggcggccaggaggcgtcgcccagctctgggcacaaccaaaatctaacgcctccgccgccgccgccctccgtgacgggagggtggcccacctccgggatgtttgacaccagcattgatatcaactcatctagaggatagctcatttcatttgtcgataattccagccctcgagaaattttctgttctcgcacaagaatgatcgaaaccatacttcgaaatagattattcggtttctcccttttccctaaaaaaaaagaaaaacggaatttctat

SEQ ID NO: 96655 - DNA, 340 bp, Zea mays
  Clone ID: MRT4577_19664C.1
ctcgtcgcaggaagtggtacagagatgccgagcttgtcgaagttgatgaaaatggagttgtacccgaaataaccaccaaatctcaagatgacgctgccagtattaaatcaacagcttcagcggatccccaaggtagcgtgcgaaagcgtcgatggttcagtaactccaaagatctaagcagaaatgcccctccatcgccttccaacgcatccacgttctcgttcagcaaccaagacgttgataacgcttcagaagataaaccctctgcatccagcacggcgaggacttcccgccccgtgagtctacatcgctcccgcacaagtgatcacggagttaaacc

SEQ ID NO: 96656 - DNA, 843 bp, Zea mays
  unsure (1)..(843): unsure at all n locations
  Clone ID: MRT4577_19665C.1
cctcgaggccggccgggacttcagcagcaaggccgcattgccgcaaggccaacagacagcagtccaagtggcccaggactcctcacggacaaagtctcagagtatcggtcaatctctctctcactctctcttgtctcccagtttctaaccctagccgccaaggccaagctccctcccaattcccatgtcccaaactgctcgtctacggtgctgggctgcaggcatccacctccaccaagcgctaacccagtttctgccatccaccaggcgtcctcggaatacagtgtagggctgccgagcagcaagccgccgagcacagggcgccgaccgccgagcagcgagcaccgaggaccgccgagcagcgagtagagggcagcgaccgtcgagcagccgagtcttctctcgtcttcactggcgagccagtgttgcaatggtagaagacaagcgtttagtccttgttggtcacatatcaattctcgcctagcacatcattttttggcaatttcgacgctgggcgctgtgggagtcaatgcagggtgcgcgcgcggaggggagggaggacttacgaagaaactcacgctttaaaggtgtagtgatatatggccatgtcacgtgcaacaactataagaacctcaaattctcgatgtcacggtaattgaggagattagcgaatcagatggtatacttaccaagaatattatgtacaaagaaatgctcactttataggcgtttgccatcaaatgaacatttatgtttatgcttaccaaactatatttgttgctacaatgatatgtaatttgctaaatatttggtatcaagatttatngagttcattatcctttg

SEQ ID NO: 96657 - DNA, 382 bp, Zea mays
  unsure (1)..(382): unsure at all n locations
  Clone ID: MRT4577_19666C.1
ccttggtgttttgatttaagnaagtttcgggtaataataaancgggagggtttacataggcaagcataattttaaaaaggttttaacagtagagttatatatacataaaagtttactgaccaaaagatcagtttttttttgcatgcacacagttttagaaaggcctcaatatcgggttaatatgtacaaaaaaaaagttttatgaccaaaagtgatgaggccttttttatgcgggcaaataagcctactgaccaagagtgacctagccatttttgcataaacacagttttaggaaggttttgagatcaggttaatatgtacataagtctgatgaccaaaagtgatggggccttataccttgatgtatttcagggtggactaa

SEQ ID NO: 96658 - DNA, 337 bp, Zea mays
  Clone ID: MRT4577_19667C.1
gccagcctcacactgttgagctctgcacaacgcactctgcttagctccgatcttaagggccttcgatgttagctgttggcttcacagtccacagtttcacacacacgtccagctgcgctggaccaatgggcgccgtcaggtccaggtcccgactgcctctcccgtccagggggctgctgatgctgcttgacacaggagtggaggctgtccacctggccgacgcagagacccctaacgaggagaccgctgatccggcggcggagaccgaggtcttcgcctctaaggagccggggtccgacgaggccgatactgattccaaggaggtctaggctaaggc

SEQ ID NO: 96659 - DNA, 115 bp, Zea mays
  Clone ID: MRT4577_19668C.1
cccacgcgtaccaaacgaaaagctgtccctcccccactttcatagcataccgcaagctgcgccgggggggggctttattctctaccataactgacctcatctcctgcttcttcct

SEQ ID NO: 96660 - DNA, 182 bp, Zea mays
  Clone ID: MRT4577_19669C.1
ggccaaaatttcctttgtttagaagggaaataaggtggtttttgttacaaaaaaaggggggttggttaattccggggttaaacctaacttttcccaggccaagggaaaggcccgccctttcagggttaagcccaaacgggcccaaaaggggaaatcccgttgtccttgggggggggaattcc

SEQ ID NO: 96661 - DNA, 858 bp, Zea mays
  Clone ID: MRT4577_1966C.1
cattgggtacctcgaggccggggcgggaggactctgcttctccatcagagagccacaagagagataagagagacagagagagactattatccaaaccatctgtctgcgtgcgtctgcttgttcgtcgccactgtaaacatcggaggcgacagcaccgcgcgcgcgcagcaggcgtcaatatggcgagcaacggcaacggcacggcgcgcgtggtggtgccggagatcaagttcaccaagctcttcatcaacggcgaattcgtcgacgccgcctcaggcaagacgttcgagaccagggacccacggacgggcgacgtgctggcccacgtagcagaggcagaccaagctgatgtggacctggcggtcaagtcggccagggatgccttcgaccacggcaaatggccccgcatgtcaggctatgagcggggccgtgtcatgagcaagctggcggacctagtggagcagcacacggaggagctggccgcgctggacggcgccgacgccgggaagctgctgctgctgggcaagatgatcgacatccccgccgccacgcagatgctgcgctactacgcgggcgccgccgacaagatccacggcgacgtgctgcgcgtctccggcaagtaccagggctacacgctcaaggagcccatcggcgtcgtgggcgtcatcatcccgtggaacttccccaccatgatgttcttcctcaaggtcagcccggcgctcgccgcggggtgcagcgtcgtcgtcaagcccgccgagcagacgccgctctccgcgctctactacgcgcacctcgccaagctgggccgcgtttccggagggggggatcaacgttgtcccgggtttggtctccccgtcg

SEQ ID NO: 96662 - DNA, 1226 bp, Zea mays
  Clone ID: MRT4577_19670C.1
attagcttgttcacttcccatttctgagggtggtgaagctatctgatttccctaacttgaagcatctagatgggcttgtggagctgccttgtttggaagaccttgagctgcgagcgatgccttgtctcgagagcatgagtggaggcccatttccttccttgtcgaggttagaactggacacgctgcctagtctaggagaggtgtggctggtagccgagacaacaatcctacctagtggtgaaggagcaggccacaacgtccatgacactggcacgcctggctctggacgacaggtccgtgttggtggtcgcttgtcatatctgtttatacaagactgtcccaggttgaggctcaggccgcacatgccttcgtcgttggagagcctgcacttgtccgagagcagcgagcaactgctgcaactgcctgcagaccaatgcctggggtcttcctcttcctactccaatttcagccacctgaagaagcttgggctatgggggatgacaggactaggatctggacgccggtgggagcttctgcaacacatgacggcgctcgagtcattggagatcaactcctctctggtgctaagagagctgccagaggggttgcggagcctcacgtgcctccagtcactgatcgtgttcgcgtgctcagatcttctcgtgctgcccgagtggataggggagcttgcgtccctgcagcagctgtgcatctggtcctgcgatgtcctgagcagccttccccagtcactggggcagctcacatccctccagatgctctccatagatgcatgctacgagcttcaccggctgcctgaacgcataggggagctctgctctctacgcaagctcaggatcagggattgccggatgctggcttgccttccgcaaatgtccggcctcacctcccttcaagaactcctgatcagcgactgcccaggcctgacatcattaccgcaggggatgatgagcggcctcgtctcccttgaaaagctgattgtcagtgactgcccggggatcaaattcttgcctcaagacataaaaggcctcaccactctgatggaattgcggatccgtaggtgccctgatctggagaggcgttgcgaaacaggaaaaggggaggactggcacctcatctcccacatccctaatttgaggatttggtgatcagcagccagcctgccatggcatcatcatctgctgcatatacatcaatgttccagcttc

SEQ ID NO: 96663 - DNA, 705 bp, Zea mays
  Clone ID: MRT4577_19671C.1
cggccgcgtgggcgttttgaactaaaaagcgatttcttccgtgtttgctgttgagcgctattttggaaaccccattttctcaattgatttttagtttttaaagaaaaatagttcattttttctcttgtgaaatggagtcccaaactaaccctaatattaaaaaaaatcgcgttttggagctcaaaacgctcgttgttatgaccaaccagctttataggtttaaaaaggttgaatcttgacaatgcttttaaaaaggttgaatcttgacaatgcttttgagatgatactgtagtgtagtctctagtggagcatcctccatggtctttggtgatcccacagaaccacaaaagatagatttcgcttgcatttggtttgtggatcactaggagggagctgaaagtttatcatcatggccaactttccatgccaaaaggtttctggttcaaagtgccaggacgaccatgattactgactgaatggaacaactgtcatcttctactactaatcatcatttgttaacacgctactactgggtcatcatcaggaagctacactacactcagaaaggcttgtcaaaggctagtcttttctccaatgggcgacatgccagattgccagcagcacacatatctcatctgaagcatgagattatacatgtaccctgaactgcaatgcccttgatttgatgcatcattataaacgcta

SEQ ID NO: 96664 - DNA, 562 bp, Zea mays
  unsure (1)..(562): unsure at all n locations
  Clone ID: MRT4577_19672C.1
gacacacctcccaaccctaactcccggcggcggcggcggcggcgcagcagcggcagcagcatccgaagatggtgaagttcctcaagcccggcaaggccgttatcctcctccagggccgcttcgccgcccctatggccactgcctcgtcgcaggcctcgccaagtacccaaagaaggtgatccgcaaggactccgccaagaagactgcgaagaagtcgcgcgtcaagtgctttatcaagctcgtcaacttcactcacctcatgcccacccgctacaccctcgacgtcgatttcaaggatgtcgccaccggtgggcccgacgcactctctacccacgacaagaaggtcgccgcctgcaagacggccaaagcgcgccttgaggagaggttcaagaccggcaagaacaggtggttctttaccaagctccgcttctagatgctcggcctcccgaatagtcctgctttagctgtcgatttgttgtatcggacacactccatctctgttttcgtattaccatgaatatttcgtgtttannnnnnnnnnnnnngaannnnnnnnnnnnnn

SEQ ID NO: 96665 - DNA, 318 bp, Zea mays
  Clone ID: MRT4577_19673C.1
gttttttttttttttttttttgtaaacaatattcgctgttaatcctgaagacataaaaatttgaacatccatcaattcagtaggactccaagaccaaacattcgaagtacacacgaacaatatacctgagagccccgggactcggccaagaagacgtcgagggtgtagcgggtgggcatgaggtgggtgaagttgacgagcttgatgaggcacttgacgcgcgacttcttcgccgtcttcttggccgagtccctgcggaccaccttcttggggtacttggcgaggccggcgacgaggcagtggccgtagggggggtcg

SEQ ID NO: 96666 - DNA, 706 bp, Zea mays
  Clone ID: MRT4577_19674C.1
ggcccgcttcgagccggccgggccgggttttcccccacccaaacccacacaacccactcggcggcggcgacggcggcggcggcggagcacgcgaagatggtgaagttcctgaagccgggcaaggcggtgatccttctccagggtcggttcgccggccggaaggcggtcattgtgcgcgttttcgaggagggcacgcgcgaccgcccctacggccactgcctcgtcgccggcctagccaagtaccccaagaaggtgatccgtaaggactcggccaagaagacggcgaagaagtcgcgcgtgaagtgcttcctgaagctggtcaacttcacccacatcatgcccacccgctacaccctggatgtcgacttcaaggacgtggcctccggcgggcccgacgccctcgccacccgcgacaagaaggtcgcctcctgcaaggccgccaaggcacgtctcgaggagaggttcaagaccggcaagaacaggtggttcttcaccaagctccgcttctaggagcagagcgtctttacaatacttattagtagttccttgttcttgcaatcaatagcacactgagctatctctatcactgtttttgtattgtccatgaggattttgtggttagtatggatctcggagagagtttaattaaggcatgatgatgatgatgttccatgtgtcaaatcatgctaaatgatgcacatggttg

SEQ ID NO: 96667 - DNA, 744 bp, Zea mays
  Clone ID: MRT4577_19675C.1
attgggtccctcgggccggccggggaccatctcccaacccctacactcccggcggcggcgcaggagcagcagcacccgaggatggtgaagttcctcaagcccggcaaggccgtgatcctcctgcagggccggttcgccggcaggaaggcggtgatcgtgcgcgtgttcgaggagggcacccgcgaccgcccctacggccactgcctcgtcgccggcctcgccaagtaccccaagaaggtggtccgcagggactcggccaagaagacggcgaagaagtcgcgcgtcaagtgcttcatcaagctcgtcaacttcacccacctcatgcccacccgctacaccctcgacgtcgacttcaaggacgtggccaccggcgggcccgacgcgctctccacccgcgacaagaaggtcgccgcctgcaaggccgccaaggcgcgcctcgaggagaggttcaagaccggcaagaacaggtggttctttaccaagctccgcttctagatggtcggcgtcccgaatggtgcccgtcggtttcttgtgtatgggacacactccatgctatgtctcttttttcgtattgccatgaagacttcttcgtgtttaatcctggggctctcaggtatattgtgcgtgtgtacttcgaatgtttggtcttggagtcctactgaattgatgaatgttcaatttatgtcttcaggattaacagcgaatatcatttacaatcttatttatcccatttggttagtttgc

SEQ ID NO: 96668 - DNA, 348 bp, Zea mays
  Clone ID: MRT4577_19676C.1
cccacgcgtccggctccggctcaaggacgagaagctggaggcgttccggtggcgcgcggtgagcatggacgtcgaggcggcgcgtctccggagccggatccacgagctggagggccgtctagcgcggcacgagaagcacagcgccgcgctggaggccctgctccaggacagggaaagcgagaacagagcactcgaggagcagctggagacgctccaagcgcaggcgcttggtgtggagatctgcacgccggcccgtggcagtggccaagacgacgggctcgacgaccagtgcatcgcgtgttcgcccgtggatgccgtccagagaacaatgtcatccggaagctcgcg

SEQ ID NO: 96669 - DNA, 842 bp, Zea mays
  Clone ID: MRT4577_19677C.1
attgcctagaagtatcagcaatggcattactttcataggctactataacagttcacgatcaactcaatattaaaagtttaacaaactaaccaatgggataaataagattgtaaacaatattcgctgttaatcctgaagacataaaaatttgaacattcatcaattcagtaggactccaagaccaaacattcgaagtacacacgcacaatatacctgagagccccaggactaaacacgaagaagtcttcatggcaatacgaaaagagacatggcttggagtgtgtcccatacaagaaaccgacggtcaccattcgggacgccgaccatctagaagcggagcttggtaaagaaccacctgttcttgccggtcttgaacctctcctcgaggcgcgccttggcggccttgcatgcggcgaccttcttgtcgcgggtggagagcgcgtcgggcccgccggtggccacgtccttgaagtcgacgtcgagggtgtagcgggtgggcatgaggtgggtgaagttgacgagcttgatgaagcacttgacgcgcgacttcttcgccgtcttcttggccgagtccctgcggaccaccttcttggggtacttggcgaggccggcgacgaggcagtggccgtaggggcggtcgcgggtgccctcctcgaacacgcgcacgatcaccgccttcctgccggcgaaccggccctgcaggaggatcacggccttgccgggcttgaggaacttcaccatcctcgggtgctggtgctgctgctcctgcgccgccgccgggagtgtaggggttgggagatgggtcaaaaccccggcccggccggcctcgagcgccgcacagg

SEQ ID NO: 96670 - DNA, 361 bp, Zea mays
  unsure (1)..(361): unsure at all n locations
  Clone ID: MRT4577_19678C.1
cttccgaaccaggcacaataaaagggggaatccagtaccaccaataaaccaccaatggcgaccaaaatattttccttcctatgctcctgctcttctgcattggtgctacgcgacaattttcctcatgctcacaagctcttagcttccttcttccccatccttncataatgatagctcagtatgtgaaaacccactcttaaccctatggctccacagcaatcgcagaagaacatacctttatcacccttgttaacaatcgcagccctatctttgggcagtcattggacaaaccatcaggcacgcagctgcagcaactcgtgctcctgtgataaccaagtagctctggcaacctttctcctac

SEQ ID NO: 96671 - DNA, 1356 bp, Zea mays
  Clone ID: MRT4577_19679C.1
cctcgaggggccggcccgggaaaaaaaaaaagtagagaagagatgagaccggtgttgagctgcagagctgggggctggggcacatgaaggaatgctgggatggaatttggactggccgactggatctttttctgtacgacaaagaaaagctacagtagtgctcatgttgggccttgggccattgacgacgagccttacatcagacccagaactacttcatcccgcgccccctgaagctcgagcacggcagcaccgtccgatcctggatccaacagccgaaacccacccacctggaaaccctagcgccgccatactatataaccttctctcttcgccgtgctccgatttgacacacctcccaaaccctacactcccggcggcggcggcggcggcgcagcagcggcagcagcatccgaagatggtgaagttcctcaagcccggcaaggccgttatcctcctccagggccgcttcgccggcaggaaggcagttatcgtgcgcgtgttcgaggagggcacccgcgaccgcccctatggccactgcctcgtcgcaggcctcgccaagtacccaaagaaggtgatccgcaaggactccgccaagaagactgcgaagaagtcgcgcgtcaagtgcttcatcaagctcgtcaacttcactcacctcatgcccacccgctacaccctcgacgtcgatttcaaggatgtcgccaccggtgggcccgacgcactctctacccacgacaagaaggtcgccgcctgcaagacggccaaagcgcgccttgaggagaggttcaagaccggcaagaacaggtggttctttaccaagctccgcttctagatgctcggcctcccgaatagtcctgctttagctgtcgatttgttgtatcggacacactccatctctgttttcgtattaccatgaatatttcgtgtttagtcctggggctctcagagataaatttgctaagatatgccgttgttgtgttacatgttttcgtgataggtctggttaaaattttgttctgttttacggcttgcgggtttcttgttggtgccagacatttgtgatgcatcttgttagtagtgtttcatcaagtaaaaaaaaaaaaaaaaaactcgaggaagatcttgagcacgccgcgggtctcctcgtagatgagcccagaaatgcgcttgacgccgcccctcctggccagcctacggatcgccggcttcgtgatgccctggatgttgtcgcgcagcaccttgcggtggcgcttggcgccgcccttgcccagccccttgccgcccttgccgcgccccgacatcgccgaaaccgagagctacgcggacggaaaaaggacgcgttgggtcgacaccggg

SEQ ID NO: 96672 - DNA, 2215 bp, Zea mays
  Clone ID: MRT4577_1967C.1
ctagaaacgtagcgtcccgcggagtcactgcctgcgggctcggccgcgcctctcgcccacatggcagtggtcaggacgtactgcagatgatctgattacctagataatatatggattgattcgttatactaggtgataaagagtatatataggtaaatagatagatagatggagatagagacagggagggggagtggtccgaggtcaataggatataactccaggactcctcgctctccagaagaatcagagacgagtcgagtgaggggcagaggccacaaaacagaggtacccaaacgatcgatctgtgcatctccccgtccgtcccgcaaccatctgattcagaagcagacatcaatggcgagcaacggctgcaacggcaacggcaacggcaaggcggcgccggcgggtgtggtggtgccggagatcaagttcaccaagctcttcatcaacggcgagttcgtcgacgccgcctccggcaagacattcgataccagggacccacggaccggcgacgtgctggcccacgtagcagaggcagacaaagctgatgtggacctggcggtgaagtccgcccgggacgccttcgagcacggcaagtggccccgcatgtcaggctacgagcgcgggcggatcatgagcaagctggcggacctggtggagcagcacacggaggagctggcggcgctggacggtgccgacgccgggaagctgctgctgctgggcaagatcatcgacatccccgcggccacgcagatgctgcgctactacgccggcgccgccgacaagatccacggcgacgtcctgcgcgtctccggcaggtaccagggctacacgctcaaggagcccatcggcgtcgtgggcgtcatcatcccctggaacttccccaccatgatgttcttcctcaaggtcagcccggcgctcgccgcgggctgcaccgtcgtcgtcaagcccgccgagcagacgccgctctccgcgctctactacgcgcacctcgcaaagatggccggcgtccccgacggagtgatcaacgtcgtccccgggttcggccccaccgccggcgccgcgctcgcctcccacatggacgtcgacagcgtggccttcaccggctccacagaggtgggtcgcctcatcatggagtcggccgcgcggagcaacctcaagacggtctcgctggagctcggcggcaagtcgccgctcatcatcttcgacgacgccgacgtcgacatggccgtcaacctgtcgaggcttgccgtcttcttcaacaagggagaggtttgcgtggcgggatcgcgcgtgtacgtgcaggaagggatctatgacgagttcgtcaagaaggccgtggaggccgcgcggagctggaaggttggagacccgttcgatgtcaccagcaacatgggccctcaggttgacaaggaccagtttgagagggtcctaaagtacattgagcatggcaagagcgagggagcgactctgctcaccggcggcaagcctgccgccgacaaagggtactacattgagcccaccatctttgtcgatgtcactgaggacatgaagatcgcgcaggaagagatcttcggccccgtcatgtccctcatgaagttcaagacggttgatgaggtgatcgagaaggccaactgcaccaggtacgggctcgccgccgggatcgtgaccaagagcctggacgtcgccaaccgggtgtcccggtcggtgcgcgccggcaccgtgtgggtgaactgctacttcgccttcgacccggacgcgcccttcggcgggtacaagatgagcggcttcggccgggaccaggggctggcagccatggacaagtacctgcaggtcaagagcgtcatcaccgcgctcccggactcgccatggtattgagttgagccagggaccgaccgatggaaccccatcgatctcttcttgtgcagtgtacatgcgtcatgcgtgcgtgctcacacagctgggttgctgctttgtgcttgtgttcgtctctggtttgtggctcatgtgttagtctgcaccctatccttctgtacgtagctgccggacatgcatatagtatgttaagtacaccatataaactcttgttttataaattcaagtttagcttggagccttgactccttcagacaaagacaaaaaaaataaaaaaaagtggagcttggagccttcactcccttcagccttgacactcgagggggggcccggtacc

SEQ ID NO: 96673 - DNA, 502 bp, Zea mays
  unsure (1)..(502): unsure at all n locations
  Clone ID: MRT4577_19680C.1
ccggggccccccccaggggggggggggggtaaaaggggggaatgttaaaaaagggtcggggttttttatcggattcccccttttccccaaaaatgggtttacccgggtcaaaaaggttaaaagggggggaaatgcaaaaaaaaaaaaaaccgcaaaaaaaaataaaacgccaaaaagaactaaaaagggggggggcccaaaaaaaaaagttaacccaaaaaaacccttttcccctccgaaaccctttttccccgggggcacctttgtttcccccccttcccaaaaaaagcccaaacccggttgggggggtttttcccttttgggcccttttccccctttcccctngngcccccccnncccccggggggttccggttcgcccccgggtttgtaccccctatccccgtaaaacgcggttttccccccgaaaattgggttttccccggggggcaaaattggggcaaaaagcccttaaaagccccaaacccccggaaatggcccct

SEQ ID NO: 96674 - DNA, 560 bp, Zea mays
  Clone ID: MRT4577_19681C.1
ctttgttttttggtttttttttttttttttttttttttttttttttttttttttttttttttttttttttttttttttttttttttttttttttttttttttttttttttttttttttttttttggggaaaccccaacccctaaggggggggggggggggggggttttttcccccccatagttgggcccggccccttacaaaaaggggggggggggtaattccccggggaaaatcaaaaccctaacggggtcctttacatttaaaacttttaaaaggttagatttgaaaacccccaaagccccaaaatttaaccctactgggtttttcccccctttttggaagggaagggggttcggtttcctttaataatccacaatctttatttaaaaacaaaagcccgcttttacacccaatgggatccgttcattttttgtaaaaactttattaggcccaaagggttaaaaccccctttttgaagggggtggcgaaaaaaaaaagcccttttactttaaaggacccaaaatttttgaacatttattctcccccatttttttttttt

SEQ ID NO: 96675 - DNA, 400 bp, Zea mays
  Clone ID: MRT4577_19682C.1
ctctacccactcttcctagaagctggaaaggtgaatggctcaaattacatagtacaaatctcttgcttaagacgcatttattaaacgatcacagctcaatcaatataaccatcctaacattaaacagctcataatatacattaccatccatcacaaactacacaaccttattgaacaactcatagactcacaacaattcaaccaacaagtcttggtcacacaaacttccacctcatcactgaaagctcttcacatcaatacaacatagctatattgatgaatcatacgttttcatctaaaattgtatattcttgccctatatcaataattaccttaacattatacactgctaatattctattttatgatcaccatactaatctaattcaccttatccctc

SEQ ID NO: 96676 - DNA, 531 bp, Zea mays
  Clone ID: MRT4577_19683C.1
cacagctttttttttttttttttttttttttttttttttttcccatccaaacgtgccttgatgcaccacagctgcaggctgcagcaagcaaatatgccctgaaacgcggacaaaaaaaacaactcggaactgaccaaagctcacagccatgcatgggcacagacacattacattgaaatttttatttgtctataggggttattgatggcagctctagcatgcaatgacagggcactaagccatttatgtgcccatatatatactatcggtacgacttctttttacctcactctctcttcctgatttcttctcccaattctccggcgaaagtatgggcgatcacctaagtcctgagttccgcatcaagttaagcgcggctagaacttgttgtaccataaaatgcccctgccgttctcgggctcgacgtaaatgcactccctagcttcgcgccacatcgccttggcgatggggggtggggctcaaactgatagtactcgccgaggatgggcttgatcgccttggtagcctcca

SEQ ID NO: 96677 - DNA, 368 bp, Zea mays
  Clone ID: MRT4577_19684C.1
tcgtttttgaggatttaaaaacaaaaaaagtgaagcgcgctttcaacaaccctagagctatggttaccaagacattatccataggtgcgcctattgcggttcctatgaacggaacaaatgctggcagtattccacaatgatcacttggtcctagtttaattattgcacaagtcctcccaacaggtactgtaatgggcttccaacaacgagataggcatgacttttggccacaacaagcgactgcggcgcagcgtttacaacaaccgattgggcaaatgcaacaacaattcgtggcacatttaacaatacaaaccattggaacgctacagtcacaacagtttctaccaacactgtggcatctagtcatg

SEQ ID NO: 96678 - DNA, 236 bp, Zea mays
  Clone ID: MRT4577_19685C.1
gttaggacgataacttgatttattttatcgagcaagtccgtcgatcgtaagcccgactggacacacatacaatggaactcgacagacagggttaaattataatgaaacttctaaacacttgaaagagcagggttacttgttcccgcttggacaccttacaagctggagcagctgggggcgatgtccggaatgcgcaaaatgattcattgagcaagggccagttacggacaagagga

SEQ ID NO: 96679 - DNA, 395 bp, Zea mays
  unsure (1)..(395): unsure at all n locations
  Clone ID: MRT4577_19686C.1
cgcgcacctcgcggccggcgacgtctacgactggggcgcggcggtgctgctgggccggtcgcggngcacgttcgcgtaccgcgggacgtggggcggnggctcctcgggcgtcgtcacctccgtgccggccaacgtggagcacgtcctcaaggccaacttcgacaactaccccaaagggccctactaccgggagcggttcgcggagctgctcggcggtggcatcttcaacgccgacggcgactcgtggcgcgcgcagcggaaggccgccagcgccgagatgcactccgcgcggttcgtccagttctcggcgggcaccgtcgagcgcctggtgcgccgcgagctgctgccgctgctggagtcgctcagcggacgagaggggccaaagagcgcggcgg

SEQ ID NO: 96680 - DNA, 347 bp, Zea mays
  Clone ID: MRT4577_19687C.1
tacagcaccttttggacaagcaaccacattctttttgtgttactatcggggtggaacattacttttcagatttctgttatcatttgcaatcttagcaagcaggaaagcataaataaactcgataagagcaaaggagcttagaaggaaagagtaatgtagtgaatgtgggcgactttatttaagtagcatataaatctagatgaagacatggagtgattagtcaaacctggctgacctccaaccggtctccaggttctactttcttaagtgcatatggcaactcttctatttctccttctggcatctgaattacagtttgccagctgcattgacaatagtagaggtta

SEQ ID NO: 96681 - DNA, 384 bp, Zea mays
  Clone ID: MRT4577_19688C.1
tgttagtaggtacccatcttgaggcctcggaggctatgggtcgacttacaggtactattacctaggtccatcttaggctcgaatgctagacggcaccttgtctccatccctgggtgattatagcacaagtcaggaagttctttgctctgcgcgcttacagacaggggatcattttacaagtcatacaagaactctgttttctatgctttcaagcagggatctggcaagattatactgcatcccaatcaccagaacccatacttctgactccaatctgctttgacaaacaatggaatcataaatcgtcctaggtaattcaaagattgcatctcgctccatgatattacgactattaaatcacaacacccataacgtatcaaacaa

SEQ ID NO: 96682 - DNA, 344 bp, Zea mays
  Clone ID: MRT4577_19689C.1
aaaagagtaggctgaaataatggacctgtcttttataattacatatgtgtccaacgtaagggtcagagcctgccatgatgggatacatacatatttcgcgtacatacacatcacatgactggataattacatgtggccaacgtaagcgttagagcaccccaagacggcatacacacatattgagcatacatacacacattgcaggagtggggaatgatgcaaggatacctcatacgattctcagccaaaagcaggaacaattaatgctgcctcggggcacgcggaaggcaccgacatacatgacttctggaacaggcacgccccgctcgccttgtggaacccgg

SEQ ID NO: 96683 - DNA, 248 bp, Zea mays
  Clone ID: MRT4577_1968C.1
catgatcattttttttttttaacactctagaagaaagcgagagtgcaccatcggaagggacctaagaggcaagatagggccacaacggaagagatctgctgaatatatgatattcctaaccaccaaagagcgcaccatcgaatccggatccaaaaaccacaccgggaaggcctgcaaccttaccaactaaaacctgagctacactttggatgggcacgggggaaaggttaatcccgtcgctcttaacc

SEQ ID NO: 96684 - DNA, 384 bp, Zea mays
  Clone ID: MRT4577_19690C.1
ctcttacggttccctccttgttgacgccgacgaccgtaacccaggtggcctttttgggggttttgggggcctctccccttctacttgaggaccaacacttacccctgtcgccagggaaagtaaaatgctcgccaagaccacccccgccagttgggacttttatacaaacctacctacttggtatgaagggccagaaacccatcaacaagaacatgtttccatgaagctcccctccgtccccttaaaggtcaccggggatcatttttgaacctaaccagatacaccagggataggacacaaataagaacctgtgaacttataaagcccagtgtgtttgaacataaaaacatgtcccagggggggggaccccggcgccccctagga

SEQ ID NO: 96685 - DNA, 183 bp, Zea mays
  Clone ID: MRT4577_19691C.1
ttttctgcaaaatgagctactgcaccttgctatgaacacactttcggtgaaagattgcacacatcctgacttgaagagatatatatgaaactgatcttgtacaaacctaaccagattatcatccactctgggtcaatacgtgaggagagccttgcaacattacacttctttttgctaacacga

SEQ ID NO: 96686 - DNA, 319 bp, Zea mays
  Clone ID: MRT4577_19692C.1
ggaaacaggaagagttgattggaaaaagaaaaaatgggatgtgtttttctttttgttcaactgagatacgacttaataaactatatcttcgaatgatgctctgacccccccccccccccccttttaatgttttttcattgactaaaacggttatgtaatgataactatgtgacacttgttttgtttggtgtgattcttcagcgtagcctggtgatcgagactcatgcgggcaaaaaaaaaaaaaaaaaaaaaaaaaaaaaaaaaaaaaaaaaaaaaaaaaaaaaaaagaaaaaaaaagaggaaaaaaagaaaagggggg

SEQ ID NO: 96687 - DNA, 1104 bp, Zea mays
  Clone ID: MRT4577_19693C.1
gtcatgggcgagcgaggctgcctcgtgtcgccgcagcagtgtgaggataagttcaatgacctaaataagaggtataaaaggcttacagatatccttggtcggggtactacttgcagagttgtggcgaacccggaacttctggatggcatggctaatctctcagataagatgaaagatgccgcgaggaagatattgagctctaagcacttgttctatgaagagatgtgctcctaccacaacaataattggttcagtttacctgaagatcctgcacttcagcgatcgttgcagcttgctcttaagtgtaaggatgagcatgatgcaaggaagcgagcaagtggagatgctgatgaagatgatcaaagtgcagacactgattatgaagaagagaatgatgatgagcatcccatcacgcatgccaataaggggaccctactcacgcgtaaaagattgcggtacatgccggcggatatggaggatgtaggtttcggcaactcttccagctcacatgactgtagctggagatctgatccccatagcattgcagtggacatcaacaaagcttctccagatggaactaacttggcttcggttcaaaaagacttggctacacagtctgcggagattgagaaacagcgcatggaaattgaagttgaggcattggagcttgcaaaacaacgtctcaagtgggaggcatttagtaagaagaaggacagagagctagagaagatgaggttggaaaatgaacaaatgaagattgagaataaacgtttggagctagaggtaagatataaggagttggagcttgaacacaaaccacaaggccatggcagtcatgcaacatgataatatctttaaaatcgcgaagactgaaatgcaagatagtaagcattgtctcctgttatcactacccagagaaataattatgagtaactcatttctaattctgtcaccaaatccttgatattcataggctgctggagtaggtgctatttggtaccagacagttcagtcatgtttatatttattttgttctctgtagatgtttcagagaaacgataagttccgatgcatgctttgggttagggaaccatggaatgcaga

SEQ ID NO: 96688 - DNA, 115 bp, Zea mays
  Clone ID: MRT4577_19694C.1
ttttctcttggtataacatagggttttcgggacaaacacagcatccacatcaacaacactagccaaacattgttcttacacctgtacatcataaaacctaaaccccacttttttc

SEQ ID NO: 96689 - DNA, 1573 bp, Zea mays
  Clone ID: MRT4577_19695C.1
gaacgctcctcgccctaaggctccgtcgaggccggccgggagggaaggcaccgggactcaaaaaaaacaaagaacgctcctccctctaaggctccgacctccgtgcctcgcgcgccctcgcccttgccctcgccctcccccaccaacccaaaacccgatccgttgctcgctgctcagggtccactactgatccgctccacgcgagctcccttgtccccgcgtcacactcgcgcccaagcaagcggttgctgcaaaggaagcctcccctgatggctctcgtgacctcgggctcgggtgccgaccaggtgatcgccgaggtggcgatgaacggcggcgccgacccaagtgcaaccaccgtgcgtgctactgtcgtgcaggcgtccaccatcttccacgacacgcccgccactcttgataaagcagagagattgatagcagaggctgctgggtatggttcacagttagttgtctttccagaagcttttattggaggctatcctcgtggatccacatttggtttcgggatcagtattagtattattaatccaaaagacaagggaaaggaagcattccggaggtatcatgcatctgctatagatgtgcctggtccagaagttacacgcttggctgctatggctacaaaatataaggttttcttggtcatgggggtgattgaaagggaaggttacaccctttattgttccgtgcttttctttgaccctcttggccgttacctgggtaagcaccggaagctcatgcctacagcattagagagaattatatggggatttggggatggatcgactattccagtttatgatactccacttggaaagattggggcgctcatttgctgggaaaataaaatgccacttttgaggacagcgctgtatggtaaaggtattgagatatactgtgcccccactgctgactccaggcctgtttggcaagcctccatgacacacattgctttggaggggggatgctttgtcttgtcagcaaaccaattctgccgcagaaaggactatcctcccccaccggagtatgagtttgctggtttaggtgaagagccatccgcggacactgttgtttgccctggaggcagcgttatcatttctccatctggagaagtcttggcaggtcccaactatgaaggagaggcactgattacagccgaccttgacctgggagagattgttcgagccaagtttgatttcgacgtggtgggccactattctcgacctgaagtccttagattggtagtgaacgaccaaccgcagctccctgtgtctttcacgtctgccgctgagaggactccagctgccaagagtgatatcgatactaagtcttactgattgactggtcatgaaactgtgttgcgccgaacacttggtgatggtcgctcagctcctctagtttgctgttgtgtctcgtggatgggagttgggagttgtagctttgaactaaaaaaaaaaactcttgccttcccaacgtaaaaaaatggtggccgcagttatgttccttgtgaaagctgttcgcttggctttaatctaaaactgtttctactttttct

SEQ ID NO: 96690 - DNA, 490 bp, Zea mays
  Clone ID: MRT4577_19696C.1
ccccaggtctttctttttatattttggattttatcatcggtgagcattgttactagttctgcgaccacttggagaatatggacaagaagaaaaaggataagaagaagcccggcgagggccccgaacaacattcttgttccaggggggggggaaaccaccgccaccgacatctgttttttttgcccacgtgccacacacccacgctagctggatggaggacccccaccagctgacccccccccctgttggactggggccccgcccgcatgtatcgcgccattataatcaaaagcccccccccaactgggggacccccccattgacccccccccccccgggaaatggggccccaaaacttaacccaaaccccccccgggggcccccccccttttttggggcccccgccaattttggcccccccccccccggaataaaacccaaaacatttccttaaggggcccccacttctccaaagggggggcccttttaa

SEQ ID NO: 96691 - DNA, 362 bp, Zea mays
  Clone ID: MRT4577_19697C.1
aaaccccaaaggcgggtttttttttaacctccgggtaaagccccggggggggccctatagcctttggaaggggggggggccgcccaagttcccccccttctttaaaagagggcccccccctggtaacctacggggcccaagggggttaggtcccccctttaattatcttcagcccatcccagcagggggggccccatttcgggatatcaggacccgggccccggggggggaatgggtcgatcccacccccccttagggaaaaaaccccccccggggggatagcccaaccaaccacaatggggggggggggggtctgcttccccctggggcccttggggaagggggcccggggggcaatcccc

SEQ ID NO: 96692 - DNA, 654 bp, Zea mays
  Clone ID: MRT4577_19698C.1
ctcgagttttttttttttttttttttttttttttttttttttttttttttttttttttttttttttttttttttttttttttttttttttttttttttaaaaaaaaacacaaccctttttttttttaaaatggggggcataaggggggggccaaaaaaaccctgggtttccctccccatttttacgagttaaaaacaaccccccccccattttaaacccccggggttaattaaaaacctccccgagggggtttgctcccgattaaatcaaaaaaaaacccccgaccaaaaatttgacccccgccctttgggaaaccggcctggtcccccgaagggaaaggcccagggccttttttttgcccttaaaagcgggggggttgttttaaaagcccgaggccttgggggggtaaaaaaaatggaaccccccccttttcgccacgcgaaggggaaccaattggggggggtcaaccccgggggcccccttggcccccaaaaaaactcccccggggcaccggcccgtagggatctccagcggcgcaaccccaaaggcgaacccgtgggccttaaaagggggccccgtttttttggccccgcccctctccggggcggggtccccccccccccccagttccaaattttgctcccccccccccga

SEQ ID NO: 96693 - DNA, 361 bp, Zea mays
  Clone ID: MRT4577_19699C.1
ctagatcgcgagggccgcccttttttttttttttttttaatcaggactccctgcaagaagaatgagttcagtcatttttgtcattctctgtctctctccactgagattcaacacgttatcagacactttgctctccaacgaaggccatcatcgtgaagtgcactgcacacaccagtatgctacacggccggcggtgtggtaactgctatcatcatccatgacaagatgaacaagcaagatcacgattagcgtttgcagaccgcgacgagaggcagcacgccagcgtcgccaggccggactcgctcctgcgcgacactcagtgagtaacctattacgaacctaaagcaatatcgtctctcct

SEQ ID NO: 96694 - DNA, 382 bp, Zea mays
  Clone ID: MRT4577_1969C.1
gtaggtgggctggcaccactgttgggctgtcggcccattaggatagggtttcacctaggtttgtctctattatgtaaccatctcctatgcaatactataggtcttccattatcttacaacatctaagcaaaaaaatatcaaagatcgacgaggccacctctggtagcagcagatggatgctccccggtggcagcgcaagagaggggaagagtggtagatgcatctaaaacctatagctttggtaccatgttacgaataagtggagactgaaactggatgactgtattgaggcccaaaggggactataaatagagtagagtacgagggacatgaaggaaaccctagactactaggggattaaactgatacccttgactattat

SEQ ID NO: 96695 - DNA, 165 bp, Zea mays
  unsure (1)..(165): unsure at all n locations
  Clone ID: MRT4577_196C.1
aaacgttacatcttacattaataatcctctttcgttcgatgacactttaattgaattttgtaaaaactgnntagacaatcctgaagaggggattgcttgcatgtcttcnnacgttcttacggcggcagtgcgccccccggagcccccgtttacagcgtttcaaat

SEQ ID NO: 96696 - DNA, 408 bp, Zea mays
  Clone ID: MRT4577_19700C.1
tgacctcccacgcgcgggaccacgcgtccacgggcttgaggccatcaccacccaccaccaccaggccaccaccaaccgcaacggagcggaccaaaggaagcacaccgcaccgacagagagagcgacaccgggaacaggggggcgagcgacccggagcacgggggcgcgcacgcggacgaggtgaacggcaggcagccgcacgaggggaagcgcatggtggcgcacgcggggcagaccgtgggcaagagccagggggccaccgtccgcgtcggccaggaggccgccggcgactccgccaaggacgcgcagggggccaaggcccagctcaaggaggagggccagcggagcctcaagggcagcagccagtggagccacaactgcagcgccaacagcggcgacagcgacagc

SEQ ID NO: 96697 - DNA, 418 bp, Zea mays
  Clone ID: MRT4577_19701C.1
caccaaataaataaatagagggataaccctggaaaccagttacataaacaggtccatggttaacaaacccccaagggatcgaatgatttacttttaaggaggaaagggcccaaagctcatttgacaaatagctgttgggcaacccttttaaaaaacttttaaaagggggaagcctcctcctggagctgtttcaccttggggaggaagtaattcatcgcctaatccttgaattggccttaaacagccttccaggcatccaatttggccctgtctttttggaaaaatatgcccggacaatcggttttcacatttccaaccggggtttgtttgaaaagcccgaaaaggaccagctggttctaattgctcgggttctaaggcaaggtctttgccttctaagaaggctcctaaaattcctcct

SEQ ID NO: 96698 - DNA, 481 bp, Zea mays
  unsure (1)..(481): unsure at all n locations
  Clone ID: MRT4577_19702C.1
cacgcgtgcgtgaacttggnacctaatanacggccggcctttttttttttttttttttatttttttattttttattttatataatatttttttttattttttttattttttaaattttttatatgaggtaaagatttattattattttagagtatttattttttgttgaggaatggattaatgggggggggggggggggaaaggacattgtatttgatgctgtaaataaaataaggtatatgaagaatttaatagattaaaaaaaagaaggactgattttgttctttgttgaagccaagaggtttttgttaatatggaagatatggaatgtgtaattgtgtgtttttattaaaaatgagataaaaaagagtttttttaaaaaaaaaaaaaaagggggggaaaaatttaagagaggtgtaaaaaaagaataattttttttaatttttgtttgaaagagtttagaggaaaaaaaaaggggggg

SEQ ID NO: 96699 - DNA, 307 bp, Zea mays
  Clone ID: MRT4577_19703C.1
gtgtggaaagaaacttcccgggtcccaaaaaaaacaaatttaaaccggggtgccccgccccccctgaaagcctttttcacagggaaagccccggggaaaaagaattaactctccttcgggcgtttataaattgaacaaaaggggggttaccctcaacccgaataaaccccctttttgagttatacgccaaccagggccttccgggaacagagccttcaacccccaccggccgtactcccccccggggcccccccgttgtggggggaacccaaaaaaaacccccaccccggttaaaaatcgcccccgg

SEQ ID NO: 96700 - DNA, 292 bp, Zea mays
  unsure (1)..(292): unsure at all n locations
  Clone ID: MRT4577_19704C.1
ggaggaggctgtcgctatcgtctccttggccgctgcgatcggttgttcttgctatttgcttgnggaaggagaccataggaatgtccttaattttcaatttcaattgttttggatttttacctggaggttttggaaaataggtctggggaagacaggaaccaacagttattgttttttggcggttaaaaaaaagggattttaaaaaatttttttattaaaaaaatctcttttatcttttttttattataataagggtggggtgttggtttttccaacaaaaaaaaaagggggg

SEQ ID NO: 96701 - DNA, 481 bp, Zea mays
  unsure (1)..(481): unsure at all n locations
  Clone ID: MRT4577_19705C.1
aaacgggaatttcagttctaataagcattatcatgaatctcagaactaacaggcgaaacacgaatcaagcagaggcgccgtggggtggacagatccacacctaaaccgttaaattaaacatgctggcgatacatgataaactaggagcactcatcagacaccaccatcattattcagatccaaagagaacggacgcagggggagtcgaccattaccgtaggagggcgggcgcactgaccagatcatagagatctaggagagctgtccgcagtcagagaccttgaccaccttggaggtggagccggtgggggtgcccaccttcttgatggcctggacgacgtgcatgccctggacgacctggccgaagaccacatgcttgccgttgagccaaggggtctngacggtgcatatgaagaactgggagccgttggtgttgggcccggggttgggtatggagaggagactgggggcggtgtgcttg

SEQ ID NO: 96702 - DNA, 539 bp, Zea mays
  unsure (1)..(539): unsure at all n locations
  Clone ID: MRT4577_19706C.1
gactctcggcaacggntatctcggctctcgcatcgatgaagaacgtagcaaaatgcaatacctgntgtgaattgcacaatcccgcnaaccatcaagtttttgaacgcaagttgcgcccgaagccttctggcggagggcacgtctgcctgcgcgtcacgccttactgcttgacatggctgctaccctgtatggctgccaaatagagatgtgttgatctcaaaaaaaaaacacaaaaaaaaaaaaaaaaaaaaaaaacgacacgactctcgccaacgcatatctcggctctcgcatcgatgaaaaacgtaccaaaatgccatacctggcgcgaattgcaaaatcccgccacccatcgagcttttcaacgcaagttccccccgaagccttctgccgcaccccacgacttgcctggccgccacccctaactgcttgacatgcctccaaccctgaatcccatgaaattacacatgcgttgatcccaaaaaaaaaaaaaaaaaaggcccctacccccccggcccctcaaaaacaaaggaaccccc

SEQ ID NO: 96703 - DNA, 683 bp, Zea mays
  Clone ID: MRT4577_19707C.1
gcgtacgcccacgcgtccgcccacgcgtgcgcacgcctactgtgtgacctgtattttgaggtgggcatcctacaaggagaaccctctctgcccacagtgcaagcatccattcgaattcctcagcgtgcaccgctctctcgacggctggtaaacccttgttcatctgaaatggtgggagggtggctgaaaattttcaggtccccaagcatccgtattggtaacaggagatggggtgacaatgggtacatcaggggaggcaggaaagaggcgaggccagtgaatactgatgtggctgctggtccatccaggactccgaagaagaaagagaaagccgcatcctcttcggcgtcggtgtcagtgtctggttcggggtcaggatcggggtctgtatccaaggatgtcgctggaaggcgggcgaagagggcgcagaagcgagaagctgcagacaaggcagctgcagagaagcacctgaagcacctgcagaggttggggctgagaaaatcgccagagcctgtagtgcccgaggaggttgggccacaggtgaatgagtgacttaagccgccgcctagtgctatatggtgctgctaaaaacactgcagccctttgggccacaaaataatcttccactgtgaagagcttgagcgtggccttgtatcatggcagcttttcgcctcgttgtacat

SEQ ID NO: 96704 - DNA, 772 bp, Zea mays
  unsure (1)..(772): unsure at all n locations
  Clone ID: MRT4577_19708C.1
ccggccgggacacaccacttttttctccggacgcgctcgttcgttcgcgaaggcgccccttcctgccctcacatccgctcctccctccccgacaccgaccgacccctcgtccgctcgcctccctccccgatccccaccgccatggccgccgccgccgccgccgcgtcctcctcttcctcctccgaggttccgatcgccgcccgcacctgcgtctccgtcggcgaggtggcggtgggcgcggtggctacaggcagcggcgaccgggtggcggcggattgcggggtgtgcgccatctgcctcgacaggatagcgctccaggagacggccctcgtcaagggttgcgaccacgcctactgtgtgnacctgtattttgaggtgggcatcctacaaggagaaccctctctgcccacagtgcaagcatccattcgaattcctcagcgtgcaccgctctctcgacggctggtaaccccttgttcatctgaatgggtgggnagggtggctgaaaattttcagcttggtttgaacctctgatcgtagaggctcacgaggaggctctggaagaagaagagtttctccaccagcagtaccaatacgatgatgacgaagatgatcttgacgaggaatcttattacatgaacaggtccccaagcatccgtattggtaacaggnagatggggtgacaatgggtacatcaggggaggcaggaaagaggcgaggccagggatactgatgtggctgctggtccatccaggactccgaagaagaagagaag

SEQ ID NO: 96705 - DNA, 1026 bp, Zea mays
  Clone ID: MRT4577_19709C.1
ccggccgggagccgcgtcgcgtactcgcgtccagccgccagcccgctagcggagcagctcagcagcgccgaagcggagacgagcaggaactgccgaagcggagcagcacggagacgagcaagaagccagaaagccaataagtggagcagcactgcgtccagtggccgatctgattttcgctgcgtccaggtctccaggaagcaagcaccagccaccagcctttgctactttgccatggcgttcaggcgttcaatgactgtgttcagtccatgcaagctcaagtcaccgtcgccattggccaccatgtccgagaacatctgccggtgcagcgatgctctaggtagcacgttggtctcctcctcattgtctccgacctccaacaccaagatcatatgaccgggaatcaaagcactttgggctaattggcacaataatctctttcaagatgggacagagtttgttaacaccaaacattttgcagatgacgacgttgcacaaaatattggtctgtaatgtttgaggccgtctgcatcttttttttctttctttcggaattagcataattaatgtgtcatttgcacgccttcagacatatgagtggaaaggaagaactgtttggtccctatgtgtcataagaaaaaaaagatttgcacgtctacctggaaaagtaccagaacctgggcttttataagtcctatttggaatagatcatcactagcttatttcctcatcggagaaatccatgcagagatccatgttgatgtttgcatttagtctcatctgcaggtgttcaacaatgaagtcgagtattacggagtcatctttcatgtacaactttgtgaagaggcgatccgacgtggtttttctgtccgatggcaccggatagcatacaactgctagcatagagacagagacagctgttcgcttagaattaaaactggttgttcaaactgctgccgcagctgcaatccacggtgacaaacacagtgaaaggattaaaaccaaacgaggcaaacggcagtgaac

SEQ ID NO: 96706 - DNA, 318 bp, Zea mays
  Clone ID: MRT4577_1970C.1
cccactcgtcctcccacgcatactctcactctacccattaatctaacccttctccataaaccatctcgggggcatatattatacactccgaaggcacaaaactcatacttagtgacctaaataccaaaaccatgtccttaacactacaaaatcacacactttacaatctaactcctatccctactaatcatattccatcacatatcctgcaccacatatttactaataacagatagctacacacaattcttacacatattcagatactcatacttattatccatccttactcgaattgcactacatttctctaaccct

SEQ ID NO: 96707 - DNA, 878 bp, Zea mays
  Clone ID: MRT4577_19710C.1
actctcttttttctccggacgcgctcgttcgttcgcgaaggcgccccttcctgccctcacatccgctcgcctccctccccggcaccgaccgacccctcgtccgctcgcctccctccccgatccccaccgccatggccgccgccgccgccgcgtcctcctcttcctcctccgaggttccgatcgccgcccgcacctgcgtctccgtcggcgaggtggcggtgggcgcggtggctacaagcagcggcgaccgggtggcggcggattgcggggtgtgcgccatctgcctcgacaggatagcgctccaggagacggccctcgtcaagggttgcgaccacacctactggcgccccttcctgccctcacatccgctcgcctccctccccggcaccgaccgacccctcgtccgctcgcctccctccccgatccccaccgccatggccgccgccgccgccgcgtcctcctcttcctcctccgaggttccgatcgccgcccgcacctgcgtctccgtcggcgaggtggcggtgggcgcggtggctacaagcagcggcgagggtggcggcggagcggggtgtgcgccatctgcctcgggatagcgctccaggagacctcgtcaagggcgacacactactactgtattttgattacaaggagaaccctctctgaagcatccatcaccctctcgactgactcgtctgcagcttgttttgaccctcgttgtacatagtctagtttctcatcactgttttagattcagcacagaaatgcagctgccgtctgcacgactgttgcagctatgaagctgtatgtaccttactgttggtgcaaaaaaaaaaaaaaaaaaaaaaaaaaaaaagtcctctgcgttgttaccactgctt

SEQ ID NO: 96708 - DNA, 400 bp, Zea mays
  unsure (1)..(400): unsure at all n locations
  Clone ID: MRT4577_19711C.1
agcttggaggcggagggcgaggcggcggcgaccgggtccggcggcagttgcagtcggtggggcggctggcagcgtatctcggcggcggtttcctcctcctctccgccacctcttccgtcgccgtccgcgccctccgcgccatctccgacgccaaccagggtgcagcgctgcttgaactgcctgggaaatggttacgcttgaagaagcgatgtcagttttcattatcgatgatagatggttgttggggagttggtaaggaaacaattggaaatttactgatgaattcgttgccttgtgtgattataattgctgtgagtctatgatttttgggtctgtttatgtcgttctgtgactatgaattgtgggcatgatgctnaaaaaaaaaaaatataaattaaat

SEQ ID NO: 96709 - DNA, 664 bp, Zea mays
  Clone ID: MRT4577_19713C.1
gcacgaggaaagatttccactgggccgcctagataacaagcggccccaccacaccgctgcagtcgccgtgctcgcgcatggagcttggaggcggagggcgaggcggcggcgaccgggtccggcggcagttgcagtcggtggggcggctggcagcgtatctcggcggcggtttcctcctcctctccgccacctcttccgtcgccgtccgcgccctccgcgccatctccgacgccaaccagaggaagttcgcgaagccgtgcggtgcctgcgaggggaagggcagctactcgcgcaggctctgcaggggcagtgccaccatcgagtggtctccgatgcacgacctggtgttcgtgaatcggggcctctgccctacctgcgatgggactcctgtgcagcgctgcttgaactggatgcgatgtcagttttcattatcgatggatgttggttgttgggagagtttggtaaggaaataattggaaatttactgataaaaactttgcctcgtgtgattataattgctttgagtcaaaaaacgttagaattgagagtggctttcggcgtcatttgtgtgctcgggggcattagagtgccttccaccacttcaacaccctagcgcgcggcaccatgctgccgttgtgatcacgcccacaaaccgtagtcaaca

SEQ ID NO: 96710 - DNA, 226 bp, Zea mays
  Clone ID: MRT4577_19714C.1
gctctacacgttctaacattccttccgccatccttctacctcatacattttgtatagagacaaattcactaatatgggtgcacatcgagataccactgactcactctataaacattatcaatgatcaaattaatctgcttattctacatcgagcatatcacttatcacggattatctaagatgtaccgaacgatacgccttgccaacaatacatcagcctgaatat

SEQ ID NO: 96711 - DNA, 753 bp, Zea mays
  Clone ID: MRT4577_19715C.1
ccgctcaggcgcgggcgggaatttcagaggctggccgcttgcgtctgatctgcatttgtactcgatctcatcctccacgccggccgtagtactttccggctagctcgccagccatggctgtccacgacgagccgctgcacatcctcttcttcccgttcctggcctccggccacctcattccgatcgccgacatggccgcgctcttcgccggccgcggcgtcaggtgcaccatcctcaccacgcccgtcaacgccgccatcatccgctccgccgtcaagcgcgccaacgacgccttcgccggcaccggctgtcccgccatcgacatcgctgtcgtgcctttccccgacgtcgggctcccgccgggggtggagaacggcacggccctctcgtcccaggacgaccgcgacaagttcttccacgcggcgactctgctccgggagccattcgaccggttcctggccgaccaccgcaccgacgctgtcgtgtccgacagcttcttccactggtctgtcgacgccgccgcggagcggggcgtcccgcgcatcgcgttcctcggcagcagcatgttcgcgcgctcctgcagcgacagcatgctgcgccacaacccgctggagaacgcccccgacgaccccgacgccttcgtcgccctgccggggctgccgcaccgcatcgagctgaggcgaagccagatgatggacccggctaagaagccatggcagtggcagttccttcaagggcgtgaacgccgccgac

SEQ ID NO: 96712 - DNA, 454 bp, Zea mays
  Clone ID: MRT4577_19716C.1
gatcgaccgctcgtacgggcacacgatgcatttgtacccacggacgcgcacggctcgattgggcgggttcaatgactcgggcatctagcgcgtacgctccaacatctgcgagaggcacgacctctgcgagcagcaccacatgagcctcagactcgtctgagcgtgcactagcgactagtacaacatgcgacacaccagcctgcgttgcggcaaggtcgtcgggctgccaatgccacaggccctacagcgaccgctagagcgttgaccgatagcacacggtgctgtacacaactaaaggaaagcgagaggggactctttctcgcgactacttgtataaccaggcttgtatgtcccctcctcgtttattctctctctctcttttttagttcgctttcgagggataataacccaactaaaaacacaaaagggctcaagactttatcatgcatgcatg

SEQ ID NO: 96713 - DNA, 292 bp, Zea mays
  Clone ID: MRT4577_19717C.1
cgcacacgctcctcaccctgctccgcaggacgagccgccccaccagcgcggcggacgacgacgactacgaccacatcggctgcctgcgcggcgtcaacgacgtggccaggcacaacaacgcgctgctcggcgcggccgtggtcggcctcagggccaggcatccccgggccaccatcgtcttcgccgacttctacacaccgatccgtagaatcctggaaaaccccaaccagggtggtggtcagtgacgtcctgaaggcgtgctgcggcaccggcggcgcctacaactggaacg

SEQ ID NO: 96714 - DNA, 257 bp, Zea mays
  unsure (1)..(257): unsure at all n locations
  Clone ID: MRT4577_19718C.1
tttcgccgggnccggtcttccccttgcnctttccttctcccgggctcccgttgtcttttcggggctctgttgcttcctgttaaccgggcttctgtttttttttttttttttttgncnnncntcnggnctttttgtttgggggggcgggncttnncnncccngnctcgcttcttctttgcgggtggcctgctctgcagcgtcttcgccntgcgctctgttttctgttcagggcgtgcgtgggcggccctcgcgttcct

SEQ ID NO: 96715 - DNA, 262 bp, Zea mays
  Clone ID: MRT4577_19719C.1
ggaaacaaaaaaacaccaatgtggggggtttaaaccggagttacgaaaaatggtaaaagttctttaaaatttttaaaaggaaaccgggatcaatggtggaaaaaaacctttgaaagggagggaaatttaaattttgaaggaaaaagaagccccggttaccttgggggggaacacctttagggggaattttggaaaatttcataaaaatgggggggggttggagaagcttttaaaggggccaatttgccctattagggggggg

SEQ ID NO: 96716 - DNA, 363 bp, Zea mays
  Clone ID: MRT4577_1971C.1
cttaaacttctgtgggagatgtatttctttgaataaaatatgcatccacagcctaattgtaggtatagcaagcctcctgtgatatggtctccatctcttacacttctgtaaatttatctcaaactaatcatcatatcagttttatttttactggagtcaatcatgaactcttaacttatctattcttttcttcctgattggaccctcctaaactgttgtgtaggctactgtctgtgtccagtgcaccaacatcttcctctgctgcaattattacctatactccaggtgtggtttaagaatctgacttgggactctagtacctaatttggcttgcaaatatcacttgtatccaagttagtaaaa

SEQ ID NO: 96717 - DNA, 524 bp, Zea mays
  Clone ID: MRT4577_19720C.1
atcatattatttacagtacgcactttattcataagtttttcttaatggctactacaggcgatcttactctacaaggccacacctctcacactggtttgtgatacaatactactgcggcatggcttacaaaaaaacgccaagcccttgggggtcttgtatattacaggacgtgctaccttatgcatattacagagtgtacatgcatactaatatgtctactacgactataaatgggaacggatggactttacacacagtcatgaccatagggggcatgaacaacttatttattatgcgccacatatccacactgaagacacacaccttattcggacatattgttcggacgacaacaaccaccctattctagttattgccacccttgcatccaacgaacatgcggaggtgtagctatcttcaataaggaccattaatcagatgatcttgacgaagctaacggtgggggtcttgggcacgccggacggagcagccgcacttcccggggtatgttggcggccatggcc

SEQ ID NO: 96718 - DNA, 264 bp, Zea mays
  unsure (1)..(264): unsure at all n locations
  Clone ID: MRT4577_19721C.1
caaaaatatgggcagagattatttttgcccatttgggggccccagtcctcaaaaccagcaaaggcctgtcatctgttttcaaaatatggccgggggggggggggaaatgtacaggactccctactaccaactggtggtttcaaaaaaataaaaaggcccatgctggggagcgggcctaagccgaaatctttgccctttttttgggtaaaattggccagggctccctacaaccaatttgccaggganaaaaaaaaaaaanaaaaa

SEQ ID NO: 96719 - DNA, 422 bp, Zea mays
  Clone ID: MRT4577_19722C.1
ggctttgtttgggggtttttttttttttttttttttttttttggggcgacgacacagcggcctccccaattgatgcccatcgccgacgaggctcataattttctctcaccattacatgactgagaaattttggtttccaatcaagcgttgcagccatggaattgaatagtacatgtaagcattaatcttaaattgcccttacccttttcaatttaatccatgacaaaactaacatggcacgacggggctgcgcctgtgctcgctggggccgagtgtccgcgcgacaccggggctgtgccctcgccggagtcgcttgcccgcgcttggccgtggctgcgcccccacatgggctgccctggctggctgagcccatctggcgttgggctgcctggccgcacccccgcgacgggatcgcgcgcccg

SEQ ID NO: 96720 - DNA, 389 bp, Zea mays
  Clone ID: MRT4577_19723C.1
aacaggatgatcaccaagctaaaagaattaacaaatcatccattgaagaaacaataatcacttccttggcctacacaaggggtgtaaatccagtggaaaagaagaaataaacaagggccgcgctgtccggccggctgcttctagtaatcattcattcactactactactggcacctgaaaactttcagcattgcatctgcactaatcaaatagcaccagttccggccccaccaactcgcccccacccgccagaagagagtcatgtagggaaagggcgtggaaaaatgccgcaaaagtttcggccgctgctgcatctgtcttggacggaagcggcgccggccgatgtggggcggcgagctaaagatccggcaaggctgccgaagaactcg

SEQ ID NO: 96721 - DNA, 308 bp, Zea mays
  Clone ID: MRT4577_19724C.1
ttcgaggcaaaagcattgcgaccacatacagggcgcgcttcaaggcctttgtgtttttgagataacaaggaggagaggaggagatggcggtcactatcacgtgggtgaaggcgaggcatatctttgacagccgtggcaaccccaccgtctaggtggacgtggtccttagttactgtagctactcgaggggtgccttacctatcgttcattcactggaatatattaggccttgtttttgttggataggtggatcttattttcttttcattgttatttttattgtgggatttatttgataattaattttt

SEQ ID NO: 96722 - DNA, 240 bp, Zea mays
  Clone ID: MRT4577_19725C.1
gagcactccatgtcggcggccgccctcctttttttttttttttgtttatgtttattttttttggttttttctgaaacgattctcataaaaagtgattgaaaagcctggacgattgacgatacgcatcagcttttagtggtcagaagctagaaaaagaccaaaggcccttagcatctagttgcgagatggaaagccgcttccggtaagctgcttgataatttcccctgcggaaggcccttt

SEQ ID NO: 96723 - DNA, 336 bp, Zea mays
  Clone ID: MRT4577_19726C.1
aacccccggggaaaggtggacggaatgccggcactatcaactactatgaatcaaggcaacatcgcgaaacggagaaaacaggaaggggacaagatagaggatggagatgtgatacgtgagatagaaaccgataaagccactctagagtacgaaagccctgaagaggggaaaaaggccaagaatacagcaccagaaggatacaaagaagaacaagtcggacaacccaaagcagaaacggaagaagaacgagaggataccaagagaataccagcagaaacatcacacggcggagaacaaaaggaagagcaaccaacagaaagcgcaccgaaaaacaaa

SEQ ID NO: 96724 - DNA, 350 bp, Zea mays
  Clone ID: MRT4577_19727C.1
agcacaaaatgagcccagatagtgaagtgatgtggaaaaaaagggggaaaaaacatcagctggcgaacatcggctggtccttggcatgacctctgaaccatagctgaaccaacagagagcaaccacacaacaactacacagagagactactggggggctacagcagcgcgggcaccctaaggttactctttggtcttaccagcaccataccagaactgactttgctcctacttggataccccgtgcctgcgctggaactactctgaaacttcgaggaactccaggtacacctcagggaggacgccgcaatcagaggcgcatgcgaagggtgtcatgcactccttaaactc

SEQ ID NO: 96725 - DNA, 514 bp, Zea mays
  Clone ID: MRT4577_19728C.1
agaagaggtattacctaaactatgtcagagacacacgcgtccgctggccgtaaaattgatgatccagagttgttagaagcagttcgactgacgatcattaacaacatgatacagtatcatccagtaactactttaactttgtttttccttttgcttttataatttacaacagcaataaatgaataaatgttgttaatttggtgccaggagtccagcagtcaattggctatgggggcaacttttgggccagaagcccctacggaagaggtattacctaaactatgtcagagacatcttctaaatgcttaacatatggactgaaaacttctcagttctctaaagagatttatgaaaccatcttatttgtctatatctatcgtgagaaagaattagtacacaacggtgtacaaagcacacatatctttaggatctccaagtttgatgtttatttcctttgtctctgcttcattgcaaaacttaatgtatcaaaattcttatctggtattgccttatt

SEQ ID NO: 96726 - DNA, 390 bp, Zea mays
  Clone ID: MRT4577_19729C.1
gtccagcaaggtccccctgttaccatggaaactgcgagaaggtgcttacaactcataccgaccaacaacagcatacagccggatatggtcttatgaacagaataccctctacactaaccccgatatgtgatgcaacctgacacgaggaaggtggcaggagtacctctttacccccatgcacacaatcatggtggcaaagaatgccatggcgattatccatcagtgtcatcctctgtccattcgcgtcggacaccatgccggaaatcttccaatgaacgaaagaccccatccgaatgtcggcgatcatgatgcaggggtacacaccgatgctgtatggttcaaatgggtagggtgccactgacactactacgatataatattaatcctgtg

SEQ ID NO: 96727 - DNA, 495 bp, Zea mays
  Clone ID: MRT4577_1972C.1
tagacgagtttggtcaatacgcatctgctggaaactcaatggggaccactggtatgaaatggagtaatctagatgactctcttaatggaatgcgtgttgtcttgattattatggttgtggaatgggcaatagttctccccttggcattttatgtggatcaagtctcgccactggggggtggattcaggaaaaatccctttttcttcttgggctgctttaagaagagtcctctatcattgcggagatatagctttgggagacaaggatctaaagtagtcgttgaaatggacaatcctgatgctgttcaagaaagggaggtggttgaacaacttctgctggaacccattgcaaaccaagcgatcctctctgataacctcaaaaaggtttaccatggtaaagatggaaaccctgacaaacttgctgtccgagggttgtctcttgccataccaaaaggccagtgttttggaatgcttggtccgaatggagctgggaaaa

SEQ ID NO: 96728 - DNA, 407 bp, Zea mays
  Clone ID: MRT4577_19730C.1
tccacatttatcttttaaaacttgtattctgttcatttactattaggtttcagggagcaaaaattagggccggggggggaaatccctaatcaacaggctgtactttttacccgggtccctcggttacaagccgaccccttatacatgtttgggttggaccccattcaaacccagtagcatcctaaccatttttcctgtttttttacccttttccaggccaaatttcaatttattccgcgatcggatctttacatatattcacgttaatggcccaaatactaaacctacatttgccattaatgggcggctctaatttaaccctcacgtgttccaaaatctctcaaaactaaatggtccatggtgggctggtggcccacccctccccttatgtgggccacgaccaccca

SEQ ID NO: 96729 - DNA, 368 bp, Zea mays
  Clone ID: MRT4577_19731C.1
gaccactttttttttttttttttttttttttttttttttttttttttttttttttttttttaacaaaaaccccacacgtcttgtttttttttttttcttcctttttctgggttctggtttggcacaccacgaccacctgacccccaaatgatctagctagataataacaataataagcaaacggaacggaaggaacaatggttttgcaatcgtttgggggaccctgcaacgcaacggccggggggctcagggcttccaaatgatgggggtctcggcgatcatgggggggaccacgtaggggtccatgttggaccccgggcgggggtcctaaaaataacccttgccgttttgtttcgtttcccggccca

SEQ ID NO: 96730 - DNA, 848 bp, Zea mays
  Clone ID: MRT4577_19732C.1
ctcttctcttggcctggcattcaaaagaagatccaaatcttggccagcgactcgaccggatctccagccgacgccggcgaccatggctcgccatcacctccttctcttcctccctctcctcgcgcttgccttctcctttgtcgtcgccgcccctgagagacagggagatgctgccgccttcatcgatggcgcatcgcaccgctacctgagggatcagcaagaggaccaggccacgtccatgtcacttgatgaagtttctgcagctgtttctgtcttgcttggttttgcaccacctgctatgcttcctgcaccttcttctgcaaagttcaacaagctgctactcccaaacccatttgacaggcctcgttctgttttcttgatgcaacttgatggatcccatgactatgttgattgcttcatatctgatgccggcagtatttacaaaaccaagattgatggtgcaaaaagtgctgctatagagcttacagataaggatgaattgattgtcattcgttcggatgaatcttctggattagatgttcttgataacgaactcgccaacttggcaacctggttggcgggatcctatcagaaagctgatagcaaattaaacattcccttgaagagtggaaacagtcttactttgttcctcactaaggaagcagacgttgaatttgcatccagcttgatctcccttcttaaaaccatcaaaagggggtattcaggttcacgaagatttctcaggaggcatcgtgagccatgcagagttattagtatgccacttcacgggcattaagggctctggaaaatgaatatggtcccgcagaaattgttaagcagggagcttg

SEQ ID NO: 96731 - DNA, 594 bp, Zea mays
  Clone ID: MRT4577_19733C.1
gccggccgggtccaaaaaagaaatacccagttcctgttttccaccaactgatggacgagttgtctcatgcttgttggttcagcaagttggatcttaaagcgggatatcaccaaattttgttgaaagccggtgaagaatacaagacggccttccaaactcacattggtcactttgagttccgtgtgatggcttttggtctcacgggggccccaaacacatttttagaagcaatgaactccactcttaaaccagtgttgaggagatgtgctctcgttttcttcgatgacatattgatctatagttccacgtttgaggaccacttgctgcatctagctgaagtattgttgttgctgcttaaggatcattggaaggtcaagctgtcgaagtgtgattttgcgcaacagcaaatctcttatctcgggcatatcatcagtgctcaaggcgtttcaactgatcctgctaaaattcaggcaatagaacaatggcctgtgcccacttctgcaaaaaagttacgccagtttctagggctggccggtttctaccagaaattcgcgcgcaactttcgcatgatcagtcgacctctctttatctttt

SEQ ID NO: 96732 - DNA, 578 bp, Zea mays
  Clone ID: MRT4577_19734C.1
gctagatcgcgagcgggcgcccttgctctctgtgcgggtccagcagcaccgaccgtattgtaggagacgataagggggcacaagacatgctggccggtgccaacgtggaccctgagaacatggcggaccatcgcgataatgacaactgagacgaaccgaactactggggacttactgcaggctgatggccacacaccttcaggagctaacatagatcccatccaaaaacttgctgatgtgcttcttcttgcattggcctctctgggtgatgagggagggacatcgagagactaacttgacggcggtgccatcgagaataagcttgttcttgaccttgtcggaggggaggatgggccctccgtctagcatgcccacctttctgaccttcttctagccgaggaagtgccttatctggatggaggggtctgagctggcgatcgccccgctgatgggtgaaatggtcgcagacgagacctcatcttgtagcggtagcccttggtgacccccttgatgaggctctgaacgtggcagatggcagctctgatggtggccatggtgctgctggtgctgaaccatgc

SEQ ID NO: 96733 - DNA, 593 bp, Zea mays
  Clone ID: MRT4577_19735C.1
cggagaggatcgtccaggcgatgcgggaagagcgcaaagactatgcttactgctcagggctgtctctatggactgcgacggtgtgaccgacgtcgaggagggtgccgtgctgctcgacgacattgttgccggggccaaacagggacagggctcggatgaggtgccgctgctccccaaggcttatccgcccaacgccagggtgtacaccacgctcatgaaggggtacacggacgcaggccgcgtcgacgatgtcctggccgtgctgcgcgcgatgcggcaagaggcgcagacggcacccgcaagccggccggaccatgtgacttacacgacggtgatatcagcgcttgttggtgcgggcgacatggcgcgcgcgcgcgccgtgctgaacgagatggctgcggccagagttccagccaaccgtgtcacctacaacgtcctgctcaagggctactgccagcagctgcagattggccaggccagggagctctttgaggagatggtgacggacgccggcatccagcccggcgtggtgacgtacaacaccctcatggacgggtgcgttctcacggacgacagcgcgggtgcgctagcct

SEQ ID NO: 96734 - DNA, 345 bp, Zea mays
  Clone ID: MRT4577_19736C.1
ggaggtgtaccacccgggcgccctcaaggcggcgttcgctgagttcatctccaccctcatgtgcttcgtcgccggccagggctccggcatggccttcagcaagctgaccggcaggaggtcctacaaccctggcgggcctgatcgcggagggggtggcgcacgcgttcgcgctgtacgaggcggtgtccgtgggcgcgaacatctcgggcgggcacgtgaacccggccgtgaccttcggcgccttcgtgggcgggatcatcaccctgttacgggggctcctgtactgagtggcgcatctgctggggaacaccgcggcgtgctttctgctccgtttctcgaagggcg

SEQ ID NO: 96735 - DNA, 416 bp, Zea mays
  Clone ID: MRT4577_19737C.1
ttacttttttttttctttttttctttaggggaagggagcatattgacaaattctgcagcacagggccaggcgcacacagccgtgttcgcttgacagcacaacatgtgggaaaccaggacagacagatgccatgggggaccaaagtttgttgttgttggcttgttgcaacccgggaacccgccttttttctctctctctctctttggttggacgcttcgacagacaagaggggctttgtttccagagacacatgccttaacaaactttaattattaatcactgacgcatgcattactgccggaatccaaaattcaaagctaaaagctgtatgcacaggccctctatttcatgggggaatttaccgggccgggccaacccattgggcggtgtcttttttttccgcttaaacaaggggt

SEQ ID NO: 96736 - DNA, 804 bp, Zea mays
  unsure (1)..(804): unsure at all n locations
  Clone ID: MRT4577_19738C.1
tgggtaccccctcgaggctcggccgggacaaagtcgacctttatcctattataaccggttacttaagtatattgcaactagctgattcatatacattagatcttgcttcgttacgcatttgtactgtgtcatgtcttcattaaatatcaggcgctatgattccctcaaccaaaaaaggtattgcaaagcaatttgctaaccatgtattttgaatttttgatgaacctcaatgcagtggtggtcctttgcttgactcaaaggggcatatgattggtattaatgcagcaattttcacacagacaggtaagattaattccatttctcgaaactgtgctagcaaaacatatgattcgatatctacatccataaagtagtcctaatgctgagatgttgctgcagatgtttctgtttttttattcataaataaacagctactacacatacctcaacatctatgctatttggccattatcagtgaaaagtacacatgtaacaatattccacaactgtcgttgttacggtcttaactagcttattgcaaagtttaagtaaatatatttgtgattcattttctaggttgctttgttcactgtattgaatgttattatgatgacattcagtgacttgctatatatgatggagtgctgagttggtggtattttatttaaaaccatttctttagtttggcattggcttgcatcctagtctcttagaggccaagagtttatacgtgtcattattctctttaaaatggatcgatatatgatcctatactcttcacatnccagctgctatgcagaccat

SEQ ID NO: 96737 - DNA, 619 bp, Zea mays
  Clone ID: MRT4577_19739C.1
gtttctcatgtcgcatgcctcaccctggcgatgaccaacctgtaaagacctgcacaacgatgagcgatacggacatcgctgcggcgctcatcgagagcttgcgcgccggacctcatcctcctctgcgatctccccggattacctcagcccacctgcccccgtggaccactttgtttgttgctcgcgcccagcatgagaaaaaggataagaatcgatgctgcactggaagcaaccgacgagcgccggatcaaagaggtgaagccagagcttgtcgagggacccgactgcgcgatggacaatgcggggaaggacttcgtcgaccttgtgtgccccaggggctatgtctatgatatcatgacgtcgagcaagagatttgtgctgctcacggacgcccacttcctcgtgacactactggctggccatcaacacggcctactgcgccgagaacgtagagtgttcaacgacgacttcttgacaggccacctcgtctaccgctagagctctgttggctactcagtactgtatcatgaaggactatgtcatcatctggcagcctgcgcgtgtcatcggcgcgaactgcccggtattcgactgcgacctgacgaacgactacctgact

SEQ ID NO: 96738 - DNA, 949 bp, Zea mays
  Clone ID: MRT4577_1973C.1
gaaagtattcttacggtctaatcctatatttgcataaatagttcccggtggttggacctgcttttacatcagcgcatacacattacaactcttgtagtcgctccatgtttctttggcagttaaaccatacaccacattacatccttgcattttttttaactttctaatgccacttaccacaatgtctcattcgaatttgatacagagagccgaaccaatctaactctccaatggtgatttggactgcctcattcttatgcgacatagctgtggcgtagatatgtttctctcaagctccactgggaatactggtacaatatatttccatcagccttcgtaaaaggggaattcagcttggtcctggtatagctggagggacatgaacccttgcccatcataaaagaacttgagcttgtcttcatttggctggaagaatcctctccatgctctggaaccgcctccgcttgtgaagtattgaattggactgtctctgctgcttatgtgttccaggcagtggtcatgcccattgatgtagaaatcgaggccattattctcaaggattggaagaagcagttgcagaagctcctcggtgttaccatggtgactgacactcctcatggtatgatggccaatggcaatcttccactttccagttgatttcttcagcgccttatccaaatccttcagcaagttggcaatgtatttctctcgaggtgctactcctctccttcccatctgctcggcgacccgggactggttgcacgcccccttacggccccagtccccgacgacgagaaggctcagcgacccgtcgttcttggccgggtggcacaggcacagcagcacgacggcgaggatgaccgtggcagcgccgcccttcgccatggccttcgccgcgcacccggagcaaggacgaaccgcaccacgggaggccggcgaagcaagccac

SEQ ID NO: 96739 - DNA, 456 bp, Zea mays
  Clone ID: MRT4577_19740C.1
agctatgttgttgatgcactcccacgtatgctcggaattcggctcgaggtggaccccaaggcatcccttctggagcccaacccgaaggtcgaaaaagagggagattgttgagctcgaaagcgggactcaggccagggggaagcagaaaagttgtatcgtgacccatgttaaggacctatatcagctgggcgatcttgacaccggggcactagtatcctgaggatctcactgcagaggtaggctcacgggacacccgctggaggagaagacgggaatcgactactgaagcgagggaaagggtcacttattatccgatcgaaggcacaacaatgctaccgagtaaagacaaagagcttatcagggggcggtatgctgatgactagacgaggaaacgcacacaatcagacacgaaggtgaaggacaaatcggggacagctgggaagcagcctagggact

SEQ ID NO: 96740 - DNA, 128 bp, Zea mays
  Clone ID: MRT4577_19741C.1
acccccacaagacaaacctgcaaggcctgttgagcgcgaggcaagccaaggcaccccccactcaagggacacgaacgcgcctcgcccgaggccagcctagagcaaaagcagccgaccgaggaggaaac

SEQ ID NO: 96741 - DNA, 366 bp, Zea mays
  Clone ID: MRT4577_19742C.1
agctcacttatcggcggccggcctttttttttttttttggggaacaccaaaagactaagtggtcggactattgcatatatcaacgtacgggctttacatgatcgctggtgaacagaaagcacggtctcttaagtactaactggctaactagcgaatatgaacaaatcatcctatggcccctagcgtaccgaatatctgtaattttcgtctatgctaacatacagcacgactcggctgcgccagatggttcttgcactgcatgcactacatattgcgagagtattcgtacgacgaccagagaacatgcaggagaagctggcatttcactactgcataattagctgagacttcatcctgcggagctta

SEQ ID NO: 96742 - DNA, 283 bp, Zea mays
  Clone ID: MRT4577_19743C.1
cttaaactttcgctacgtagcatttcatttaaaaaagcagacgaaatggcgagcggcaccatggccctttgctccacggcacttaccggcaaggccgtgaacgtgccgtcattgtgcgtcttcggagaggcccgcgtgacgatgcgcaagactgaggggaatgccaatccatatgaggcgtacgggagctcttggtacgggcccgaccgagtgctatacctgggcccactgaccggcgagccaccgaactaactgactggcgagttaccgtgcgactacagtt

SEQ ID NO: 96743 - DNA, 954 bp, Zea mays
  Clone ID: MRT4577_19744C.1
tgttgttactgtattaagaccatggttctgcatgactagtcttaatttcgactacacggcgtggtattctcccacaggagttttatgacatttcctggcgtggagctcgcgcagccgcctcgcctcgcctggagctcgcgcagccgcctcgcctggatctcgcgctagggttggagccagggtcctcacagccgcctctatcctcgcctggagctcgcgctagggttcctctcgcagccgccgctgttgaggtgctacttgcaaaagcgtgtactgaacagctcaaaaggccctgttgtacgtgcactgcgtgctcagactgataagagagagtatgcaatagagatgaagaacagtgtggataaagtatatgctgtaaaccttgcaggtccatatggtaaaggaaatcagtggcgaagtctatctttttctcctcctgccgtacgtccgttccagcttgcaaagcgctcgcgagctgctgccatggccagcgccggtgcacccgcagttccccaggctggtcgcccagcctccaacttcgacgtcatcgtggtgggcgccggcatcatgggcagctgcacggcgcacgcggcggtgtctcgcggcgcccgcatccagttgctggagcgcttatttgagaacagatatggtacacatagaacaatgatgtttttcagagttagattaacttgagttctatgcattttcttatttgagaataaatatgctacacttgtatagaacaatgatgtttttctaagtaaatactatcagtaattctggctgaaaaaagccacgaaaaaaaaaaaaaaagctgccttctactgtcaccctcaagctcttcctctaccgtctcctatccccgctccgaacactgatccggtcgatcgttcaccgcacccccttgcggtcacggctctcttcttctatgtctctcgcgcacagatctcactc

SEQ ID NO: 96744 - DNA, 161 bp, Zea mays
  Clone ID: MRT4577_19745C.1
gtgcggcgctcgaggcggccctagtgacatgcacgggaatacaagcaattctatgattcgatgtgcaacgagtgggataggttcccttctcaacttactattgactctgcagagggcgctttaaggaatcagatacgcaaagactacggactatctcttca

SEQ ID NO: 96745 - DNA, 377 bp, Zea mays
  Clone ID: MRT4577_19746C.1
atccagtcctctttccccaagctagctagctggcccagccaaacctgaagcgcgcggccggccataggagcagaagccaagcacaaggcaaactaataaagttaggtagagatcgacagaaatgggcaacgtgctgccatgcctggtccaacaagcaggcacagcagcaggggctctgccagccatgaaccccaagcggaggctcatctccctcaaactcctcacgaaggccatccacaagatgaagaagaggctcggtcccagcaaggcggccaagatagacagcaaaccgttaccgtcgtcggccacggtggaggacggggaaggaggagaagttcgtgttgaagcgagaagcaaggccaccagcagcaccaaca

SEQ ID NO: 96746 - DNA, 159 bp, Zea mays
  unsure (1)..(159): unsure at all n locations
  Clone ID: MRT4577_19747C.1
ctcnttgccccaaggcaaccaaaccatctgggacctcgactcgcggggaagccacgcttttcccggcggaaacggcctacggttttaggaactgtacgatccatcgcccagggaaggagcggaagggaggcggaaatgatcgaggcggcgctcaacgac

SEQ ID NO: 96747 - DNA, 605 bp, Zea mays
  Clone ID: MRT4577_19748C.1
attcctctctctcgcggggtctctatgtctcccgtctttctctccgtctgcaccatgactaaggcaccgacggcaccgcgcgtccggctctacgtccggggcaccatcctcggatacaagaggtccaagtccaatccagacgagagcacggcgctcgttcattatcgatggggtcgatcaccaaggaaggactgtctacgtggtacattgattagcgtatgatgaatctttactaggataggactctgagcagttagacccgctacaggtgcatctgtgcgccaggtcgctcgcccgcatcggttactcagtcgtcgacctctataagttcattgctgcctcccgcctgattacatgggtggctaaggctcagtgttcatgtgccttagtgccatctaatgtttttggtgatagtaaaggaggactcccaatggccgtgcttatttcttctctctgagcttaaatgccgtgtgttgtgatgttatatagctcatgaactgaactctgttgacaatatacgaccatttcttggcatagggatgagcagctggcccactgttatgcgatacatggagcttatctttccttgaattctagaatgaatg

SEQ ID NO: 96748 - DNA, 511 bp, Zea mays
  Clone ID: MRT4577_19749C.1
ggggcacttccaatttggattttttctactatgaaggaacacggaagaagcggcccacgccttaaatgcccaagaaagattaggaggccaattcctataagatccccatgctctactaaaaccaaactgatccacaaagaagaccaaggttatacgagtggggggtagactaatgtgatcgaaaactccaagaatccaaacgctcagactagagagaaatgaaatggttgcgaagaacaaaaaaagaggagtagactactagcctaatctactgaatagaaactatgaatctcactaaagaataatgtgaaagaaactacagtgtggtttaaagaacagaaagcggaattctctaccacactataggataccaaaccggccctttctttggagactcgcataagagatgcatatctaaccctcatcattctgtccagcgacaaaaagcaatgccaatgaagagttgggaccggcggcgtttacacgcttaggacgaattacggcactctga

SEQ ID NO: 96749 - DNA, 373 bp, Zea mays
  unsure (1)..(373): unsure at all n locations
  Clone ID: MRT4577_1974C.1
gacaccctcgtcnctcacgggcgcacagacgcgcctggtgcactggctcctcgctccgatgccactgtaagtcgccttgtgaagaacggcctgtgcggatgcatgcccggcgatgacgggatcgatgactttggtgtggaggacgacgacgcgcaccctacggttgacgccaggaagaggaagggctcgatggcgctcagggacctcgcgagggacggggcggacacggagaagaaggctatgaaaatgcggatggaggaccaccgcagggggaggcacactcggatggtgaagaataagccccgatcacgacgcaaggactcatgcggtacgtatgaccaggatgatctggagaggctagatccacgagctc

SEQ ID NO: 96750 - DNA, 1115 bp, Zea mays
  Clone ID: MRT4577_19750C.1
atggagttcacgcttaacccagatttagtaccacaaaatagacatgctgttataaaagtgtatgtctcgagaaaatggatttttcgtggcgcaatggacaatggacctatacatcacatcgatcttgtgttgatagacaaagagggtaatggtataagtgctgaaatcccaggaaatctagctgaagagaaaggatctatcatcgaagaaaatgaaatatatgagatcagtagattcataatatcttcagcaagacaaatgttcaaacctgttcatatagacaaaatgatccacttcacatatcacacaattattaaggcatcacttgattctccgtcaacatttcctagatatgtctatcatctgactccattgcatcaaatcgaatcctatattcaaaagaatgaatacttccttgatgtgctcggagttatcactcaagtgagtgcattaaaaccagttcggacacagacccaggaaagctcaaatgtcataaaagagatcatcataaaagatatcaatgatgtcacaatgagactaaccctatgggcagaacgagctaaagcttttaaattagatgatgtttacaatcctctagagcaaaagccaatcgtcacactctttgtaggttgtttagccaaaaatttccaaggtgcatacttaaatggtggaacagcatgtagatggtatttcaatcctggtattaaggaagccgctccttattatcaaaggtttggatctcaaaaaataaaactacaaataccatcagagcaggaacaacaactatctgttgcaaaagaaacacatgtagaacacaaaaccttgcatgagcttcttgcgttggatccatatgcatttccgaaacaaggatatgaatgcacagttacaatcatagaagtacctacaacaaatcgttggtggtttccatcttgcaccaaatgcagtcgagcatgtagaccacaagatggtggttactattgctcctactgtaaatcagaagcgtacacactaaggtctcaagtcttggatgtagcacaaggaactaatgcagataagggaatccccactgataaaggcaaagagatcgaacctcatcttcaatctcctccaaaaag

SEQ ID NO: 96751 - DNA, 257 bp, Zea mays
  Clone ID: MRT4577_19751C.1
tttaggtgatgctagctgctgctaatagctaatatatcggagggatgaggaaattaggggtcgaagctagcttcacttcaggaccgaatgaaacatcgaatataatgtacgcagaggcggcaggaaaactaggtgcatgagcctattgatgttaaaattatccaggaataatggtgaaacagctcgcaagtacttgttctcatctcttccggaatctggaaaacaaaaaggagaaaatttcaagaggtttggctact

SEQ ID NO: 96752 - DNA, 305 bp, Zea mays
  Clone ID: MRT4577_19752C.1
aatcttaaatcattttattcgggcatataatttcataggagggggcatcaccaatttacacattgaataatgtaagttctatttctcatacaacacaaatcttgcataaccaaaaattcttataaattgcgaggggccaccgataattttgtcacacattcaataaaaacccaaacgccactcaggatttttttctcccggatcctctttgcttattttcacaggatttgaatataaaagagtctagcagacactgaactatatgctaattaacacatgaaacccccccgaggattctttttttc

SEQ ID NO: 96753 - DNA, 308 bp, Zea mays
  unsure (1)..(308): unsure at all n locations
  Clone ID: MRT4577_19753C.1
gaaaaaaaaatcatttttacttacccctccccatagggccaaaaaaagagaacatcccctttaaaaagcccaaccctacccccctaaacccatccttggcaaacaaaaattttttttcttaccaaatttttagaccaaaaaaataaccggccttttcccattggtcccctggtgtaacccggaaaatcccacccggtccccgtgagacccccaactttccctatantaaaacgattaaaaccttcaccaaataatgcgaaaaactgtttccgaggaaaaactttttttcgttcccaaatccccaaaaa

SEQ ID NO: 96754 - DNA, 311 bp, Zea mays
  unsure (1)..(311): unsure at all n locations
  Clone ID: MRT4577_19754C.1
tatacaagagatcaaagaaataactaatgccatgtggttgcttgggctaggcgttacactggcgggggcgcgtactccantaagaaggtgttttatgttccacaaggctatggcgcgttacgctatcacgttaagacaagcangggtaattttatgtgcttttgcaactgaaaagagctggtggccggactgacatttctgctggaaatagggtaggtcaaggactaatttcgaactatttgattgatcatccatttggaaaatggtgatctgtggaggttctcacatgggccaatttcttttggtggaaa

SEQ ID NO: 96755 - DNA, 452 bp, Zea mays
  unsure (1)..(452): unsure at all n locations
  Clone ID: MRT4577_19755C.1
cccccctcgagtttttttattctttttttttttttttttttttttttttttttttttttttttttttttttttagggaaaatgtaaattaacccaaaaacactgccaggtcaaacgtcgaatgtttttgatagcaaaaaaaaaggacctttgtttttttattccacagttgggggccaatttaccaaaaagtaaaacatccgcattctaaacaattttggggaaacaaattatttccttcgggggaaaaccgcctccatttaaaacctaacatgcccccttatttgctggcaaaaaaatgggggtaaataacatcgcctccgtaacctggtttttaaaaagggcccgttgaaccaccaaaaaaaacttcanctgcaccaagccctgcccctggggcaccctgctggctgtaaaaggcctgcccgatctgcatgacttccgggttcaacgcac

SEQ ID NO: 96756 - DNA, 203 bp, Zea mays
  Clone ID: MRT4577_19756C.1
accacgcctcctcctacaccagcttttcatttttaatctattcattgcctccgcttcgactaggtgctataggactggtcgaacggtacccttccatacctcccggatgtcctcaagatactactccatgacaagccctaaaacttattcctaatcctgcctaatcaccacgcaacctacgacatactccattactgacccta

SEQ ID NO: 96757 - DNA, 306 bp, Zea mays
  unsure (1)..(306): unsure at all n locations
  Clone ID: MRT4577_19757C.1
ntttctccctgtctgtcagnattttgttttattcttatctcctttacgatttttttttcttcacatttctccctgtctgtcacaaacaaaccaattgtcagtcagtatgcatagtcgtccgctattgctctgtatcttcagcttttgtatgaggatattatatcatttgttttggggtgtgaatcaaagaacgggccatgtttccaaaaaaaaaaagaaaaaaaaaaaaaaaaaaaaaaaaagaaaaaaaagaaaaaagaataaaaaaaagaaaaaaaaaaaaaaaaaaaaaaggggggggggttt

SEQ ID NO: 96758 - DNA, 127 bp, Zea mays
  Clone ID: MRT4577_19758C.1
gaggaatcccactacagtgcctccctcgtgggctcgtggactagcatggtgccggggccgtgggggacggcaaggacggtacgcaaccgtacgcaggcactcaccggtgagcggcgaggcgactgac

SEQ ID NO: 96759 - DNA, 408 bp, Zea mays
  unsure (1)..(408): unsure at all n locations
  Clone ID: MRT4577_19759C.1
ggcaaacgtaggtgtataccagcgaagcggcagctgtgcagatcatgcctacgctcacgcaactgccatggagaaccctgccgtatacctacatctactctcatctatcgcccggtcgcgtgtgggcagtagcacactacggtagcctcacatcgaacgagtacgcctgcatacatatgngtacgcagctcatgactcatgctagctagcggcacacactgctgactacttacaacactagcttccattcaaccaactgggtaagtcaaactgtgatgggtacctacaacagagacaacaattactcaatgcattggcagtggctaacccataggtcgctaccttactgcagcagcaacaacaagtaggtgccatacaaccagctctctttgatgaaccctgcgttgc

SEQ ID NO: 96760 - DNA, 308 bp, Zea mays
  Clone ID: MRT4577_1975C.1
gggacaacaaacaaatcaaaaaattttttttctgaagggtgtttgcccctcccacaggattttaggggccgtttggttcatttttttgaaaccgaagggggaacggataaccttaaatcatgtttgttttagcccacccgtattcagatcccccccttaattttgttccccccctttttaaatttgttccccccagtttttgagccaaaaccattaccattaccatttgggttacattttttgaaccaaacagccccatttttcaatttttcaagggtaaaaaggactcgcccccacgcaacaaacct

SEQ ID NO: 96761 - DNA, 301 bp, Zea mays
  Clone ID: MRT4577_19760C.1
gagctattagtcggcggccgcagccaccagccaatgtggaggtgtcccacagctgcgcggcagacgcgggaacctgattgggagccactgcaccacaaagaaccagcccccaaagggaggagccgcatggccgcgtgcctgccgaagcgctagtgacagtgcagccgccgcccagtgcccaccagacacgagagcagcccacgtcaaggagcccgcgaacgcgcacacggaagcagcagcacagcaccaccaccgtgggccacatcgaggacagcggggcccaagaagggcttggggtacc

SEQ ID NO: 96762 - DNA, 451 bp, Zea mays
  Clone ID: MRT4577_19761C.1
ccgccccaccaaagggggggaaggcttaaacaaaccccaggggggtcccacaaacccactcaaaagggggggggggaacaattcgggaaattttcgggcagataacacccaaattatccaagtcccaggcgggttgggggggggcccatcgcagggaaccaaaaaatccccggggggggggggacaagggcgtgtccgggggggggccccccctggcttattccgggccctagggacagggccccatcatttatgggggaaacgggaacaaaatctccgccagtcccgggtggccggaggcaaaagggggccccccccactcaaaaaccttttttttaaggggcaaaaagtccccttccccagcctggatcaagggcccaatctcactaaaaaagcttgggacccggtgggggacaaaaccatttggggaaccaccccaaaaaagctggga

SEQ ID NO: 96763 - DNA, 463 bp, Zea mays
  Clone ID: MRT4577_19762C.1
atggagatcatccaccagcagaggaagatcgatgaagatactaaggaagtgcgtcatcttactcaagatgatcacaaccaaaggcctcaataccgggagcttcgtcaagagggcacgttcaacaaagatgaatggtacgatgatttcaatcatggtagctttacttttgatgatgcttctcccctaacagcagaattgcaggctatcccatggccacaatcttacaaaccacctcagctaaccatgtatgatgggcactcggacacaaagcaattcttgatgagctatgaggcaacaatatcctcatacggaggcaacgcagctgtcatggcaaaatccttcgtcatggcagtccaaaacgtggtccagacatggtattcttctcttcggccagggacaattacgtcatggcagaagctcaaggacatactggttaccagttttaaggctttcagacgaagct

SEQ ID NO: 96764 - DNA, 335 bp, Zea mays
  Clone ID: MRT4577_19763C.1
aaaaaaaaaaaaataactataaagatcaaaaatgcaaaagacagtgcaccaactttaaaaaaacagagggaaaaaacgtgggcggggccgggtgtacaaaatcctgatggccttgctgaggaatctggtaagtgttaaatgaggttaatcggcggatgctagagttctcgttactaatatacatatatggtacggtgtaacacactgaacgtgaattagttcttgtggtggacctgtacttttttgttgtgaataatcagcgggtgcacagactattaaactcttatttactgctctatcaactcttcttttatatgggtgatcgctttgttctg

SEQ ID NO: 96765 - DNA, 790 bp, Zea mays
  Clone ID: MRT4577_19764C.1
gacgcggtaaaaaagcctattttatcaaatctcaaattgtatcgactattatatcgaagcagcttgaaatggagtttataatagcaaaaaaactgccactgctcaggtcttctaatgcatccttcattccttcctcggcctcctgccacgctacaggaacgtgacggcggcgaggcagcggaggctgcccccgctcgggccacggcgcccactcccgccgccgcacctcctcgccgctgtcatcgccttcgccttcgctctcctcttcttgctcctcgtgcttctctccagctcctcccctcactcgccgccgccatcccaccacgccgtcgtcgcaagatcatcctcgtcctcggcaccgccgtcggctcgctgcagcagcgcggcggcgagcctcggggagctcggcgacgcgatggtgtccatgctgcccaaggacctcccgttcaccgtcttcgtgccctcagcggactctttcacccgcgtcctcaggctgcaggggtccaagtccaacgccagcactggagatcaggaagcggccaccgacaccgacaccaacacctacgccatcctatcccgcgtgctcggcttctccgcggtccctcgccgcctgctcgccgcggacgtgccggtgccgccgcgcggggccggggcggtgcgcctcctggactccgtgtccgggctgaggctgtacgcctccagggacgcgcgcggggcgctcgtcgtgaacggcgtgcggtcggagtgcgtcgatattatcaggggccggacgcgtgggcggacccttgcg

SEQ ID NO: 96766 - DNA, 580 bp, Zea mays
  Clone ID: MRT4577_19765C.1
actataggaagaataggtagggatgatctgccttccacacaaaccggacacttcggaggccggacccggtgagaagggaccgaccgcagccagctcacgtctccctcttcatccgccatgctgaaggtcgtgtgcaggcgcctctcgtccgctctcgactggagcaccgccgccgccgcctcaggctcccggggccctctcgccggcacactacccggacgcgacgacgacgacgcacgagactgcagggcgcgtttcagccatcgaatcatcccttcttcgcacgctgtcataggattttcagcaaagactcatgtgctccaagatagaccacgatgtggacgtatctgagctccgagcatactgtggcaagtgagaacaatccacagagaaaaaatcgagcatgatgagcataatcatgagcgctacccacctgcagacgccaataagggtgcatttgactactttgagctgagtgctgcgaggatcatttacacatactttgctgctagcttcatcgacttagaattagtccataccatgtcagatagtaatgatgatcgtcggcttgcctcacttg

SEQ ID NO: 96767 - DNA, 328 bp, Zea mays
  unsure (1)..(328): unsure at all n locations
  Clone ID: MRT4577_19766C.1
ctacgactttttatatatcgcagggtgctagaacccatcgggggcgatataacgagaggcggctgcttgttgcccacggccatgacgagagcactgaccatggtggccatgatagtcactgatgccttgttcttcatggccgatagctcacagcaaagcggtacgcaggacggcggcgcgctctgccccaactgcctctgctgcagccagtagggctattgcagctccactccccactactgtacctacggcatgcacagccaccgcttnctacataggatgcatcggcagcggcagtacccctactacttccccgagcgggcctgtg

SEQ ID NO: 96768 - DNA, 493 bp, Zea mays
  Clone ID: MRT4577_19767C.1
tttttttttttttttttacttacccagtacaggtttgtttgagaaaggaaaggcagttccctcttttgtttaagaaaggcaaggctgttctgtcctaagttacaggctctaacattggtttcgtcggctggctactttgaagcaagggctgcagagtcaagttaggcgcaaggcatggttggttggggaccaatatttactaccacatcctgggacaccggaagctaaaccatcaccagacccagaaaggaaacgggtcaatcaagtcacttattttctctagataaggatggtgctttcaccagtttatttggataaggccatggtttttagaagttcaacacttaagccattctctggaaacgacatcaacggagattctcaagaaacgaggaatgatggctagcggcaccaaaacatgaaaggaatcgagatcggaggtatttctactcggccttcttctctgccctgccctcttctcagggaacattcc

SEQ ID NO: 96769 - DNA, 534 bp, Zea mays
  unsure (1)..(534): unsure at all n locations
  Clone ID: MRT4577_19768C.1
gcacgagcttcggccgcggcacacgggccgccgccgcgcgcgccgccgccgggtcgtccgccagtggcagcgcggcggcgaaagctgcaccgaccaccgcccagggaagcgccgctgcccgatgcagcgaccagcacaccccgagtacagtagaggacctcgagctgtagtttgcagcacttgagctagctatatttcttctctgccattcgggttcagcatcgttcttgcctttcttcctttcctttttgtttgctggatttcttcctgctcgccacttgagccattttaattatttcactatttgctgaactagccagctactgggtcagtcgaccagtaataatatcatgcgcatggcaattggcaaaaatttgtagtatatccaggagatcgagggagaagtgaattaatgaataggtcttgtacgtactcttgttgcttagcttgcccatgcatgcatacccgagataaaagagcaagctttattatttagnnnnnnnnnnnnnnnnnnnnnnaaaaaaaaaaaaaaaa

SEQ ID NO: 96770 - DNA, 651 bp, Zea mays
  unsure (1)..(651): unsure at all n locations
  Clone ID: MRT4577_19769C.1
gggtacctcgnagccggccgggatcccttctcaacccacgcgcactcagctcgccgccttctattgatcgcctcacgactacccccgaacgatgtctggagccgcggaggagaacaaaaagaccccggagggcggatgccacatcctccttagagcaagggaccggatggctctgacgggttcttccgcatcaccactccacccacctaaccaatctgatgaacgcgtattgggaccgccagcctgcggacgtgaatgccattgcgtgcctgtttgatgaccccatgcttcacaccgagtatacccctgatgacctgtatatggaggacggcgacaatatccatgccatgcttcacctaaccggaggcagcgttcctagcaccacctaagagaatcaatcgcggagcttcattttgctctccgccctgcgtagtatgaaacaacaaggaaacagtgctttttaatgaacttgctgacgcctcttcctccttgagacattgctgagggacatccttatcctttggttaatactatggattggcactttggactggcatcactcatacatctatccctattacgtgccgccatgaatgtactcccaatgacgcgcacattatttggttcgctgtgactgctctcacctccaag

SEQ ID NO: 96771 - DNA, 553 bp, Zea mays
  Clone ID: MRT4577_1976C.1
aaaaaaaaacaaaaaaggcttttaaacttttttggggtccatgatttttgttttaaaaaaaacggggtgggcttggttttcaaaaacccacaaattaacattttccgcccacaaaatcaagggctttttttcccccctaagaggaaaaaaaaccccgaaaaaaaggcccgccttttaaaaaatttacaaggcataccctaacaaactttttttcagccccaaaagtcaaactcaaaactcaacgggtttgcccgtttaagcttttttcccccctaggggtgggctaacccctgaaaaaatcaccccaaaaaaccttccattttttgccccccaaaagtgggaccccggaaagctctttttgttgatagcaccccttatgaggggcggggcaatttttgacacctttaaaaataagcggaagaaatacctccttccaaaaaaagctttaaattcctttgcccttttggggggaagggaaaagggcctggtgttaacataatcaagagtagcccctttgggtttgccaaatgcaatcctccaccaatttgccctt

SEQ ID NO: 96772 - DNA, 588 bp, Zea mays
  Clone ID: MRT4577_19770C.1
cccacgcgtccgccacacgtgcggagccaacatctcgcaccattttggcaaccccgcactgaaaaaataagggcgaatcgaggccgccagcttaccttctgagcggaagcggcgcctagcaaccaacccctctcataggtccaccaacgactacgcggaccatgggcttgccgaccacgctgagggacctgacgtatgctgactgtcatgaagggacaaaagtcgagggtgacccaccacccgcggggatcactgactacgcccaatatcaattgggagagctcgttgcagtggagctaccataagttgacatacgcgactcccatggaaagacccttggttacggagatagtgtgaatggcgccagacctttctattgaccactgtctggagatgtggttgaagcgaacgagatactacatgactcgcccggactggtgaatactggcgcatatgacaacggatgacctataaagggcaggcccaacatgccaggagagctcaatggactcatgcatgctgaccagtgctcgaaatactgcgaacaacgcaaccatcgtagaaatgggaatggattctgaggaccag

SEQ ID NO: 96773 - DNA, 367 bp, Zea mays
  Clone ID: MRT4577_19771C.1
tttcacgcgtatacatatatatatgtctgagaggccaagcaagtcaaccaagagagagagagagaaaatgcaagcgcgttagcctaaaaatgtccacagatcactgcttacacgccacgtaatatgacgtaacagcgcaagcagcagatctagggcacgcacacgcaagagctccgagaaggacgacaagaagccggctagctaggctgacaggcgatctgtaccttcgatccctgtctgtgacgacgccttcttccagcgaagcgttggtgatatcgcatgcaggaaacgatcacgcacgcacgcacgcagctggctaggctaggctagctagcatgaggcgggagagcaggcatggcgagatctc

SEQ ID NO: 96774 - DNA, 315 bp, Zea mays
  Clone ID: MRT4577_19772C.1
ggagaataaacaaaattgggcagggttgtatacatcacagcctacaacatcgacctggcatgtttttttatgggaaaaaagacgacagataaagccaccaaattaactgctaccccgataccccactctgccactcccacccgaggggacaatggcactgtcagtaggccccgcatggcgccagctcatggggcagctgaaccccggcgttggcactgcttttagcctgacggcacacaaaacactctaggccactgacctctaccatttccagatccaaggacttgatgccgtgggccatcgaccaggtcaagc

SEQ ID NO: 96775 - DNA, 340 bp, Zea mays
  Clone ID: MRT4577_19773C.1
ggggctggggggcccccaaattttttccattttaaacccacccataaacccccttccccaagcccttaaaaaccatgcgattacctcctaccagccaaaacccagaaagccccccgtaccgggggaaatgggcatgccactgaccagccgactaaggaacccagcggagcaagacacatggaccccctggttacaacggactcgacatacaacatgcgccgggattgcttggcattcattggtgatttcatcaagggccggagatcaagtgttgcatggatcatgaccacccatggggggccctccaggggcaccttgaaaatgggggcccaaacattct

SEQ ID NO: 96776 - DNA, 522 bp, Zea mays
  unsure (1)..(522): unsure at all n locations
  Clone ID: MRT4577_19774C.1
cggttccggttcgcccacgcgtccgaggtcggctcatcaacatcaggccatccaccaattcactccgacagctaaaaagtttgccgccgatggggtcgtcggtgaagaaggcggcagtggcggagacgacggcgcgggcggtggaccaggcggtggcgtacgtgctcatggccgccgcgctcgccgtcacctacctcgtgcactgagcaccgcgcggtgaacacaagtgccaattttgatacatcctacggaaaggaggacagacaagctggagatgacgtactatgattcaatcgcagcggaggattcgactatctacggtcgccaccgtacttcttatcgatctcaaccaaacccttcgttattgtaaaaaagatgtactacagatcttctataacgaacagtgctcatgagggcaaacatgtcatgcactcatgctccaggataaaagaaaagaaatgtcgttggagatcttccatgcaatggataatgctcgtgagtgctnnnnnnnnnnnnnnnnnn

SEQ ID NO: 96777 - DNA, 628 bp, Zea mays
  Clone ID: MRT4577_19775C.1
ttggccgggtcgaaaaaaaaaaaaaaaataaccattattcaggcaaataagccatttgtattattagatcttatccatcacctatggtgaagagcctagatcacataaccatccgagggctctttctactttttatgtttcttgtggcatcctttgttggtcatgcacagataataagaggtgaaaccaaggagaataaggacactaacagcatgacgatgacaacaacaagactaggaagctatgtaattagcatggatgaaaaatctagcttgtgctttctggatccaagaactctatggtacatctgcaaaataacatatcgcctttttaggacattgaaggattgcttggagttttgccacagtatatgatgcaccatgttggaaaaaaagactaataagaggccatgctttctcaagattgtagatggagatggtgaagatgttatacccaatcatccatgcatgtaccaagggataataaactataagacaacttatcagttattattaagtgttccctattttaggaaaaaaaaaaaaaaaaaagcgattttctttgtgtgcgattatgaaagtttcaaatttcatagatgagacgagaaaaaaaaaaaaaaaaagcggcc

SEQ ID NO: 96778 - DNA, 741 bp, Zea mays
  Clone ID: MRT4577_19776C.1
gcaacaagcagtacccatacccgcgccgctgccgcaccggccgccccaggaccaagaaggaccccgagacggagatgcgcgagggccacaactacgtgccccgcgacgagcagttctcggaggtgaagcagctcacgttcggggccaccacgctgcgctccggcctgcacgcgctgctgccggcgctccgcccgctgctcatcaacaagaaggatctgcgcttcccgcacttccccgccatcgacgaactctacagcgacggcatcccgctgccggcgcagaccgggttcgacgccatccgcaccgtcgtcccgcgcatggtcaagctggtggaggacaccaccgaccacgtcctccgcttcgaggggaccggttcgcgtggttcaaggacgaggagttcgcgaggcagacgatcgcggggctcaacccgctgtgcatccagctgctgaccgagttccccatcaagagcaagctggacccggaggtgtacgggccagcggagtccgccatcaccaaggagatcctggagaagcagatgaactgcgcgctgaccgtggagcaggcgctggcggcgaagcggctgttcatcctggactaccacgacgtgttcctgccctacgtgcacaaggtgcgggagctgcaggacgcgacgctctacgcctcgcgcaccatctttttcctgacggacctgggcacgctgatgccgctggccatcgagctgacgcggcccaagtcgccgac

SEQ ID NO: 96779 - DNA, 228 bp, Zea mays
  Clone ID: MRT4577_19777C.1
cattcgcctcgagggctgtgtggagccaccactcctagccacagctgccatgataagtccttccatgaaggactgaggagggagagtgggggtccagggctggtgctgctcttccctcagctctgccggggctctaaggtccctctatttatttctcaaccctggctggcctctcaccaggagtttaggctgaatgccttccacgtgatggagggaaaagccaactct

SEQ ID NO: 96780 - DNA, 586 bp, Zea mays
  Clone ID: MRT4577_19778C.1
ggccgcttttttttttttttttttctcaaaagcgcaggggaactgctccttaaatatattaagaagaggaaaaaggtctatagcagaccagaggttacaacattaaactccttacggaggccaataccgcacataagtgaaagagtccaaggaagccggactcaaaaaactactaaagtaaaaacaggggggttcagtcattaggcaaagaagctgccaagaaagagagacccttggccccagctaactcccaaactcttctctcgtcgtcagcctgccgaaggatagaggggagactgggagtctggccgtcaaacacgcatctgttgcggtgattccagatcatccaggccctcaaagagatcagagaactcagacctttcttgaccattccttgaactgtttcagaagctatcaggctgagaagactatccaacactgtctgactacctgtccccaccctggctctgcagggcctccttagccaccatttgtctgttggagtataggttgtgtttaagtcctgtagttgataagtgtgtagggttggtggtcctaagcaatatgctctggcccgtccgacctt

SEQ ID NO: 96781 - DNA, 477 bp, Zea mays
  unsure (1)..(477): unsure at all n locations
  Clone ID: MRT4577_19779C.1
tacgacaaactctcgtctagtcgtacgtatggcgtcttgcagttcaagtcctttgtccattattgtggaaagcatctatatttcttgcacacatatatttgaactatattctcattattgttatgataatcatcatccacacatctatagatatatccacggttcagtaatggctatggatatatagtagccaccattattgttggatctagagctcaggtactagcagttaggatgcatgcatgcatggcgcccatccatacggacagcagnatgagtgagtgactatactcacttgcgtcgagctcggagctgacgagctccagcagcagcgtcttgccgaataggtcgccgacgtcgtcgacggcgcgctggaagtacatctgcccgatggccggcgacgcctccaccgacgccgtcaccgtcagcatcctctccacggtgacggacgacacggcgccgctgacctcctcggtg

SEQ ID NO: 96782 - DNA, 224 bp, Zea mays
  Clone ID: MRT4577_1977C.1
aacagggcacacaaatgctttactactttgaaaaggccctcctataacaatttggaaagggccaatttctacaaaaaataacttcacacatgagcaggaatgccaaccgcaacaaaaccccaaaaatttgttttgaggggaagcacacaatttttggtttatgtatgaaaaaggattttatactgatctgccataaggggacaaaaaaaaaacctttttaaact

SEQ ID NO: 96783 - DNA, 652 bp, Zea mays
  unsure (1)..(652): unsure at all n locations
  Clone ID: MRT4577_19780C.1
cttggatccggtgctcagcggaacagctagctatagcctgtagctagcagctagcttcagtcacaggccggacggtcggctcacacacagctagccgccgccgctgctagcttagccaccagtagtccgatctgatctacaggcagggggccagcaggggcagctagctagctagccgcgcgccggcgccatgatgaacctgaacctgaagcagcctctggtgctgcccgcgcaccacagcaatgtcgtcggctcgcgcctgtcgtcgccgtcgccctcggcggccgccgccagcaggaggaccggcggcggcgtgtcctcccggtccggctcccggcggcccgtgcggctgccgaggatcagctgcagcgccaccgaggaggtcagcggcgccgtgtcgtccgtcaccgtggagaggatgctgacggtgacggcgtcggtggaggcgtcgccggccatcgggcagatgtacttccagcgcgccgtcgacgacgtcggcgacctattcggcaagacgctgctgctggagctcgncagctccgagctcgacgcaagtgagtatagtcactcactcatactgctgtccgtatggatgggcgccatgcatgcatgcatcctaactgctagtacctgagctctagatcaacaataa

SEQ ID NO: 96784 - DNA, 546 bp, Zea mays
  Clone ID: MRT4577_19781C.1
cggtgcggcggcccctgccgctcatgccgggcgccgacgtcgaccaggacgagccggaaacggcggcgcagctgatcatcgtgtacggagggcgggcgctggtgctcgacgacgtcgcggcggacaaggcggcggacctgctgcgcctcgccgcggcggcggcggcgcgaggaggcacagagcagccgctctgctcgctcgccgacctacccgtggcccggaaggcgtcgctgcagcggttcatggagaagcgcaaggacagggtcgccgcccgcgcggagccgtaccgccggcgccgacccgtcggtgaccgacgcaacgatctcgcgctcgagctgtgatttgaggatgtctcggcggtaactactagaggacgctgtgctcaagaagcagccgaacgatctctgatgcttcgtacagtcagatcatattaatttgttataactagataggtataggtggattgttcttatgtgttgtgcagcaaaacagaagaaaaaacttggagatgaaaagacatggtttcgcattgaaaaaaaaaaaaaa

SEQ ID NO: 96785 - DNA, 1669 bp, Zea mays
  Clone ID: MRT4577_19782C.1
gcacgagcacggacctgggcacgctgatgccgctggccatcgagctggtgcggcccaaatcgccgacgcagccgcagtggaagcgggtgttcacgcacgggcccgacgccaccgacgcctggctgtggaagcttgccaaggcgcacgtggtgacccacgacacggggtaccaccagctggtgagccactggctgcgcacgcactgctgcgtggagccctacatcattgccgcgaaccggcagctcagccggctgcacccggtgtaccgcctcctgcacccgcacttccgctacaccatggagatcaacgcgctggccagggaggcgctcatcaacgccgacggcatcatcgaggagtccttctggccgggcaggtacgccgtcgagctcagctcagcggcgtacggcgcgacgtggcagttcgacacggaggcgctgcccaacgacctcatcaagcgcgggctggccgtgcgcggggaggacggggagctggagctcaccatcaaggactacccctacgcccacgacgggctcctggtctgggactccatcaggcagtgggcgtccgagtacgtcaacgtctactacaagtccgacgaggccgtggccgccgaccccgagctgagggcgttctgggacgaggtgcgcaacgtggggcacggcgacaagaaggacgagccgtggtggcccgtgctggacacccgcgacagcctggtggagacgctgaccaccatcatgtgggtcacctccggccaccactcggccgtcaacttcggccagtaccacttcgccggctacttccccaaccggccgaccaccatccggaagaacatgccggtggaggagggcgggccgggcgaggagatggagaagttcctcaagcagccggagacgacgctgctggacatgctgcccacgcagatgcaggccatcaaggtcatgacgacgctggacatcctctcgtcgcactcgcccgacgaggagtacatgggggagttcgcggagccatcgtggctggcggagcccatggtgaaggcggcgttcgagaagttcggcggcaggatgaaggagatcgaggggttcatcgacgagtgcaacaacaacctggacctcaagaaccgctgcggcgccgggatcgtgccgtacgagctgctcaagcccttctccaagccgggagtcaccgggaggggcatccccagcagcatctccatctgatccatcctcagcatgcattagtccaattaattaaatcgggggttgtactattattgcatgcagaggctgcttgtcgaataaaacgtactatatgtacgattgtattgtacatgtgtgtcaatgcaacaagaggcacgtttgagactttgagttaataccaattaaactagtaagatggaattatacattttgaaacgactagatctatatacagtctaattttgagataaaaaaaaaaaaaaaaagggcggccgccctttttttttttttttttgaacacaacaattcttccttgccggttgaaccctggcccgggaagtaatctacatcgtggggcaaactggaaccagtgcgcgctcacgtgcatccgaacacctagatatcggcagcggtggccggtggcggcgggcggtggcgcctcccggcgtacgagcgccaccttttcgggttcccct

SEQ ID NO: 96786 - DNA, 486 bp, Zea mays
  Clone ID: MRT4577_19783C.1
ctcgtaggagctgagatccaagattccaagctcttctgtcagtaaggaaccctaacttgcttggggatggatctatgaggggagtttccctctagtcatttgctagtgattccttcgctatcccatccatccatgtttgcggttccgtgcgattagtggtttgctcttgcgtgcacgaaagattgatcccgcggcccaagtggttgctccacgcacgcaacgccaggtcattgacacagttgtttggcaaacttaagtttggggcgtggccttttgtagtcacgcacctcgcggattcaatcaaacatcacgaactagctatcactgccaaaaaatgcagatattctgaacggcacccgtcatatatgctctggcttgactaggttcggaatttgaacgcagattttctgaacgatacacgtcataactgttctggcgtgactaggattggatgtttggtatatgctcttaatttgttccataatg

SEQ ID NO: 96787 - DNA, 121 bp, Zea mays
  Clone ID: MRT4577_19784C.1
ccgcgggctcgttacttcggttcccaggttggaagcttatcgcactcggctccagctatataagctgaccggtgtagaggggcccagcagggccaactccatggattccttccacgacaga

SEQ ID NO: 96788 - DNA, 421 bp, Zea mays
  Clone ID: MRT4577_19786C.1
agagacactcgtacatagaagaaaacatatccctcaaaccctaggcatacagatctagatggcgaaccctaccgtattgttcaacaatcgaccggcacgggtgcctcggctggcctgatagagaatggatcttgcacgccaacgaggtgcccagagaaccgtgtgagaacttacgagcgctgtacacggtcgagaatgacttggtcaattgcgtaaagccgttccactacatagagactgcaccttacaccgggtaatccccgagttacatgtgcatagggcggagaacttcacccgcgtgaacgatacacggagacgagtccatctacggttagaagttctccgacgagaagttagtactcaagcacaccgccccagacttgctcttcatgggcaacaacatgcccaacaacaacggatg

SEQ ID NO: 96789 - DNA, 890 bp, Zea mays
  unsure (1)..(890): unsure at all n locations
  Clone ID: MRT4577_19787C.1
tccggtgctcagcggaacagctagctatagcctgtagctagcagctagcttcagtcacaggccggacggtcggctcacacacagctagctagctagccgcgcgccggcgccatgatgaacctgaacctgaagcagccgctcgtgctgcccgcgcaccacagcaatgtcgtcggctcgcgcctgtcgtcgtcgtcgccctcggcagccgccgccagcaggaggaccggcggcggcgtgtcctcccggtccggctcccggcggcacgtgcggctgccgaggatcagctgcagcgccaccgaggaggtcagcggcgccgtgtcgtccgtcaccgtggagaggatgctcacggtgacggcgtcggtggaggcgtcgccggccatcgggcagatgtacttccagcgcgccgtcgacgacatcggcgacctcctcggcaagacgctgctgctcgagctcgtcagctccgagctcgacgcaagtgagtatagtcactcatactgtcggccgtatggatgggcgccatgcatgcatgatgcatgcatcctgctagtagtagctgagctagatccaacactaatggtggctactatactatatatctatatattaatgggccatggccattatattgctcagccagcaactaaacgaaaatcactactgaaccgtggatatatctatagatgtgtggatgatggttatcataacaataatgagaatatagttcaaatattatgtgtgcaagaaatatagatgctctccacacaatggacaaaaggacttgaactgcaagacgccataccatacgtacgaactagacgagagtntgtcgtagaagactacgcgcgtacgccgtaagaaataaagggaaaaatctgagctagtgagcatgc

SEQ ID NO: 96790 - DNA, 1147 bp, Zea mays
  Clone ID: MRT4577_19788C.1
tttgtaataacatccctataagggggaatgggggccccgggcccccctccgaggtttttttttttttttttttttttttttttttttttttttttttttttttccaaatgtataaaggctctgttaataatgccatcttactagtttaattggtattaactcaaagtctcaaacgtgcctcttgttgcattgacacacatgtacaatacaatcgtacatatagtacgttttattcgacaagcagcctctgcatgcaataatagtacaccccccgatttaattggactaatgcatgctgaggatggatcagatggagatgctgctggggatgcccctcccggtgactcccggcttggagaagggcttgagcagctcgtacggcacgatcccggcgccgcagcggttcttgaggtccaggttgttgttgcactcgtcgatgaacccctcgatctccttcatcctgccgccgaacttctcgaacgccgccttcaccatgggctccgccagccacgacggctccgcgaactcccccatgtactcctcgtcgggcgggccgggcgaggagatggagaagttcctcaagcagccggagacgacgctgctggacatgctgcccacgcagatgcaggccatcaaggtcatgacgacgctggacatcctctctttttactcgcccgacgaggagtacatgggggagttcgcggagccgtcgtggctggcggagcccatggtgaaggcggcgttcgagaagttcggcggcaggatgaaggagatcgaggggttcatcgacgagtgcaacaacaacctggacctcaagaaccgctgcggcgccgggatcgtgccgtacgagctgctcaagcccttctccaagccgggagtcaccgggaggggcatccccagcagcatctccatctgatccatcctcagcatgcattagtccaattaaatcggggggtgtactattattgcatgcagaggctgcttgtcgaataaaacgtactatatgtacgattgtattgtacatgtgtgtcaatgcaacaagaggcacgtttgagactttgagttaataccaattaaactagtaagatggcattattaaaaaaaaaaaaaaaaaaaaaaaaaacccacgcgtccgcccacgcggccg

SEQ ID NO: 96791 - DNA, 200 bp, Zea mays
  Clone ID: MRT4577_19789C.1
gaaaaaacaaagtgcacgatgagctcatgtattaccagaccgcctgactattcctcgtgtctccggcagtgctctcgtccactgtcgacctccagctcatctccgtggacagagctctgggtatcctgcccgtgacaacgacgttcgtctacgaaaaccctatcgatcgtgctgccgagacacattagaagagctatgtg

SEQ ID NO: 96792 - DNA, 1387 bp, Zea mays
  Clone ID: MRT4577_1978C.1
ctcgaggccggccgggccgggatgacactgtctccatcatatcctctcgatccatcacttggtcatcaggaacgccgattcatcggttgattgctcgtctcatcggtcgagcaataatcgagatgggcgcggcgtcgtcgacgatccactcggcggacttgccgcggctgctgtgctgcgcgtgcgtggagcagtcgacggtggccatggaggagacgtgcgggcggtacgacacggtgctgcagccgggctgccacttcatgccctggtgcgtcggccggagggtcgccggctacctctccctccgtgtgcagcagctcaacgtccgttgcgagaccaagagcaaagacaacgtcttcgtcaccgtggtggcgtccgtgcagtaccgcgccatcgaggacaaggcctacgacgccttctaccgactcagcaacgcccgggagcagattcagtcctacgtcttcgacgtcatccgtgccagcgtgcccaacatgaacctggaccaggtgttcgagcagaagaacgaggtggcgcgggccgtggaggaggagctggccaaggccatgaccatgtacggctacgagatcgtgcagacgctcatcatcgacatcgagcccgacgaggtggtcaagcgcgccatgaacgacatcaacgcggcggcgcggctgcgcgtggcggcggcggagcgcgcggaggccgagaagatacagcaggtcaagcgcgccgagggggaggccgagtccaggcacctggccggcgtcggcgtcgcgcgccagcgccaggccatcgtggacggcctgcgccggttcgtgcccgacgagaagtccgtcatggacatggtcctcgccacgcagtacttcgacaccatcagggatatcggcgccacgtcgcgcgccgccaccgtgttcatcccgcacggccccgccgcggtgcacgatgtggctgcgcaggtccgcgacggcgtgctccaggccgcggcgtacaacccctacgccggaaccaagtgaccggccgccgcacggccacggtgcctttccgccctgtcttttcttgcttcttggacatgttcatgtgtgaattcgaaacctgaccatcagtgtgtgtaccttgtgtcgaacctttacttcagtaggcgaaatacccaaatttatacttcgaggtgtgtatatacgtacaaaacataggaatattttatacatgaaaaaaacaagtttagtagcttagaagcagatacttatccaccagcgttgttagtctatctcccgcaccttcaatgtcccatttctcatctcaatttctatttcaaacttcactctacaaatagtattatatacaatgtaaaacagtgttttgtacgagcatgaataagtaaacttaagtaatgtcc

SEQ ID NO: 96793 - DNA, 1614 bp, Zea mays
  Clone ID: MRT4577_19790C.1
gaaaaaaatacacagagcagccacttggatccggtgtgctcagcggaacagctagctatagcctgtagctagcagctagcttcagtcacagcaggacggtcggctcacacagctagtcgccgccgctgcttagccaccagtagtccgatctaatctacaggcagggggccagcaggggcaggtagctagctagccgcgcgccggcgccatgatgaacctgaacctgaagcagccgctcgtgctgcccgcgcaccacagcaatgtcgtcggcgacctcctcggcaagacgctgctgctggagctcgtcagctccgagctcgacgcaaagtcgggcgtggagaagacgcgggtgacggcgtacgcgcacaagacgctgcgggagggccactacgaggcggagttcaaggtgccggcgtcgttcgggccggtgggcgcggtgctggtggagaacgagcaccacaaggaggtcttcatcaaggagatcaagctcgtcaccggcggcgacagcagcaccgccgtcaccttcgactgcaactcctgggtgcactccaagttcgacaacccggagaagcgcatcttcttcaccctcaagtcatacctgccgtccgacacgcccaaggggctggaggacctgaggaagaaggacctgcaggcgctgcgcggcgacgggcacggcgagcgcaaggtgttcgagcgcgtctacgactacgacgtgtacaacgacctgggcgacccggacaagaacccggcccaccagcggcccgtgctgggcggcaacaagcagtacccatacccgcgccgctgccgcaccggccgccccaggaccaagaaggaccccgagacggagatgcgcgagggccacaactacgtgccccgcgacgagcagttctcggaggtgaagcagctcacgttcggggccaccacgctgcgctccggcctgcacgcgctgctgccggcgctccgcccgctgctcatcaacaagaaggatctgcgcttcccgcacttccccgccatcgacgacctcttcagcgacggcatcccgctgccggcgcagaccgggttcgacgccatccgcaccgtcgtcccgcgcatggtcaagctggtggaggacaccaccgaccacgtcctccgcttcgaggtgccggagatgatagagagtaagctagctagcagacgcactcatctcaggactgcttgttatcttaatcttaaaaaaaataaatgatttgctttgctaggggaccggttctcgtggttcaaggacgaggagttcgcgaggcagacgatcgcggggctcaacccgctgtgcatccagctgctgactgagttccccatcaagagcaagctggacccggaggtgtacgggccagcggagtccgccatcaccaaggagatcctggagaagcagatgaacggcgcgctgaccgtggagcaggcgctggcggcgaagcggctgttcatcctggactaccacgacgtgttcctgccctacgtgcacaaggtgcgggagctgcaggacgcgacgctctacgcctcgcgcaccatcttcttcctgacggacctgggcacgctgatgccgctggccatcgagctgacgcggcccaagtcgccgac

SEQ ID NO: 96794 - DNA, 2503 bp, Zea mays
  Clone ID: MRT4577_19791C.1
tccatgaggatctcggcatcgaggcgaaggaggctgcggttcgcgaggtggcgaagctgctcccgttcccggagctcctctcctctatcgcctctatcaaatacgactaccttacgcggcagcagataaatgatgcacaactcagtacaatggtggcagaccaggtggagcaggcccatgctggcatcaatgctctagcattatctcatataacaataaacaaactacgtgagaacttcattgatatagacaagttgtgtcaggagtgtcaaactttaattgagaaccatgacaagatcaagcttcttagcaatacaagaaacaatttgaacacaactctaaaggatgtgggaggtatgatgtccatttctgttgaggctgttgctgcacatgactcattaagcaatgaccaggagttaattcacacttacgagcgactaacagctcttgatggtaagaggcgttttgctctagctgctgcttcatctcataaggaagaagttggaagattaagagaatactttgaggatgttgaccgaacatgggaaacctttgagaaaacattatggagccagatctctaactgtttcatactttcaaaagagagtcctcagacattggttcgagctttgagggttgttgaaatgcaagagatcttagatcaacaagttgcagaagaagcagctgaggctgagggtgctggtgctatggcgacaataacaaaccaacgtagaactgcaaaaaaaggtgcaggggcaacagttaccccaagaaagggcactcaagaaaaatcgaaggttcagggaaagggctacaaggacaaatgctatgagtctatcaggatggctgttgaggcccgcttcaacaagttgcttactgagcttgtttttgtggaggacttgatggaagctttggaggaagccaaagctattggagatgagcttggcgatatatatgattatgttgcaccatgctttcctcctaggtatgaaattttccagctcatggtaaacctgtatactgagagattcattcagatgcttcgacttctcagtgatagagcaaacgatattcaaaatataaatatcctgaaggtgactggttgggtcgtgcaatatcaagaaaacttgattggtcttggtgtggatgaatcacttgcccaagtttgttctgaaagtggtgcattggatcccctcatgaacatgtatgttgagcgtatgcaggcaacaaccaagaaatggtacagcaacattttggaggctgacaaaacacaaccaccaaagagtacagaggatggaaaactatatacacctgcagcagtggatctattcagaatattgaccgagcaagttcagatagttagagacaacagcacagacgtcatgctatatcgaattgcacttgcggttattcaggtcatgcttgattttcaagcagctgagaggcaaaggcttgaggagccagcttctgatgttggtctggaatctctatgtgcattgattaacaataatctgcgttgctatgaactttcatcagagctaagtagcagtacattggaggcgcttccacaaaactatgctgaacaggttaattttgaagacacctgcaaaggatttcttgaggttgccaaggaggccgtcctccaaactgttagtgttatttttgaagacccaggtgtgcaggatctactcgtgaagctttaccagaaagactggctggagggaatggtcacagaatatcttgtcgcaacatttgctgattactttggtgatgttaaaatgtatattgaagaaagatcatttcgaagatttgtggaggcttgcatagaggaaacaattgtggtctatgttgaccatctcctttctcagaaaaactacataaaagaagaaacgatagagaggatgaggttagatgaagaggtgcttatggatttcttcagggaacacatcaacgtgacaaaagttgaaagcagagtgcggattctggcagatatgagggagctagcttcagctgagagtttggatagctttactctcatttacactaatatactggaacatcaacctgattgcccgcctgaggttgtcgagaagcttgtggcaatgcgggaaggcattccaaaaaaggaagcgaaggaggttgtacaagaatgcaaagagatatacgagaactcgcttgtggatggcaaccctcagaagtccggttttgtgtttggcaaattgaagtgcttgacagcaaagaaaggcatatggaggaagcttgggcagtaagtgtggacttgagcagagtggacagaagtaccacctaggcaaagactgtacgtttcacttctctatgatcattcttttgttcttttgtcgatgctactgttgggtttcacgtttagactatcagtgtgtactcagcttgaggagcaaaaatgtatattccactttgcttagctacagaggattttggtgtaagaatatgtaatttattcaataaaatggttgctatttgcaat

SEQ ID NO: 96795 - DNA, 286 bp, Zea mays
  unsure (1)..(286): unsure at all n locations
  Clone ID: MRT4577_19792C.1
caagggctacgcgagggcgggccttcggctcgcgcgggcgtgccacctgttgcctcactccgtctgcctctctcctttcgctggcccgccgccaccctgtttgctttctttgctcccttctctcgctttgtcgggggggggggggcctgctcacagccccccggggcgcctgtcaacggcttcattccttcctctccngcgactcaaaacgcgtttcccctcgttctcgtgattttcgtctccctgcttgccttctgtagttcttgtatggcgtgggcatttccct

SEQ ID NO: 96796 - DNA, 290 bp, Zea mays
  Clone ID: MRT4577_19794C.1
ctttaggctgatttatgtgcttgtaagcaagtcgggactttatctccccagactcgtggataggcgtcaagctccggggatggacgtaccaccaagcgggaaggacgtagtaacgtggtcacagcttctacactcagtcgtcgtcgaccactacacaattcttcaccgttagacacataattcgatacggcttctcgcaagtcgaacgtcacgaatgtctagcccctcgacctttaagccacggactatttaaaacgtcacgaagaatcctcgaagcgaaatactgatac

SEQ ID NO: 96797 - DNA, 3343 bp, Zea mays
  Clone ID: MRT4577_19795C.1
ggaccctcctcgcaccgactactgctccgactacgtattcgttagatagggtatttcgttctgcaacccctctctctcggcttctccgcctcaagcctcttcccaattccgctagctgctgcccatcggccgccgcgaaccgaccgaccggtgctgctccggctccgccatggccggcgccggcgccgagctgggccgccgagccgctgcgaacgctgccaacaccgcgggggcccgcatctaggctcgatggtgtaggggggactgggaactgcggagaggagaagtggaggtgagaggggcgacgacaaagagagagagagagatgggagcgattggaggcgacgcgccggtgcagtgggacaaggtggatggggccgaggtggccaatggcggcggtggaggtgctgcgggaaggctggagaagatactcgtctcggtgaggctgagaccgctcagcgacaaggagatttcaaggggggacccggcggagtgggagtgcatcaacgacactaccatcatctcccggagcaccttcccggaccggcccactgctccgactgcgtattcgttcgatagggtatttcgttctgactgtactaccaaagaagtatatgaggaagggaccaaagcagttgccctctctgtagttagtggcattaactcaagtgtttttgcatatggtcaaacaagtagtggaaaaacatacaccatgactggaataacggaatatacagcagcagatatctatgattacattgccaagcatgaagagagagcgtttgtattgaaattttcagcaatcgaaatatataacgaagttgtaagggatcttcttagtgcagaaaacacatcgcttagactttgggatgatgcagagaagggaacatatgtagagaaccttacagaggtgaccttgagggattcagaccacctgaaagaacttatttctacgtgtgaagctcaaaaggaggaccggagagacatacttaaatgaaaacagctccagatcacaccaaatacttaaactgactattgaaagttctgctcatgagttcttgggtaaggacaagtcaacaacacttgttgctagtgtgaacttcgttgatttggctggaagtgaacgtgcatctcaggcattatcagctgggactaggctgaaggaaggttgtcatattaatagaagtctacttaccctaggaactgtgattcggaaactaagcaaggtaagaaatgggcacataccataccgagattcaaagctcacgcgcatattacaaccttctctaggaggcaatgcaagaacagcaattatttgtacaatgagcccagcccggagccatatggaacagtcaaggaataccttgttgtttgcaagttgtgcaaaggaagtggtgacaaatgcccaggttaatgtcgttatgtctgataaggcactggttaagcaattacaaaaagaacttgcaaggttggagagtgaattgcgatgcccagcttcatattctggtcttgaagcattagtgagagaaaaagataatcaaatccggaagatggataaagaaattaaggaactgaagttacatcgtgatcttgctcagtctagactgcaagatttgctcaaggttgttggagataaccacggttcgaagcaccccctggcttcttctggaagaaattttacttttgatgttcctcagccatgtgaggatgagcaatcgacgacatcagaagctatcagcagtggccaaaattttaggcttcaaggacgcctgacaacacaaagagattataggtcacagcaatctgaaaatgatgtgcagtttgctacccctcttagctattcaatcagcagtcccccattcagtgggatgcctccaactaatggcagaaatgataactctcatatatctgatgaagattcagaggatctttgcaaagaagtacggtgcatagagaccaatgaaacagaagaaaatgaatgcttagagtcgtcagctgtgggaagcaatagtctgcaagattcaaatttagcttccagcatgcatgggaacgacaatacaaatcgatctgtgaattctggacggaatgatgcatcttctattaccctggaacaacatctggagaatgtcaaaaaaccgtttgccaatcctggcatggatctgggatcctctacacgtaactcgtcaagctcaaaagtaattggcagaagcaggagctgtaggtctctgatgggttctactctgttggaagacttggagaaagaagtttgcacccctccaagcagaagtttcatggactacccagggaggcccgaaacatgtcaaagaagggtacccgcactgaactacgatgcagagagtgaagctttatccagggcaggatcaatgctatctgaaattaccaccacgaggggtggactgaaggaaaacagctctgctgctggtgatacagaatttgttgctggcataggtgaatttgtcgcggagctaaaagaaatggcccagggtcataatggagaattggctgaagggaccataaggagcgtggggctggatcccattatggatatcttgcaatcaccttctcgctggcctttggaattcgagaagaaacagcaggagatcattgacctgtggcatggatgcaacgtttccttggtccacaggacttactttttcctgctgttcaaaggggacccagccgacgccatttacatggaagtggagcttaggaggttatcatttctcaagaacacatactccaacggaagcatggggtatgatatggtggcaggcagcttgagcacttctctggtttcaagtgcaaagaaactgcaacgcgagagggagatgctctgcaggcagatgcagaagcggctgacgatccaggaacgggagagcctgtacaccaagtggggagtctcgctgtcctccaagaggaggcggctgcaggtcgctcggcgcctttggacggagaccagggacctggagcatgtgagggagagcgcgtccctcgtggccagactgatcgggctcctggagcctgggaaggcgctgagggagatgtttggtctgagcttcgcgccgcagcagtccacccggaggtcgcacagtagttggcggtatggccgttcttctctagactgactgagctcgaaagacgcagctgacaaaaaaacaacaacagttattccgttgttttcgttttgtgtagtgcctgatttttttgctgtcctctcggaaaatagaaattcctgaacattttgtgaccagtctgcgagaaaatttggtagcattttcaagatttattgatgtttacaatttggaaaaaaaaaaaaaaaaaa

SEQ ID NO: 96798 - DNA, 868 bp, Zea mays
  Clone ID: MRT4577_19796C.1
tttcgagtttttttttttttttttttttttgcatggacgacatatttaacattaaatagtacaattctcatgttgcgacggtacataaattctcacatattacaaatctaaatgtcatagcccagtacatacatgttaagtgtgtttatatgccatggagaaatcatttctgttttttgcacattgtgtctcaaaactctaaagagctataacaaaagaacatgtcatagtgttcatgaaaaaaggacacgttgcaaacggtaaataaatttgatggggatctgtgtcaccatctcctgcttgagcccattgtccttgaacacatagagcaacccttggaagatgtcgacctcaagtgtggcaactgacttgcccaccaattgttcgacgagtcgaggtcagcgagcgccgctgtgagcttcagttgcacgcactggtccaacttggatagccttaaggtgagcctctcgttgcaaagtaagatgcataccgttgcattagccatctagcaacataactccgtaaggatgccttggaatgtggggaacaggttggattccatcatcacagaagaagggttcgtcttgccacgagcacgatagctctagcgtgttgtagattcacttcttaggcataaaaaagatattctttcattggtgagattaatctagttgtagctagccttggacctgtacaggcagatctattggagtcgaaaggacaccaaaagtctgggaccaaaaatgtcgattgggataccagaaaataatgtcccctgatattttctacagtaccctgcgattcttcctttgactttgatcctaagtagattctcgtatgcaatgtgaattaccgacagatgctagtc

SEQ ID NO: 96799 - DNA, 335 bp, Zea mays
  Clone ID: MRT4577_19797C.1
cccggatcgacccaggcgtccggaccagctggccaaattctaacacctaggcgctcggccgagatggcccccaagcgctctgcgccacctgcgccgcctccgcccacggctgactcctccgaggagaccgcctctggttcgggctccgaggaggaggaggaggaggaggaggaggaggatgatttggagaccgtccactcaccgtcttccgtcgctcccaagagcgtagctccgatgccgcataacgtccaagagcccgaagcgtccgacgaggatgagtatgacgatgaagatgacgagccgtataaggtacaagaacccgaaacgtccgatga

SEQ ID NO: 96800 - DNA, 189 bp, Zea mays
  Clone ID: MRT4577_19798C.1
gtaccttcgaggaaatcctcttctgtggatctgactgatcggatggacttcgttgttggtacggtctaagttcttgtacaaactatagcgaaacacatagggttttctgagtgaaatgcgggctttatcttgtaataccacctcccggagggtcatattctgatatatgggaatgacaccgctgatgct

SEQ ID NO: 96801 - DNA, 405 bp, Zea mays
  Clone ID: MRT4577_19799C.1
gcgtttttcccgcttccgccttccttctccgctgtgggcgactccacggacactacacgtgcggaactctacccccataactacgggcctggatctatggtctgtcacctgtacgcttacctccacggagttcatcctgatgtactgcctactgtgctgccgacagagctcccggagcaggggcgaggtcattgacttcatcaacttccggtgctacttggggagctactaatcacggcactaatggaggccctgatggtgacctgaactatagtttgtactattattcctattataaaaccatgtgattaattgtgtgcctttgtgtggactaatgtatggtattctggattgtactctctaatcttgttgcttccctgctaaagacaaaacaaatctggagga

SEQ ID NO: 96802 - DNA, 768 bp, Zea mays
  Clone ID: MRT4577_1979C.1
agccgccgcagccacacccagaaccagctaaaccctaccatcttccgcttcctctccaccggcggcctccccggtcagatcaccatgtcgacggagaagaagcagttgaacccgatgcgggagatcaaggtgcagaagctcgtcctcaacatctccgtcggcgagagcggcgatcgcctcactcgcgctgccaaggtgttggagcagctgagcgggcagtcgccagttttctccaaggcgaggtacactgtcaggtctttcggcattcgtcgtaatgagaagattgcctgctatgtgacgatcaggggtgagaaggcaatgcagcttctcgagagtgggctgaaggtgaaggagtacgagctcctgaggaggaacttcagtgacactggttgctttgggtttggtattcaggagcacattgatcttggcatgaagtatgacccatcaaccggcatctacggtatggacttctttgttgttctggagcgagctggataccgcgtctcccgccggcgccgatgcaaggcccgtgttgggatccaccaaagggtgaccaaggaagacgccatgaagtggttccaggtcaagtatgagggtgtcatcctgaacaagtcccacgctagctagtaacctttcgagtgattgagttgtcgttagagctttaagtcagtcaagcttaatctggatcattggatacaaagtttgcactatcaattttgcctgttccgttgggctgacctgcatctataattccaccaaatcttttca

SEQ ID NO: 96803 - DNA, 188 bp, Zea mays
  Clone ID: MRT4577_197C.1
gtggccaaacaaaaaaactattggacaaaaagtgcccaagcaaagtactggtgcaaatacaaacaagtgtaatcctttgagaggatacaaaaatatataatattagttttttgacatcctttgtaaataatacttgcataaaacctgattcatgtttgagcaaaatagataagctatttatgtacttt

SEQ ID NO: 96804 - DNA, 1004 bp, Zea mays
  Clone ID: MRT4577_19800C.1
tccgtctggagctcattttcttaaaattagggagacactggagagttcaatgacgtcgtgaaagctttaaataaggctctgcgtgataccaagcagatggtgagaggcgggtcggcactcacggcgaaacagatgcagttacaagttggaattttgccatcgattgcagaatgcttggatggatttcaaacattatgtgaaatgcaccatgatgagtttacgctaaaatcatcagctatctccttgctgacttggaagacatgttccagtgacattgctgtactacgccaactcttagtagaccagccaaacattccaaaagatgaagtccaatccatattcgacattatatttgcagatgaaatttgttgaccaccaactcatagtatttgattgttgaagccttgccccctatgttctgatcaagctgccttctcaggtgagaccgagtcagtgtggaaactttatgttaacccaattgttgaggcattgtggacgaggcaagtcttcatctctgtcagcaatcggtgattgaagacccagaggccggacctgaccattgtgtgccggtcaccggagtgtgagtggtctgaacttgggatggtaatggctttgcctgtccatcctgcggggtgtggacagtgatagaacttgaacaggcttgacccctcctagcaagggattgtgaattgtgatcaccaatccatggttcagacttgcaccaatcatgtggcttgcgttttttagaaataggtgcaccattgcctcttccaggtggtgcccagaaggtttcgaccaaggtctgtgaaagaagcactttgcaatcagcggtgggttcagatatatcacatgaacgagcagacaaggaaacattctaacttggaaaaagtttctattgggttctattcggcaatggaaaaacggtgtatcatgtaaattaaactatactagttcactttggttttgtaagttaaaaactttaacgctgatcaagacaataccct

SEQ ID NO: 96805 - DNA, 523 bp, Zea mays
  Clone ID: MRT4577_19801C.1
gcttctagaacgtgcatcggacgccctctatttttctttctctttttttatgtatatatacgtttttaatgggtagcacacagtctagtcgttttggaagcaatggagacgagtgctcttttgctgacaattgaggtgacgacctaagcggccgtcatcacctatgggcacttaattttcgtcatagaacactgattgttctacaaccaaacaacccagaacagactttgcttattctattcaacgattgacaggacacctcatagaaccagatgcattgattacggcaggcaccttctgtacaacacggcttttgaatgacaccagaccaccaagccttctcatgcgggtaggcgccgacaacaaatccgtagggggtagctaacaagcctatactcaattacaatttcctcaggctggtgaagtttaaaaaatatcctagaacgcacttcgactcggtcaggctgacctactaaacctttttcacctttttcaccttgtcaaggattatcattcacaactt

SEQ ID NO: 96806 - DNA, 1874 bp, Zea mays
  Clone ID: MRT4577_19802C.1
ggtaccctcgcaggcccggccgggactagcagccggcaggccgcaacccgcaaccgtggcaccctgcgcgcctcgaacaatctcgtttcgtactcccgtttcgtttctccccctcgctccccagccgcatctcgagcgcgctctcggcggccgtccacgtctcggtcccacgcgctgctcgcttgctcgccggcggggcgcgagggcggtggcctaggtcgtacccagcgaagcgcggcgtgccacggggtgggggttggctcgggaccatcgagcctgtccggaattttttctggcgcgtgatttgccgctgagaaagcatcggaaaagggaacggggatttactctcagtagccgcgagctacccaccgtcccctggtcgattcagtgcaaatcctccaggtttctgggtcttaatggcttcctcagatatctctgttgatattcgtcctgacataaactcatttgatcattttttaagcatgcgatacattgcaacagatagaccctggctgaaattatatggaataagagttcagcctgtgccaccattcagcagtttgagctacaaacctgatccagcgctcattcatcattgcctacctgatgaactaatgctcgagatttttacaagaatgagcccatatactttagggagggctgcatgtgtctgccgcaagtggaaatatactgcacgcaatcctactttgtggcgtgctgcatgcttgaaaacttggcagaggagtggaatggaggcaaactacatgatggttcggtcgttgtatgattcctcttggaggagaatgtggctacagagaccaagaatccgaattgatggtctctatgtaagcaggaacacatacattcatactggagttacagaatggcaattcaagaaaactgtcaatgtggtttgctactaccgttacttaagatttttcccgagcgggaagtttctctataagatctctccagataaagttaaagacgctgttaagtgcatgcatttccgggcatcaaaggctgattgtgtatttaaaggtgactacgtgctgtcagaggatggccagatagaaatggctctcctgtacccagggcatcggtacacgcttgtcaggatgcaccttaggcttaggggcaccacagttggtgcaaataacaggttggatgtactgaagattctaaccaccggagtgaatgcaactgagctgcaaaactggaaaggaagcatactagaactcgttgagggctgggaggaggatgagacgcatgacccggatgtgcctgccgtttcccacagcaggggtttgtcaccctttgtgtttgttccgtttgaggaggctgatacttcggtgttaaacctccccgtggagaagatggactactacgtccctgggtgagctcttcatgacgacgatggccattggagaatgagatgatgggtggtcatgttacaggttaaaatgatgatggccaacgatctccttccctctcagatcccttgctagagcaaatgtgtaaatacagtgttgttttgtttacacttttcggttggtcgcatgctgttgtatgacattatgtttgttgatacctggaaacaggttttattattgttggtgcttgaaaatggtgtgggaggaaactcactatcaaaaaaagtagagctaccctcctgaagtaatgtgggtctgtattattatagaaacaagcagtctatcgttgcgaactttttagtctgtatgtattttcgtattgtacagttataaccttggcaccgagcatcgtttaacattaatgactaaaaatagatgggctgtaataatgtgccatatatgatcaatctgcttgtaccttttggtgtcttatataaggaa

SEQ ID NO: 96807 - DNA, 637 bp, Zea mays
  Clone ID: MRT4577_19803C.1
ttttttttttttttttaacggctcaaactcgatggttgtatttcaagagagaaagcaggaaatataacatagtgtcatctgtcacaacatgtgacagagaccagacatggaaacaatatcagatgcaacaaaagattgaggcaggactgaacaagataaaagaaacctctgagacacaacacaggaatcaggacactacaacatcatctgaataactgatctacacagtcagttatcaggacacttttttctactgagaagaggaagctaaactgtcctcaaccaggactacactagaatacttatgagaaaataatttagagggatggggagattgaagagaagactggagcggagaagtgactgatattctgacacgcccccacgcgaacagaccgggttgcctaaagcaggctacactcggactcgagtccgtcggatatttcgtcgagagacaggagttcggcttgggctagaagacttgcggttggatcgacggagccttctgtcaatccacacacagggtcaatgggagacaccgaggtgaaatgggcttctgggtcgtttattcgtgcattcaattgatcacgatacttttttagcagttcggggtgcagagagaagcagcgagactcgg

SEQ ID NO: 96808 - DNA, 353 bp, Zea mays
  Clone ID: MRT4577_19804C.1
taaaaaaatatcctggggggggttaccctcctcactaataagtctagaaaaacacttagacttataaaaaggccaagcccaccgacacttaacaccatcacaacagcataaggtttttcctcaaaaaacactttttttgttgtagggaacaacaccttttttttcataatccttgctgggatacttgcttcatctatccgtcttcaaattaatccatcccctttatcctgcggattagcccgcccttggggtccacctgggtcagcttccacatcacccaagaaattatccgacctaattgaaatgcactatgcacatgaaagcatagcactgacttcacttaacaaccaaaa

SEQ ID NO: 96809 - DNA, 169 bp, Zea mays
  Clone ID: MRT4577_19805C.1
cgggtccggaagtcagccaaacccccacgtcggcgacgcttcctacctcttctcccaaaatccgcgccgggactcaactaatccacgaaattctgggtgccattgtgatcgtgcttacctggtcgtggctataaactaactgacgtgcatctcatcatttccctcctcc

SEQ ID NO: 96810 - DNA, 293 bp, Zea mays
  unsure (1)..(293): unsure at all n locations
  Clone ID: MRT4577_19806C.1
cggnngggggaaatacgacatcggcacagtaatcagcagacggcaacaaacttaaaccatgtcgtgaactgagtttgtggattatatgagtttgacatgaattgatgaatttccagcctgaaaatttttgccagcaggattgttttggtgtagggaggtgggtcacaggattaggtgaactaaggatcagtctgtgttcatttgtattaatttgtgaacagatagctataaactatgcttccaaagtttaatgatgattgaattaatcttattttttgttttaaggtttgcat

SEQ ID NO: 96811 - DNA, 228 bp, Zea mays
  Clone ID: MRT4577_19807C.1
gtcatgtgcctgtctatattaccatgtggcatgttaatggccaaaaaaaaaaaaaaaaaaaaaggaaaaaaaaaaaaaaaaaaaaaaaaaaaaaaaaaaaggaaaaaaaggaaggggcggtccgatcgagcggtccctggcttacgtacgcggccgtcgcactttttcagctcttgtagggggggggggtaaatccacttgacctgggcggaataacagggcggcctg

SEQ ID NO: 96812 - DNA, 634 bp, Zea mays
  Clone ID: MRT4577_19808C.1
cctcgaggcggcggggacagtcacaagaggcgggccgcatcgagttgctgtgtgcgccctcaaggtggaggtcctcgtggtcattggccatagctgctgcggtggcatcagggcgctcctctccctccaggacggcgcacctgacaccttccacttcgtcgaggactgggttaagatcggcttcattgccaagatgaaggtaaagaaagagcacgcctcggtgccgttcgatgaccagtgctccattctcgagaagggggccgttaacgtgtccctggagaacctcaagacctaccccttcgtcaaggaagggcttgcaaatgggaccctcaagctgatcggcgcccactacgactttgtctcaggagagttcctcacatggaaaaagtgaaaaactagggctacggcaattctaccggcccgccgactcctgcatcatcataaatatatatactatactatactactacgtacctaccgatatgcacccgagcaatgtgaatgcgtcgagtactatctgttttctgcatctacatatataccggatcatatcaatcgcccaatgtgaatgtaataagcaatatcattttctaccacttttctttcctaaaaaaaaaaaaaaaaaaggccccta

SEQ ID NO: 96813 - DNA, 329 bp, Zea mays
  Clone ID: MRT4577_19809C.1
acggtaacattcttgatcgataactaacatgttatgagtggagggtatattcttatcacaccgaacatgtgcatgtagcccctgtttccttctatctcgtgttctttcatgtaaccatcacaatatatatacatgttgcttaaataaacaaaaaataaaacaaggaatgtactattattatataaaataaaaccaatttaaacgctgtaaaaaaaaaaaataaaaaaaaaaaaagggctgccgaatcaaaaagatccaaacttgcgctcgccttcttaaaaaccccatatttcctccctcgtgcctccaaaattaaattcattttttcg

SEQ ID NO: 96814 - DNA, 1046 bp, Zea mays
  Clone ID: MRT4577_1980C.1
ggaatgcaccaaaacatcacttccgtttttaatattagatcgagatctgaagttggattcgttcataatatacataaaggtacatgtcaacttatacatgtttgaaaattaggaaaacacactcaaaacatttatcctagctacacaggtacgtgaccacatataactgcaacagtccaaatattgctcctgaaaggtaccatccctctcgagcatttcctcatcaagtgatcaagtattgacatggacttccagacgtctactatgaaaattttacatcgaatgaaggaatctcctccctgataagtagagcacagagtccagctgacgactgttgagggctactctaatttgcgacgattacttcgtcgaagttccagtctctaacaaggtccctggacacagcacggctgcgttgaagtcgaggagcgccctctgtaccaacttgatcactcaccacgggtggaaagggggtcactttcgatgtcccaacgctagtagaggttccagctggtgttactcttcgagctaagcaggcaacaacagctccacaccggctttcctcctctgagcttgacaccgagtagcttctaagagagtgcgaggggctgctcatgccatggcatacaagacaagcaagactcatggttgttgtctggctgctactgtgacgatctggagggtggcttgcacggatcttcgctgcgagctcctcgccggcaggctacagaccctcgccgaggagaacgcgatgctgtggacgatttggtcgacgtggaccactgccgtgtgcgtcgcgcggggcttgcagtggctacagcggagaaagggatggcgcgggcgggaaaagaagagggtaggagatggtggaacaccgtcaaggtcgggccgagaagagggcgaagggctggagatgtgggagacgagagagagagaagagatcgggaagacagagagtgaaggaagggagaagaagaatggcagaacccggcgcgtctttttttttttttttttttttttttttttttttttcccggccgagcctc

SEQ ID NO: 96815 - DNA, 1252 bp, Zea mays
  unsure (1)..(1252): unsure at all n locations
  Clone ID: MRT4577_19810C.1
gggtacctcgaggccggccggaagcggactcgcacgatcatgtacacattgcccgtccgccccaccacatccagcatcgtcgccagcctcgccacccccgcgccgtcctcctcctccggctccggccgccccaggctcaggctcaggctcatccggaacgcccccgtcttcgccgcccccgccaccgtcgtgttgcgcgcgtcatcatgttgctagtaaacgggacggcgggcagctgaggagtcaaacgagagagatcgagagaaagaaagggagggcatccaccagccgccggcgataagaggggaggagagagaggccagagaagaggaggagaagaagaagaaaatgagcagctgcctctgccttccgaaaaaaaaggaggggccagcgaaggagaagccgtccacagatacccccacctcgtcactccttcagaaccagaagccctcccaacctccacctcctccctccaaggcttcctccaagggcatggaccccaccgtcgagcgcttgaagagcgggttccagaagttcaagaccgaggtctatgacaagaagccggagctgttcgagcctctcaagtccggccagagccccanggtacatgggtgttcgcctgctccgactcccgcgtgtgcccgtcggtgacactgggcctgcagcccggcgaggcattcaccgtccgcaacatcgcctccatggtcccaccctacgacaagaccaagtacaccggcaccgggtccgccatcgagtacgccgtgtgcgcgctcaaggtggaggtcctcgtggtcattggccacagctgctgcggtggcatcagggcgctcctgtccctccaggacggcgcacctgacaacttccacttcgttgagaactgggttaagatcggcttccctgccaagattaaggtgaagaaagaccacgcatcggtgccgttcgatgaccagtgctccattctcgagaaggaggccgtgaacgtgtccctggagaacctcaagacctaccccttcgtcaaggatgggctggccaacgggacgctcaagctggtcggcggccactacaacttcgtgtcaggggagttcctcacatgggacccccagcagccatcatgaatctatatatatatatactacatgatgcatgtacgttttcagcatgcagctacatacatatatataccggatcacccaatgcaatgtgtgaatgtgtaataagcaataccatatattctaccaaaaaaaacaaaccc

SEQ ID NO: 96816 - DNA, 967 bp, Zea mays
  Clone ID: MRT4577_19811C.1
gtgcggcgctcgaggcggccagttccggtccaattcatccaccttgtccctcccggagaaccagaaggccacccaccttccaaggcaggggaggggccatggacgaccccgtcgagcgcttgaaggacgggttccataagttcaagaccgaggtctatgacaagaagccggagctgttcgagcctctcaaggccggccaggcccccaagtacatggtgttcgcctgctccgactcccgcgtgtgcccgtcggtgaccctgggcctgcagcccggcgaggccttcaccgtccgcaacatcgccgccatggtcccagcctacgacaagaccaagtacaccggcatcgggtccgccatcgagtacgccgtgtgcgcgctcaaggtggaggtcctcgtggtcattggccacagctgctgcggtggcatcagggcgctcctctccctccaggacggcgcacctgacaacttccacttcgttgagaactgggttaagatcggcttccctgccaagattaaggtgaagaaagaccacgcatcggtgccgttcgatgaccagtgctctattctagagaaggaggccgttaacctgtccctggagaacctcaagacctaccccttcgtcaaggatgggctggccaacgggacgctcaagctggtcggcggccactacaacttcgtgtcaggggagttcctcacatgggacaataagcagccatcatgattcatgaatatatatatatactacatgatgcatcatgtacgttttcagcatgcagctacatacatatatataccggatcacccaatgcaatgtgtgaatgtgtaataagcaataccatatattctaccattctaccgctttttattttcttacgccgagcattcatgtactgtgtattttatgatgaccgccctgtgctagtcaaaagacatctgctataaaaaaaaaaaaaaaaggccctagggccg

SEQ ID NO: 96817 - DNA, 253 bp, Zea mays
  Clone ID: MRT4577_19812C.1
cgccacctcgtcctcatcaatcaagtaccctaacgtgaccgggtatttcctgcaggatgagacctccacggacccgtcgacccttgactacactgcagtcaactttggcctcatcgaccgtacctaccctgccgatcaggtgctcaagaaccagggcaaggacctcactcagtgggagcgcttccagcaccaggtccagaagatgaacacggagtctggcaaggatgtcgagtacaaggtgctcttcctcggc

SEQ ID NO: 96818 - DNA, 1969 bp, Zea mays
  Clone ID: MRT4577_19813C.1
ctggccgggaagcggcactcgcacgatcaatgtacacattgcccgtccgcgccaccacatccagcatcgtcgccagcctcgccacccccgcgccgtcctcctcctccggctccggctccggccgccccaggcccaggctcatccggaacgcccccgtcttcgccgcccccgccaccgtcgtgttgcgcgcgtcatcatgttgctagtaaacgggacggcgggcagctgaggagtcaaacgagagagagatcgagagagaaagggagggcatccacacccgccggcggcgataagaggggaggagagagaggccagagaagaggaggaggagaagaagaagaagatgagcagctgcctctgccttccgaaaaaaaaggaggggccagcgaaggagaagccgtccacagatacccccacctcgtcactccttcagaaccagaagccctcccaacctccacctcctccctccaaggcttcctccaagggcatggaccccaccgtcgagcgcttgaagagcgggttccagaagttcaagaccgaggtctatgacaagaagccggagctgttcgagcctctcaagtccggccagagccccaggtacatggtgttcgcctgctccgactcccgcgtgtgcccgtcggtgaccctgggactgcagcccggcgaggcattcaccgtccgcaacatcgcctccatggtcccaccctacgacaagatcaagtacgccggcacagggtccgccatcgagtacgccgtgtgcgcgctcaaggtgcaggtcatcgtggtcattggccacagctgctgcggtggcatcagggcgctcctctccctcaaggacggcgcgcccgacaacttccacttcgtggaggactgggtcaggatcggcagccctgccaagaacaaggtgaagaaagagcacgcgtccgtgccgttcgatgaccagtgctccatcctggagaaggaggccgtgaacgtgtcgctccagaacctcaagagctaccccttcgtcaaggaagggctggttggcgcccactacgacttcgtcaaagggcagttcgtcacatgggagcctccccaggacgccatcgagcgcttgacgagcggcttccagcagttcaaggtcaatgtctatgacaagaagccggagcttttcgggcctctcgaggccggccaggccccccaagtacatggtgttcgcctgctccgactcccgtgtgtgcccgtcggtgacactgggactgcagcccggcgaggccttcaccgtccgcaacatcgccgccatggtcccagcctacgacaagaccaagtacaccggcatcgggtccgccattgagtacgccgtgtgcgcgctcaaggtggaggtcctcgtggtcattggccatagctgctgcggtggcatcagggcgctcctgtccctccaggacggcgcacctgacaccttccacttcgttgagaactgggttaagatcggcttccctgccaagattaaggtgaagaaagaccacgcatcggtgccgttcgatgaccagtgctccattctcgagaaggaggccgttaacctgtccctggagaacctcaagacctaccccttcgtcaaggatgggctggccaacgggacgctcaagctggtcggcggccactacaacttcgtgtcaggggagttcctcacatgggacaataagcagccatcatgaatctatatatatatatatacactacatgatgcatgtacgttttcagcatgcagctacatacatatatataccggatcacccaatgcaatgtgtgaatgtgtaataagcaataccatatattctaccattctaccgctttttattttcttacgccgagcattcatgtactgtgtattttatgatgaccgccctgtgctcgtcaaaagacatctgctatatataatcatctttggctagattaattataaaaaaagaaaaaaaaaaaaaaaaagcgg

SEQ ID NO: 96819 - DNA, 372 bp, Zea mays
  unsure (1)..(372): unsure at all n locations
  Clone ID: MRT4577_19814C.1
atgtgtactgaactcagaaggtttagcatttagggtattttagctaatgctaattcggtgaaagagtgtaacacccttcttgcagatatgaagttagtagaagggtgcaatgctctgctcctctttgttagtgaaaaccctatcagatcggggggaggggggatgtgtgctcggatcacctgtggcactgaactttttttgttgtggtgtggacattggctgccctctaaaatggaagtttgtttgcgcatcgagatgcgtcagctgatgaaagaaccaaatacaaggagcaggagtgatcttcctttttctcagatggaaactgcaaacgggaaacagtgtggtgtangaagaactctaacgaactcaaga

SEQ ID NO: 96820 - DNA, 1965 bp, Zea mays
  Clone ID: MRT4577_19815C.1
gggtacctcgaggccggccgggaagcggcactcgcacgatcaatgtacacattgcccgtccgtgccaccacatccagcatcgtcgccagcctcgccacccccgcgccgtcctcctcctccggctccggccgccccaggctcaggctcatccggaacgcccccgtcttcgccgcccccgccaccgtcgtgtaaacgggacggcgggcagctgaggagtcaaacgagagagatcgagagagaaagaaagggagggcatccaccagccggcggcgataagaggggaggagagagagagccagagaagaggaggagaagaagaagaagatgagcagctgcctctgccttccgaaaaaaaaggaggggccagcgaaggagaagccgtccacagatacccccacctcgtcactccttcagaaccagaagccctcccaacctccacctcctccctccaaggcttcctccaagggcatggaccccaccgtcgagcgcttgaagagcgggttccagaagttcaagaccgaggtctatgacaagaagccggagctgttcgagcctctcaagtccggccagagccccaggtacatggtgttcgcctgctccgactcccgcgtgtgcccgtcggtgacactgggactgcagcccggcgaggcattcaccgtccgcaacatcgcttccatggtcccaccctacgacaagatcaagtacgccggcacagggtccgccatcgagtacgccgtgtgcgcgctcaaggtgcaggtcatcgtggtcattggccacagctgctgcggtggcatcagggcgctcctctccctcaaggacggcgcgcccgacaacttcaccttcgtggaggactgggtcaggatcggcagccctgccaagaacaaggtgaagaaagagcacgcgtccgtgccgttcgatgaccagtgctccatcctggagaaggaggccgtgaacgtgtcgctccagaacctcaagagctaccccttcgtcaaggaagggctggccggcgggacgctcaagctggttggcgcccactcacacttcgtcaaagggcagttcgtcacatgggagcctccccaggacgccatcgagcgcttgacgagcggcttccagcagttcaaggtcaatgtctatgacaagaagccggagcttttcgggcctctcaagtccggccaggcccccaagtacatggtgttcgcctgctccgactcccgtgtgtgcccgtcggtgaccctgggcctgcagccgggcgaggccttcaccgttcgcaacatcgccgccatggtcccaggctacgacaagaccaagtacaccggcatcgggtccgccatcgagtacgctgtgtgcgccctcaaggtggaggtcctcgtggtcattggccatagctgctgcggtggcatcagggcgctcctctcactccaggacggcgcagcctacaccttccacttcgtcgaggactgggttaagatcggcttcattgccaagatgaaggtaaagaaagagcacgcctcggtgccgttcgatgaccagtgctccattctcgagaaggaggccgtgaacgtgtccctggagaacctcaagacctaccccttcgtcaaggaagggcttgcaaatgggaccctcaagctgatcggcgcccactacgactttgtctcaggagagttcctcacatggaaaaagtgaaaaactagggctaaggcaattctaccggcccgccgactctgcatcatcataatatatatactataactatactactagctacctaccgatagtcacccgagcaatgtgaatgcgtcgagtactatctgttttctgcatctacatatatataccggatcaacaatcgcccaatgtgaatgtaataagcaatatcattttctaccacttttcattcctaacgctgaggctttttatgtactatatcttatatgatgaataataatatgaccgccttgtgatcta

SEQ ID NO: 96821 - DNA, 1078 bp, Zea mays
  Clone ID: MRT4577_19816C.1
tcagttttctaggttcattgaaaagaaggactatttggagatccagaagctaagtggtcagcacttaatggcaaaccagatgcagccaagtggtggggttcatatggagggcaatgccctgaattacaaaggattgcaagacgcattgtctctcaatgcatatcatctagtggatgtgaaagaagttggagcacctttgctctagttcacacaaaattaagaaataagctaggctttgagaagctgcacaagttggtgaaagtgcattataacctgaagttacagatcgaacaatttgaagctgattttcaaagccttcaagaaaaggattctgatccatgtagtatgctgatggatgttgctctttatgatgaccaaaacccaatcatggattggctaaacaattctatgagtgattctgcaccaactctggatgaatatgatgatagtgatcttgattggagcacacctagcaggtttgtcactgaaagtttacaaatgggcatagaagaggtggctgaatttaagagggacctttatatggggaaaaaaaggttgtaaaaacaaacagagaatgcaatgggatggagaagatgctgaaggtaccgcagaagactatgaaactgattcttcacaagaacaaggcagcccaatttatgctgagtcaggtgacagtagttccaatgatgaaggtgatggcaataatgatgttggtgccgatggaagtggtggcactagggctgctgatggtcctgccaaaggttcgagacatggggaaccaactcctttgcgtccaagatcaacaagaaaaaggaagccaactctcaagagcattactgaattataaatgtgttgtatggctccaaggaaaagatctggatatggcaatgcttcactgattaatgtcttttggcgatgtgtcgtcggcttaaatagacgcctaacttttgtaacataataatatttgaagctgccattacttttactatctaatggactgtaatatgtgatttggtggtgacttaattatgttatgtactaatatttgaggctgccattacttgtccacttcatattt

SEQ ID NO: 96822 - DNA, 991 bp, Zea mays
  Clone ID: MRT4577_19817C.1
gagaaggtgagcagctgcctttgcctcccctgtcgttataaaaaggatcggagcgggggtcaccgaaggcgtccaattcatccaccttgtccctcccggagaaccagaaggctacccaccctccaaggcaggggaggggccatggacgaccccgtcgagcgcttgaaggacgggttccacaagttcaagaccgaggtctatgacaagaagccggagctgttcgagcctctcaaggccggccaggcccccaagtacatggtgttcgcctgctccgactcccgcgtgtgcccgtcggtgacactgggactgcagcccggcgaggcattcaccgtccgcaacatcgccgccatggtcccagcctacgacaagaccaagtacaccggcatcgggtccgccatcgagtacgccgtgtgcgcgctcaaggtggaggtcctcgtggtcattggccacagctgctgcggtggcatcagggcgctcctctccctccaggacggcgcacctgacaccttccacttcgttgagaactgggttaagatcggcttccctgccaagattaaggtgaagaaacaccacgcatcggtgccgttcgatgaccagtgctctattctagagaaggaggccgttaacctgtccctggagaacctcaagacctaccccttcgtcaaggatgggctggccaacgggacgctcaagctggtcggcggccactacaacttcgtgtcaggggagttcctcacatgggacaataagcagccatcatgaatctatatatatacactaatgcatcatgtacgttttcagcatgcagctacatacatatatataccggatcacccaatgcaatgtgtgaatgtgtaataagcaataccatatattctaccgcttttattttctaacgccgagcattattcatgcactgtgtattttatgatggccgccctgtgtgttcgtcaaaaaacatctgctaaatataatcatctttggcgagatt

SEQ ID NO: 96823 - DNA, 651 bp, Zea mays
  unsure (1)..(651): unsure at all n locations
  Clone ID: MRT4577_19818C.1
ggaccctcggggtggccggaagcggactcgcacgatcaatgtaccattgcccggtcgtgccccacatccatcgtcggcccgatcgtcgccacccccgcgccgtgctcctcctccgggtccgggcgccccaggctcatgctcatccggaacgcccccgtcttcgccgcccccgccaccgtggtgtaaacgggacggggggcagctgaggagtcaaacgagagagatggagggagagaaagggagggcatccaccagccgccggcgataagaggggaggagagagaggccatataatatgaggagaagaagaagaaaatgagcagctgcctctgccttccgaaaaaaaaggaggggccagcgaaggagaagccgtccacagatgcgggcacctcgtcactccttcagaaccagaagccctcccaacctccacctcctccctccaaggcttcctccaagggcatgggccccaccggcgagcgcttgaagagcgggttccagaagttcaagaccgaggtctatgacaagaagccggagctgttcgagcctctcaaggccgggcagagccccangtacatggtgttcggctgctccgactcccgcgtgtgcccgtcggggacactgggcctgcaacccggggaggcattcaccggg

SEQ ID NO: 96824 - DNA, 986 bp, Zea mays
  unsure (1)..(986): unsure at all n locations
  Clone ID: MRT4577_19819C.1
gggtacctcgaggccggccgggatccatccatccatagatccctcacctcactcactcgtgaagaaccagagaacccacccaccctccttcatctcctacatccacatctatccaagaaggtccgttctctcctccccgctcccctcagcaataatctccgcacggcaacctcgctccacccttgtggccatgggcgacgccgtggagcacctcaagagcgggttccagaagttcaagaccgaggtgtatgacaagaagccggagctgttcgagcctctcaaggccggtcaggcccccaagtacatggtgttcgcctgctccgactcccgcgtgtgcccgtcggtgaccctgggcctgcagcccggcgaggccttcaccgtgcgcaacatcgccgccatggtcccggcctacgacaagaccaagtacaccggcatcgggtccgccatcgagtacgccgtgtgcgccctcaaggtggaggtcctcgtggtcatcggccacagctgctgcggtggcatccgggcgctgctctccctccaggacggtgcacccgacaacttccacttcgtcgagaactgggtcaagatcggcttccctgccaaggtcaaggtgaagaaagagcacgcctccgtgcccttcgatgaccagtgctccatcctggagaaggaggccgtgaacgtgtccctggagagcctcaagacctaccccttcgtccaggaagggctggccaaggggaccctcaagctggtcggcgcccactacgacttcgtgtccgggaacttcctcgtatgggaaacttagccacacccgccgctcagcgcgcggcttcgtcgtcacaactcctatatcttcataaatatatatatccactacctatatatacctaccgatatgtgaatgcgaggagtactattacctgcatgttttcagcagtatgcagctacgtacatatatatgtaccggatcgnnnnnnnaaaaaaaaaaaaaa

SEQ ID NO: 96825 - DNA, 537 bp, Zea mays
  Clone ID: MRT4577_1981C.1
cccctcgagttttttttttttttttttttttttttttttttttttttttttttttttttttttttttttttttttttttccaaaaacgggggttttttttggggaaacatgaccatccttgagtaccccagttttaaggaatttcgttttttcccacgggccatatttgtttaatggcctttaacggggggaaccacacccataaacctttggaaaaaagggggctagcccatatggggcccgccccggggaaaaaatttatcatttcatttgcccccgaatttaacaaactggtatttaccggggaggggcccgccctgaaacccctgcccgttggtgccaagggctttaacccccggttcaaatcccaggcccagcccccctttgttgccctggcccacaatcctacccgggagggccccccccccccccgtgttggccaccaaaaaacattccccccccccggcctggccggggggccccgggccccccaaaaagcccccccacccttactttttcccccaaaaaaggggtttt

SEQ ID NO: 96826 - DNA, 644 bp, Zea mays
  Clone ID: MRT4577_19820C.1
tgggacctcgagccggccgggaaataattcatgagaagctgcctctgccttccgataaatcaggaggggccagcgaaggaggagccgtccacagatacccccacctacgtctcgtccttcaggaacctagaagcgcctacgcaatgctgccagcctctcatccctcccaaggtgttaccgtccaaggcgcatagcagcccaccgatcgtagcgacttgaatgagcggcattccagatagttcaagtaccgaggtactcatgactagaagccggagctgttcgagcctctcaagagcggccagagccccaggtacatggcgttcgcctgctgcgactcccgcgtgtgcccggcggtgacactgggcctgcagcccggcgaggcattctctgtccgcaacatcgcctccatgtgcccaccctacgacaagatcaagtacgccggcaccgtgtccgccatcgagtacgccgtgtgcgcgctcaaggagcaggtcatcgtggacattggacacagctgctgcggaggtatcgaggagcacatctcacttcttctaggcgcggccgacaattctacttccgtaggcgtaatctccagacaaaggctggagtgacatctgctgcgtgaaaaatcactgatagcctccgac

SEQ ID NO: 96827 - DNA, 594 bp, Zea mays
  unsure (1)..(594): unsure at all n locations
  Clone ID: MRT4577_19821C.1
tccaccgcggtggcgngcccgccctctttttttattttttatttcttttctttttttttcttttgctactgaaaccggggggggggggggggggcctttttaagataaaaattcagtgccatacaaaaaaccccactacccccaacgtttattttttgtcccacataacctgtctgaaagcaaataacatcgaaataccggcaaaaactgccccttgtaaaacctgattcaaacaaaagtcggccccgatcccaaaaaaaaatcccaccttcgttttccaattccaatccaaaacaacggcctttttgacgtccattttacacggtgtaccccccacctctgctgggcttggctctcttaaattcgtcatgaaaagtgtccgtaatcttctcgttgtaaacaataacatccttccactttttgccaatgtttacctgaacagcttcattggtggcagtcctaatccataatgccagcttatttccttttgcccggacactaacaacaattccacaaatatcctctttttaataaaaactgctccccaataagggccataaacgtttcaagccacatggcctaaaagattgcctt

SEQ ID NO: 96828 - DNA, 4147 bp, Zea mays
  unsure (1)..(4147): unsure at all n locations
  Clone ID: MRT4577_19822C.1
ccggccgggagcacatgggcttagctagcgccgggccgtgcaaaccctaaccgcccaccgcgccatggatcgggcgggcatagagttcgtggccagcggcggagcgctcggtagagcttagacctcatcagatttgttctactctacttaatcctggttgcatctcatgcatgcatgtttgttctccttattattgtctgtgcttttattcaagctctgtccaatgctatatatgctccattgctccgccactgctcgtcgctaattcgatcggcagcgcgggcatcggagcagccacgcatgcatgcatcagccaagcttggacggaatgtatggagcagctgggacggttccagatgattaaatattatactccgtacaacttatacagcatcccagatggattctttgtaaccgaacaagtcaggatgaatacggcgggcatcggagaaagggcatggaccccaccgtcgagcgcttgaagagcgggttccagaagttcaagaccgaggtctatgacaagaagccggagctgttcgagcctctcaagtccggccagagccccaggtacatggtgttcgcctgctccgactcccgcgtgtgcccgtcggtgacactgggcctgcagcccggcgaggcattcaccgtccgcaacatcgcttccatggtcccaccctacgacaagatcaagtacgccggcaccgggtccgccatcgagtacgccgtgtgcgcgctcaaggtgcaggtcatcgtggtcattggccacagctgctgcggtggcatcagggcgctcctctccctcaaggacggcgcgcccgacaacttcaccttcgtggaggactgggtcaggatcggcagccctgccaagaacaaggtgaagaaagagcacgcgtccgtgccgttcgatgaccagtgctccatcctggagaaggaggnnnnnnnnnnnnnnnnnnnnaacctcaagagctaccccttcgtcaaggaagggctggccggcgggacgctcaagctggttggcgcccactcacacttcgtcaaagggcagttcgtcacatgggagcctccccaggacgccatcgagcgcttgacgagcggcttccagcagttcaaggtcaatgtctatgacaagaagccggagcttttcgggcctctcaagtccggccaggnnnnnaagtacatggtgttcgcttgctccgactcccgtgtgtgcccgtcggtgacactgggcctgcagcccggcgaggccttcaccgttcgcaacatcgccgccatggtcccaggctacgacaagaccaagtacaccggcatcgggtccgccatcgagtacgctgtgtgcgccctcaaggtggaggtcctcgtggtcattggccatagctgctgcggtggcatcagggcgctcctctccctccaggacggcgcacctgacaccttccacttcgtcgaggactgggttaagatcggcttcattgccaagatgaaggtaaagaaagagcacgcctcggtgccgttcgatgaccagtgctccattctcgagaaggaggccgtgaacgtgtccctggagaacctcaagacctaccccttcgtcaaggaagggcttgcaaatgggaccctcaagctgatcggcgcccactacgactttgtctcaggagagttcctcacatgggcnnngtgnnnnnctagggctacggcaattctaccggcccgccgactcctgcatcatcataaatatatatgctatactatactactacgtacctaccgatatgcacccgagcaatgtgaatgcgtcgagtactatatatctgttttctgcatctacatatatataccggatcaatcgcccaatgtgaatgtaataagcaatatcattttctaccacttttcattcctaacgctgagctttttatgtactatatctcatattattattcatcatataagatatagtacataaaaagctcagcgttaggaatgaaaagtggtagaaaatgatattgcttattacattcacattgggcgattgttgatccggtatatatatgtagatgcagaaaacagatagtactcgacgcattcacattgctcgggtgcatatcggtaggtacgtagtagtatagttatagtatatatatttatgatgatgcaggagtcggcgggccggtagaattgccttagccctagtttttcactttttccatgtgaggaactctcctgagacaaagtcgtagtgggcgccgatcagcttgagggtcccatttgcaagcccttccttgacgaaggggtaggtcttgaggttctccagggacacgttcacggcctccttctcgagaatggagcactggtcatcgaacggcaccgaggcgtgctctttctttaccttcatcttggcaatgaagccgatcttaacccagtcctcgacgaagtggaaggtgtcaggtgcgccgtcctggagtgagaggagcgccctgatgccaccgcagcagctatggccaatgaccacgaggacctccaccttgagggcgcacacagcgtactcgatggcggacccgatgccggtgtacttggtcttgtcgtagcctgggaccatggcggcgatgttgcgaacggtgaaggcctcgccgggctgcaggcccagggtcaccgacgggcacacacgggagtcggagcaggcgaacaccatgtacttgggggcctggccggacttgagaggcccgaaaagctccggcttcttgtcatagacattgaccttgaactgctggaagccgctcgtcaagcgctcgatggcgtcctggggaggctcccatgtgacgaactgccctttaacgaagtcgtagtggggccaaccacttgacgtcccgccggccagcccttccttgaccaaggggtagctcttgaggttctggagcgacacgttcacggcctccttctccaggatggagcactggtcatcgaacggcacggacgcgtgctctttcttcaccttgttcttggcagggctgccgatcctgacccagtcctccacgaagtggaagttgtcgggcgcgccgtccttgagggagaggagcgccctgatgccaccgcagcagctatggccaatgaccacgaggacctccaccttgagggcgcacacagcgtactcgatggcggacccgatgccggtgtacttggtcttgtcgtagcctgggaccatggcggcgatgttgcgaacggtgaaggccttcgcgggctgcaggcccagggtcaccgacgggcacacacgggagtcggagcaggcgaacaccatgtacttgggggcctggccggacttgagaggcccgaaaagctccggcttcttgtcatagacattgaccttgaactgctggaagccgctcgtcaagcgctcgatggcgtcctggggaggctcccatgtgacgaactgccctttgacgaagctgtagtgggcgccaaccagcttgagcgtcccgccggccagcccttccttgacgaaggggtagctcttgaggttctggagcgacacgttcacggcctccttctccaggatggagcactggtcatcgaacggcacggacgcgtgctctttcttcaccttgttcttggcagggctgccgatcctgacccagtcctccacgaaggtgaagttgtcgggcgcgccgtccttgagggagaggagcgccctgatgccaccgcagcagctgtggccaatgaccacgatgacctgcaccttgagcgcgcacacggcgtactcgatggcggaccctgtgccggcgtacttgatcttgtcgtagggtgggaccatggaagcgatgttgcggacggtgaatgcctcgccgggctgcagtcccagtgtcaccgacgggcacacgcgggagtcggagcaggcgaacaccatgtacctggggctctggccggacttgagaggctcgaacagctccggcttcttgtcatagacctcggtcttgaacttctggaacccgctcttcaagcgctcgacggtggggtccatgcccacgacggtggcggggcggcgaagacggggcgttccggatgagcctgagcctgggggccggagccggaggaggaggacggcgcgggggtggcaggctggcacgatgctggatgtggtggcacggacgggcaatgtgtacat

SEQ ID NO: 96829 - DNA, 1576 bp, Zea mays
  unsure (1)..(1576): unsure at all n locations
  Clone ID: MRT4577_19823C.1
aatccggccgggaaactacggccagcagtcttccccggccggcagtgccagccgccttgcgcttgccctctctgcgacgactgggtgcgccgccgccgccgctgtcctacgtcaggtgtcgaagccttcgccggcgaagagcgctcaccagattatccatctactagattcacccctggtggaggaggagaagaaggtaagcgaagatgctacggcggaacatacgtcagcgtcgggagtacctgtactccaagagcctcgagggcccccagcgggcgctgttcgagaagaagcgccggatccgggcggcgctcgaggagggcaagcccatccccaccgagctccgcaacgaggagcacgacctgcggaggcagatcgacctcgaggaccaggagcgtcaagttcccaagagcatcgttgacaacgagtacgctactgccaccattcgggagcccaagatactattgaccacttctcgcaatcctagcgcgcccctaactcagtttgttaaggagctcaaggttgtcttcccaaactcacaaagaatgaaccgtggtggacaggtcatatcagaaattgtggaggcctgccgctcacatgatataacagatcttattctggtccatgaacaccgtggtcaacctgatggtttgattgtctcccatctaccacatggtccaactgcatactttgggttgctcaatgtggtgacacgtcatgatatcaaggacaggaagacgatgggcaaaatgtcagaagcttacccccatttaatactggacaacttctcaacccagattggcgaaaggactgcaactattctgaagcacctctttcctgtcccaaagccagattcaaagcgaataattacatttgctaacagagacgattacatctctttcaggcatcatgtatatgaaaaaccaggtggccccaaatcgattgacctgaaggaggtcggcccccggttcgagttgcggctgtaccagatcaaactaggaaccgtggaacaaaaggaagcgcagagcgagtttgtgctgcggccctacatcaatactgccaagaagcaaaagacgcttggagcgtgagctacactgcagtacagaacttaatttttttttggtcttcatcgtttatgctgtagtagcaacattcacagggtgattagatcaatatctgtcaatctaatagaagccgcaatgtacccctgactcgaacccaagctggctgacttttttttttttgtcacggatgtgggctccacatgtcagtcctttgtgtctaaaaaaaaaaaaaaaaaaaaaaaaaaaaaaaaaaaaaaaaaaaaaaaaaaaaaaaaaaaaaaaaaaaaaaaaaaaaaaaaaaaaaaaccggggcggccccactaaagggacaaaaaaaaaaaaaaacacaaattcaatgctcctaaccctttcttttttggggaaacggattgggaaacccttgcccttngtccaacctaattgggttggggaacactcccggtttcccaactaaggggcaagagaaaaaaagcccttcccaacagcttttccttcaataaaaaaaagggaaa

SEQ ID NO: 96830 - DNA, 597 bp, Zea mays
  Clone ID: MRT4577_19824C.1
gccggccgggtcgaatatttttttttgagttcagttgctgtaaactactactgttatggagaaacgaacgaatacaacaactgtgacctgaaaaaaaaaaaaaaaaaaaaaaaaaaaaaaaaaaaaaaaaaaaaaaaaaaaaaaaaaaaaaaaaaaaaggaaaggaggagaaataaagaaaaggggaacccccggaccccggggaaagggaaatataaaaattataagggcccctggggccgggggggccctgaaacccgggggtcccccggggtggggggttttgttttttgctttttgtttcccgttttcctcgggggggggcccgggccccctttccccctatttgggggccttttacccccgttccctgggcgggtttttaccagggggggggggggaaaacccgggggtccccccccttattccctttggggaaattccccttttggccagtgggggatataagcataaggccccccccgatgcccctttccaaaagttgcccccccttttgggcgaagggaccttgacacggttaatttttttttaaatttcgcgctaaatttttgttaatccgggttttttttttaaccg

SEQ ID NO: 96831 - DNA, 495 bp, Zea mays
  unsure (1)..(495): unsure at all n locations
  Clone ID: MRT4577_19825C.1
acctgctcggaccctagtaccggccgccagtagctgaattccccttaacatggtaacaacgcnanggcgtggtttttttttatttttttttttttttagataatttttttggtcacaaactttataaacatgcctatcactaaattgaaatggacacacatcttattaaaatacatagccttattgacatcatactgacatccatattaaccactgaggggggaggcaatgactaatgttcaggattgctgcattttaactaaagacccgcatttcaaagccttgccttaaaatattacttagcagtatttattgtgcttaaatcatttttcgagttctgtatcttatgaatagtatgaagaatatacagagtccatgaaaggaagatcaatgactcatataaattacttactggaaaatgtcccgatgaaacccgctcnggcctgcttntnnaggggcataaaaagtactctgcgttggttcccccggcttagg

SEQ ID NO: 96832 - DNA, 522 bp, Zea mays
  unsure (1)..(522): unsure at all n locations
  Clone ID: MRT4577_19826C.1
ttgatcattagtttctccatctacctactgtttagtttgtttcttctagctctgtttcatactccagggccagagtcttgctgtatatttgttgagtaatagccatgtttgtatgtggactattccctgaaggttatccactaaattgttcatttccagatttagataccatgcctaaatgtagtgccctgataccatgaattagctgagatccaacacctattttattgatcacaattgtacttttatgtatacaacggcacatgatgctcttgatctgctccataaaaagctaaaagtgcatgatctangaatagaaggagcgggtgcctttgttaaccatagcattttgcaaacttttaccatgaatgtatgattgccgaacttgttaactgaatttatcagttgaactactttgcttatagcatacacacttaacacaatatcagcctgtgaaattctgggaaggtggattttgctttttttcccttgtaattcgcaatttcacagatgatcttgaat

SEQ ID NO: 96833 - DNA, 1699 bp, Zea mays
  Clone ID: MRT4577_19827C.1
cgtccatctgggcgtcccctctcagttactgtgctgctgagaaaattcttaccgcaggtgtacagttccatgctcaactagtgaaagtcggatatgtctcatctatatccactggcaacttgctgatcagtttttattcacgatgcagccgagtgggggttgcgcttccggtgtgcctgtgtccgacgccttgatgtcctgggacgcggactgcgggaccttcgggcgagccccagatatatcaggtggaatcatgtctccagttatttgcactgatgaggcactctgtgtgcaacccaaatgacgtcacatttgcaactatcttcagtgtctgcactaatcatgcatttcttgtacttggtaaaagtgtgcaagccctacagatgagaatgggttttgattcgtatgtgcatgtgtccaatgcattgatatcaatgtatgcaaagtgcgggagtattggtgaagcacgagctgtatttgagagcattagatgcaaagacctggtctcttggaactccttgatctttggatattcacagcatggccttgctgagcattgcctatacttgctaagagaaatggaagggcatataacaccggatgcaatctccttcctaggtgtgctctcatcatgccggcatgcatgccttgtggcagagggccgacggtgcttcagggcaatgattgaacatggagtagtaccagagatagatcactactcatgtatggtggatctttttggccgtgcagggctgcttgatgaagcatgggatctgatccagacgatgcccatgcctccaaatggtgttgtatggggctcccttctagcttcctgtagggtgcatggaagcacttggatcggcatacaagctgcagagcaccgtctaaagctggaaccaagttgtgctggaattcatgttcagctagcgaatttgtatgggagcattgggtgctgggatgatgtggcaagagtgaggaaggtgatgaaggagagagggctgaaaacaaacatcgggtgcagttggatagaagttggcaataaagtttatacatttacagcagaaaacagatcaaagaaccaggtaaacaatgtcctggttgttcttgattgcttgcagtcacatatggatcacgagtatgatatactactgatcgagggtctggattgggattatcctgagcatatcaagttcaagtttatccactacataaatttgtaggtgttccctctcaatttcaaagttcggtggcacgtggcactcaatacatgaattaagagccggcattcgatatttggaatccaccagaagtgctcggatttctcccaggtgagccgggcttttgagccagagcctgcgcctgcgcctgcgcctgctcgctctgtccttgtgccgctcagacctgaaggtttggtccccccttatgatttttagaatgttcggttgctttttagtcgttgcataaatgatgagaggggggctgagaaaaagtagaaccaaaacctgtgagccttagatcttcccgccaatctggtttgtacattgttggttgctttttagtcgtaacataaaaaatgagaggggggctgagaaaaagtagaaccaaaaactgtggccccccccccctccccccaatttggtttgtcccttgttggttgctaaagaaaaaaaaaatgtgaaggttttctattttttttttt

SEQ ID NO: 96834 - DNA, 659 bp, Zea mays
  unsure (1)..(659): unsure at all n locations
  Clone ID: MRT4577_19828C.1
cattgggtacctcgaggccggccgggatggttctataggaaggtcccaaaccttgtaaatccatcacttttctcaccattgacgtcttcacagacaacaatggtgtgcactaattctgtagtagcaattgctccacctcaacatcctcagactgctcagcagccgcaaagtgctcccttgcttcagccttttctattacctacggcttcaccatctccaccatatgggactccattacttcaaccatttccgccacctaatccatcgccatctcttgcgtctgcaccagtcttgagcccagcactgtctagagacaaagtccgagatgcattactgagacttgtggagaacgatgaattcatagatttagtctacggcgagatcatgaacagacagtaatggattttcaaggtacagtcctctccatcaggctagcttgtgcttggactctgtcattatctgttgtctaggctatttcaagttatcctgtaaattcattgatgaaatccttcggtttgtggagcttgtgctattaatgtacttttgacatttacaaagaaaaaaaaaaaaaaaaaagcggccacagttttgttattagaacaatcacggggcttttgttcggccggggtgaatataaaaaanggaaggacggaaactca

SEQ ID NO: 96835 - DNA, 1396 bp, Zea mays
  Clone ID: MRT4577_19829C.1
cgcgcactctcacctgccttccttctgccagctgctgactcatctatcagctcgctcgcacgctgcagaacgaacgaagctgaaggcggcggcggcggctagccatggggagggcgccgtgctgcgacaaggcgagcgtgaagaaagggccgtggtcgcccgaggaggatgccaagctcaaggcctacatcgaggagcatggcaccggcggcaactggatcgcgctgccgcagaagattggggctgaagagatgtggcaaaagctgcaggctgagatggctcaattatctgcgccgaaacattaagcacggtgacttcacagaagaagaggagcatatcatttgcagcctctacattagcattggaagcaggtggtccatcattgcagcgcagttgccggggcgaacggacaacgacatcaagaactactggaacaccaagctgaagaagaagctcctcggcaagcgcgcgccatcccggcgcgcgagggcaaaccaggatccctacctcgctgcgggaggcggcaacagcagcaccagcggtggcaacagcgccgcgacggccacgcaaaccctaagcgcgtcggctctagagcggatccagctccacatgcgcctccaaggcatgtacggcgcgttcggttgcagtggcggcggcggcaacgacgaccgcaacgccgtcgtcggggcggcggcgccgcagtggccaaagcttgaggcgctgctgcaggcgaacaggctgctcccgggatcgctgccgacggacgccatggccacaacagtgagcgtgcaacagcggcaccatcagcatctggtcgaccaccagagcctcgcagtcggcgctggtaacgccgcagcagtcgagggcgagcaacagcagctcagctctgccgatgcggcaaactacatggcgctgccaggagggggctttttcgagcggcccaagctagggttttactctccatccgccgaggctgaagctaccgcggccgccgccagcgtagagatgaactcagtcgccccgatggttggtggcggctacggcggcgccggatttgaacagtatcatcatcacgacgtgctatacgaattcctgtacagcaattacggatcggtgggcgagctggcgcaggacgggcatgtccccacgttgccggagctgcagtgcccgaacggcgctgccgtcgatggagccgatgagaagttctcggtgtggaccgcatccgccgcctgcgattacggcgcggccggcggctatcagattcagctgggaaactccatcggtagcaatctgcacgattacgtgctaggcggctatgatcaatgggagtagggtttcggcgtcatgccgtatttgtgtgtgcaaaattcttaagctcatatatagttcattttcc

SEQ ID NO: 96836 - DNA, 335 bp, Zea mays
  Clone ID: MRT4577_1982C.1
agagttcgtgtggtggccctcttcaacaaaaaccccaggcgtgaatttgggcccccccaaaccccataaaattccaccttttttaaacaggttggttttacttccttttttaacactttttttttggatttggggaaccaagggaccccccaaattctaccattcttttttttagaactttgccccaatccactaacacaaacttttacattttagcggggaagggaaggctgcacaaacttaaaggggaatttccgggcgcctttttgccacaagccagaatactcccgaaaagactaagaagggcccctttaaaagggatttttggcattccc

SEQ ID NO: 96837 - DNA, 1058 bp, Zea mays
  Clone ID: MRT4577_19830C.1
ccgaggtgatcgtggaggggaatggtttatgctgtatccattcttgtagaaaacctcgaacagcaagttcttgccgctgtctttctcttccttgtggtttttagtgctcccttctcctctggcgttttaaatcacacgaggaagacgtggccggtggttcatcatccgggcagcctgatgccaccgtcgcaggctgcgtcattgatgtctacattttttgtgctaactgatgtcttatcggtcaaacataatttatgaatcttcatattgtctgcaaaaaaaaaaaataattctttttcattttttcttccccatcttggagaagaagaaggcccgacgccctcgccgctgccaccaaaatcgcacgcgagccccaaagatccccaaaccctacacccgcccgccggcgcactcggggaccgtcgaatcgagcaggttgacggaggagaggaagcctcgaagatgttccggaaccagtacgacaccgacgtgacgacatggagcccccaggggcggctgttccaggtggagtacgccatggaggccgtcaagcagggctcagcctgcgtcgggctccggtccagcacccacgccgtcctcgccgccgtcaacaagcccgcctccgagctctcctcctaccagcggaaggtgttccgcgtcgctgaccacgccggggtcgcgctcgccggcctcaccgccgacggccgcgttctctcgcgcttcctccgcaacgagtgcatcaaccactccttcgtctacgaggcgccgctccccgtctccatgcaggaggaggagaggggcccagaagatgctgctgctgctgcacctgcacccatggacatctagaagccccatatgaacccaccaacctcacgctgcattctgagttcccaaaatactagactgcttctttagaaaattgttgtgagttgtgactcttgtgtactctttgcttccgaagaacttctctatggtctctccgacgaacagttgcagttgcttgggtttggaccgactatttatcatgtgattgcaaaaaaaaaaaaaaaaaagcggcc

SEQ ID NO: 96838 - DNA, 220 bp, Zea mays
  Clone ID: MRT4577_19831C.1
attcggctcgaggccggccgaggttttgttattacggccgtggacgattttatagggacgatttgtaagaccctaggcatgataacagacgggattgaacaagcgaaggggcgactaaacacgaagaaactgttcatctttactggggcactcgagaaaattaggggtatgatcaggtttctcgaataacacccactgaggtccaaggagtgtaaaccta

SEQ ID NO: 96839 - DNA, 1738 bp, Zea mays
  Clone ID: MRT4577_19832C.1
ttgggtacctcgaggccggccgggaaggctgcattgtaccaagattaggggttcagttaccctcgtcttgaatttgccgactcggctgcagccaaattaacgaggaagaaaaactggccggcttgccctctattcaatgggctatccgcttaccgaccttcctataatcccatatggcaccaattttgtcttttatttcactctaaaccgaggtgatcgtggaggggaatgatttatgctgtatccattcttgtagaacacctcgaacagcaagttcttgccgctgtctttctcttccttgtggtttttagtgctcccttctcctctggcgttttaaatcacacgaggaagacgtggccggtggttcatcatccgggcagcctgatgccaccgtcgcaggctgcgtcattgatgtctacattttttgtgctaactgatgtcttatcggtcaaacataatttatgaatcttcatattgtctgcaagctcatttgtacaaacttggcctccttaatgatatcgttgtggtcaatgattaaattaaattacccgaggccggctgaggcccccctaataaaaaatttaaaaaaaaaaaaaaaaaaaaaaaaaaaaaaaaaaaaaatcgcacgcgagccccaaagatccccaaaccctacacccgcccgccggcgcactcggggaccgtcgaatcgagcaggttgacggaggagaggaagcctcgaagatgttccggaaccagtacgacaccgacgtgacgacatggagcccccaggggcggctgttccaggtggagtacgccatggaggccgtcaagcagggctcagcctgcgtcgggctccggtccagcacccatgccgtcctcgccgccgtcaacaagcccgcctccgagccctcctaccagcggaaggtgttccgcgtcgctgaccacgccggggtcgcgctcgccggcctcaccgccgacggcctctccgcgcttcctccgcaacgagtgcatcaaccactccttcgtctacgaggcgccgctccccgtctccaggctcgcgctcaagctcgccgacaaggctcaggtttgcacacagcggtcatggaagaggccctatgttggcctcctagttgctggactggacgagtcaggggctcatctgtactacaactgccccagcgggaactactttgagtaccaggcattcgccatcggttctcgttcccaagccgccaagactttcctggagcgcaggttccagggctacaatgactacaccccggagcagctcatcaaggacgcccgccataaaggagacgctgcagggtgagaagctatccagctccaactgcacggtggccatcgtaggcaggaaggaggacggcaccatcgagccgttcgagatgattggcgccgcaaggatacaggaacttatcgactccatggaggtcgccgaggaggcgcccgcggaggaggccagctccatgcaggaggaggagaggggcccagaagatgctgctgctgctgcacctgcacccatggacatctagaagccccatatgaacccaccaacctcacgctgcattctgagttcccaaaagactagactgcttctttagaaaattgttgtgagttgtgactctttgcttccgaagaacttctctatggtctctccgacgaacagttgcagttgcttgggtttggaccgactatttatcatgtgattgcggaaaaaaaaaaaaaaaaaaggccccta

SEQ ID NO: 96840 - DNA, 566 bp, Zea mays
  unsure (1)..(566): unsure at all n locations
  Clone ID: MRT4577_19833C.1
ggcaattgggactctcgaggccggccgggatgccaacagatgtcgaggacgacgtctgccggaacggctcctgctcctcctcctccttcctgtgcgcctcgtgatattgggttagatagtagtctctatcttcgcggatacctgtagacatgagccatcatcatgtcacgctagatgagactgttagtcctccaggtctgctactgctatcgcacatggatcgcgcacggggctgtctcataacagtgctcatcccagatgtcaacgagctgaataccttcacatcgtagacctctgggagcagaatgcgacaggcaaaggcagatgtcaagcctgaggacgtcttccagacggtttcctagacgaaggaatacgacctcgtactgctaggccgaatgcgcgaccccgtacgctgcgatggctccataaggctaatgagatcccagcaccacgtgacaagctgctcctgctgctgctccgtctcttgcagagatcaccccaagcatagatgacgcctgatcgctcacggtattacttactcatatgtgatgctgncgatgcgactc

SEQ ID NO: 96841 - DNA, 1549 bp, Zea mays
  Clone ID: MRT4577_19834C.1
ggcaattgggtttctcgaggccggccggggctatagctatgtatatctcttctcgattcctttatctgaagcacaactaataaacgtctccgtccatgggagaagctaagctcaacaacgtgaccgccctgttgtgggccctcctcctcctgagcagcggggttcaagacgctgccgccatgccacggacgttgaactactacacgattgtctgcgacgagccaaacggaaagaacgaggacctgtaccgccccgacgacaacgtcaataaatacacccgtggatgcgatgccatagaacgcttgacggacgcgcgctgatcaccaagcatatacatatagcacatcgatttcttattattgcatgcacgtttatataagtgctcattgtcttggtgttgtaagtgtcaccacaagcatatatacatcggttatatatagcgacgctccctatccatagcgcccgctcatcagcccacgcggtgtgcggccctcgagtatggcgttcggttgccctcgagcccggccgggatagcgcccgctcgcccatcagcccacgcggccacgccgaagcatggcgctctccgtctcctccctcgccgccgccctctcccacctctccctcccatcgacctccacccccaagcctcacccggccccgctcctgcgcctgcgctccacctaccgccgcgctgttagcctcgcgctccgcgcctccgccgccgaatcgttcgaggcggacctgcccgcggaggaggtgatggctgtcgaggaggaggcggaggaggatgcgctgtcgggaatcgcgctgcgaaagtatgtgaagcagcggctgccgggcgggttcgcggcgcagcggatcaccgccacgggccgtcgcaagactgccatcgcccgcgtcgtgctccaggagggcaccggcaaggtcttcatcaacttccgcgacgctaaggagtatctgcagggaaatccaatgtggatggagtactgcaagggtacccttgatgactctagggtttgagaacaactatgacgtctttgtgaaagtacacgggggtggtctctcaggccaggcccaggccatttgccttggtgttgcccgtgcgctggtgaagatcagcaatgccaacagggttcctctgaagtcggaaggtttgctgacaagggacacccgtatcgttgaaaggaagaaggctggtctcaagaaggcacgcaagcggccccagttctcaaagcgttgaggatgttcacttgttgcattgccacttccagaggcccctttttttttctgtcaactgctgtgcaaaatctgtaatggacgcgatatatctgtagtattcttttcctgaagcaaatttcatgaggtggctatctgattctgctggttaagtgtattctgcattggacgaacttatggcccctgtttagcacaacttatttcacaattttttaaaagatttaagcagaagttgtataatgtttgtgtaaaaaaataaaaaaagaaaaaaaaaaaaaaaaaagcgaccatgtagtaagtagaagttgttttt

SEQ ID NO: 96842 - DNA, 3043 bp, Zea mays
  unsure (1)..(3043): unsure at all n locations
  Clone ID: MRT4577_19835C.1
ttgggtacctcgaggccggccgggataaacgaacgccgcgagacgaccttctcaccacttcagcgccgccacaggtaacgaagaatcatcatctacggttttcccctcgtttcgttcctagtgttatgcgatgtattgttgcttgattccgtcacgagtaatccaacgacactcgagcccctagatgagtcgatccctcagatttttttttctccggggctcgaattttccagaggggcgacatctctggagatcttgggtcgcttcgcctactgtacaccgtgaggcgcagcgaataacattctccaagattcccgtttcgtttattcttgccttaatcttgtttcttgcgctcgatccggttgttctgtgagccccgtgatggcacaatctttgagacctgagattttcttccttgatgaatatcaaaagcatgattcctgagggcctcatacgcgatcgcatattcttacccctttttctattttattataccctagatgttttgcctagttctggatttggatgatgaaatgcactgggctccgagcagtggatttcgctgtgttttgacggagatgcacttgcctagaaagcattgtctgacatacacactactatagttattagtcaaacaaatcgttgctctgatgactattatacagaaggctgcattgtaccaagattggggttcagtttctttaccttcgtcttgaatttgccgactcggctgtagccaaattaacgaggaagaaaaactggtcggcatgccctctattcaatgggctatccgcttaccgaccttcccataatcccatatggcaccaattctgtctttattttcatgtctttgtgtctgcactcactctaaaccgaggtgattgtggaggggaatggtgtatgctgtgtccattcttgtagaacacctcgaacagcaagttcctgccgctgtctttctcttccttggtttttagtgctcccttctcctctggcgttttaaatcacacgaggaagacgtggccggtggttcatcatccgggcagcctgatgccaccgtcgcaggctgcgtcattgatgtctacatttttttgtgctaactgatgtcttatcggtcaaacataatttatgaatcttcatattgtctgcaagctcatttgtacaaacttggcctccttaatggatatcgnntgtggtcaatggattaaattaaattaccacgcattggcggactcgtgggcggacgcgtgggcggacggggaaaaaaaaaaaaaaaaaaaaaaaaaaaaaaaaaaaacccttatttttcttccccatcttggagaagaagaaggcccgacgctctcaccgctgccaccaaaatcgcacgcgagccccaagagatccccaaaccctacacctgcccgccggcgcactcggggaccgtcgaatcgagcaggttgacggaggagagggagcctcgaagatgttccggaaccagtacgacaccgacgtgacgacatggagcccccaggggcggctgttccaggtggagtacgccatggaggccgtcaagcagggctccgcctgcgtcgggctccggtcgagcacccacgccgtcttagccgccgtcaacaagcccgcctccgagctctcctcctaccagcggaaggtgttccgcgtcgctgaccacgccggggtcgctctcgccggcctcaccgccgacggccgcgttctctcgcgtttcctccgcaacgagtgcatcaaccactccttcgtctacgaggcgccgggcccggcttttattttttcttccccatcttggagaagaagaaggcccgacgccctcgccgctgccaccaaaatcgcacgcgagccccaaagatccccaaaccctacacccgcccgccggcgcactcggggaccgtcgaatcgagcaggttgacggaggagaggaagcctcgaagatgttccggaaccagtacgacaccgacgtgacgacatggagcccccaggggcggctgttccaggtggagtacgccatggaggccgtcaagcagggctcagcctgcgtcgggctccggtccagcacccacgccgtcctcgccgccgtcaacaagcccgcctccgagctctcctcctaccagcggaaggtgttccgcgtcgctgaccacgccggggtcgcgctcgccggcctcaccgccgacggccgcgttctctcgcgcttcctccgcaacgagtgcatcaaccactccttcgtctacgaggcgccgctccccgtctccaggctcgcgcctcaagctcgccgacaaggcgcaggtttgcacacagcggtcatggaagaggccctatggtgttggcctcctagttgctggactggacgagtcaggggctcatctgtactacaactgccccagcgggaactactttgagtaccaggcattcgccatcggttctcgttcccaagccgccaagactttcctggagcgcaggttccagggctacaatgactacaccccggagcagctcatcaaggacgccctctccgccataaaggagacgctgcagggtgagaagctgtccagctccaactgcacggtggccatcgtaggcaggaaggaggacggcaccatcgagccgttcgagatgattggcgccgcaaggatacaggaacttatcgactccatggaggtcgccgaggaggcgcccgcggaggaggccagctccatgcaggaggaggagaggggcccagaagatgctgctgctgctgcacctgcacccatggacatctagaagccccatatgaacccaccaacctcacgctgcattctgagttcccaaaagactagactgcttctttagaaaattgttgtgagttgtgactcttgtgtactctttgcttccgaagaacttctctatggtctctccgacgaacagttgcagttgcttgggtttggaccgactatttatcatgtgattgcgaacataatgttttggttttggaggccaaaatgttttggttttggaggccgtcgccaaaaaaaaaaaaaaaaaggcccctagggcc

SEQ ID NO: 96843 - DNA, 396 bp, Zea mays
  Clone ID: MRT4577_19836C.1
agagagtgggttggccacataatttttaattgttatgcatctgtgcaaatttttcctccaagaattattcatctctttgctatctgtttttttttcaattacagatgaagatgtcgacaagcctacaataaacacacctcaaaaagaaaaattaagttgaagaatctcatgattgactacttattcactgcagtctgtcatgtagcagcacgtaccatcagatctaagaatgaaccaagcgaatgggatcacccgtatcaagatgagaacttaaattcaggttagctagatttgattaacagacatttgtataaaagtatatttatatagacgtattttaagtcaaagtccacttgatggatgaaataatactatgttccaaatgataagttggtt

SEQ ID NO: 96844 - DNA, 4246 bp, Zea mays
  Clone ID: MRT4577_19837C.1
gcagtccactcagaccgatgggcgatggcgaggaagggggaaggaaaatatcaaaaggaatctcccacgtccaaacagaccccatcgcccgccgcacgtcacgacatgcccttctccctgctagtgctgccaccgctcccgctgaaaaagattattagttttttatttctatttttaataattgaacctcttctgccggttcttctccctccttgagtactacttcctggcaatttatcttctccaacaaggtccgacatcaacaagtgattgctcgcggccccgcaagcgagagagaacttttcaacccaaacaaacagtccaatccaattcctagggcaatccggtgaacgtgtgcgtgtgtatatacatacacacggccgccgccgccgcaggcctcgctcctaccgccaccggactcccctttcgcgtccgcttctcttgttgttgctgtgctctcctgttaccgggacccggaggaaggcaggaaggaaggaaggaaggaaggcggggatggcggaggagacggtgcgggagctgcgcgcgagcttcgcggcggggcagacgcgcccggccgagtggcgggcggcgcagctcaaggggctcatccggatgatcgacgagaaggaagccgagatcagcgccgcgctccacgaggacctcgccaagccgcatatggagtccttcctccacgagatatcacttacaaagtcgtcgtgcaagtttgcgctcaaggggctcaagaactggatgaagcccgagaaggtacctgcggccataactacattcccgtcctccgcccaaatcgtgccggagcccctcggcgtcgtgctcatcatctcagcctggaactaccctttcatactctctatcgacccagtcattggagcaatcgctgctggaaatgctgttgttctgaagccatcagaaatagcgccagctacctcgtcactgttagcaaagctgctacccgagtatgttgacaactcctgtattaaagttgtggagggaagcgttccagaaacaaccgcactcttggaacagagatgggataagatcttctacacaggtaatggaactgtaggacgtatagtgatggcagcagccgcaaagcatctgaccccggtagctctggagcttggtgggaaatcccctgttatcgtggattcaaatgttgatctgcatgttgctgctaagaggattgttgttggcaaatggggatgcaacaacggccaagcatgcattgctccagattacatcataacgacaaaatcatttgcaccggagctggtggcctctttcaaaagagttttggaaaggttctatggggaggatcctctgcaatcagcagacttgtctcgtattgtgaattcgaagcagttcaaaagattgacaaatttgatagaagaaaaaagagttgctgacaagattgtgtacggcggcaaggctgatgagaagcaactaaaaatttctcctacactattgttagatgttcctgaagattcagaaattatgacaggcgaaatatttgggcccttgcttcctattgtgacggtcgaaaagattgaggaaagcttcgacttgatcaatgccaagcctaagccactagccgcctaccttttcaccaagaataggaagctgcaagaggagtttgtggcaagcgtccctgcaggagggatgcttgtaaacgacactgcgctacatctcaccaacccgtacatgcccttcggcggcgtcggcgacagcgggatggggtgctaccacggcaagttcggcttcgactgcttcagccacaagaagggagtcctgatccgcggctttggcggggaggcgaacgccaggtacccgccctacacgacggagaagcagaagatcctgaggggcctcatcaacggcagcttcatcgccctcatccttgccctcctgggcttccccagggagaagcgttagatgctccggcctcttgtcggtttcggtacagcctttttagtccctgttcgtcgtcaggtgcacagtatacaccgtcatatgctgtcaaatagatgcaatgcaacgactgcgcgccgtgcttgtgttgcaagcgtggataatgcatatatattgtagcattgacatgatgtgcgttattgcattacgtaagggagttggataaataagtgtgatttgtttgtcaattattcagtgttgagaatggatgatacttgcaaaaaaaaaaaaaaaagaaactactgttgaaggacatgctgtaaactacagagagaatgaaaattaaattggtaaatctcttcaataccttgtctggaaggtccttcattccgagtacatgtccaggacatgggaggattcctctttcctcatgccaaagcaaagtgctaaatagacaccaccagagacagatttattcaaaacttgttttctgaatccatttcatcaccaggtcctaacactctgctaaatatttggattacagaaatctgtactactgctagagccagcccttagagaaacagagcagcatcagtaatgccatttaggcctcagctcctcttcttcctctgtcagctcttgataccggtaccattgcgacgctgctttgccgacaggtaatggaggacgcatgaagacctcaaccggtttgggcacatgtaccaccagatgcagctcaccgccatcataaacttcctcagcgctgtttgaaggcacacctgatggctccacagaaatccacccaagcccagagatcgcgatgtcacaggcaggcctgtcacgttcctcatattttatcttcaactcgcgaaccccttgaagccctgtccatccttcagctctctccttaccagttggcggagtcaatgtgaccccaacttcagtctcgtaaaattgatcagcttctgttgtcgggaccatattaatctttagcttcttgggcccatagaatgtcagccgtgaacgtggaagagccttgataacatcaatgcggactagcccagcccagaataatgaattcccgctcaattcaacatctgtatcattagccggaaaacatcgccctttcaaacgactttgtggtgcaagagaaggcagatcatcagcatggataactgctgcctgcctatggtgaaggtggactccaggtgtatcatacaatttccctccgcctaaaaatgcttcaatttgaatagggccaagggttgttccaggaacagcagactgtattggcttgtatttttgagctgccgctgctaccgggtccttgtacgccattgttcttagcattgcactgataaatgcagattttccaacatttgcggaacccagtatatatacatctcggcccttcctttcctgatgaatctctgatataacccctgtgataccgaccaatgactttgagcttgtcaaatggacactaaggacgttaagcttcttcttgacaactgactcgacaacccagtcgcctatacaattcaaatcagtatctctgggaaggagatcaacctttgttatcacaagtataataggattagcaccagcaaaatcgcgtacacgtgccaggaaacttccattgaagtcaacgatgtcaaccaatttgactatgagcgctttctcgtgacggaggtatgacagcttctccctgagctgttccgcagaaacaaacttcttgccccctggataaccgccgtggccaccaacagcagtgaccacccacgcgtcagaccgcggcttgcacctcccacatagaacggttcttagttggtggtgcctcttcttcagttggtacgtgtccgggtcgacgtatcccggcgcggcctcctccgccgtctgcagcggggcaccgcaaccgtagcaggatgcgaggccggagggcttccgtgccaaggcccggcgcttctccttgcgtcggcgccgcctgtcggcgtcctcgggcgcgagcacgcgcgcggcggcctcggtggccagctggcggccgaggaagcggtccccacgcgtgggcgcggcgggccccgcgccgtcaggcggggcgggcggcggagcaggagcggcggctagggaggtgcggtgggcgtgggtcttgagtgggggaggtagcggcggtaatgttttggggaaggagaggaaaggaaggtgcggtgacgccatggacgatggacggcggcgtggcggagcagccgcagagcagtgaaggtatcctctccttaccttatccgggccggcgcaacggaagggacggacggtggcctcgagg

SEQ ID NO: 96845 - DNA, 347 bp, Zea mays
  Clone ID: MRT4577_19838C.1
ctgcttttgctatcactatatcagtggccctgtactgttgggctgaacatattgcagtcatcatattgcagacacatgtgatgccagagttgtcatgagtaatgtttgcgatgaaggtagttaacaaatatgcatagttgtataaccatgcaactcgaatgtctctgccaatatgacaacatttttcattcgcccccagtgtcttatggcacaaaaagttttgtagtgttggccatcaattttgtctgattaggacccatttgttctctatagatttttggctgtaaaatagacatccttggccattatactgataagagtgtagagattacaattggttcaatttt

SEQ ID NO: 96846 - DNA, 481 bp, Zea mays
  unsure (1)..(481): unsure at all n locations
  Clone ID: MRT4577_19839C.1
gtggtagctaccggcgactacgtgtctaccgccgtggcgggctcaccggccttgatgagacagccgtgaggggtcacgacggcacggaggaagagttgagccacgcggcacccggccgagaggcggcggtcgacggcgagcgctttacagcgggcggtgagctagaggagatgtaccgtggccgagcggggtgacttccagctcaccggtgacgaggacctttaccgcgacagcctcgccccagcggacctcgtagccgccctctgtcgtgtattgttcctcgctagttctcgacggcgccgtctctcccacgcggtcctctgccaccagcccaccacctactgcgccggcgctcctccgagcgcagttcgcctacggaattcgatcacttcgtcgtcgctctcgcctgcgcccccagatgatacatgctttnttagttcctgggagtaaattaacatcaattacacaatcatggaagagc

SEQ ID NO: 96847 - DNA, 478 bp, Zea mays
  Clone ID: MRT4577_1983C.1
cttctaaagacagacacatctacattggggaataaacagttatatcccatattacaaagttgactcacagacaacaagttatatccaagggactcaactaaaaacacattaaaaatagagggctcggatgaaatagcaatttttcctaaccctttcaccttgccttggttcccatcaccgaatatgattgaatcttggggatccttgttcttgacgtaggaagaaaacatccttttttcccccatcatggggtttgggcatccgctgtcgataatccagcttgagcccccggatgcataaacctttttttcccttgccatgaggcaggtgtgatgctcgtttggaaagaggaccgatttgttgaaggcggtggcggcaagtccttcgttgtcggagtcggacgacaaacaatccgagtcccactcctttccaaggtgtgcctcgcccttagccttcttgaaagccttcttcttttctc

SEQ ID NO: 96848 - DNA, 653 bp, Zea mays
  Clone ID: MRT4577_19840C.1
ttttttttttttttttttcgaaccgccaaaactcgataatatttatatttatatccgaatccggagagaaaatatagaaacaaaacaagtaatatccatctacaccttacagtggctagtccaggtagtttctttgccgtcaaacttcgctacttcaaagacctgaagattccaagcggatgatgtccttcccaagcgctcaaccatggctgtttactacggttttaatcctgactgtggcttaatccgactgcggctataactattttagtattttatctttatgtattgcatttgtagccgtccgaacacctgtagccagtcgaatcgaaacacaccgtgaccacgaggcttagcattgtctgctccctgcaagtaaaaaaagcaacacgcttggctaaagattactcgcttcggggttctattagttgtcgtttagacagtctccaaaatataactttgacaaatatttaaaaaaatatacaaataaactcttaattcatttatacttttataaaaaaatactttttaatataaatcgatgcatataaatattagatttcaaaaataaacaacaaaaaattatttatagtcaaaattttataagtttgactcaaaccttatccaaaacaacaactcataggacggccggc

SEQ ID NO: 96849 - DNA, 429 bp, Zea mays
  Clone ID: MRT4577_19841C.1
gaggagcaacactatgctgaatgtcttcgtggctctaccactaataaagcaaggtgcatgttgtctgccgtcaattgaagagcttattgcaaagctggctggaccttctaaaacatcgcccccagggtgacgtccgaacccttacagcctgagaagggggatgctaccaatgtccctatggactcgattgctgggtcttgctaacatgccggccaggaactacaaccccccctgaagttgacacgatgtacgcgacggtataaaaagaagaataatcccgggcctctccaccttaaccgagatggccaccagtgcttgtgtgcctggagccttcaaagagcttgctagcggcacaacggtgtagactaccggaacacacttgcgaacctgagaaggcccctgctcttcatggcggagtccgcgcccccc

SEQ ID NO: 96850 - DNA, 256 bp, Zea mays
  Clone ID: MRT4577_19843C.1
ataaacttcataataagggttatattatcgtgcgttttaattagccccaaatattttatttgagctggatacatgcatacatacagaggatgtgtataacaggagcaagaagcctggtcatttctccacagcggcggggccctccggttccttcttcttggcggtttcgtcctccttataatcatcgtcatcctcgagctccgggaaaagatcctttagcaccagggatttggggttggccaaagggggtcccttc

SEQ ID NO: 96851 - DNA, 333 bp, Zea mays
  Clone ID: MRT4577_19844C.1
ttttgtttttttttttttttttttgggttttcacttttttttttttttttttttttttttttccaaaaaaaaatagggggcccagggggcccggaaaacgtccaacacaaacactatgggggagcctaaaaccccccaaaactttggggaccaaacaacccgaaactaaaccagggggctagggggccccccccccgcccccggggggtcggcccccccccgcagtggacaacgcccccaccttttcttaaggggggggtcaggcctcggggctggccaagacccagggcgaaaagggaccccccgggcggggcttgctgccggaggggggag

SEQ ID NO: 96852 - DNA, 444 bp, Zea mays
  Clone ID: MRT4577_19846C.1
aacaagaaaaccgggataaggagaatcaaaatggcatgggttagcccaacacacgatttggtcaagaatcaaaatactttaatgggggaaggaggggggggaccaacacgtgcccaaccattatacttaaaaaaaaaaagggaccttgactaggcgagtttaaaaaagagcacctcccaaaggatacactccagcgatttggaaattattgggcgagactggaacacctttttgattcaagggttagggggcatccactccaagaaaaagggaccaacacaattcaccaatccagggctgtttgaagggtggcctttaattacacataaaaatcaggaggggtgcaaaattcaatcagcaacctggttaaaagggttgtctggggacttcttccacaggttccatataaaggctttgaattggggcaacgttagaactggcttt

SEQ ID NO: 96853 - DNA, 1029 bp, Zea mays
  Clone ID: MRT4577_19847C.1
tgggtacctcgaggccggccgggatccatccatccatagatccctcacctcactcactcgtgaagaaccagagaacccacccaccctccttcatctcctacatccacatctatccaagaaggtccgttctctcctccccgctcccctcagcaataatctccgcacggcaacctcgctcctccgttttggttttcctctgtgtgccatgggcgacgccgtggagcacctcaagagcgggttccagaagttcaagaccgaggtgtatgacaagaagccggagctgttcgagcctctcaaggccggtcaggcccccaagtacatggtgttcgcctgctccgactcccgcgtgtgcccgtcggtgaccctgggcctgcagcccggcgaggccttcaccgtgcgcaacatcgccgccatggtcccggcctacgacaagaccaagtacaccggcatcgggtccgccatcgagtacgccgtgtgcgccctcaaggtggaggtcctcgtggtcatcggccacagctgctgcggtggcatccgggcgctgctctccctccaggacggtgcacccgacaacttccacttcgtcgagaactgggtcaagatcggcttccctgccaaggtcaaggtgaagaaagagcacgcctccgtgcccttcgatgaccagtgctccatcctggagaaggaggccgtgaacgtgtccctggagaacctcaagacctaccccttcgtccaggaagggctggccaaggggacccccaagctggtcggcgccccctacgacttcgtgtccgggaacttcctcgtatgggaaacttagcccccccccccgctcagggggggggttcgtcgtcccaacccctaaatcttcataaaaaaaaaaaccccccccccatatatccccccccatatgtgaatgcgggggggactattccccgcatgttttcaccagtatgcagctacggacataaatatggcccgggtcccccaacgacgtgaatgtaataaccaataatttttccccccctttttttt

SEQ ID NO: 96854 - DNA, 1013 bp, Zea mays
  Clone ID: MRT4577_19848C.1
ggcgcgggctgccatgtcgttataaaaaggagcggagcgggggtcaccgaaggcgtccaattcatccaccttgtccctcccggagaaccagaaggccacccaccttccaaggcaggggccatggacgaccccgtcgagcgcttgaaggacgggttccacaagttcaagaccgaggtctatgacaagaagccggagctgttcgagcctctcaaggccggccaggcccccaagtacatggtgttcgcctgctccgactcccgcgtgtgcccgtcggtgaccctgggcctgcagcccggcgaggcattcaccgtccgcaacatcgccgccatggtcccagcctacgacaagaccaagtacaccggcatcgggtccgccatcgagtacgccgtgtgcgcgctcaaggtggaggtcctcgtggtcattggccatagctgctgcggtggcattagggcgctcctctccctccaggacggcgcacctgacacattccacttcgttgagaactgggttaagatcggcttccctgccaagattaaggtgaagaaagaccacgcatcggtgccgttcgatgaccagtgctctattctagagaaggaggccgttaacctgtccctggagaacctcaagacctaccccttcgtcaaggatgggctggccaacgggacgctcaagctggtcggcggccactacaacttcgtgtcaggggagttcctcacatgggacaataagcagccatcgtgaatctatatatatacactacatgatgcatgttcgtattcagcatgcagctacatacatatatatataccggatcacccaatgcaatgtgtgaatgtgtattgtgtaataagcaataccatatattctaccattctaccgcttttttattttctaacgccgagcattcatgtactgtgtattttatgatgaccgccctgtgtgctcgtcaaaagacatctgctatatataatcatctttggcgagactaaaaaaaaaaaaaaaaaaggccccta

SEQ ID NO: 96855 - DNA, 1718 bp, Zea mays
  Clone ID: MRT4577_19849C.1
ctcggccgggaagcggcactcgcacgatcaatgtacacattgcccgtccgccccaccacatccagcatcgtcgccagcctcgccacccccgcgccgtcctcctcctccggctccggccgccccaggctcaggctcaggctcatccggaacgcccccgtcttcgccgcccccgccaccgtcgtgggcatggaccccaccgtcgagcgcttgaagagcgggttccagaagttcaagaccgaggtctatgacaagaagccggagctgttcgagcctctcaagtccggccagagccccaggtacatggtgttcgcctgctccgactcccgcgtgtgcccgtcggtgacactgggcctgcagcccggcgaggcattcaccgtccgcaacatcgcctccatggtcccaccctacgacaagatcaagtacgccggcaccgggtccgccatcgagtacgccgtgtgcgcgctcaaggtgcaggtcatcgtggtcatcggccacagctgctgcggtggcatcagggcgctcctctccctcaaggacggcgcgcccgacaacttccacttcgtggaggactgggtcaggatcggcagccctgccaagaacaaggtgaagaaagagcacgcgtcggtgccgttcgatgaccagtgctccatcctggagaaggaggccgtgaacgtgtcgctccagaacctcaagagctaccccttcgtcaaggaagggctggccggcgggacgctcaagctggttggcgcccactacgacttcgtcaaagggcagttcgtcacatgggagcctccccaggacgccatcgagcgcttgacgagcgggttccagcagttcaaggtcaatgtctatgacaagaagccggagcttttcgggcctctcaagtccggccaggcccccaagtacatggtgttcgcctgctccgactcccgtgtgtgcccgtcggtgaccctgggcctgcagcccggcgaggccttcaccgttcgcaacatcgccgccatggtcccaggctacgacaagaccaagtacaccggcatcgggtccgccatcgagtacgctgtgtgcgctctcaaggtggaggtcctcgtggtcattggccatagctgctgcggtggcatcagggcgctcctctccctccaggacggcgcacctgacaccttccacttcgtcgaggactgggttaagatcggcttcattgccaagatgaaggtaaagaaagagcacgcctcggtgccgttcgatgaccagtgctccattctcgagaaggaggccgtgaacgtgtccctggagaacctcaagacctaccccttcgtcaaggaagggcttgcaaatgggaccctcaagctgatcggcgcccactacgactttgtctcaggagagttcctcacatggaaaaagtgaaaaactagggctacggcaattctaccggcccgccgactcctgcatcatcataaatatatatactatactatactactacgtacctaccgatatgcacccgagcaatgtgaatgcgtcgagtactatatatctgttttctgcatctacatatatataccggatcaacaatcgcccaatgtgaatgtaataagcaatatcattttctaccacttttcattcctaacgctgagctttttatgtactactatatcttatatgatgaataataatatgaccgccttgtatctaaaaaaaaaaaaaaaaaaaaaaaagcggcc

SEQ ID NO: 96856 - DNA, 861 bp, Zea mays
  Clone ID: MRT4577_1984C.1
atggatcctaagggaaaggggatggtggtcaacaacaagacaaaggcgttcatcgtcaacgagccaagagatgataagccttcggactctggctcgagtcataagaaaagagacgggaagaagaagaggcgcatcaagaagatcgtctactacgacagcgacgaatcctcttcttccccaagagacgacgacgacgagaaaaagaaaccggaacaagaaaggaatgggaagagggagaaaaagaagacctacaagaagatgaagggcgaggcgcaccttggcaaagagtgggactcgaattgttcttcgtccgactccgacgacgaaggactcgccgcctcggccttcaacaaatcgtcgctcttccccaacgagcgccacacttgcctaatggcaaaggagaagaaggtttatgcatccgggggctcaagctggattatcgacagcggatgcgcaaaccacatgacgggggagaagaagatgttcacttcctacgtcaagaacaaagattcccaagattcaatcatctttggagatgggaaccaaggcaaggataaatcagaaacccaagggacccttaagcgcttcctaaggagagctcaaaatgaatttgagctcaaggtgaaaaagataagaagcgacaacgggtccgagttcaagaaccttcaagtggaggagtatcttgaggaggaaggaatcaagcacgagttctccgctccctacacaccacaacaaaatggtgtgatagagaggaagaataggacgctcatagacatggcgaggacgatgcttggagaattaaagacacctgagcagttttggtcggaagctatgaacacggcttgccacgccataaactag

SEQ ID NO: 96857 - DNA, 1988 bp, Zea mays
  Clone ID: MRT4577_19850C.1
ccggccgggaagcggcactcgcacgatcatgtacacattgcccgtccgcgccaccacatccagcatcgtcgccagcctcgccacccccgcgccgtcctcctcctccggctccggctccggccgccccaggcccaggctcatccggaacgcccccgtcttcgccgcccccgccaccgtcgtgtaaacgggacggcgggcagctgaggagtcaaacgagagagatcgagagaaagaaagggagggcatccaccagccgccggcgataagaggggaggagagagaggccagagaagaggaggagaagaagaagaaaatgagcagctgcctctgccttccgaaaaaaaaggaggggccagcgaaggagaagccgtccacagatacccccacctcgtcactccttcagaaccagaagccctcccaacctccacctcctccctccaaggcttcctccaagggcatggaccccaccgtcgagcgcttgaagagcgggttccagaagttcaagaccgaggtctatgacaagaagccggagctgttcgagcctctcaagtccggccagagccccaggtacatggtgttcgcctgctccgactcccgcgtgtgcccgtcggtgacactgggcctgcagcccggcgaggcattcaccgtccgcaacatcgcctccatggtcccaccctacgacaagatcaagtacgccggcaccgggtccgccatcgagtacgccgtgtgcgcgctcaaggtgcaggtcatcgtggtcattggccacagctgctgcggtggcatcagggcgctcctctccctcaaggacggcgcgcccgacaacttccacttcgtggaggactgggtcaggatcggcagccctgccaagaacaaggtgaagaaagagcacgcatcggtgccgttcgatgaccagtgctccatcctggagaaggaggccgtgaacgtgtcgctccggaacctcaagagctaccccttcgtcaaggaagggctggccggcgggacgctcaagctggttggcgcccactacgacttcgtcaaagggcagttcgtcacatgggagcctccccaggacgccatcgagcgcttgacgagcgggttccagcagttcaaggtcaatgtctatgacaagaagccggagcttttcgggcctctcaagtccggccaggcccccaagtacatggtgttcgcttgctccgactcccgtgtgtgcccatcggtgaccctgggcctgcagcccggcgaggccttcaccgttcgcaacatagccgccatggtcccaggctacgacaagaccaagtacaccggcatcgggtccgccatcgagtacgctgtgtgcgctctcaaggtggaggtcctcgtggtcattggccatagctgctgcggtggcatcagggcgctcctctccctccaggacggcgcacctgacaccttccacttcgtcgaggactgggttaagatcggcttcattgccaagatgaaggtaaagaaagagcacgcctcggtgccgttcgatgaccagtgctccattctcgagaaggaggccgtgaacgtgtccctggagaacctcaagacctaccccttcgtcaaggaagggcttgcaaatgggaccctcaagctgatcggcgcccactacgactttgtctcaggagagttcctcacatggaaaaagtgaaaaactagggctacggcaattctaccggcccgccgactcctgcatcatcataaatatatatactatactatactatactactactactacgtacctaccgatatgcacccgagcaatgtgaatgcgtcgagtactatatatctgttttctgcatctacatatatataccggatcaatcgcccaatgtgaatgtaataagcaatatcattttctaccacttttcattcctaacgctgagctttttatgtactatatcttatatgatgaataataatatgaccgccttgtgatctaaaaaaaaaaaaaaaaagcggcc

SEQ ID NO: 96858 - DNA, 1022 bp, Zea mays
  Clone ID: MRT4577_19851C.1
ccggccgggccggggtccaattcatccaccttgtccgtccctccctgagaaccagaaggccacccaccttccaaggcaggggaggggccatggacgaccccgtcgagcgcttgaaggacgggttccataagttcaaggccgaggtctatgacaagaagccggagctgttcgagcctctcaaggccggccaggcccccaagtacgtggtgttcgcctgctccgactcccgcgtgtgcccgtcggtgaccctgggcctgcagcccggcgaggccttcaccgtccgcaacatcgccgccatggtcccagcctacgacaagaccaagtacaccggcatcgggtccgccatcgagtacgccgtgtgcgcgctcaaggtggaggtcctcgtggtcattggccacagctgctgcggtggcatcagggcgctcctctccctccaggacggcgcacctgacaacttccacttcgttgagaactgggttaagatcggcttccctgccaagattaaggtgaagaaagaccacgcatcggtgccgttcgatgaccagtgctctattctagagaaggaggccgtgaacctgtccctggagaacctcaagacctaccccttcgtcaaggaagggctggccaacgggacgctcaagctggtcggcggccactacaacttcgtgtcaggggagttcctcacatgggacaataagcagccatcgtgaatctatatatatacactacatgatgcatgttcgtattcagcatgcagctacatacatatatatataccggatcacccaatgcaatgtgtgaatgtgtattgtgtaataagcaataccatatattctaccattctaccgcttttttattttctaacgcccgagcattcatgtactgtgtattttatgatgaccgccctgtgtgctcgtcaaaagacatctgctatatataatcatctttggcgagcattcatgtactgtgtattttatgatgaccgccctgtgcccacgcgtccgctagttctagctcccccc

SEQ ID NO: 96859 - DNA, 1053 bp, Zea mays
  Clone ID: MRT4577_19852C.1
ggcgattgggtttccaagagccggccgggatccatccatccatagatccctcacctcactcactcgtgaagaaccagagaacccacccaccctccttcatctcctacatccacatctatccaagaaggccatgggcgacgccgtggagcacctcaagagcgggttccagaagttcaagaccgaggtgtatgacaagaagccggagctgttcgagcctctcaaggccggtcaggcccccaagtacatggtgttcgcctgctccgactcccgcgtgtgcccgtcggtgaccctgggcctgcagcccggcgaggccttcaccgtgcgcaacatcgccgccatggtcccggcctacgacaagaccaagtacaccggcatcgggtccgccatcgagtacgccgtgtgcgccctcaaggtggaggtcctcgtggtcatcggccacagctgctgcggtggcatccgggcgctgctctccctccaggacggtgcacccgacaacttccacttcgtcgagaactgggtcaagatcggcttccctgccaaggtcaaggtgaagaaagagcacgcctccgtgcccttcgatgaccagtgctccatcctggagaaggaggccgtgaacgtgtccctggagaacctcaagacctaccccttcgtccaggaagggctggccaaggggaccctcaagctggtcggcgcccactacgacttcgtgtccgggaacttcctcgtatgggaaacttagccacacccgccgctcagcgcgcggcttcgtcgtcacaactcctatatcttcataaatatatatatccactaccatacaaatacctaccgatatgtgaatgcgaggagtactattacctgcatgttttcagcagtatgcagctacgtacatatatatgtaccggatcgcctaacgacgtgaatgtaataagccaataatattttctaccgcttttttttatttctttctaacctcgagcttctatatgtagcaacaacattttctacgtacatatatatgtgccacccgtattccgacgtaaaaaaaaaaaaaaa

SEQ ID NO: 96860 - DNA, 206 bp, Zea mays
  Clone ID: MRT4577_19853C.1
cgccttaacagaccgaggctactcccaggcgccgggtcttctttgatatgttccactatctatgctaacggtaatggcgaccgttccatgggatctgatctggctgattgtgaggaagaacaactccttcctggtgaagcattttggcaacttattatgccaaggttcatttcaccaatgagcccaacatcctttacaatttacac

SEQ ID NO: 96861 - DNA, 1729 bp, Zea mays
  Clone ID: MRT4577_19854C.1
ttgggtccctcgaggccggccgggaagcggcactcgcacgatcaatgtacacattgcccgtccgtgccaccacatccagcatcgtcgccagcctcgccacccccgcgccgtcctcctcctccggctccggccgccccaggctcaggctcatccggaacgcccccgtcttcgccgcccccgccaccgtcgtgggcatggaccccaccgtcgagcgcttgaagagcgggttccagaagttcaagaccgaggtctatgacaagaagccggagctgttcgagcctctcaagtccggccagagccccaggtacatggtgttcgcctgctccgactcccgcgtgtgcccgtcggtgacactgggactgcagcccggcgaggcattcaccgtccgcaacatcgcctccatggtcccaccctacgacaagatcaagtacgccggcacagggtccgccatcgagtacgccgtgtgcgcgctcaaggtgcaggtcatcgtggtcattggccacagctgctgcggtggcatcagggcgctcctctccctcaaggacggcgcgcccgacaacttccacttcgtggaggactgggtcaggatcgggcagccctgccaagaacaaggtgaagaaagagcacgcgtccgtgccgttcgatgaccagtgctccatcctggagaaggaggccgtgaacgtgtcgctccagaacctcaagagctaccccttcgtcaaggaagggctggccggcgggacgctcaagctggttggcgcccactacgacttcgtcaaagggcagttcgtcacatgggagcctccccaggacgccatcgagcgcttgacgagcgggttccagcagttcaaggtcaatgtctatgacaagaagccggagcttttcgggcctctcaagtccggccaggcccccaagtacatggtgttcgcttgctccgactcccgtgtgtgcccgtcggtgacactgggcctgcagcccggcgaggccttcaccgttcgcaacatcgccgccatggtcccaggctacgacaagaccaagtacaccggcatcgggtccgccatcgagtacgctgtgtgcgccctcaaggtggaggtcctcgtggtcattggccatagctgctgcggtggcatcagggcgctcctctccctccaggatggcgcacctgacaccttccacttcgtcgaggactgggttaagatcggcttcattgccaagatgaaggtaaagaaagagcacgcctcggtgccgttcgatgaccagtgctccattctcgagaaggaggccgtgaacgtgtccctggagaacctcaagacctaccccttcgtcaaggaagggcttgcaaatgggaccctcaagctgatcggaggccactacgactttgtctcaggagagttcctcacatggaaaaagtgaaaaactagggctacggcaattctaccggcccgccgactcctgcatcatcataaatatatatactatactatactactacgtacctaccgatatgcacccgagcaatgtgaatgcgtcgagtactatatatctgttttctgcatctacatatatataccggatcaatcgcccaatgtgaatgtaataagcaatatcattttctaccacttttcattcctaacgctgagctttttatgtactatatcttatatgatgaataataatatgaccgccttgtgatctaaaaaaaaaaaaaaaaaaaaaaagtcgacgcggccgc

SEQ ID NO: 96862 - DNA, 3637 bp, Zea mays
  Clone ID: MRT4577_19855C.1
cattggtacctcgaggccggccgggaagcggactcgcacgatcatgtacacattgcccgtccgccccaccacatccagcatcgtcgccagcctcgccacccccgcgccgtcctcctcctccggctccggccgccccaggctcaggctcaggctcatccggaacgcccccgtcttcgccgcccccgccaccgtcgtgtaaacgggacggcgggcagctgaggagtcaaacgagagagatcgagagaaagaaagggagggcatccaccagccgccggcgataagaggggaggagagagaggccagagaagaggaggagaagaagaagaaaatgagcagctgcctctgccttccgaaaaaaaaggaggggccagcgaaggagaagccgtccacagatacccccacctcgtcactccttcagaaccagaagccctcccaacctccacctcctccctccaaggcttcctccaagggcatggaccccaccgtcgagcgcttgaagagcgggttccagaagttcaagaccgaggtctatgacaagaagccggagctgttcgagcctctcaagtccggccagagccccaggtacatggtgttcgcctgctccgactcccgcgtgtgcccgtcggtgacactgggcctgcagcccggcgaggcattcaccgtccgcaacatcgcctccatggtcccaccctacgacaagatcaagtacgccggcaccgggtccgccatcgagtacgccgtgtgcgcgctcaaggtgcaggtcatcgtggtcatcggccacagctgctgcggtggcatcagggcgctcctctccctcaaggacggcgcgcccgacaacttccacttcgtggaggactgggtcaggatcggcagccctgccaagaacaaggtgaagaaagagcacgcgtcggtgccgttcgatgaccagtgctccatcctggagaaggaggccgtgaacgtgtcgctccagaacctcaagagctaccccttcgtcaaggaagggctggccggcgggacgctcaagctggttggcgcccactacgacttcgtcaaagggcagttcgtcacatgggagcctccccaggacgccatcgagcgcttgacgagcgggttccagcagttcaaggtcaatgtctatgacaagaagccggagcttttcgggcctctcaagtccggccaggcccccaagtacatggtgttcgcttgctccgactcccgtgtgtgcccgtcggtgaccctgggcctgcagcccggcgaggccttcaccgttcgcaacatagccgccatggtcccaggctacgacaagaccaagtacaccggcatcgggtccgccatcgagtacgctgtgtgcgctctcaaggtggaggtcctcgtggtcattggccatagctgctgcggtggcatcagggcgctcctctccctccaggacggcgcacctgacaccttccacttcgtcgaggactgggttaagatcggcttcattgccaagatgaaggtaaagaaagagcacgcctcggtgccgttcgatgaccagtgctccattctcgagaaggaggccgtgaacgtgtccctggagaacctcaagacctaccccttcgtcaaggaagggcttgcaaatgggaccctcaagctgatcggcgcccactacgactttgtctcaggagagttcctcacatggaaaaagtgaaaaactagggctacggcaattctaccggcccgccgactcctgcatcatcataaatatatatactatactatactactacgtacctaccgatatgcacccgagcaatgtgaatgcgtcgagtactatatatctgttttctgcatctacatatatataccggatcaacaatcgcccaatgtgaatgtaataagcaatatcattttctaccacttttcattcctaaaaaaaaaaaaaaaaaaaagcggcactcgcacgatcaatgtacacattgcccgtccgcgccaccacatccagcatcgtcgccagcctcgccacccccgcgccgtcctcctcctccggctccggctccggccgccccaggcccaggctcatccggaacgcccccgtcttcgccgcccccgccaccgtcgtgggcatggaccccaccgtcgagcgcttgaagagcgggttccagaagttcaagaccgaggtctatgacaagaagccggagctgttcgagcctctcaagtccggccagagccccaggtacatggtgttcgcctgctccgactcccgcgtgtgcccgtcggtgacactgggcctgcagcccggcgaggcattcaccgtccgcaacatcgcctccatggtcccaccctacgacaagatcaagtacgccggcaccgggtccgccatcgagtacgccgtgtgcgcgctcaaggtgcaggtcatcgtggtcatcggccacagctgctgcggtggcatcagggcgctcctctccctcaaggacggcgcgcccgacaacttccacttcgtggaggactgggtcaggatcggcagccctgccaagaacaaggtgaagaaagagcacgcatcggtgccgttcgatgaccagtgctccatcctggagaaggaggccgtgaacgtgtcgctccagaacctcaagagctaccccttcgtcaaggaagggctggccggcgggacgctcaagctggttggcgcccactacgacttcgtcaaagggcagttcgtcacatgggagcctccccaggacgccatcgagcgcttgacgagcgggttccagcagttcaaggtcaatgtctatgacaagaagccggagcttttcgggcctctcaagtccggccaggcccccaagtacatggtgttcgcttgctccgactcccgtgtgtgcccatcggtgaccctgggcctgcagcccggcgaggccttcaccgttcgcaacatagccgccatggtcccaggctacgacaagaccaagtacaccggcatcgggtccgccatcgagtacgctgtgtgcgctctcaaggtggaggtcctcgtggtcattggccatagctgctgcggtggcatcagggcgctcctctccctccaggacggcgcacctgacaccttccacttcgtcgaggactgggttaagatcggcttcattgccaagatgaaggtaaagaaagagcacgcctcggtgccgttcgatgaccagtgctccattctcgagaaggaggccgtgaacgtgtccctggagaacctcaagacctaccccttcgtcaaggaagggcttgcaaatgggaccctcaagctgatcggcggccactacgactttgtctcaggagagttcctcacatggaaaaagtgaaaaactagggctaaggcaattctaccggcccgccgactcctgcattatcataaatatatatactatactatactatactactacgtacctaccgatatgcacccgagcaatgtgaatgcgtcgagtactatctgttttctgcatctacatatatatatatataccggatcaatcgcccaatgtgaatgtaataagcaatatcattttctaccacttttcattcctaacgctgagctttttatgtactactatatcttatatgatgaataataatatgaccgccttgtatctaaaacaaaaaaaaaaaaaaaaaagcggcc

SEQ ID NO: 96863 - DNA, 781 bp, Zea mays
  Clone ID: MRT4577_19856C.1
cattgggtacctcgaggccggccgggctgcctcttggcttgccccgtgacgatcggcgggttctcgtggaacatcttctcctccccgtccccgtcgacggccgccacgggcggcgaccgcggtccggcgatggcgctcgacggcgcggtggccgacttcgccatggacggggccggtgggcccagagggctcaagctgctggagaacgcgcggggcaagctcgccgggccgcggaactgctggcaggatgcgtacggaaagctgttcgccagctgcggcgagatcatggccgacaaggagaggcagtcgcgcctggcgtggcacctcagcagctgcttccaggaggactcggggcgctcgcccttcccgtcctgcgccgagggatccgagatggtgcactgccgcaagcggctcggtgagtcccaagacaaggtcttcctcgagttcttcttggagaccaacaccctgtgccaccaattgcaggctgaagctttcaagcacaacaccgagagactcgtcaacgacctcacaaggacatccaagtatgccgaggagaagctcgaggtgatcgaggagagggcagaccacatcatcaaagagtcgagcaaagtccaggacacactgtcatcgatcgagatgcagaccgacaacctggcagaggcgtcgaagcacgtcggggtgcagatcaacgacgtgctgctccactccaagtccatcttcgagcagtccaaggagatcgccgccgctcaggctgaactgggcagagggcaggcagagatga

SEQ ID NO: 96864 - DNA, 445 bp, Zea mays
  Clone ID: MRT4577_19857C.1
ccgaaaaattaacggggggggttctcgtttcgtcggggaaaatttatacaagggggattatgcaattattaaaccctctaaatccaaggggcaaacggaattatgggcaagggtaacagggaaaataatgctgatcaactgggggtttttatttttccgtttttttggggggcgggcaaacggatcaacccatgttttgttttcccttgcagcccggccccagggtttttgaaaatcacggagctcggatcgggattttctccggatctttgttcgcatataaaggccgggagccccccctttcgatctttggatttgagctgttttctggccgaggggcttggcatttttgccaaaaataccatcctttgtttttggaaaacctcttaatggcggcactcctcggggaactataaatttccttatcaactaccccaagggtttt

SEQ ID NO: 96865 - DNA, 350 bp, Zea mays
  Clone ID: MRT4577_19858C.1
attcggctcgagcgcgatccacaccatcagtgtctgacaggcgaactcggcgtttgtgccggggggggtatttaagctcagggaggagctggacccccatgggcgcttggtcggaggactgcacgggcgactggcttggtccctgccgcaacccaaacaaccactgcagaaggggcccgtccaggtgcaaaagctggcacatgtgactcgggatcaacaaggaccccaacacatataaatcggcggtaatcataaaactagagcactgtaacacggacctcggaaccttccccgtcaaggatgccaagtgcgcgacaatgcaccccatgtggcaaaaagctatcacacat

SEQ ID NO: 96866 - DNA, 213 bp, Zea mays
  Clone ID: MRT4577_19859C.1
ctagaactagcacgtacatcctacacacttttagaaactgaaacagacgaggcacattagcgagcacgtatagcacggtcaccaccatggatgtccaggaagacgctattagtcaagcatatcactctataccatcgcaggaagcctgactacttcacaactacagagcggtgcggcatgaatgcaataaagacatctctacaccgctacaga

SEQ ID NO: 96867 - DNA, 4635 bp, Zea mays
  Clone ID: MRT4577_1985C.1
atggatcctaaggggaagggaatcgtgatcaacgacaaggagaaggagtccttcgtcaacgagccaaaggatgacaagtccaacgactcgggctcaggccatagacaaaaagatgggaagaagaagaagacaaggcgcatcaaggagattgtctactacgacagcgacgaatcttcctcttcccaaaaggacgacgacaacgactacaggaagacggtcaattcgaacttttcatttgactattctcgtattccacacaattcgaattcgcatttgctttccattcctcttggcaaacctccacacttcgatggggaggactacagattttggagtcacaaaatgcgtagtcacttattctctctccatccaagcatatgggagattgtagagaatggaatgaaatttgatagctcggatagtcctatgcttataaatgaacaaatccatagaaatgcacaagctactactgttctcttagcatctttgtgcagggaagaatacaataaggtgagcggcttggacaatgccaagcagatatgggacaccctcaagatctctcacgagggcaacgacgtcaccatgctcaccaagatggagttggtggagggcgaacttgggagattcgctatgataaggggggaggagccaacccaaacatacaaccggctcaaaacccttgtcaacaagataagaagctatggaagcacgcgatggacggaccacgacgtcgtccgcctaatgctaaggtcctttaccgttcttgatcctcatttggtgaataatattcgtgagaatcccaggtacaccaaaatgtcgcccgaagaagttcttgggaagttcgtaagcgggcgaatgatgatcaaggaggcaagatacgtggacgacgcgttgaacggtcctatccatgagcctcaacccattgctctcaaggcaacaaggagcaaggaggcgctaccaagcaaggtggcacaagttgaggcggccgggctaaataatgaggagatggccctcatcattaagcgcttcaagacggcgcttaaaggtcgcaagggacagccaagcaagaccaagacaaaggagaagcgctcatgcttcaaatgtggtaagatcggtcatttcattgctaactgccccgataatgaaagtgaccaggaaaaaggggacaagagggaaaagaagaagcattacaagaaggccaagggcgaggcgcatctaggcaaagagtgggactcggactgctcctcctccgactccgataatgaaggactcgccgccaccgccttcaacaagtcatctctcttccccaacgagcgtcacacatgccttatggcaagggagaagaaggtatgtactcagaactctacctatgcttcttcaagtgaggacgaatctagtgatgaggatgaagtagattactcatgtctgtttaagggcctggatagaaccaaggtagacaaaattaatgaattgattgatgccctgaatgagaagaacatacttctagaaaagcaagaggatttgttgtatgaagaacatgataaatttgtagaagctcaaagatctcatgctctagaagttaaaagaaatgaaatgctttcttgtgaattatcttcttgccatgatgcaatttctaaattaaggagcattaatgatgattttaatgctaagttagagattgctagtaaatccacctcttgtgtagaaaatgttgtagcgtgcactaagtgtaaagatattaacattgatgcttgtagtgaacacctagcttgcatttctaaattaaatgaagaggtagctagtcttaatgcccaacttaatactagcaaaagtgactttgagaaactaaaatttgctagggatgcctacacggttggtagacacccctcaattaaggatgggcttggcttcaagagggaagccaagaacttaacaagccataaggctcctatctccgccaaggagaaagggaaggcccctatggcaagtagcactaaaaggaatcatgcttttatatatcatgataggagacaaactagaaatgcttataggagttataatccttatgatgattttaactcacatgccatgtttgcttctagttcttcctgtatgcatggtagaaatatgcctaggaaaaatgctatgcctagaaagaatattattcatgccctaggaaaaaaggataggaaggcttatgcatccgggggttcaagctggattattgatagcggttgcacaaaccatatgacgggggagaagaagatgttcacctcctacgtcaagaataaggattcccaagattcaatcatattcggtgatgggaatcaaggcaaggataagtctgaaacccaagggaccctcaagcgcttcctcaggagagctcaaaatgagtttgagctcaaggtgaagaagataaggagcgacaacgggtccgagttcaagaaccttcaagtggaggagttccttgaagaggaagggatcaagcacgagttctccgctccctacacaccacaacaaaatggtgtggtagagaggaagaacaggacgctcatcgatatggcgaggacgatgctaggagaggtctaccttcatcgcctcctcaagaagacgtcgtatgagctactaaccggtaacaaacccaatgtatcctactttcgtgtatttgggagcaagtgctacattctagtgaagaagggtagaaattctaaatttgctcccaaagctgtagaagggtttttgttaggttatgactcaaatacaaaggcgtatagagtcttcaacaaatcatcgggtttggtcgaagtctctagagacgttgtatttgatgagactaatggctctccaagagagcaagttgttgattgtgatgatgtagatgaagaagatgttccgacggccgctatacgaaccatggcgattggagaagttcggccacaggaacaagatgaacaagatcaaccttcttcctcaacaatggtgcttcccccaactcaagacgatgaacaggttcatcaacaggaggcgtgtgatcaagggggagcacaagttgatcatgtgatggaggaagaagcacaaccggcacctcaaacccaagttcgagcaatgattcaaagggatcatcctgtcgaccaaattctgggtgacattagcaaaggagaggagctcaacaacttcaagaggaatgaagtttggacactggtgcctcgtccgaagcaaaatgttgtgggaaccaagtgggtgttccgcaacaaacaggacgagcacggggtggtgacaaggaacaaggctcgacttgtggcaaaaggttatgcccaagtcgcaggtttggattttgaggagacttttgctcctgtggctaggctagagtctattcgtatcttgctagcatatgtcgctcaccattctttcaggttgttccaaatggatgtgaagagcgctttcctcaacgggccaatcaaggaggaggtgtacgtggagcaaccccctggcttcgaggatgaacggtaccccgaccatgtgtgtaagctctctaaggcgctctatggacttaagcaagccccaagagcatggtatgaatgccttagagactttctaattgttaatgctttcaaggttgggaaagccgatccaactctttttacaaagacatgtgatggtgatttgtttgtgtgccaaatttatgtcgatgacataatatttggttctactaaccaaaagtcttgtgaagagtttagcagggtgatgacgcagaaattcgagatgtcgatgatgggcgagttgaactacttccttgggttccaagtgaagcaactcaaggacggcaccttcatctcccaaacgaagtacacgcaagatctgctaaagcggtttgggatgaaggacgccaagcccgcaaagactccgatgggaactgacggacacaccgacctcaacaaaggaggtaagtccgttgatcaaaaagcataccggtccatgataggttctttgctttatttatgtgctagtagaccggatattatgcttagcgtatgcatgtgtgctagatttcaatccgatcctaaggagtgtcacttagtggcggtgaagcgaattctgagatatttagttgctacgccttgcttcgggctctggtatccaaaggggtctacctttgacttagttggatactcagattccgactatgctggatgcaaggtcgataggaagagtacatcggggacgtgccaattcttaggaaggtccctggtgtcgtggaactctaagaaacaaacttccgttgccctatccaccgctgaggccgagtacgttgccgcaggacagtgttgcgcgcaactactttggatgaggcaaaccctccgggactttggctacaatctgagcaaagtcccactcctatgtgataatgagagtgctatccgcatggcggaaaatcctgttgagcacaaccgcacaaagcacatagacatccgacatcactttttgagagaccaccagcaaaagggggatatcgaagtgtttcatgttagcaccgagaaccagctagccgatatctttaccaagcctctagatgagaagaccttttgcaggctgcgtagtgagctaaatgtcttagattcgcggaacttggattga

SEQ ID NO: 96868 - DNA, 262 bp, Zea mays
  Clone ID: MRT4577_19860C.1
ggcgtacgcggaagcgttggataaaaaagaaaaaaattttttgtttttgaaagatgaaaaataagagggggagggtattttttaaattgggggtgggttgttttaaaggataaaagtttacttacgggttttgctaggtaattgtttttgtatagtggtatttaaattgaattaattggacgttgatttataatatggtgagtgggaaaacattggtgttgcctaatttaatagaattttaaaaaatgctgattttttaatt

SEQ ID NO: 96869 - DNA, 339 bp, Zea mays
  unsure (1)..(339): unsure at all n locations
  Clone ID: MRT4577_19861C.1
ccatgtggaggagggctttatttatggtgctgttcatggctggcgccgcgctgctcgccggggccgccggcgccngcgcgcagcngggcgtgtggtgcatcctctcccggcccctgttccagagcctgctgcgccaccgcggcgtcagcgggtgccagggcgccttctcncctacgacgccttcatcgaggccgccggcgggggccccggctttttttttttttcggcgngcnggcgcgcaggcgggagctcgccgccttcttcggtctgtcgccccccgcttccgccggtggctgggcgtctgttccggttggtccgtctgcctcgggtttctgccgg

SEQ ID NO: 96870 - DNA, 2163 bp, Zea mays
  Clone ID: MRT4577_19862C.1
ttcgtggacgcgaacactcgcgttctctggcgcgaccgggctagccactagcctccctctgctccattctctctcgcacggcacggtccagcctccctgtgctcctccatgccgtggcgccaaggggagcttcggcggtgaccgtcgccttcacctccgccgcgccggcgcccccgccgcctccagcgtcgccgcccctcctcctccgcccccgccccgccgcccgcgcgcgcctccgtcgtcaccgcctcgcctgctgcgcacccccatgccccacccgtcccggaaagggaagcttcacaccggtccgaggcggttttcacacggtaccaaaacacaccccggacggtcgggcacgtaagccccgtcccgtccttcagatatcggccgccaccttcacctccaccgccccggcgcacgtgcgcgtctccatcgtcgccgcctctcctccttcggacacgactgaccttccactggcgccgacgaagaagacacataggaagaagctcaccgccaaacctcatccagatccagtcgctaccctccgaaagccgcatacggaacgtctcgtctcttcctttggatccggcagccggtgctcctcctccggatccggtggtcaactccatcacccccagctccacctcccttagtccccctccatccgccctcacccaccgcttctatatcgccacctctctcgttgtagaagacactgaggatctgggaagtgaagccgttccgccgtgaagcagcgccaccccttgccatccgcccgaccgctgggaagcagggcccacgtctccaagcttcctacaggaagagcctgcgcccctcccaaaggacaaagatattaggatggatgaagtcacacaagctgttgaaaatctgaagaaagaatggagccaagctgtttcacagcttgaggagagcattgctgcaattgaatcatgtggaaaaacagggaaaggaaacagaggaagcaacttctcttccatggttgaatgagtcttcacagtatgctctgtcacttgcacatgtccttacagatccgtcttgatcttctggctcagcagctatctactgtttatgaaatgtattaagttctatcaaacttactgctgtctgccatacgttatagttagtatgacagtgttggattttttttaatttttttcttcttcttttagcctgctttttttttgcaaaaaaattgattgtgtttgcaggttgcgtgctagcctgaggaatgctaacttacaagcgaaagagaacattagaaaagctgctcaggaggagagggagcttcttctagggggtggagaagagtcaacaatccgtaggcgtaatctccagacaaaggttgggatgacatctgctgctgaaagtatcaccgagagcctccgacggtctcgccagatgatggttcaggaagtggaaaggagtgcaagtaccttggcaacatttgatgaatcaacaagtgttctccggaaggctgaaggtgaatatcaaggacaccgctctttgctaatgcgtacccgtggtttgctctccacgatgcaacagcaagatgttcttgataggatcatcctgaccatcggctttatcattttctccttggcggttctttatgttgtctcaagacgtattggtctattgacgctgcaaaggaaactggccgatgccatcagatccggttcattatcagccgatgacatcgtagcgaatgcccaacgtggacctgccccagcaaatgttcctgctcccatctacgatgaactgtgattcgtttgtcctctgtattgttaaggttagttttgcatgtggctattgggattttgtccagtgtgtggtggtcatgtaccgatctgcgattcattaaaataatttcaaatgaaaaatagttaactaaaaaaaaaaaaaaaaaaaaaaacggctttctggaatcacatgagaactggccaggtactctcactcctttatacagttcaaaactgggatcactgaaaataagtgtataatctgttcttatagcttgcactatttgttttacagtctaaatatttaaacttaatgaaatatctttatatagtgtgtacacctaacagctcttcacatttcaatgagcatctacaaattgaactttaaccattgttcctttcg

SEQ ID NO: 96871 - DNA, 887 bp, Zea mays
  Clone ID: MRT4577_19863C.1
ggcacgtaagccccgtctcgtcctccagatatcggccgccaccttcacctccaccgccccggcgcacgtgcgcgtctccatcgtcgccgcctctcctccttcggacacgactgaccttccactggcgccgacgaagaagacacataggaagaagctcaccgccaaacctcatccagatccagtcgctaccctccgaaagccgcatacggaacgtctcgtctcttcctttggatccggcagccggtgctcctcctccggatccggtggtcaactccatcacccccagctccacctcccttagtccccctccatccgccctcacccaccgcttctatatcgccacctctctcgttgtagaagacactgaggatctggccatcatcatccgtcgcccctcactcgatttcccatctgccgctccctcctggtctctgagccgctgatcgggtctccgacgcagggaagtgaagccgttccgccgtgaagcagcgccaccccttgccatccgcccgaccgctgggaagcagggcccacgtctccaagcttcctacaggaagagcctgcgcccctcccaaaggacaaagatattaggatggatgaagtcacacaagctgttgaaaatctgaagaaagaatggagccaagctgtttcacagcttgaggagagcattgctgcaattgaatcatgtggaaaaacagggaaaggaacagaggaagcaacttctcttccaaggttgaatggttctgcacaggatgctctgcagttgctcaagtccctgcagttccgggcttgatcttctagctcagcagctacctacttttgatgaagtgcagtctgggcaagcaccttagggtcgtgggatgaacaatacagagttgcgtgctaac

SEQ ID NO: 96872 - DNA, 402 bp, Zea mays
  Clone ID: MRT4577_19864C.1
accccgctcgctaacccttctcattccttgcttcctccagtccctgccctcctccctccatcgccccgttccatccccttccccttccctttcacgagatccccatccggccatccccacctctgaccgcacctcccatgccgcactagttcacccgcccactccccacccaacacacgccgcccagcgagatccagagccgaccggtcgccggccctcgccctccgccccctccgcaggtgctcggcggaatgtcccaccgccagccggcgccaatgccggacaccctctcggacgccttcgccgccgcggtgctcctctcctccaccgacaagccggacacgctgcccccggggaggctctcgctagactacctcgccccgcactgccccgccaaggacg

SEQ ID NO: 96873 - DNA, 744 bp, Zea mays
  Clone ID: MRT4577_19865C.1
cattgggtacctcgaggccggccggggtctcgtcctccagatatcggccgccaccttcacctccaccgccccggcgcacgtgcgcgtctccatcgtcgccgcctctcctccttcggacacgactgaccttccactggcgccgacgaagaagacacataggaagaagctcaccgccaaacctcatccagatccagtcgctaccctccgaaagccgcatacggaacgtctcgtctcttcctttggatccggcagccggtgctcctcctccggatccggtggtcaactccatcacccccagctccacctcccttagtccccctccatccgccctcacccaccgcttctatatcgccacctctctcgttgtagaagacactgaggatctgatgtgcatgcttgtccctcttgcactgcttgtctgttacctgcaacaatctttgccaaacggacacagggaacctatgccccgctggactgcactacacgtgggacaggccatcatcatccgtcgcccctcactcgatttcccatctgccgctccctcctggtctctgagccgctgatcgggtctccgacgcagggaagtgaagccgttccgccgtgaagcagcgccaccccttgccatccgcccgaccgctgggaagcagggccccacgtctcaagcttcctacaggaagagcctgcgcccctcccaagggacaaagatattaggatggatgaagtcacacaagctggtgaaaatct

SEQ ID NO: 96874 - DNA, 273 bp, Zea mays
  Clone ID: MRT4577_19866C.1
gaaaaaaatcacctgacgggggattataaatttattttttgggggggttcacaatttatgaccaagccataagggtgcctacatacataccttggtacatataaacaatttttcggggctgacaaattctaacctttattttgggtgcccaccccggggttttaaaactggtcgcctgaaaaccgtgaacctgaataacttggagtttcattacggggaaaaaattccatttaccaagcccctttatttataggggcttttttttaccaaaaa

SEQ ID NO: 96875 - DNA, 1219 bp, Zea mays
  unsure (1)..(1219): unsure at all n locations
  Clone ID: MRT4577_19867C.1
caccgaccgagcgagcgctagttaggcaagtgagctgctgctcatgatgagtcactagtcagtagtcgcaacgcgcacgcggtgcgagcgtgaggttgatgggcgcgcagggatgagcgagagtgccctgaccatcaagcggctgagcggtggcggtgccggcggcggcaatgcgggagagagcgctggcgcggcggcccctgggaagaaggaggcggcaatgcggcgcgggtccggggtgtcaacgcgggcatcatggacgagacggtgctgcagctggtgttccgggcgctcaactgggacccgcagtcgctgtgcgcggtggcgcgggtgagccggcgcctgcgcgccgtggcggagcgggtgctgtggcgggagctctgcgcctcgcgggcgccgcggatggtggcggcgctgacgggcggggcggccacctcggcgccggcggccgggcgcatcggcggcgggtggccggcgctggcgaagctcctgctcttctgctgcggcgcggcgggcgcgggcgtgggggccacttcgccccggtctcccgcttctccaagacgtccggccggagcttcctgtcgcgccgctgcgcgggggacctgctgtacgtgtcggacccctgcgagcacgccgtggcgggcgccaacgacaacgtcggcgcctaccgcggcgtgttccgcgggttcatgcgctcccggacgcgggcgtgcctggtgggccaccgcaccgcgctggagccgcgcgtgcgctgcccctactgcggcgcgcgcgtctggagcatgaccgccgcggggctcgccccgcgcagcgcgtcccgcaggctcggcgcccacgaggaccgcctcgagtacttcgtctgcgtcagcggccacctccacggcagctgctggctcgcgcgcctctccgacagcgagggcggcggaccaggcggcgccagcgacgacgacgacgacgcgtccgccgccgccagcgaggaggacgacgccagcctctgacgccgatcgatcgacgggagggacgtgtacagagagttttagttagcgtcagcttggcattttccccaccttgctgtcttcgattcatcttgtaaatgcagaggctctggcgttctgcacttgtgctgttggctattgcaatgcacaccggtttgcctgctgccagagatgaanaaaagaatgatcaacctaccttggttgtaccaanatcggagtctgtc

SEQ ID NO: 96876 - DNA, 1197 bp, Zea mays
  Clone ID: MRT4577_19868C.1
gccggctgcggcctgtgaaaattgcggcacgctgagattggacaccgaatgagcagcgagcaccagtttaggcaagtgagcagctcgccagttgtcggtcgcggcctcctgcgctcagcgcttcgctcgcggtgccggtgcgtgaggtgaggttgatgggcgcggagggatgagcgagagcgccttgaccataaggcggctgagcgggccgtcgaacggcggcggcggcaatgcgggagctagctcttgcgcggtcggcacctggggaggaggaggcggcggcggcggcggcaatgcggcgagcatccggggcgtcaacgtggggctcatggacgagaaggtgctgcagctcgtgttcctggcgctcaactgggacccgcagtcgctgtgcgcggtggcgcgggtgagccggcgcctgcgcgccgtggcggagcgggtgctgtggcgggagctctgcgtctcgcgggcgccgcggatggtggcggcgctgacgggaggccccgcgggctcggcgccggcggccgggcgcgtcggcggcgggtggccggcgctggcgaagctgctgctcttctgctgcggcgccgcgggcgcgggcgtgcgggccacttcgccccggtctcccgcttctccaagacgtccgggcggagcttcctgccgcgccgctgcgcgggggacctgctgtacgtgtcggacccctgcgagcacgccgtggcgggcgccgacgacgtcggcgtctaccgcggcgtgttccgcggcttcatgcggtcccggacgcgggcgtggctggtgggccaccgcgccgcgctggagccccgcgcgcgatgcccctactgcggcgcgcgcgtctggagcatggccgccgcggggctcgccccgcgcagcgcgtcccgcaggctcggcgcccacgagggccggctcgagtacttcgtctgtgtcagcggccacctccacggcagctgctggcttgtgcgcctctccgacagcgagggcaccggacccgacgccgacgacggcgccagcgacgaggacgacgccgatcgacgggagggaagtgtacagagtattagatagcgtcaacttggcatttctccaccttgttgtctttgattcatcttgtaaagttgtaaattgatagactagctccaacaagaagctttaaagggttctgtaccctaaatttagggtgcgtttggttgc

SEQ ID NO: 96877 - DNA, 2129 bp, Zea mays
  unsure (1)..(2129): unsure at all n locations
  Clone ID: MRT4577_19869C.1
agggcacccttcttgtcgcgccggctggccccgttgccggcgcagcggcggcgaaccatggcggggggccctgccgccgcactcccctcacggtcgtggcgctcgggcccggcgctttagtggatgccgcgccgtcccgcgggatctttggcgttgagagcaaacccagaaaggaaaaaggaaaaaaagaaaacagagagaggggagagtgggagacggtcggagacagaggcctcactcctccacactctcagtcgtcttccagtcccagcgctttcttggatcgcgaggaaaccactcggggagtttgcagttgcagagaactgtatcggccgaagtggttgcacggtgtgttggccttggccatgcgccacggcagggaacagagacgagcagcagggaggcagcaatggaggcgctcattgaccctgctctcgctgtaaagatagtcccgcggtgccctccgaattccacttgatccaactctcgacatgaagcggccacgcggcgctactccctccctgtctgcgatgcccaatcatcaggaagatgacggctacggcgtggtcgggatggaggcggacgtggacgtggacgtggacgaggagatgatggcgtgcggcggcggcggggagaagaagcggcgcctgagctccgagcaggtgcgcgcgctggagcggagcttcgaggtggagaacaagctggagccggagcgcaaggcgcggctggcgcgcgacctcggcctgcagccgcgccaggtcgccgtctggttccagaaccgccgcgcccgctggaagaccaagcagctggagcgcgactactccgcgctccgccagtcctacgacgcgctgcggcacgaccacgacgcgctgcgccgcgacaaggacgccctcctcgccgagatcaaggagctcaaggcgaagctcggggacgacgaggcagcggcgagcttcacgtcggtcaaggcggagccggcggcctcggacgggccggcccccgcgggggtggggtcgtccgagagtgactccagcgcggtgctgaacgacgcggacccgcccgtggcggaggcgccggcgccggcgcccgaggtgcagggcacccttcttgtcgcgccggctggccccgttgccggcgcagcggcggcgaaccatggcggggtgttcttccacgggagtttcctgaaggtggaggaggacgagacgggccttttagacgacgacgggccgtgcggcgggttcttcgccgtggagcagccgccggcgatggcgtggtggaacgagcccgcggaacactggaactgaaccgaggtggacgcggcagtgcagcgtagtagaatcgggatctcggacgagcggtggaggaataaccgaatagaggaattcggagcgataaagaaggggcttttctgcaaattttgtaaaacggggttttacctagccctactttttgtcaattctcgagcgtattagcagtagacagtagtagtagtctgggtcggaacccagtcaagctcagcgcctgggttgcgtttggactccagtgcagaattgcgtagaggatttagaggaagagcggagctgagctgagcgaggcaggagtaaaggacaacctgtatgtcactgttagtgggcccagtgccacgtgaaagtcaggcactgttggtgcccattgacggccggacttgccagcgacgcggatgggcgacgtgaacgtgtctggccgagcagtgcgctcgctccctccccccaatgggccatggcctcttccgcgaaagcgtgctcccctgtaagtatctgatttggatgctagccaaggctgctggatgattacttcgattatctaaaaaatctgatttggatgctcgccgcaaaaacaatggctcgctgcggagggaatcggcagcggtgccgtcagattgtggaatgtgttcaacggttatctgttggattaatgtggctgtggccagattgtaccccgctgattagtcaatgccattggctcaagaaactaaatcgccgccgccgaggagaacaaggtgcatgacactttctgctcgacgccgtgtgaggcccggcagggnatggacctggtgttgcgacaggagtcccttcgacctctcacagcactcc

SEQ ID NO: 96878 - DNA, 273 bp, Zea mays
  unsure (1)..(273): unsure at all n locations
  Clone ID: MRT4577_1986C.1
gaacccgggcggaccaaccggcaccacccacaactctcacccattttccttcgtgctcannccacgagagtncgggtcacagccaaggcggncgnncttctttcggagggaggccagggatctctactctcgtccggcggggcgtgggcgtccatcggcgcgcgccgggcaaatgcgggtacctcacggcggaggagcgctgcgctgcgctgcgccaggagcgatcatgccttgacagcacacacaccatcacgcagaggagggtcatcaaat

SEQ ID NO: 96879 - DNA, 106 bp, Zea mays
  Clone ID: MRT4577_19870C.1
atgacaagatgcctcgatgggacttgcgagagtttgatgttcattgtgcttacaacataatctacaaatctgatttcatcatgagctacttactacataattagct

SEQ ID NO: 96880 - DNA, 1011 bp, Zea mays
  Clone ID: MRT4577_19871C.1
cctcggcactccttccatggtgcccagctggccgagctcctccaatggcgccctccctttcctccccagcgctgcccctgctttagtcggctccctctccctgctcctgagcgcgcagggcagatcaagtctccctggatccatggcaccggtgaagctcgagcagccaagctcccagctatggcgccctcctccctggtctccctgcgctcagcttccctaacccggtgcccttgcagcatggcgagcagcagctccctcccatggcacgacgccgctgctccttttttcccccctcgctctgctcgctctgccaccagcagccatggccgacttccactcccttggagcaggcgcccccaatagccatggcgcccttccctgttctccagcgccctccctgccatcttccctcccatgggcgcgagctccaccccctgcaatggacgctgcgcgagatccccctggcgcctctgtttttcccagccgtgcagctccctattcgacttccatggccgcccagctcccatggacgcccagaaattccagcagcaagcccccttcctcgctgtacgtcgtggtgcccgccggctgttcgacaaaatgcacagcaagccgcgcgctgcagcagccctcccgttcgatctccactccccttgtcgtgtgtcgtcgctctcgtgctcgctgcgcagccccctccgcgacgccgtcgaaacccgtgctagtggtcgacgccgcgcttcgcgccttggccgttcgacgaaatgccgagccatgtggacagcccatgcgtctagtcacgacttgttcaggttgattgaattatagtttataatatgccccccccccccccctcgggtagtgcatgtatatatgtggatgtgtgtactatgtttcgcgctatacatgttggtaggatcgcatttgcgaatagagaacaaaagaggttgttgatgtgtgcgaattgtaatttgtctaatttcgttttggtcaaaacccccaacaacaccc

SEQ ID NO: 96881 - DNA, 319 bp, Zea mays
  Clone ID: MRT4577_19872C.1
aatgaccaaacatagtgacaactttactactatcaaatccgtatcttcgggggtggacttttatatgagtggggggggactacacctcaacaggaccatctctatccactcgcactctcttgcaaattcttcgctcgtccaaaccccttcgacactatccaaaacttcactcgcttcactcaacctaattaatcgactctgccgcctcaccctatgcaaaccatctaaatctcctcttttcggagcgctacgcccccaatcaccattaggcatggcgagacctcctcaacttcaccccgttcagcctactgtactatct

SEQ ID NO: 96882 - DNA, 199 bp, Zea mays
  Clone ID: MRT4577_19873C.1
ctccacgcgttcgggcatacggtggtggtgcttatggaggtggtgcctatggaggcggggcatatggaggcagctcctatggaagcgccccatgtgatggttatggaactggtggatacggcaaataaggaggaccagggggtaatggtggtgtgagtacaggtgctaagggttcaagtcaggactatccatatggaaa

SEQ ID NO: 96883 - DNA, 433 bp, Zea mays
  Clone ID: MRT4577_19874C.1
ccccccaatttcatggggcggtaccaggagcgggagcaacactggagcacagggcagcgggacagaaaaaaaaaggaaccgctcgctctcagatgcacagtgcaggaaccagcgcaaacacacagagagaaaaaccttctttgacaggggggggaacagcaagagacgaccgaaaaaaaccacgaacccaaatcctacgggaaaaggaaacaagccgctccaggagccagccgcttcagaaagggcagcctactggcgaagaacagaggggactggccgcagaaccagatgggaacgaaagccatggggggggcaacgcttagctgagcgaggggcagaaacagggattgaggggcaacaaggaagacaaaaaggcaacggacggggggggcgacccgggaacaggggaccgggaccgggaagcggaccagcg

SEQ ID NO: 96884 - DNA, 211 bp, Zea mays
  unsure (1)..(211): unsure at all n locations
  Clone ID: MRT4577_19875C.1
ttccaacaccacctcgcctgcgatctccggaggctgcgtcgcgtcgagcatggagcatgtctncctactgcggaaaggacaaggatgagctcatcaagaatgctgcctacattggcacccctggcaagggtatccttgctgctgatgagtccactggcaccattggcaagcgcctttccagtatcaattgtcgagaacgtttgaggagaac

SEQ ID NO: 96885 - DNA, 101 bp, Zea mays
  Clone ID: MRT4577_19876C.1
aatatcacccacatactacatctatactttccttctacttatatctcaaactactttcaggagggtattttcctaagctacacttctctatcctaattctt

SEQ ID NO: 96886 - DNA, 902 bp, Zea mays
  Clone ID: MRT4577_19877C.1
agctagttctagatcgcgagcggcgtggcttctctccccgctcccctcctgcccctttccttcgtcctcagatccgccgattccccgtccctgcgcctccgtctcatgatctctgcgcctctgcgggtgcggctgccggcgccgaaggctgccgccggggggtcgttcctgctcggcgcgtcctccgtcgagtccaatcccaatcccaagcccaagcccagcaggatccgctgcgccgccgccacgctgtacgaggtcctgggcctgcgcgccggcgcgacgggccgggagatcaaggccgcgtaccggcgcctggcgcgggagcggcacccggacgtggcgcccgcgcccggggccgccgccgagttcgcccgcctgcacgacgcctacgccacgctctccgacccggacagccgcgcgcgctacgacggcggcggcgccgcgcccgcggcggcggtggcgaggcgcccctggagcggcgccgtctacggccggccccgacgccgcacatgggagacggaccagtgctggtagtagagagtagagaggcacagccaagagccccacgcgcttcttgtctgtctgtagaatagttagacctcctgccgccagccatgcggccatggcggctcaccttggactttttttttggtttcggtggccatccatgtagcgtgatttttcgttttccttcctccacttgcccttgtacctgtgtgctgtggtcttgacttcttgagatgtaaatactagtacttgatgagatggttggaggagtaaaaaaaaaaaaaaaaaaaaaaaaaaaaaaaaaaaaaaaaaaaaaaaaaaaaaaaagaaaaaaaaaaaaaaaaaagcggccccctgcctctgttaattctaaataatccaagctgttctctcct

SEQ ID NO: 96887 - DNA, 295 bp, Zea mays
  Clone ID: MRT4577_19878C.1
aagggtttcggtggcacaaagttaacaccccaggcacagtttgtgaaagggccatgctatttacagaattttacagaggatacaagtggggggttgatggggaagacctaatggaacactaaacaccaaacctttgttggtggtgggaaaagctggagtattattctcggctctacaacacctaaatgagaacgacctttttagagagaagaatagacgccacttcgatgaggtgctataaacttggtcaggacaaaatgccactcgaagattattcttcaagattgacgagcat

SEQ ID NO: 96888 - DNA, 516 bp, Zea mays
  Clone ID: MRT4577_19879C.1
ctttggcatgctcaagtttatccattatgctttactttcatgttcaacactcagcaaattggttagtcctttaatattggcgtcattcaatccaccaaaacccacaagggaactaaatacacttttacttaactttgggtcgattgtacaaacaaataataggttaattaatggatcatctgcttgctgaaggaatcacactatggagtaggagtgtttattatatgaccattcggatgggtaatgggagcaacaacacgatcaactagagaaggtgttatatatgtattttggtgcgtgcttactggtagcctgtggtggtttacatacaatcttacataataagactgttaatgcttatctaatgtgtagagtgtattatcaaatgaggagggtaaactcatggacaactccactatagcaaggatatagatgttgtggtgatacgataatctatgtatactgacacatgctacacctaaacaccataatatcttaggaagcttgttttggatc

SEQ ID NO: 96889 - DNA, 1787 bp, Zea mays
  Clone ID: MRT4577_1987C.1
tttcgccctattcaccccccccctctaggcgactttcacttgtgcagcttgtcaagcaggataaatcagaaacccaagggacccttaagcgcttcctaagaagagctcaaaacaaatttgagcttaagctgaaaaagataagaagcgacaacgggtccgaattcaagaatcttgaagtggaagagtaccttgaggaggaaggtgtcaagcacgagttctccgctccctacacaccacaacaaaacggtgtggtagagaggaagaacaggacacttttagacatggcgaggacgatgcttggtgaattcaagacggccgaacggttttggatggaagctgtgaacacggcttgccacgccataaaccgggtctaccttcatcgcctcctcaagaagacgtcgtacgaactactaaccggtaacaaacccaacgtgtcatactttcgtgtatttgggagtaaatgctacattctagtgaagaaaggtaggaattccaaatttgctcccaaagctgtagaagggtttttgttaggttatgactcaaatacaaaggcgtatagagtcttcaacaaatcatcgggtttggttgaagtctctagcgatgttgtatttgatgagactaatggctctccaagagagcaagttgatcttgatgatgtagatgatgaagatgttccaacggccgcaatacgcaccatggcaattggggatgacgagcacggggtggtgacaaggaacaaggctaaacttatggcaaaaggttatgcccaagtcacacgtttggactttgaggagacttttgctcctgtggctaggctagagtctattcgcattttgttagcatatgccgctcaccattcttttaggttgttccaaatggatgtgaagagcgctttcctcaacgggccaatcaaggaggaggtgtacgtggagcaaccccctggctttgaggatgaacggtaccccgatcacgtgtgtaagctctttaaggcgctctatggacttaagcaagccccaagagcatggtatgaatgccttagagactttctaatttctaatgctttcaaggttgggaaagccgatccaactttattcactaagacttgtgatggtgacttatttgtatgccaaatttatgtcgatgacataatatttggttctactaaccaaaagtcttgtgaagagtttagcagggtgatgactcaaaagtttgagatgtcaatgatgggcgagttaaactacttccttgggttccaagtgaagcaactcaaggacgacaccttcatctcccaaatgaagtacacacaagacttgctcaagcgattcggaatgaaggacgccaagcccgcaaagactccaatgggaaccgacggacatgtcgacctcaacaaaggaggtaagtccgttgatcaaaaggcataccggtctatgataggttcctcgctttacttatgtgctagtagaccggatattatgctaagcgtatgcatgtgtgctagatttcaatctgacccaagggattgtcaccttgtggccgttaagcgaattcttagatatgtagttgctacgccttgcttcgggatctggtatccaaaggggtcaacctttgacttaattggatattcagactccgattatgctggatgcaaggttgataggaagagtacatcagggacgtgccaattcctaggaaggtccctggtgtcttggagttctaagaaacaaacttctgttgccctatccaccgctgaggccgagtatgttgccgcaggactgaaagggaaatag

SEQ ID NO: 96890 - DNA, 150 bp, Zea mays
  Clone ID: MRT4577_19880C.1
caggtgccgaaagggccggttgagggatatgaggagattgaggagtttctgaggaccatgcaccaactgctgctggaggtggaatagatagagggcaccctgcagtgcccggaatctggacgtatgttccccatcagccgcgggatcccc

SEQ ID NO: 96891 - DNA, 1066 bp, Zea mays
  Clone ID: MRT4577_19881C.1
atcccgcatccgctgcctccgcctctcgagtctcgtccacccgtcgtcctcctagctcctctactcgccagtcgccatgggcaagattaagatcggaatcaacggcttcggaaggatcggcaggctcgtggccagggtcgccctccagagcgaggatgtcgagctcgtcgccgtcaacgaccccttcatcaccacggactacatgacctacatgttcaagtacgacaccgtccacggccactggaagcacagcgacatcacactcaaggactccaagacccttctcttcggtgacaagccggtcaccgtctttggcatcaggaaccctgaggaaatcccgtggggtgaggctggcgctgagtacgtcgtggagtccaccggcgtcttcactgacaaggacaaggctgctgcacatcattcctagcagcaccggtgctgccaaggctgttggtaaagttcttcctgatctgaatggcaagctcactggtatgtccttccgtgttcctactgtggatgtctcggttgttgacctcaccgtcagaatcgagaagggggcctcctatgaggatatcaagaaagctattaaggctgcttccgagggtccactcaagggtatcatgggttatgcggaggaggatctggtttctaccgacttccttggtgacagcaggtcgagcatcttcgacgccaaggccgggatcgctctgaacgaccacttcgtcaagctcgtctcgtggtacgacaacgagtggggctacagcaaccgcgtcgtcgacctgatccgccacatgttcaagacccagtagagggttttttcccctctgcttctcatggatggttgctgcttgtgtatgccgagaataaatgtggatggcgcgtgcctctgggtcgccaggttcatgctgagtctggacatgttttgcacttttgtttccattcctgctaccatctgtgacagaaccgctcgctaatatgggacctgagattagctttttgcttgtggtgaggttgcagttttgttctgtgttgttagtactcctatgattcaggtgttcgttataaagaa

SEQ ID NO: 96892 - DNA, 1856 bp, Zea mays
  Clone ID: MRT4577_19882C.1
gaaaaattgaaacaaaaatggattgcctgtaacatattctggaccctgcgggcaatacaccaggcacctatgccttattatgagggggcgcatattataagctggtatatttttagcacaactagcatacatgttgctgacatgcaaatcccaatatgtacaagtaataatcaaatcctgatctctcatcattgccctagcatactgaagactgacgcaatcaatcatactgacacgagaatgtataacttaatagtgcatgcttttttcaccatctgttaacaattgacctcgaggcctcctgcctgcacgcgtccgtagagatgccgtctgcgtccgcggcggcatcggcgccggcgtcaccccccgctataaatccgtcgcacccgcccacccacctgccgtgccagtgctctcatctgcgtacacggtctccctcttcctgtcagtagtagagtgagagtgaggcagcgagtgggagacaaggggaaatggggaagggagcgcaagggagcgatgcggcggcggcgggcggcgaggtggaggagaacatggcggcgtggctggttgccaagaacaccctcaagatcatgcccttcaagctcccgcccgtcggcccttatgatgtccgcgtgcgcatgaaggcagtggggatttgcggcagcgatgtgcactacctcagggagatgcgcatcgcgcacttcgtggtgaaggagccgatggtgatcgggcacgagtgcgcgggcgtggtcgaggaggtgggcgccggcgtgacgcacctgtccgtgggcgaccgcgtggcgctggagccgggcgtcagctgctggcgctgccgccactgcaagggcgggcggtacaacctgtgcgaggacatgaagttcttcgccaccccgccggtgcacggctcgctggcgaaccaggtggtgcacccggccgacctgtgcttcaagctccccgacggggtgagcctggaggagggcgccatgtgcgagccgctgagcgtgggcgtgcacgcgtgccgccgcgcgggggtggggcccgagacgggcgtgctcgtggtgggcgccggccccatcggcctggtgtcgctgctggcggcgcgggccttcggcgcgccgcgcgtggtggtcgtggacgtggacgaccaccgcctggccgtggccaggtcgctgggcgcggacgcggcggtgcgggtgtcgccccgcgcggaggacctggcggacgaggtggagcgcatccgcgcggccatgggctcggacatcgacgtcagcctggactgcgccgggttcagcaagaccatgtcgacggcgctggaggcgacgcggcccggcgggaaggtgtgcctggtcgggatgggccacaacgagatgacgctgccgctgacggcggcggcggcgcgggaggtggacgtggtgggcgtgttccggtacaaggacacctggccgctgtgcatcgacttcctgcgcagcggcaaggtggacgtcaagccgctcatcacccaccgcttcggcttctcgcagcgggacgtggaggaggccttcgaggtcagcgcccgcggccgcgatgccataaaagtcatgttcaacctctaggcgggcaagccgcctccctctcggtccagccgtctaggcgccgtcgccgttgccgtatgcccctgcccccacccaggccacagctcctggaataaaaatgacagaaaagaaactttatagttcgatgaatgggcagtttgccgtggttttggaataatttggactttgtcttctttcgcttctgttgtcgtaccattgtcttaatcgatttgtggatttcgaagtctccttttattgacaaaagttcgcgaaaactaagtactt

SEQ ID NO: 96893 - DNA, 795 bp, Zea mays
  unsure (1)..(795): unsure at all n locations
  Clone ID: MRT4577_19883C.1
gggaccctcgaggccggccgggactggagataaggaggcggaggcggacaggccacccccgcacctcattccacaattatttgcgcccgtcccatgtaatctctcgtgactggtgtaacagtcagtcggctttaaaaggacacgagcgcttaaacccccaccccatatccgcatccgctgcctccgcctctcgagtctcgtccacccgtcatcctcctagctcctctactcgccagtcgccatgggcaagattaagatcggaatcaacggcttcggaaggatcggcaggctcgtggccagggtcgccctccagagcgaggatgtcgagctcgtcgccgtcaacgaccccttcatcaccacggactacatgacctacatgttcaagtacgacaccgtccacggccactggaagcacagcgacatcacactcaaggactccaagacccttctcttcggtgacaagccggtcaccgtctttggcatcaggaacccaggaaatcccgtggggtgaggctggcgctgagtatgtcgtggagtccaccggcgtcttcactgacaaggacaaggctgctgcacatctcaagggtggtgccaagaaggttgttatctctgccccaagcaaagacgcacccatgtttgttgttggtgtcaatgaggacaagtacacctcggatgttaacattgtttccaatgctagctgcaccacaaactgccttgctccccttgctaaggtcattcatgacaacttcggcattgttgagggtttgatgacnactgttcatgccatcactgcca

SEQ ID NO: 96894 - DNA, 720 bp, Zea mays
  unsure (1)..(720): unsure at all n locations
  Clone ID: MRT4577_19884C.1
cacaaccgcatacaaaacttcgggatggagtgacaagtcattgtattgcaaaagcagatacaggattaacgacaggttgcancatttctttttggcagctgccttggtaaccttggcgccggtcgggtccttcttctccacactcttgatgactccaacagcaactgtctgcctcatgtcgcggacagcaaacctaccaaggggaggatactgcgagaatgtctccaccaccatgggcttggtgggaatcatcttcaccataccagcatcgccgttcttcaagaacttgggctctttctcaagctccttgccagaacgccgatctggccagggtggttcatgatgatgacctgggacgtgaagctggcagcctccttggcagggtcatccttggagtttgaggccacaaaaccacgcttgagatccttcacagcaacgttcttcacgttgaagccaacattgtcaccaggaagggcctcctgaagagcctcgtggtgcatctcaacagacttcacctcagtagtcaggccagttggaccgaaggtgacaaccataccaggcttgatgacaccagtctccacacgaccaaccggtacagttccaataccaccaatcttgtacacatcctgcagggggagacgcaggggcttgtccgaaggtctcttgngctcggtgatctggtcaagagcctcaagcagggtcgggcctttgtaccagtca

SEQ ID NO: 96895 - DNA, 1541 bp, Zea mays
  Clone ID: MRT4577_19885C.1
attgtctgttcgaaaccaccactgcctgcgccttcttctggagaaaggcaggcggaggcggacaggccacccccgcacctcattccacaattatttgcgcccgtcccatgtcagtcggctttaaaaggacacgagcgcttaaacccccaccccatatccgcatccgctgcctccgcctctcgagtctcgtccacccgtcgtcctcctagctcctctactcgccagtcgccatgggcaagattaagatcggaatcaacggcttcggaaggatcggcaggctcgtggccagggtcgccctccagagcgaggatgtcgagctcgtcgccgtcaacgaccccttcatcaccacggactacatgacctacatgttcaagtacgacaccgtccacggccactggaagcacagcgacatcacactcaaggactccaagacccttctcttcggtgacaagccggtcaccgtctttggcatcaggaaccctgaggaaatcccgtggggtgaggctggcgctgagtatgtcgtggagtccaccggcgtcttcactgacaaggacaaggctgctgcacatctcaagggtggtgccaagaaggttgttatctctgccccaagcaaagatgcacccatgtttgttgttggtgtcaatgaggacaagtacacctcggatgttaacattgtttccaatgctagctgcaccacaaactgccttgctccccttgctaaggtcattcatgacaacttcggcattgttgagggtttgatgacaactgttcatgccatcactgccacacagaaaactgttgacggaccctcagccaaggactggagaggtggcagggctgccagctttaacatcattcctagcagcaccggtgctgccaaggctgttggtaaagttcttcctgatctgaatggcaagctcactggtatgtccttccgtgttcctactgtggatgtctcggttgttgacctcaccgtcagaatcgagaagggggcctcctatgaggatatcaagaaagctattaaggctgcttccgagggtccactcaagggtatcatgggttatgtggaagaggatctggtttctaccgacttccttggtgacagcaggtcgagcatcttcgacgccaaggccgggatcgctctgaacgaccacttcgtcaagctcgtctcgtggtacgacaacgagtggggctacagcaaccgcgtcgtcgacctgatccgccacatgttcaagacccagtaggggtttttccccccctgcttctcatggatggttgctgcttgtgtatgccgagaataaatgtggatggcgcgtgcctctgggtcgccaggttcatgctgagtctggacatgttttgcacttttgtttcccttcctgctaccatctgtgacagatccgctcgctaatatgggacctgagattagctttttgctgcttgtggtgaggttgcagttttgttctgtgtttctgtgttgttagtactcctatgatttaggccttgttccaatctcgcgagataaactttagcagctatttttt

SEQ ID NO: 96896 - DNA, 545 bp, Zea mays
  Clone ID: MRT4577_19886C.1
tcattctctaaaaaacaatattcctttcctttttttaaaaaaaagttattgatcaatttgtgaaagtaaagctgacatgggaaacaactcaagagtcagaaaggcaaaccacttactcaacaacactcgaaaaatagaaagggcagcccaaggctaaactgcttcaagaactaaactgaaacaaacatgccctaacaaacagattttcactacataattcaacaatggttaggtggccactggccagtccacgtggctttgggatccaataagctcgtcactaactcctccactattttagtttcctgtctgctgtgcatcattttcatgctgatccaaaggaacttctagttgttcaaaggaatagaaaaattttaaacaaagatagggtaggagtgcaggttggctttggaagcaacagcttttgtttctagtgtcgcattccccattatctggaggcaacactactccagcagtttattctagtgctggctagctagactagagctgctggcaggcatgctaggcgccgcaccgctggctca

SEQ ID NO: 96897 - DNA, 737 bp, Zea mays
  Clone ID: MRT4577_19887C.1
acacaataacagtaacaaccgcatacaaaacttcgggatggagtgacaagtcaggtattgcaaaagcagatacaggattaacgacaggttgcatcatttctttttggcagctgccttggtaaccttggcgccggtcgggtccttcttctccacactcttaatgactccaacagcaactgtctgcctcatgtcgcggacagcaaacctaccaaggggaggatactgcgagaatgtctccaccaccatgggcttggtgggaatcatcttcaccataccagcatcgccgttcttcaagaacttgggctctttctcaagctccttgccagaacgcctgggacgtgaagctggcagcctccttggcagggtcatccttggagtttgaggccacaaaaccacgcttgagatccttcacagcaacgttcttcacgttgaagccaacattgtcaccaggaagggcctcctgaagagcctcgtggtgcatctcaacagacttcacctcagtagtcaggccagttggaccgaaggtgacaaccataccaggcttgatgacaccagtctccacacgaccaaccggtacagttccaataccaccaatcttgtacacatcctgcagggggagacgcaggggcttgtccgaaggtctcttgggctcggtgatctggtcaagagcctcaagcagggtcgggcctttgtaccagtcaaggttggtggacctctcatcatgttgtcgccctcaa

SEQ ID NO: 96898 - DNA, 780 bp, Zea mays
  unsure (1)..(780): unsure at all n locations
  Clone ID: MRT4577_19888C.1
ctaaacagtgtctcattggctttctcctccccctctctgctatcctccattgcaagttgtttggagcttaagcgaacagcatatcccggtgagtttggggcagatcctggcgaccgagcatcgattttcgatgagaacccgacgaatctcatcggtcgcagccgctgcgcgctaggtgggaactcgagcaaggcgagatcgaggcgggatccagaggctaagctacggtttccgacgcggatccggcggttctcggtcgctgcgcgccagatgagaatcgccgttgttgctcggtaaccgtcgtgttgtgtgtagaatcctggttggtttgccaaccaaaaaccctcttacccccccagggaaaaaaaaaaaaaaggggtttgtttttaagggccatttggggggggggggggaaaaacccctattttttaaaggtttttttttgggggggggccgaaaaatatttttttaaaaaaganaaagctttagtttttggaaaaaaaaaaaaaaaaaaaaaaaaaggcgcccccctgggggggcggggcggcgccccccccttaaaaaaaaaaaggggggggccccccccccccgcggggggggggagaagaaaaaaaaaaaaaaaaagttttttttttccacccccccccccccccccccggggggggggggggggggggccaaaaaaaactttttttttacacgagggggggggtataccccccccccccccccccccccccgcgcctttttttttttaataggggggggggggggggaaaa

SEQ ID NO: 96899 - DNA, 432 bp, Zea mays
  Clone ID: MRT4577_19889C.1
agcagtggtaacaacgcagagtacttttttttttttttttttttttttttttttaattttttttttttttttttttttttttttttttttttcgccaccaaaacggaaacctcattgtttattcttaacaaagcacaaaagaactaaaactggcgaattcgttacaggacgggggcatataagttaaaacacaaaaggacaaccgggtccaaaaccagcatggatccagcttccaggggccccgttcacatttattctcagcatagacaagcagcaaagttggtctgcgaccaaaggccattgggacgaccctcgatggggaggcagaaatctatctctctactagcctacggggtcttgaacatgggggggatcaggtcgacaacgcggttgctgtaccccccccgcgtactctgcgttgttaccactgct

SEQ ID NO: 96900 - DNA, 1660 bp, Zea mays
  Clone ID: MRT4577_1988C.1
atggatcctaagggcaaggggattgtgatcaatgacaaggagaaggagtcattcatcaatgagcccaaggatgacaagcctaccgactcgggctcgggccacaaacgcaaagatgggaagaagaagaagacaagacgcatcaaggagattgtctactacgacgacaacgatgagtccacttcctcccaaaaggacaacgacgacaacgactacgagagaaggaaaccgattcatagaaatgcacaagctactactgtgttgctagcctccttgtgcagggacgagtaccataaggtgagcggcttggacaatgccaagcagatctgggacaccctcaagatctctcatgaggggaacgacgtcaccttactcaccaaaatggagttggtggagggcgagcttggaagatttgcaatgataaggggcgaggagccaacccaaacatacaaccggctcaagacccttatcaacaaaataaggagctacggaagcacgcgatggacggatcacgacatcgtccgcctaatgctaaggtcttttactgtacttgatccacatttggtgaacaatattcgtgaaaatcctaggtacaccaagatgtcacccgaagaagtccttggaaagttcgtaagcgggagaatgatgatcaaggaggcaaggtacgtggacgacgcgttgaacggtccaacccatgagcctcaacccattgctctcaaggcaacgaggagcaaggagacgctacctagcaaggtggcacaagttgaggcggccgggctcaatgatgaagagatggccctcatcatcaagcgcttcaagacggcgctaaagggtcgcaagggacagccaagcaagaccaagacaaagaggaagcgttcatgcttcaaatgcggtaagattggtcattttattgctaactgtcccgataatgaaagtgaccaggaacaagggagcaagagggagaagaagaaggcatacaagaaagctaagggcgaggcacatcttggaaaggagtgggactcggactgttcgtcatccgactccgaaaatgaaggactcgccgccaccgccttcaacaagtcatccctcttccccaacgagcgtcacacatgcctcatggcaaaggagaagaaggtatgtactcgagacagtactacttatgattcttctagtgatgatgaatctagtgatgaagaaatagattactctagtttgttcaaaggattggatagaactaaagtagataagattaatgaattgattgatgccttgaatgaaaaggatagactcttagaaaaacaagaggaccttttatatgaagagcatgacaaatttgtagaggcacaaaaatcttatgctttagaagttaaaagaaatgaaatgctttcttatgaactatcttcttaccatgagacaatttctagcttaaggagcatgaatgatgatttgaatgctaagttagagatagctagtaaatctaactcttgtgtagaacatgttatgatttgcaagaggtgtaaagattttgacattgatgcttgtagtgaacacctagtgtcaatttctaaattgaatgatgaagtggctagtcttagtgcccaacttaagactagcaaaaacgaatttgataagttaaaatttgcaagggatgcctacacgattg

SEQ ID NO: 96901 - DNA, 281 bp, Zea mays
  Clone ID: MRT4577_19890C.1
ccgcgtaccttggcttcgtcgactgcgtgcgggtacatgaagagggtgatcggcgaggacccacgacaccactctgcttaggactacatgaggcggaagggcaagctggcgccggcgcacgccttccaggacaccatgcaatcggcggccaagatctgggcggactagaagaaggttgggacagaggccatctactgctgcgccttgaacatctgcttggatctggatgcccaaatcctttcaagtggtgtctgtgcagaatggtcatttttaccgataag

SEQ ID NO: 96902 - DNA, 407 bp, Zea mays
  Clone ID: MRT4577_19891C.1
ccgactcgtgcggagcacgcctttgggttcgaaccaaggatccaagcgcaatcccgatcgaactgtcgcaagagcgctatctatctgagcagatagccgttaagtagaacgccactaagaccgcatgtgctaggtctgagtagacaataagggcattacgccgcgagacctatggccggtagtgtttggccgtatctacgatgctcattccgatcgggactccagtcctctcgctagcaaatgctaaggccctagctgggggacgtaccggctaaagggtatcgctctgattcgcaaactacaggactgcatccaggccctcctggctcgactgtacatcacgccagtgcgaaggcgtatgaattactgagggactacgacggctcgctcatccagatgcggctgga

SEQ ID NO: 96903 - DNA, 258 bp, Zea mays
  Clone ID: MRT4577_19892C.1
gggaaatggggaagggagcgcaagggagcgatgcggcggcggcgggcggcgaggtggaggagaacatggcggcgtgctcgtggtgggcgccggccccatcggcctggtgtcgctgctggcggcgcgggccttcggcgcgccgcgcgtggtggtcgtggatgtggacgaccaccgcctggccgtggccaggtcgctgggcgcggacgcggccgtgcgggtgtcgccccgcgcggaggacctgtcggacgatgtggagcg

SEQ ID NO: 96904 - DNA, 610 bp, Zea mays
  Clone ID: MRT4577_19893C.1
gtgtcagttgttgacctcactgtccgaatcgagaagggtgcctcctatggggatatcaagaaagctattaaggctgcttctgagggaccactcaagggtatcatgggctatgtggaggaggatttggtttccaccgacttcgttggtgacagcaggtcgagcatcttcgatgccaaggctggtattgccctgaacgacaacttcatcaagcttgtctcgtggtacgacaacgagtggggctacagcaaccgtgttgtcgacctgatccgccacatgttcaagacccagtagagagctttccgtagcatcccaatggccttggtctttctgctttccatagcatcccaatggccttggtcgctgtccatcccgctgcttgtctatgctgagaataaatgtgaatggtgcctctggacgcccgctccatgctgggtctgaacatgttttgtgtttccatttctgctaccatcctgtaacaaattcgctaatatgggacctgagtttagttttttgcttgtgaagaatataaacagtggggttgcaattttgcagtgctggtttggttgcatagatgagctggtctttgggaataatagtttcttgattcgtc

SEQ ID NO: 96905 - DNA, 380 bp, Zea mays
  unsure (1)..(380): unsure at all n locations
  Clone ID: MRT4577_19894C.1
tttntaggaaacacccctcggtatgagggcaccattgtcgagcccaccccatagnaanctttatctggttttttttaacgaggggngctgcaaggcaggggttccgcaaagagaactggttgtatggcagcaattgttgttgctgctgcaggaaggtagccaccaatgggttagccactgccaatggattaagtaactgttgtcgctgttgtaggtacgcagcagagtttgacacagccaggtggttgaatggaagcaactgttgtaagtaggcagcagggtttgccacagctagctgagtcagagctggtacaatttggtgcagcaactggtgttggnggtccgtaggggcattgcccaccgcgagcgggctagatgaa

SEQ ID NO: 96906 - DNA, 326 bp, Zea mays
  unsure (1)..(326): unsure at all n locations
  Clone ID: MRT4577_19895C.1
tcttgagtctcggccacccgtcgtccttctaggttctttactcgccaggcgccatgggcaagattaagatcggaatcaacggcttcggaaggatcggcaggctcgtggccagggtcgcccttcagagcgaggatgtcgagctcgtcgccgncaacgaccccttcattaccacggactacatgacctacatgttcaagtactacaccgtccacgggcacttgaagcacaacgacatcacactcaaggacttcaagacccttctcttcggtgacatgccggtcaccggcttttgcattaagaaccctggggaaattccgtggggtgag

SEQ ID NO: 96907 - DNA, 555 bp, Zea mays
  Clone ID: MRT4577_19896C.1
ggtacccccgggtctcggccggcatcacctataatattgttgagacattcagaatcacaccgagcgaagcgcactacgcaacagcctaacaacaatggctaccaagcatattatccctgcttgcgcttcttgcgctttttgcgagcgcatcaaatgcgtccattattacacaatgctcacttgcttctagttccattatttcacagttcctcccaccagatactttaatggccttcgaacacccagctgcgcaagcctgtaggctacaacaagcgattgcggagatgcgtcttacaacaaccaattgcccaattgcaacaacaatccttggcacatctaacaatacaaaccatggcaacgcaacagggacaacagttcctaccagcactgagccacctagccatggtgaaccctgtcgcctacttgcaacagcagctgcttgcatacaacccacttgctcttgcaaacgtagttggaaaccagcaacaacaacaactgcgacagttgctgccagcgcttagtcaactagccatgtggaaccgctggcggctacct

SEQ ID NO: 96908 - DNA, 632 bp, Zea mays
  unsure (1)..(632): unsure at all n locations
  Clone ID: MRT4577_19897C.1
tccctatccgttcccctacttctccgcatcctcccgggtgcntgggggggggtccactactcacctcgccaggcgtgggcaagatcaagatcggagtcaacgggttcggaaggatcggcaggctcgtggccagggtcgccctgcagagcgaggatgtcgagctcgtcgccgtcaacgaccccttcatcaccacgggggggggggcggacatgttcaagtacgacaccgggcacgggcaatggaagcacagcgacatcgccctcaaggactccaagacgcttctcttcggcgagaagccgggcaccggctttggcatcaggaaccccgaggagatcccgtggggtgaggctggtgctgagtatgtcntggagtccaccggtggcttcactgacaaggacaaggctgctgcacatctgaagggtggtgccaagaagggtggtatctctgccccaagcaaagatgcgcccatgggtggtggtggtgtcaatgaggacaagtacacctccgatgggaacattgggtccaatgctagctgcaccacaaactgccttgctccccttgcgaagggcattcatgacaactttggcattattgagggcttgatgacaactgggcatgccatcactggcacc

SEQ ID NO: 96909 - DNA, 635 bp, Zea mays
  Clone ID: MRT4577_19898C.1
ggccgcttttttttttttttttttctttttttttttttttttttttttttttttttttttttttttttttttttttttttttttgggttttttttttttaaaccgagaaaaatcccaatcaaaaaattggttatttctaggaaacccatgtcggtatgagggccccattggcgaggccctctcatatggaatctaaaagagggcccccccaaccatgggttgctgcaaggcagggttcatcaaaaaaaaccggttgtatggcaacaattgttgttgctgctgcaggaagggaccccccaatgggttaccccccgccaagggattaagaaaccgttgcccctgttgtaggtcccccccaaagtttgacccaccccgttggttgaatggaaccaactgttgtaagtaggcaacagggtttgccccacctagctgagtcaaacctggtccaatttggtgcaccaactggtgttgtaggtacctaggggcattgcccacccggagcgggctaaataaaagtagttgtaggtaaaccgcagggttcaccatggctagttgcctgagcaccggcataaactgttgcacctgttgttgttgctggaatgcaactaccttccccaagacaagggggttggatg

SEQ ID NO: 96910 - DNA, 789 bp, Zea mays
  Clone ID: MRT4577_19899C.1
gttcatgccatcactgccacacagaaaactgttgacggaccctcagccaaggactggagaggtggcagggctgccagctttaacatcattcctagcagcaccggtgctgccaaggctgttggtaaagttcttcctgatctgaatggcaagctvactggtatgtccttccgtgttcctactgtggatgtctcggttgttgacctcaccgtcagaatcgagaagggggcctcctatgaggatatcaagaaagctattaaggctgcttccgagggtccactcaagggtatcatgggttatgtggaggaggatctggtttctaccgacttccttggtgacagcaggtcgagcatcttcggcgccaaggccgggatcgctctgaacgaccacttcgtcaagcttgtctcgtggtacgacaacgagtggggctacagcaaccgcgtcgtcgacctgatccgccacatgttcaagacccagtagagggttttccccctgcttctcatggatggttgctgcttgtgtatgccgagaataaatgtggatgtcgcgtgcctctgggtcgccaggttcatgctgagtctggacatgttttgcacttttgtttccatttctgccatcatctgtggcagatccgctcgctaatatgggacctgagattagctttttgctgcttgtggtgaggttgcagttttgttaaaaaaaaaaaaaaaaaaaaaaaaaaaaaaaaaaaaaaaaaattaaaaaaaaaaaaaaaaaaaaaaaaaaaagggactctgcgttgttaccactgct

SEQ ID NO: 96911 - DNA, 339 bp, Zea mays
  Clone ID: MRT4577_1989C.1
tctctttccggctttcccttcttcctatgtggtgcttgtagctatgcaaacatctacccaagtaggcctggctaatagtgctagccctaggttcaacgatggcttcatttactgccttctcagcgctaacattgacaacaagtcatttcttctattgttctacaaaaaaaaaaaaaaaaaaaaaaaaaaaaaaaaaaaaaaaaaaaaataaaaaaaaaaaaaaaaaaaataaaatacaaaaccataatgccccatatacaggcatgccttagaacctaaacttaacatatttgagacagtggtaatcaacaatggtcttaaaataaaaaaaaaaagagg

SEQ ID NO: 96912 - DNA, 778 bp, Zea mays
  Clone ID: MRT4577_198C.1
tatatttctggggtgtttttgggaagcatatgaggaagaagtcatgccaaccaaacagtcatataaaaaatgtggagatcagcaatcccagtcaaccaaatggcaaatctgaggaagtaagcatgaaattggatatgagaaaaggcaaagaaaaagagagtgctaaatctgacgatgtcatgacgttgggtgtgaatggaggcaatccaacagatgtcacaggaaatagagagacagttaggggcaattatgaggatattgccaaggtattggattcaacaggaggcaaggataccgatagggtcaatggctgggtggcagtgcttgaggctcctgattcagaccctgcatccagttgctcggttccggctgcctcttctcttggcggatattgccatcatgactctgcaaaaaatagctcttctatcttagattcttcatgccagcctgctgacggttcttctgttagcccagacctcatgctggacataccccctggaatatctgcgcatatacctcctggcttcacaaaagcccactgtcagcttcagatgggaactgctgctctgtcttttgctgataggcatcgcagtctgatttcggacattcctccaggctttactgaagttcatcggggactccctcctgcaattccacctgctggaccagcttgtgtgtcgacccctgggactgaaaagaagcccttcgttaggttctcgcttaatgtcccaaggcctgttggaatgggagctccacctggatttactccactgcatgc

SEQ ID NO: 96913 - DNA, 376 bp, Zea mays
  Clone ID: MRT4577_19900C.1
cagagcttgactttctaacaaatgggggcgcgaatacatacacgtggctgagaagacaattaacagggggggggattgctatggcaaagaaagggggcggaatttccttaggcctgacacatattcacatatagcagggtggtacggttagggatttagggctaggtcgataacctcattttttttcaagggatttttatttttaacacttggaaaaaaagggagttaaacaaactagccctcatggattttaccggaggaatggaaattagaccccgggaaaaaaggaccgggaccagcaagcgtaccacctttgcctataacgaggggaattaaaacttggccccatcatagtcatagctggtccctgtgggaa

SEQ ID NO: 96914 - DNA, 416 bp, Zea mays
  Clone ID: MRT4577_19901C.1
gcattcagaaacacaccacgcgaagctcattatcaacaacctaacatcaatggctaccagagtatattatccctccttgcgctatttgcgctttttgcgagcgcaacaaatgcgttcattattccacattgctcacttgctccaagttccattattacacagtatgctacatcaggtacttcaatgggcttcgaacacccagctgtgcaagcctataggctacaacaagcaattgcggcgagcgtcttacatcatccaatttcccagttgcaacaacaatccttggcacatctaacaatacatactatcgaaacgcaacagctacaacaatttctaccagctctgagccacctagccatggtgaacactggcgactacttgcaacagcagatgcttgcatcatacccacttgctct

SEQ ID NO: 96915 - DNA, 1678 bp, Zea mays
  Clone ID: MRT4577_19902C.1
ggcggacaggccacccccgcacctcattccacaattatttgcgcccgtcccatggtttatattcattattattattaaaatcacgctttctgtagttggatttcgttttctcctttttttaattattttgtaattacagtaatctctcgtgactggtgtaacagtcagtcggctttaaaaggacacgagcgcttaaacccccaccccatatccgcatccgctgcctccgcctctcgagtctcgtccacccgtcatcctcctagctcctctactcgccagtcgccatgggcaagattaagatcggaatcaacggcttcggaaggatcggcaggctcgtggccagggtcgccctccagagcgaggatgtcgagctcgtcgccgtcaacgaccccttcatcaccacggactacatgacctacatgttcaagtacgacaccgtccacggccactggaagcacagcgacatcacactcaaggactccaagacccttctcttcggtgacaagccggtcaccgtctttggcatcaggaaccctgaggaaatcccgtggggtgaggctggcgctgagtatgtcgtggagtccaccggcgtcttcactgacaaggacaaggctgctgcacatctcaagggtggtgccaagaaggttgttatctctgccccaagcaaagatgcacccatgtttgttgttggtgtcaatgaggacaagtacacctcggatgttaacattgtttccaatgctagctgcaccacaaactgccttgctccccttgctaaggtcattcatgacaacttcggcattgttgagggtttgatgacaactgttcatgccatcactgccacccagaaaactgttgacggaccctcagccaaggactggagaggtggcagggctgccagctttaacatcattcctagcagcaccggtgctgccaaggctgttggtaaagttcttcctgatctgaatggcaagctcactggtatgtccttccgtgttcctactgtggatgtctcggttgttgacctcaccgtcagaatcgagaagggggcctcctatgaggatatcaagaaagctattaaggctgcttccgagggtccactcaagggtatcatgggttatgcggaggaggatctggtttctaccgacttccttggtgacagcaggtcgagcatcttcgacgccaaggccgggatcgctctgaacgaccacttcgtcaagctcgtctcgtggtacgacaacgagtggggctacagcaaccgcgtcgtcgacctgatccgccacatgttcaagacccagtagaggggttttttccccctgcttctcatggatggtgaacgctcgcaggaccataccgctgctgcttgtgtatgccgagaataaatgtggatggcgcgtgcctctgggtcgccaggttcatgctgagtctggacatgttttgcacttttgcttcccttcctgctaccatctgtgacagaaccgctcgctaatatgggacctgagattagctttttgctgcttgtggtgaggttgcagttttgttctgtgtttctgtgttgttagcaatcctatgattcaggtgttcgttatatagaattaaaccaccaaatatatgggacaagtgaatagaattaaaccaccaaatatctgggacaaccatcaaaaaaaaaaaaaaaaaaaaa

SEQ ID NO: 96916 - DNA, 455 bp, Zea mays
  Clone ID: MRT4577_19903C.1
atcgagaaaaatcccaatcaatatattgattatttctaggaaacacatgtcggtatgagggccccattggcgagtccctctcatatgtaatctaaaagatggcccccccaaccatgggttgctgcaaggcagggttcatcaaaaaaaaccggttgtatggcaacaattgttgttgctgctgcaggaagggacccaccaatgggttacccactgccaatggattaaaaaactgttgcccctgttgtaggtccccaccaaagtttgacacaccccgttggttgaatggaaacaactgttgtaagtaggcaacagggtttgccacaactagctgagtcaaagctggtacaatttgttgcaacaaccgttgttgtaggtacctaggggcattgcccaccccgagcgggctaaataaaagaaattgtaggtaaaccgcagggttcaccatggctagttga

SEQ ID NO: 96917 - DNA, 257 bp, Zea mays
  unsure (1)..(257): unsure at all n locations
  Clone ID: MRT4577_19904C.1
gcccaagcgangcgtacgtaattcattgtaggtagctgcacctttttttttttggttgttgttgcaacgggcgaagggggacctccattttaagtagtgcctgtcagcccgcgccggtgaagatgatggacaaggatatgaaaatagcggtgatgtattcttttgtgcggcaaatgaggggaggtggtcatcttggtgtgccaaaaagaatggctattgtgctggtttgaaaagttaaaaatttggagggctgtctc

SEQ ID NO: 96918 - DNA, 385 bp, Zea mays
  Clone ID: MRT4577_19905C.1
acctttttcaccaaccctccaattcccgccgggggggctgtttcaattcttaggagagccatagcaccgaatgccgctcgacctgaacggatcttgcctgcacgtccgacaacaggctcgaactgcacttcttaacccacgaataacacatgcaggcgtaaagtttaatacccttaatgtggctgacatcagcaagaacgtacacctaggagccctgcaatagacagactcatacacttatccaaactaaacagtccgatggcaatatacaaataatggatgacactctaggctatcggctacaaagctcttcataattggaggaaatggcaacggcacgacagaaatactagcgtgaagtctactgcatctgcagaacctcacc

SEQ ID NO: 96919 - DNA, 318 bp, Zea mays
  Clone ID: MRT4577_19906C.1
atccggcgcaatacaatttcttgacatgactggaatgctaaatctggagtctacgcgcagggcagcaagatacacctgaatcgaagtgaacactccgatactggacgcattactcacgctcatgtgcctacatcaacatcctcaacggatatacaactgggtgcttctacgtcgatgggagcagcacgacattttaacgattacgaagacatattgcaaaaatggcacatattaacctaactactggattcacatgaaggatgcagtgatccttcttaaactggactgaattgcacaatatgccctgtgaaatctaaa

SEQ ID NO: 96920 - DNA, 119 bp, Zea mays
  Clone ID: MRT4577_19907C.1
ctgaacagagtgtgagacaactcaagtaaggcaacttttgcagggctacatgacgtcacagacaaaaccgcacctaccggttacatcgccaaggtgagatcacctctacttgggcagaa

SEQ ID NO: 96921 - DNA, 527 bp, Zea mays
  Clone ID: MRT4577_19908C.1
aaaacggaccgggggttattttaaaaaattaacggggttgccctaatgaacacgtactgatgaaaaaagggaaaaaaataaactttaccctgaaattctcctatggccattttggcagaaaaaagaattcacaggccacccccacagggggaggttaggtcggaactaaaactgaacagggaaccggaccctgattaaagaaaccaggttccagaatcaaatcagggggatcaaaaaaaagaaacattgcccggggaacccttttaaaataaggtttaaaaactacggaaacaaaattatccccacgttcaaaaaaggagaaacggggccaaattccaaatttcccggttaaaagcctagggaccaagtccttacatatttaaactgaaccttttgcagggtcaaacagttggaacttcagggaggacttgaaaaaaaaggccattttttttttgggctgccagaaaacatggccaattcccactgagcgacgttttaaacccgcgaggggggggggggaaaaacct

SEQ ID NO: 96922 - DNA, 193 bp, Zea mays
  Clone ID: MRT4577_19909C.1
gacgcacgcgtccgaatcgctaatgcactctgctcgcccgctgagtcgctgcgcctcgcagctgtcacatctgtgtcctcgatactcccgcgcgaagacctaacgcttatgtgctgcacaaacccctccctaatggcgcatgctaccacgtctggaggccgactggccgagcttgggcctgactatgcagacg

SEQ ID NO: 96923 - DNA, 311 bp, Zea mays
  Clone ID: MRT4577_1990C.1
gttttgagcttccataaacactccaagggacgagcactagcataagcctaacatcaatgtctaccaagatattatcactccttgcgctttttgtccttattgtgagcgcaacaaatgcgtttattattccacaatgctcacttgcttctagtgccatttttccacatttccttccaccagttacttcaatggtctgtttacatctagtcttgcatagctaacttgcttcatcatgctcttggtgtatgcggcttacaacaatccattatttccttagtgcatcatctatttcttgtcatattttacattac

SEQ ID NO: 96924 - DNA, 870 bp, Zea mays
  unsure (1)..(870): unsure at all n locations
  Clone ID: MRT4577_19910C.1
tgaactgcgtgcagcgagacggtcaagtttgggcacgtcacttttttctggaacgggaatcggtctggttacttcgaccagaacctggaaaaatacgaggagattcccagcgatgccggcatccccttcaatgtccagccgaagatgaaggccttggaaatcgcgcagaaggcgagggacgccatcctgagccaaaaattcgatcaggtaagggtcaacattgcaaacggagatatggttggccatacaggagacatggaggcaaccattgttgggtgcaaggcagctgatgaggctgttaagatcatcctcgacgccgttgagcaagtgggcggcgttttcgtggtgactgccgaccacggcaacgccgaggacatggcgaaaagagacaagtctggagaaccactccgggacaaggacggcaaggtgcagaccctgacttcgcacacgctgaatccggtcccaatcgcgataggaggccccgggcttgcgcctggcgtcaggttccgtacagacctcgcaagtgccggcctcgccaatgttgcggcgacggtcatgaaccttcatgggtttcaggcacccgatcactatgagccaacgctgatccaagtcgtcgacgagtgatttccgctttgctggttgctgcgttgcagttttcagacattatctgaactaactcctaccacagttgtccggcatgtaatcgtactcaaactagactacctgggcaattacctgtgccaattaccgtgtcgaatgttcaaaaatgttttcgttaaggccttgttcgtttgtatcggattacactcgcaatgtatcggattacactcgcaaaaaagaaaanaaaagcaaaaaaatgaaaggggcggc

SEQ ID NO: 96925 - DNA, 954 bp, Zea mays
  Clone ID: MRT4577_19911C.1
tatgaactgcgtgcagcgagacggtcaagtttgggcacgtcatctttttctggaacgggaatcggtccggttacttcgaccagaacctggaaaaatacgaggagattcccagcgatgccggcatccccttcaatgtccagccgaagatgaaggccttggaaatcgcgcagaaggcgagggacgccatcctgagccaaaaattcgatcaggtaagggtcaacattgcaaacggagatatggttggccatacaggagacatggaggcaaccattgttgggtgcaaggcagctgatgaggctgttaaggtacatgtacatggactagtgcgtcaagctttgcgttgcgatcacctctctatcttcccgagggtttttcctagctaccgattgatccagtctgtatcttgtagatcatcctcgacgccgttgagcaagtgggcgggtgtttcgtggtgactgccgaccacggcaacgccgaggacatggcgaaaagagacgagtctggagaaccactccgggacaaggacggcaaggtgcagaccctgacttcgcacacgctgaatccggttccaatcgcgctaggaggccccgggcttgcgcctggcgtcaggttccgtacagacctcgcaagtgccggcctcgccaatgttgcggcgacggtcatgaaccttcatgggtttgaggcacccgatcactatgagccaacgctgatccaagtcgtcgatgagtgatgccttggcctttgcttgcgtacgtgaatggtgtatatgctctgctcgggataaatttggtttccgctttgctggttgctgcgttccagttttcagacattatctgaaccaactcctaccacagttgtccggcatgtaatcgtactcaaactagactacctgtgacaattaccgtgtcgaatgttcaaaattgttttcattaagtattaatctgctttttggcc

SEQ ID NO: 96926 - DNA, 915 bp, Zea mays
  unsure (1)..(915): unsure at all n locations
  Clone ID: MRT4577_19912C.1
cggggnactctaaaagcttcagttgcctccctctctccgctttggctaggttagctatctctctctcgctacgcccctgaccattataagaaatgacacatgccatcccaatttgaaacatataagagtcgtggcttctcacagttatattttttattttcaaattattagtgtacatatatatttacaatctctctcctttatataacataaaagacatgagttgtagtggtagacgtcaagtgctttatacgaagcaaatagggtttgaatcttccacaacttattttttttggatattctgtgcgggggaggaagcaaattgaatcagtcttttacctcaacaccagctgacatcgccagccatgaaactgttggtctgacgagcgcgcctttgcttggaaccgtagtattatctcttagtcaccgtcaagccatgtcgctcacattagaatctggtgcttataattntttgtttgttttctccaagttttgaagttagagtagcaaacaattaaggacttgggatgcagaacattaaggatttgtaccatttactataggggcaaggaggtttctagtgagtcatcgatctaaaatcttttatgctctctttgtgtttactgtttagagttgtttagttctgatatgaactaagggcatgtttgcttcgcaccttcctgcgccaggcaagaattttggccaggtgtctagaactcaacgtcggagaattcaagatgcttaatgccccctcagaattcaagatgcataatatttcttatgtgatgcttacacttgtcctagcactactacttgtcaaaacagtggaaaagttactagattgtcaatcatcactactatgtagttgtggtgcacctgcacttccaatcatcacttactaagttactaattagt

SEQ ID NO: 96927 - DNA, 402 bp, Zea mays
  Clone ID: MRT4577_19913C.1
attaaatcggaacgatttctatccggattgtttctctaatttatataaactttaattagctagaacaattgcgagtgtaatccgatacaaacgaacaaggccttaacgaaaacatttttgaacattcgacacggtaattggcacaggtaattgcccaggtagtctagtttgagtacgattacatgccggacaactgtggtaggagttagttcagataatgtctgaaaactgcaacgcagcaaccagcaaagcggaaatcactcgtcgacgacttggatcagcgttggctcatagtgatcgggtgcctgaaacccatgaaggttcatgaccgtcgccgcaacattggcgaggccggcacttgcgaggtctgtacggaacctgacgccaggcgcaagcccgggg

SEQ ID NO: 96928 - DNA, 599 bp, Zea mays
  Clone ID: MRT4577_19914C.1
gtaccctccgagtctgccgggatttctctgtcgatgagctaacagattcaggtgttcttcatgctgataggagtgttcagacctccccatcatcaattcatatatttgatgcaagtgagtctgcagacttacctgagactattacagaccaggcaactgtttcgatttctgcatcaaaacgtgccattaactccctggtacttaaccacctaattgaagagcttagaggctggatggggaccactgctggtactcgagccatacctttaatgcagttattctgcaggctttcttctgctgttggtggtcctttcatggatagctcaaagccagaaaattttgatttggagaagtttgtgaagtggctaatggatgaagtcaacataaataaacagttccctgccaaaacacgatgcacatttggtgaagcattgatccttgctttcatgttcttcacacttatgttccgcaactggcatcaacctgggagtgataattctcattcaaagtcaagtgggagctctgatttgacagataaaggtcctgctcaggttctgggatcaacaacaataactcttccgtcatctagtgctgacctg

SEQ ID NO: 96929 - DNA, 109 bp, Zea mays
  unsure (1)..(109): unsure at all n locations
  Clone ID: MRT4577_19915C.1
taattttantaatcaaccaccctnccctagccttactactantcaattattancattttgcactactcacaactncancggctntcatngataaattccaccccttatg

SEQ ID NO: 96930 - DNA, 437 bp, Zea mays
  Clone ID: MRT4577_19916C.1
aacaccttctagtagagacaggctaacacatgtagcctctgtgacacacacgggaggaccaggacagggcatcatttctcatacacggcaacacactatgtaaagctagtaggcacacgccaacggcaggtctcggtgcggggacgatttattttttacgtagggcggcaaacacacgcgaggggttgccttggatcaacgatagagcacctactagtggcatcatgctccagaaggatggtggctcaaccatgccatgttgtcaccgtcccgcattacgagcataacatattccctgtgtgggtagccgacccgatccatggcggttttggcgccgccgggggaggggcacttgccgaactttagaccaccgatgaacaaatttggggtcaggcacgatacggggagcctccccgacgaacgggccgaagatgatg

SEQ ID NO: 96931 - DNA, 181 bp, Zea mays
  Clone ID: MRT4577_19917C.1
gaggataacctagctagcacaataggtacgatataaggctcccagggcaccagagtcattccttttttggtagaccggaggaataacggatcaatcaatcaatcccgtctctaattaacccctccaaaaaccactcataagactaccgttaattatataaatacgatcccatactcaaaca

SEQ ID NO: 96932 - DNA, 438 bp, Zea mays
  Clone ID: MRT4577_19918C.1
gtggggggtttggaccccccaagccggaaaatttgtttcttaaaatattcaaaggcttccctatttacaagatttttggaaaacaaattctgagggggtacacaaggtttaaatctccccttttggcccaccccacccatgacttatgccatgcaagaacttcccaggaatttaaagggttacagcccctccccaagaccagtaacatggaccttcctacccttgtttttattctcaaccccaccattatacccatatttgagaattttatccacacagcttggtaaacccgttttttcaatggtaaaaagtttttttaagggggcatagcatatcaatctccctgattttaaaaaaaagtttcaatttttttttcaggcctgttgtttgcaaaattttattgccaaaaatgggccttaaagtttttttcccaatttc

SEQ ID NO: 96933 - DNA, 384 bp, Zea mays
  unsure (1)..(384): unsure at all n locations
  Clone ID: MRT4577_19919C.1
tttgcccctgtacaggatagaggcgngccgggtctctacatggtttgctgagaactgatctgatgacacctaggatggtaagtggagctgcggctgatgcgaggagggaaacgactacacagctctatactaggggggctttaagtacgaatgcatgtagcagaactaagctggtaacaaaagggaatagcgtcagacggccgggaccttcagcatggggtagccactttactaggtcaaaaggaatggacttgcgagggactggcacgcaggaatcgagaagtgtttacgtacctgcaatgggaatggtcaaatatactgtcggaggaccagctgtcgccactatatctagggcaaaaaggaaagagggcgtacaagagacag

SEQ ID NO: 96934 - DNA, 3998 bp, Zea mays
  Clone ID: MRT4577_1991C.1
atggtggtcaacgataaggagaaggaatccctcttcaatgagccaagagacgacaagcccactgactcaggctcgagtcacaagaagagggatgggaagaagaagagacgcatcaataagatcatctactacgacagtgatgcatcatcttcttcaccaagggacgacaacgacgacgacgactcttcatcaaagaaaaagatggttaatcaaaattattcttttgattactctcgcattccctataattcaaatgtgcttctacattcaatcccccttggaaaacctccacactttgatggagaggactattcgttttggagtcataaaatgtgtagtcatttattctctcttcatcctagcatatgtgaaattgtagaaaatgggatgcattttgatagcactgataatcctgtgattattaatgagcaaatccataaaaatgcccaagctactactgtgttgttagcatctctttgcagggacgagtataataaagtgagtggcttggacaatgccaaacaaatctgggataccctcaagatatcacatgagggaaatgatgccactatgatcacaaagatggaactagtggaaggcgagctggggaagttcacgatgatcaagggagaggagccaactcagacctacaacaggctcaagaccctggtcaacaagatccgaagctacagaagcacaagatggacggatcatgatgtcatccgactcatgctaaggtcatttactataattgacccctatcttgtgaatcttattcgtgaaaaccccaggtacaccaaaatgacatccgaggagatcctcagaaatttcgagagcgggcgcatgatggtgaaggaggctcgatacatggacgatgcactaaacggcccactacccgtctacgagccacaacccgtttctctcaaagcaaccagcagcaggaaggcgctaccaagcaaggtgacacaagtggaggctgccgggctcaatgaagatgaaatggcgcttatcatcaagcacttcaagaccgcgcttaaaggacgcaaggagtactccaacaagaacaaaacaagaggaaaacgctcctacttcaaatgtggtaagactggtcatttcattgcacaatgtcccgataatgataatgagcagggacaagaaaagagcgggaagaaggaaaggaagaagaactataggaagacaaagggcgaggcacattttggaaatgagtgggattctgactgctcctcatctgactccgacgatgaaggattggctgcctcggccttcgacaagtattcgctcttccccaacgaacgccacacttgcctcatggccaaggagaagaaggtacgtattcgatattcccctaagtactcttcttctagtgatgaggaatcctccgatgatgaagtagattactctagtttatttaaaggtctagataaagccaaagtagagaaaattaatgaattaattgatgctctaaatgaaaaagatagactgctagaaaagcaagaggacattttgtatgaggaacatgacaaatttgttagtgtacaaaaatctcttgctttagaaactaagagaaatgaaatgctatcttttgagttatctgcttgccatgaatctatctctagtctaaagaatgtaaatgatgaattaaatgctaagctagaggaagttagtaaaacaagttcatgtgtagagcatgttagtatttgtaatagatgtaaggactttgatgttgatgtctgtgatgaacatcttatttctattactaaattaaatgatgaggtggcaagtcttaatgctcaacttaagacttgcaaaattgattttgataaattaaaatttgctagggatgcctacactattggtagacacccctcaattaaagatggacttggttttcgaaaggaaaccaagaacttaacaagccaaaggattcccgttctcaacaaggagaaagggaaggcccctttggcgagtagtcctcaaaggaaccatgcctttatttatgataggaaaattgctagttgttctcattataataagagttatgttcatactgcttataatgattcacatgctatgtttgcctctagatctacttttgttcatggtagaggaaaatgtgcaatgaacccactactgtttttcatgcttgcaacacttcttttgtactttcatgtttatgcatccgggggttctagctggataatcgacagtggatgcacaaaccacatgatgggggaaaataagatgttcacctcctacgtcaagaacaaggattcccaggattcgatcatctttggagatgggaaccaaggcaaggtcaaaggattaggaaaaatagccatttcatccaagcattctatctctaatgtgtttttagttgaatcgctcggctataacctgttatctctttggcatcgccgtctagcacatgttgggatgaagaaccttcataagcttctaaagggagatcatgtgttaggactaactgatgtctgttttgagaaagacagaccttgtgcagcatgtcaggcaggaaaacaggtgggaagcactcatcacggcaagaatgtgatgacaacatcaagaccactagagcttcttcacatggacctcttcggacccgttgcctatctaagcatcgggggaagtaagtatggtcttgtaattgttgatgatttttcccacttcacttgggtgttcttcttacaggataaatcagaaacccaagggaccctaaagcggttcttaaggagagctcaaaatgagtttgagcttaaagttaaaaagataaggagcgacaatgggtccgaattcaagaatctacaagttgaagagtttcttgaggaggaaggcatcaagcacgaattctccgctccctacacaccacaacaaaacggtgtggtagagaggaagaacaggacgcttatcgacatggcaagaacgatgcttggagagtttaagatgcccgagcggttttggtcggaagctttgaacacagcctgccacgccataaaccggctctatttgcatcgcctcctcaagaagacctcctacgaacttcttactggtaacaaacccaatgtctcttactttcgtgtatttgggagcaaatgctacattctggtgaagaaaggtagacactctaaatttgctcccaaggctgtagaaggttttttactaggatatgactcaaatacaaagctgtatagtgtcttcagcaaatcatcgggattagttgaaatctctagcgacgttgtatttgatgagactaatggctctccaagagagcaagttgatcttgatgatatagatgaagatgaagttccgacggccgcaatgcgcacaatggcgatagatgatggacaaatacctcaagaagaagggaaggatcaagggggagcacaggaagatcaagtggtggaggaagaagcaccacgggcccgtccaactcaagtccgagcgtcgatccaaaaacatcaccccgtcgaccagattttgggtgacattatcaagggagtaactactcgctcacgattagctaatttttgtgagaattactcgtttgtctcttctattgagcctttcagggtagaagaggccttgcaggatccgaacttggcgttggccatgcaggaagagctcaacaacttcaaaaggattgaagtctggagcctggtgccacgtccaaagcaaaacattgtgggaaccaagtgggtgttccgcaacaagcaagacgagcacggagtggtgacgagaaacaaggctcgacttgtggcaaaaggttatgcccaagtcgcaggtttggattttgaggagacttttgctcgtgtggctaggctagagtcaattcgaatattattagcctatgccgctcaccattcctttaggctatttcaaatggacatgaagagcgctttcctcaacgggccaatcaaggaggaggtatacgtggaacaaccccctggctttgaggatgacag

SEQ ID NO: 96935 - DNA, 3029 bp, Zea mays
  Clone ID: MRT4577_19920C.1
catcaatccaccgcccttctcccatctcttggctcttgcttcggcacgagggtctcgtccaaacggtaaaacagcaagcgctaactgatccaaaacatcaaaagcgccgcgcaggcagaagcagcaggtaaaagaaccggaagcccaccaggagcgcattcccactcatcagccagcagagctcagatataagctcaccagccggcccccttccgatcctctcccactccctcgtccctccccctcgtccagtccactcccattgggcgagaagccgagaaggacagggagggagcgagagctagccaggccgtcccgtccagagccgctatgtccggcggcgcgcccctcctggccctgctgctgctggcggcggcggccatgatcgccccgtcgccggccaatgccgccgtgtcgtacgaccacagggccgtggtcatcaacgggcagcgccgcatcctcatctcggggtccatccactacccgcgcagcacgccggagatgtggccggggctgctgcagaaggccaaggacggcgggctggacgtggtccagacgtacgtgttctggaacgggcacgagccggtgcgtgggcagtactacttcggcgaccgctacgacctcgtccgcttcgtcaagctcgccaagcaggccggcctctacgtccacctccgcatcgggccctacgtctgcgccgagtggaacttcggcggcttccccgtgtggctcaagtacgtccccggcatcagcttccgcaccgacaacggccccttcaaggcggcgatgcaggcgttcgtggagaagatcgtgtccatgatgaagtccgaggggctgttcgagtggcagggcgggcccatcatcctggcgcaggtggagaacgagtacgggcccatggagtccgtcatgggcgccggcgccaagcccctacgccaactgggcagccaagatggccgtcgccaccggcgccggcgtgccctgggtcatgtgcaagcaggacgacgccccggaccccgtgatcaacacctgcaacggcttctactgcgactacttcagccccaactccaacagcaagccgaccatgtggaccgaggcctggaccggctggttcacggcgttcggtggcgcggtgccgcaccggccggtggaggacatggccttcgccgtggcgcgcttcatccagaagggcggctccttcgtcaattactacatgtaccatggaggcaccaacttcgaccgcacctccggtgggccgttcatcgccaccagctacgactacgacgcgccgatcgacgaatacggtctgctgaggcagccgaaatgggggcacctgagggacctgcacaaggccatcaagcaagccgagccggcgctggtctccggcgacccgacgatccagtccctcgggaactacgagaaggcgtacgtgttcaagtcgagcggcggcgcctgcgcggcgttcctgtccaactaccacaccagcgccgcggcgcgggtggtgttcaacgggcggcgctacgacctcccggcctggtccatcagcgtgctgcccgactgcaaggccgccgtgttcaacacggcgacggtgagcgagccgtcggcgccggcgcggatgagccccgcgggcggcttctcgtggcagtcgtacagcgaggccaccaactcgctggacggccgcgccttcaccaaggacgggctggtggagcagctcagcatgacgtgggacaagtcggactacctgtggtacaccacctacgtgaacatcaactcgaacgagcagttcttgaagtccgggcagtggccgcagctgaccgtctactctgccggccactccctgcaggtgttcgtcaacggccagtcctacggcgccgtgtatggcggctacgacagccccaagctgacatacagcggctacgtgaagatgtggcaggggagcaacaagatctccatcctcagcgcagcagtcggcctccctaaccagggcacccactacgagacgtggaacgtcggagtgctcggtccggtcacgctgtccggcctcaacgaggggaagcgggacctcagcaaccagaagtggacctaccagatcggcctccacggcgagtcgctgggcgtgcagtccgtcgccgggagctcgtccgtcgagtggggcagcgcggcagggaagcaacccttgacatggcacaaggcctacttcagcgcgccgtccggcgacgcgccggtggccctggacatgggcagcatgggcaagggccaggcgtgggtgaacggccgccacatcgggcggtactggtcgtacaaggcatcctcctccggcggctgcggcggctgcagctacgcggggacgtacagcgagaccaagtgccagaccggctgcggcgacgtctcccagaggtactaccacgtcccgcgctcctggctcaaccccagcggcaacctgctggtgctgctcgaggagttcggcggcgacctgcccggcgtgaagctggtgaccaggacggcgtgaccaggaatggagaggggagggcatgccgcacgcacacaggatgtgaataatttgctgggaagagaagcgagctgagggcagggcgcgcgcgcgcgcgacacgacacgacacgacaccgattctttcttcctcgtgaagtatctatagatacggcgtacatacggacacaatttgtgcccactatacgtacgtacaaaaaagattagtactagcgtttaccgtagatctgttcttggagttggccgacgccggcacggctgcaggaactgcggctcacggccggctggtaatggtactagtagcatggtttttgctctgcagtccgcatgaatctcaaggcgcacgcaggcttaattttcttagcacaaatttgcgaaactgagttgtaaatgaggttatttattcctacgattaagtaggatacaagacgaataattattatgtgagttctttttaaaaaaaaaaaaaaaaaaccactaaaaaaaaaaaaaaagaaaaaataaaaaaaaaaaaaaaaaggccccta

SEQ ID NO: 96936 - DNA, 298 bp, Zea mays
  Clone ID: MRT4577_19921C.1
aacaaaaatacaaaatattaaaaaacacggctggctatctcaaagaatgcaatctatcgcacgcgtgcatttcaacatcatacatctactgtacagcatcttaatgtcaatgtactggggggcgcctctcaagggacgccaattttaaaaccccgctcttcacccaccttaattttttttaaggccacccaaatttaatctcatggcccgggttttaaaaaggtcagacctggaaaaccttgggcgttctcaactaaatggctttggaaaaaaaccccctttggaacggtggtttaat

SEQ ID NO: 96937 - DNA, 350 bp, Zea mays
  Clone ID: MRT4577_19922C.1
cgatttgccagtatagctgcaacatacatagttcaaaatgggcctcggcagtgtcgtcctccgcctcttcgtcaatggcatccgcgtcctccagttcctggccggtgccgtcatgctcggcatattctcttacttcctggccgtgctggctgaccaccacctccccatcgcccaatggatccgcgccgttgagggcctttctggagccgccactctgtacgcgctgctcggatcaatcttcaccatctgtctcggcggaatcatgtttttcgggcttctgggcatggtcctcgatgcttgttttgtgggtgcctcggtcgcaattgctgtgatgaccaggcacggaacgc

SEQ ID NO: 96938 - DNA, 363 bp, Zea mays
  Clone ID: MRT4577_19923C.1
accacgcgtccgcggacgcgtgggcggacgcgtgggcggacgcgtgggcggacgcgtgggcggacgcgtgggcgccaccgccgcgcgccgccggcggcgcaagggacgcacgatggccatgcaggtggtgcgcaacctcgacctggagcggtacgccgggcggtggtaccagattgcgtgcttcccgtcccggttccagcccaagacgggcaccaacacgcgcgccacctacacgctgaacccggacggcactgtgaaagtggtgaacgagacgtgggccgacgggcgccgcggccacatcgaaagcacagtctggcgcgccgaccctgtcagcgacaaggccaagctcacggttctcttcta

SEQ ID NO: 96939 - DNA, 375 bp, Zea mays
  Clone ID: MRT4577_19924C.1
atcgctaggaacgcatatcagcgcccgtacctcgtagaatgggtatatacctcacctgcggggggtggaataagatgtccaagcacactgcgcccaaaactgaccatgtctaccttaagctcctcgtcaagctctaccgtttcttggtcaggaggaccaagaccaatacaaacgctgtcattctcaatacgcttttgatgagtgaaaccaacccaccaccaatctcctttcgccgccttgtcaagtttatggaaggaaaggagaggaacattgctgtcattgttggtacagtcacatatgacaaaaggatccaacacgttgcaccaattaaagttactgccctgacgttgacgccaacagcaagggccaggattg

SEQ ID NO: 96940 - DNA, 3063 bp, Zea mays
  Clone ID: MRT4577_19925C.1
cattgggtacctcgaggccggccggggggattttgttgagacctagatacgggcccttgctctcctcggcccaccgatccacgccccgcacgcacacgacccgcagaccgcaccctgtcggcgagctcgctcccgttcccgtccgctgctctccgctcgacgccgccgtcttccgcgcagctagtgtctacactcccggcgacgatggcggaggacttggttttggacacggcgatccgagactgggtcctgatcccgctctccgtggttatggtcctcatcggcgtgctccgctactttgtctccaagctcatgcgctccccggcgacctctccgtctcccgaccccaagctcgttaaggaagggcaggtggtcatcagggcgaggaacctgaggaccaacgcacagttcatcccggccaaggctttcaaggcacgcaaggtttattacaccaacgaggaaaatggattacttcatgttccaaaggaagacgcgcagaaggctcaggcagccatgttttctgatccaaacatggccatggacatgatgaagaagaacctatccatgatagttcctcagacacttacatttgcatgggtgaactttttcttttcaggtttcgttgcagcaaaaatcccctttccattgactcagagattcaggggaatgctgcaaaatgggattgacctgagcactgttgatgtcagctatgttagtagccggtcatggtatttcctcaatttattcggcttgaggggtcttttcagtctgatccttggtgaagaaaacgcaactgatgatgcacagaagatgatgcaaatgggtggtggatttggatttaacccaacaatgagtttgggagcagagaaagacagcctggatatcatgcagcatgactgggctctacctaagatggagcggcacgcagaagatgtgttgaaacagttgctgaagaaatgactcgaacggttgggcttctgggaagcaacactcgcgtcgcgtcttccagtttttgttgaagccagtttggaccaggaattttaccatttctaaatgtattatttataactagctactataacacccttagaaggtggagacccggtgttgtgatacttaatataagtagaaaaaacgtaattctgttactttattctcctgatatttatgagcatcgtttaagcactaaaaaaaaaaaaacattctaaaaatgatgaaatctgccaggtttttgacacgatcttaaatgttgtactatctgtaaccttatcgatcgccaagataagacatcatcttatcgggaaagaggaacgccctttgttcaaaagatggccaacataatgactgattgttcttagagctgcagctgtaggtctcgacggcggcagccgccggatcacatgaccgggtagctcgggagcatagcgatgccgcagaggccagacgcgacgctggcttcgcgttgcatgaggatgtagccggcgtcgccccactcgggcccccacgagttcttgacgatccagtacttcttcccgggcacgccgctaccgtcgccgtccgtgtccccctgggtctcgccgtacccgaccaccgtgacgccgtggttcagctcggcggtgcagggtcccgtgaagacgccgccgccgtagagctgccacacgaagctgccggcgtccacggccacggacaccggctgcgccgcggcggcccgcaggaggtccggctcgctgctgggcgtcacgttcatgtacccggagatgctcaccgcgctctccttcagcttcggcgtctggcaggcgccgttcagcccttgatacgggtagttccgttcggtggtgaggccgcggttcttcatcacgaactcgaaggcccagctcatgtacccgccggcgcagccgatggccttggtgtcgcagtccaccagctcctgctccgacagggacaccagcttcccgttcttgatctggttgatgccctcgatggccgcaacggcggagaacgcccagcaagagccacagtccccctggctcttcaccggcgcgacagctcccttctctcgccagtccacgcttttcggtagatcagaataaccctgacgacccatcagtccacttccaatacaagccacggtgctcggcgctgtggagtgcccggctccgcctccgctgcgaggccgtccgaagcccagcatcttggccctgaactcctcgttcgtcaggtcggcgaacttgttgtcggccagcctgtacccgttgcccatggagttgaaggtctcgaccagctcgacgttcctccggtacacctcgagccgcctctgcttctctccggcgtcagcgtacagccggccgtgcctgcccatccactgctcgaacctctcgagcatcgggtcggcacgcgctactagggccgcgccgcatatccagacgacagccagcagcagcgcgagaagccggggagacctcgccattgctggacctttggcttggcctctggggagtggggaggaggacgacgatcggcaacggtgcggacgcgtgggccgcgggttttttttttttttttttacattcgattgattttttattgaaaacattttaggcaatgagttcgacaacaccacccagcagccttgatcttcttttcggcaagagcagagacgaaacgagtacgaacaatgacgggttgagaaatggtacctttagccaagaccttggcataaccattttgaagagcatcaataacgggaaccttttcagtgttcttgtattgttcacgagcaccttcaccggcaagagtccagatcttgtcaaggttgacaacaggacgccagtaagggttcttcttcaagtggaagtgacgcataccgaccttaccaaagtaaccagggtggtacttgtccatgttgatacggtgatggtgttgaccaccagcaagaccacgaccaccaggatgctttctgtgcttaccgacacgaccgtgaccggctgaaacgtgtccacgcttctttctgttgtggtgaagtctagtaggcatttgtgttctaaaagagaagggcccggccgg

SEQ ID NO: 96941 - DNA, 456 bp, Zea mays
  unsure (1)..(456): unsure at all n locations
  Clone ID: MRT4577_19926C.1
cgnntccgccctcnngtcgtcgtctcacctctaccccgctcttcactgccnntccctcaccaaataaggggtcccgcgccttttctcgacacttcacnnaggggggaccaggnnaaatcagcggcccatggcccctcgattctcgggcgacgaacctnntcgccgtcatcttatcccgtnncctcttctgtnngccgcggcttggcaccgccccgtcgacaaccgaacctccctcgactaccgtcatctcaggggccgcgtctactggcgacactctgctncgcgccgggttctgtgaaccaatgtcactcgagtaccatcgcgggcgccaaaggtgaaggctggagtgcaaagcacttcggcaccggcaaagctcgagcgctccatcgacggggtgaccgacgcgaacggcacgtacacgatcgagctcaaggacagccacgaggaggacatctg

SEQ ID NO: 96942 - DNA, 428 bp, Zea mays
  unsure (1)..(428): unsure at all n locations
  Clone ID: MRT4577_19927C.1
aaaaaccggcggacgaacaaccccacctccactctccaacatttttcnnacntcatatnccacagggagggctttttacatggcggagccgcccctcatcctactacctcattatcttctcaacttcatgtagctatattctcacttcttcaccgttatataaatccttttttcttcaaataacgattttaccaatactgatgacaacttatactctctccatattgttcatcaaataattttataattactcctacctctttataatgaactctttatcattaatgccatcactattcccctatacttattctttttcctaattaaatttcacaattacaattttacatctttttactctttttttactttaacattacatcctttacatttattcccactcttccacttctaatatcatccttttt

SEQ ID NO: 96943 - DNA, 334 bp, Zea mays
  unsure (1)..(334): unsure at all n locations
  Clone ID: MRT4577_19928C.1
aattcggcacggaggatcgagtacagtcggctaggtaatctggtggtacgacgactgacgacgacgtggcggccaccagcagcaagtcgtcgtcgtgctcgagctcggcgcagcgggcagcagctgccgccctgctcgtggcggagtccgtcctgangatggtcgcggtgtcggtgtgcgacatgagcaacgagcaggtcatgtcgtgccagcccgcgggtggcaagacgacggacccggcgtgcgcgccggcgtaggcgcgctgatacgcgctgtagggggcggacctgaagggcctgggcggttgcgggaactggggggggatgggggggta

SEQ ID NO: 96944 - DNA, 216 bp, Zea mays
  Clone ID: MRT4577_19929C.1
ctccttatgacgacaattcctttgggggtggcggccgcgattttattacatttagccgtgccgagaatggggctcccattctcaaaatgaaggcactggacggtggatctggaagcaagatgcttaagggtcctggtatttggactcctgatggtactgttttactaaatgatgtccgaagactagaaaaatctaaagctgaattcatggaacaac

SEQ ID NO: 96945 - DNA, 2791 bp, Zea mays
  Clone ID: MRT4577_1992C.1
ccctccgtcgcctgtcgcaccctcggccggcacggctccactaccatcactcacaatggctgtcctcgtcctcctccttctcgcatccttcctcccgccgaccgccctggccgccttctccccgcccttctccttcttcctcgcctgcggcgccggctccaccgtacgcgacagctcagcgcgcaactttacaccggatgacggttacctgaccaccaaaagcgtcccggcggtgacgaactccaacgccaacagcgccgcctccccgctctacgccgccgcgcgcgcgtccagctccggcgccttctcctacaggttctctttccccaacttcgccgggcaggccgcgttcctcgtcctccgcctccacttcttccctttcaccccggccccgccgtccgccttcagcatctcctctgcgcgcttcgcagtctctgttcagcttcaggacacgtacgacgtgctgtcctccttctcgccgccgagcgccggcgtcgtcaaggagttcttcgtcccggcaggcggctccggtgacttccgcgtcacgttcacgccggccgccggctcggccgcgttcgtcaacgccgtcgagctgttcccggctccagaggagctgctgtggaacgccagcgtgacgccggtgggcgcggcggtcctcgacatagccgcgtggccgcgagacgcgctggagacggtgtaccgcctcaacgtgggcggcccctgaggtgagcgaggagagcgacacgctctggcggacgtggctccccgacgaccccttcctcttcagtcccccggggacctccacgctggagaacacgagcgccccgatcatctacgccacctacacccgcgaggtggcgcccgacgtcgtctacaggacgcagcgcgccgcggcgaacgtgtcagggatggcggtacccacgagtgtcaacgtcacgtggaccttcccggcggaaccggggtcgaactacctcgtccgtctccacttctgcggctacgaggtgctgagcgccgtcgacggagtcggcatcgtgttcaacgtcttcgtcccgcatgccagggacggccaagtctttacccccacacaattcgagactcagccgaacacggccttggtcaggggcatggccgcctcgcctcgcatgtctcggaccttcacagtcaccgttggaatgtccgactagagcagcccgggcgaaggcggtttcctgaacgggctggtaaacagaagctgcggccttcgggttcgagcttggcggcggggtcacgcggtagcagcaggagagttctgatcatcgcgctctcggccgtgctcggcgcctcggttctcgcgtccgccgtgctctgcttgtgcttcgtcgcgcggaggaaaaggcggatggcgcgaccggcgccgctggagaaggagagcagcaagccgctgccgtggtcccaagagagctccgggtgggtgctggagccgtcgagccggtcgggcgagggcacgaccggcgcgatgcacagggtgagcacgcagctccacatcccgctggaggagctgaggtcggccaccgacaacttccacgagcgcaacctcatcggcgtgggcgggttcggcaacgtgtaccgcggagcgctccgcgacggcacgcgcgtggcggtgaagcgcgcgacgcgcgcgtccaagcagggcctgccggagttccagacggagatcgtggtgctgtcccgcatccggcaccggcacctggtgtccctgatcggctactgcaacgagcaggcggagatgatcctggtgtacgagtacatggagaaggggacgctgcggagccacctgtacgggggggcggacccgggcggcggcggcgaggcggtggtgctgtcgtggaagcagcggctggaggtgtgcatcggcgccgccagggggctgcactacctgcacacggggtactcggagaacatcatccaccgcgacgtcaagtccaccaacatcctcctgggcgacgggttcatcgcgaaggtggccgacttcgggctgtcgcgcatgggcccgtcgttcggggagacgcacgtgagcacggcggtgaagggcagcttcgggtacctggacccggagtacttcaagacgcagcagctgacggaccggtcggacgtgtactcgttcggggtggtgctgttcgaggtgctgtgcgcgcggccggtgatcgaccaggcgctggagcgcgagcagatcaacctggcggagtgggccgtggagtggcagaggcgcgggcagctggagcgcatcgcggacccgcggatcctcggggaggtgaacgagaactcgctgcgcaagttcgcggagacggcggagcggtgcctggcggactacgggcaggagcggccgtccatggccgacgtgctgtggaacctcgagtactgcctgcagctgcaggagacgcacgtgcggcgggacgcgttcgaggacagcggcgccgtgggcgcgcagttccccgaggacgtcgtcgtgccgcgctgggtgccgtcgtcgaccagcttcatgaccacggccgacccggacgactcggccgtcacgggcgtgggcgccgtcgacagcaaggtgttctcccagctcagcggcggcgagggccggtgaacgatgaccggctactggagtgtactaatcgctctctgttttgctatcgtttgacagtaccataggggggaaaatcacgttattatcacacacacagcagcagctcctagagttgctggtgaatgtgctcaactctgcaaccaaaaacttttcgagccaattcttcgccgtccctac

SEQ ID NO: 96946 - DNA, 363 bp, Zea mays
  Clone ID: MRT4577_19930C.1
attcggctcgagggtttcttaggctggaccaggtaccattgctgaagccttgataaggggtctttttataatccttaatgacttcatacctggacaggtttgtgttcctactattattctgcactcatgcagttttattgccataatgtgcatgtgaagtgtatgtctttttctgcatttctgatctccttaataaagggtcttagtgtgtaacgtgtttggatcatatgcgctacttatatatttgtattttgattgaatgcaatatatatgaattaaaggttattctaatgtgttaacatgttctcacatacgtttgtgtgtttttgcatgtatgacaggaagttggcaacgtaccttatg

SEQ ID NO: 96947 - DNA, 323 bp, Zea mays
  Clone ID: MRT4577_19931C.1
gtacaagcaaacatttttaaaaacttaaatcttttttttttttttaaaaaagaaaggggaaaaaaaaaaagttttttcactttggtcgttaccaccttaagggggaaacctgccgaggtccatcaaactggggggggttttagcatccttttggggggcccaattggccctataggggggggcataaaaattaactggccggggttttaaaacacctggagagaaaaaacactggggttacccaactaaaaagcctttgagcacaaacccctttttccagatggggtgtaccaaaaagggccccaccaatatccttttccaaa

SEQ ID NO: 96948 - DNA, 355 bp, Zea mays
  Clone ID: MRT4577_19932C.1
ccagcaaaaaaaactttttttttgaactataacttataaccaatttaaaagagggcccccccaatgatgggttgttggaaaaacactgttgggtttgaaaaagcaagttggtcaaatggcaccaattgttgcagttgaaaaagggtgccaactttaggcccagtgggcaggaaaaacggcaacaaatgttgttgtgtaaaaaaggcaccagggctcacagcagttagctggctaaatgggaaaaatttttgtttttgcacataagcatgaaagttcaatgctcccatttgtttaaatggaaaaaattcgcgggggtagccaacaactagcttggtgagtggaaaatttttttttc

SEQ ID NO: 96949 - DNA, 255 bp, Zea mays
  Clone ID: MRT4577_19933C.1
aaccttgaatgcgcatcgcccccctacctaaactttgatttcgaggccaccccgacccaaatagccacccccgtggggaacgcctgccatacgcttttgagggaaacccaaaagacaaaccccttttttccaagaaaaggtgcctgggacccaaaacaaaaaccacgacccaattattgaccccggatagtgccctataactatttgatcacctccacattccttttttcttgaagcaaggccaaccaattaagc

SEQ ID NO: 96950 - DNA, 420 bp, Zea mays
  Clone ID: MRT4577_19934C.1
aaaaaaaaaggcaaagaaaacaaaacaaaaaaaaaaaaataagaccccggcgagggaagaaggataagtactgtcctgacacaggaatacaataaaaccaccggaaagcaaaagaaaaaaaaaagcccctcaaaggaaaaaaaaagacaaccaaaccaaaaaaaaaaaggccaaagacgggggggaaaagggcaaggaatgggggggggggggaaaggaaaccgggggggggaatgccggcccggggggggccccgcccgagtccgcccgggcccgggagggaatcccactatacctaggggaggccccggggaaaactgggcaaaaaaaggtttggtcatggatgggcttgaaaagccaatccccgggccgcaagcaaaaaaaccctagggggggagagaaaacggcggggccaggggg

SEQ ID NO: 96951 - DNA, 207 bp, Zea mays
  Clone ID: MRT4577_19935C.1
tacaagcctctaaaatgagtcgtattacacaaacaaaaaaaaacaaacaaggtaaaacaaaaaaacaaacaaaaagggtcaacaagcaaggaaaaatggcggaatcaagataccccagttgcaattgagggggcctaccccggtccgtgtcgaccctaggtgacctgatcactgcactgcaacgtgtcatgaacatgtccggtgatc

SEQ ID NO: 96952 - DNA, 713 bp, Zea mays
  Clone ID: MRT4577_19936C.1
acaactcgtaaaaataaaagatcgttggagtcccagagccagcgggttgtagttgacttcaattgcttttacatggcgatgcttgctcaccttgcatttggatttacaacccgccagaccgagttgatcaagaaagctaaaaccatctgtgaatgtttagttgcatctgagagcacagacctaaaatttgaggaatctttctgctcatatcttcttggagaggaaactggaaccacagtatttgaaaagcttcagcagcttcaaagtactggaagttcaaattcaaagaactatggattggataaaaagaaagacagcagtggcgaggttactgtcaaccaatcactggaactgtggctgaaggatgtggccctttctcgttttgcagatacaaaagattgtccgccatctttgaccaacttttttggagctcctaaacgtgtccttaacacatccaagcagaaactgggatccccaagatcagtccttttgagctctcagccatcttctagtgcttcattatgcaacagaacttcaacagaacagagcccaagattgagtcccaacagccatctgggggaggctggtaacaacttgcacctgccacttggggctccatcatccatggataggcaagtaatggttcagggaaagcatctgttcccttgaaaccaatcctggatccttatagaactttggaattattgggaata

SEQ ID NO: 96953 - DNA, 611 bp, Zea mays
  unsure (1)..(611): unsure at all n locations
  Clone ID: MRT4577_19937C.1
tgctttggctacaactcgtaaaaaaaaagacgttggagtcccagagccagcgggttgtagttgacttcaattgcttttacatggcgatgcttgctcaccttgcatttggatttacaacccgccagactgagttgatcaagaaagctaaaaccatctgtgaatgtttagttgcatctgagagcacagacctaaaatttgaggaatctttctgctcatatcttcttggagaggttataaacttatctcaatctgactaaattattagctttagttccttgcattactagaactaatgattagctctcaggaaactggaaccacagtgtttgaaaagcttcagcagcttcaaagtactggaagttcaaattcaaagaactatggattggataaaaagaaagacagcagtggcaaggttactgtcaaccaatcactggaactgtggctgaaggatgtggccctttctcgttttgcagatacaaaagattgtccgccatctttgaccaactnttttggagctnctaaacgtgtccttaacacatncaagcagaaactgggatccccaagatcagtccttttgagctctcagccaccttctagtgcttcattatgca

SEQ ID NO: 96954 - DNA, 240 bp, Zea mays
  Clone ID: MRT4577_19938C.1
ttatatttttcaaggaccgcgagccgatagaaggggacttttttgtatcaatcgcggtctttataccgaacaaccccttactcagttattccactcaacccggatggttaccttcttctttgctggccatccctatagaccacatccacaaggggtagcaccggagtgaatttgaaacctaccacccttaaaggaagtttgaaccattaaaagttcgagctttattcaataaggaccgtc

SEQ ID NO: 96955 - DNA, 776 bp, Zea mays
  Clone ID: MRT4577_19939C.1
gtgctgggttctcatttgatccccagttttcctcatcctgtcctttgccctaggcatgaatcaaacggccatacaagcagtcaacctattcaatttcttcgccaagtcgcacaaaatacatatacaccgccacaacactggaaaaacttgtctaaaaggcatctctccatgacaacgtgttatacagaaaagactatatcacacatcccacttaaggagctatcctcgcacaacacgaaagctaaaaccatatcgaagagcaaaatacatttacactcgtatatgcagttttctgcaatcgccaggcggggagaaaagaaccactactgaagaatttacaatcatgaaatcgaacggtcatcctcctaccttgggtggttccaaggagagggtggcttgaatggaaaaccttgcggagcagatccacgtcccaaatcaaggctatgaagttgttccatcagttgcgaccttcgctccttgaagaaatctagtctagttgttagctctaccaaagtggaggatgtgaccattggttgcctcccaaattcaatgccctctgccagctttgggacgttgatggacacagaggtgttctctgttgacatacttgttgagggttctgtgccccttgattcacttgaggaggcatcaaatgaaagctttcgtgtgagtggcctcgaagaaccataaggtagcacatgctgcttgatgtttctccattgtgatgactccaccgaactctcctcatttctctgcttctaatgaatgcagaaagc

SEQ ID NO: 96956 - DNA, 867 bp, Zea mays
  Clone ID: MRT4577_1993C.1
atggatcctaagggaaaggggatggtggtcaacgacaaggagaaggagtccatcttcaacgagccaagagatgacaagcccactgactcaggcttgagtcataagaagaaggacgggaagaagaagaggttcatcaagaagatcaactactacgacagcgatgcatcttcttcttcaccaagagacgacgacgacgactcttcatcgaaaaagagaacggataatcaaaactactcttttgactattctcgcatgccatacatttcgaatgcacatttactttctattcctctaggaaaacctccacactttgatggagaggactactcattttggagtcataaaatgcgtagtcatctattttctctccatcctagcatttgggaaatagtggaaaatggaatgcatttcgatagtacggataaccctgtgattattaatgagcaaatccataagaatgcccaagctactactgtgttgttagcatctatttgcagggacgagtataataaagtaagtggcttggacaacgccaagcaaatctgggacaccctcaagatctcacatgagggaaatgatgttacaatgatcaccaaaatggaactggtggaaggtgagctagggagattcgccatgatcaggggattagaaccaacacaaacctacaacatgctcaagaccatggtcaacaagattagaagctatggaagcacaagatggacggatcatgacgtcgtccgactcatgctcaagtcatttatagttattgacccctatcttgtgaatcttatccatgaaaaccccaggtacacaaagatgacgctcgaggagtgttgggactatgcttcgtcgcgccgaaggtcttga

SEQ ID NO: 96957 - DNA, 316 bp, Zea mays
  Clone ID: MRT4577_19940C.1
ccacaatatccattcacttgttaaaacattcaggttgtgaaaatcatagtgctgcacaaaaatgatccgttctgtaattttgttcaaacaagcaagtaaaaaaaagtagtgtatgcacacacttcgatactgtttagattccaacgactagaactccatggatacataggttgcagagtaatcaggcatcttgtgtagtctccggaggatgctctcggccgtctgcttagtgctctcgtcccctctgtggaaggcgctcactaacgccgtgggcagcatccgatcgcctgtcaccttcctcacgcatcggtcgtcg

SEQ ID NO: 96958 - DNA, 167 bp, Zea mays
  unsure (1)..(167): unsure at all n locations
  Clone ID: MRT4577_19941C.1
accgcacgcgtccgcggtgaatgaatctccctttaaccttggtgcttaaactcgaaatctgtgaccatgcagctaaggcactttctaaatagaaacagagatgcacaaaaacatgacngaaacgcatgagccaaaaaaacacagaaaaaaagcgccagccccacgaa

SEQ ID NO: 96959 - DNA, 416 bp, Zea mays
  Clone ID: MRT4577_19942C.1
gaaattgatgtcctgcagaagcttgtaaaaaatgatgctgcaggcaaacagtagtttatgcatttacttgttcggattgtggaaacaaaggaataagttctgtacttctgtgcattaaattgtgggctttcttaaaaactatgatgctgctgtaatggaggaaagttacatgcttatggtgtttttgcagttgtgttcaaatacggaactggtttgactatcgtagccatatttgtattgtaagtataatggttggtttatagaatttcccctcaccggcaagtagacattggggccaaatcaatcaatattttttgatgaattaacaggtctgcgagaagcttggcccaagcttatatgattttctgcaaaaaaccggcttccatccattcccaaatgatctaattcgccggatc

SEQ ID NO: 96960 - DNA, 1240 bp, Zea mays
  Clone ID: MRT4577_19943C.1
ggtaccggcccccctctctcggttttttttttttttttttttttttttttttttttttttttttttttttttttttttttttaaccccgccacaacactggaaaaaacttgtctaaaaggcatctctccatgacaacgtgttatacagaaaagactatatcacacatcccacttaaggagctatcctcgcacaacacgaaagctaaaaccatatcgaagagcaaaatacatttacactcgtatatgcagttttctgcaatcgccaggcggggaaaaaagaaccactactgaagaatttacaatcatgaaatcgaacggtcatcctcctaccttggggggttccaaggaaaggggggtttgaatggaaaaccttggggagcaaatccacgtcccaaatcaaggctataaagttgttccatcagttgcgaccttcgctccttgaaaaaatctagtctagttgttagctctaccaaaggggaggatgggaccattggttgcctcccaaattaaaggcccctttgccaactttgggacgttgatggacacaggggggttctctgttgacatacttggggagggttctgggccccttgattcacttggggaggcatcaaatgaaagctttcgtgtgagtggcctcgaagaaccataaggtagcacatgctgcttgatgtttctccattgtgatgactccaccgaactctcctcatttctctgcttctcttgattgcagaaagcaaggttcatatcaaatccttgttgaacaaagttttgctgtgagaaatgaccagggaggcggtgatgacgatcatttgcatccactacagagccatactggtgttgacgttgttgattgagttggaggtgaagctctgcaaccttctgttttaaccttgcaacatcagcttcagcgagagcaatctcctcaagttctgcctttgtcttcacgtccatcgaacgagcacttgaaaactgtccagaagacatgctcaagccaacctccaatgcagctcgcagatccctttcagcttgcagttgttcttgcaacctggagacatcctgttccaaagccaatctgcgttcatgtagcgcttgttttcttctttccaaactcgcctgtagaattgcattccctctagcctcttttgcaattctgttttgcagatcattcttcgcaatctctagtctttgaatagcaagctcttcttctccagatgaatcgactgattcagagcccggg

SEQ ID NO: 96961 - DNA, 396 bp, Zea mays
  unsure (1)..(396): unsure at all n locations
  Clone ID: MRT4577_19944C.1
cccgggcgccaccgccgtttggcngttcggaagatcaggtctccgggcgagtgcggggngaggacggtgatgagatgaccagggtnttctggcggtctatcaaggacaagcttatcctcccatttctgggcctgggcatcaagtactatgatttggggatactgcgccgtgaagcaactgatgacatggtctcaggggggggtgcagaggcttctctcangtncaacgtgggtattacgtgtgcgaccattactcctgatgaagctcgggttctggagtgccgtctgtgcctcgtgtgggggagccctactggggcatttgggaacattataaatggcgctgtgctcggagagcctattatgtgcgtaaacgttccaaggcttgttcccgggtggg

SEQ ID NO: 96962 - DNA, 252 bp, Zea mays
  unsure (1)..(252): unsure at all n locations
  Clone ID: MRT4577_19945C.1
cggacgcgtgggcggtcgcgtggtgtgaatgaatgagatattcagtgaccaaaaaaaaaaggaaaaaagaaatgcaattatctgctnaccacctcccattcactatctgatctggtctgcccctttagaggatccagacttatctccggtctcctccgacgacatcgctttttttttggggaccctgaaccccatttcctgccccgcgttttccaacggcgcagcctagaaaaaaccttgcctgtccccact

SEQ ID NO: 96963 - DNA, 499 bp, Zea mays
  Clone ID: MRT4577_19946C.1
aaaaaaaaggggggccccccaattccttttttttccccccaaacgccctaaaaccacctggtgcctttccattttaccctttaaaccaaacaagcgggccataacccaacggggatttttttactttaaacacaacggacccccttttggaaaaggggtaatcgtttatttttcccccccttaaccgttgtttttaaaaaaaaaaccccatttttttataaggccccctgtccggtttttttaaactaccaaaattgtttttggcccatcctctccattggcattttgggccactttttgggagtttaccaaagcaggttgcccattcaccatttgtgttgggcccaggggcttttgggaaccaaaaccaaaaaccgaagcttttttttttccggggttgaaaattgaactttgcccttcgctgactttttctccactggtgggaacattcgtatccttgtaaagaccataaaaggaggatgcattttgctccaagggt

SEQ ID NO: 96964 - DNA, 395 bp, Zea mays
  unsure (1)..(395): unsure at all n locations
  Clone ID: MRT4577_19947C.1
tttttttttttttttttttnnnnnnnnnnnnnnnnnnnnnnnnnnnnnnnnnnnnnnnnnntttcaaatttgaaaccgaaaacactaaaatccgagctggctttcgtatccccgtggggaccgagaacgaaaaaattccccagttttcgctcgttacctaacgagacactcaaccgggggtggagttctacatgacttggttcaaaacgtaggctgtgtgaaactggccatgtccagtgggtcgggggcaatcggtttaaaccgaccaatcggttctgtttctttggggcagctaaacttcgtatctcagtgcagtactccagccgtcgacgtaaacgctgccggcgaggtaaacttcgttcggggttcagtttctaccaaaagaatcgtcttcg

SEQ ID NO: 96965 - DNA, 289 bp, Zea mays
  Clone ID: MRT4577_19948C.1
cttcgctttctttctttttgtctttttttccttttcttccttgttacttccttgttccccgtcccattcactcctttttttcctggcccagtttggaacaaaaaaggcgctctcctgtgggacaatccccccacattttgcccaaccgggtttacagaatttttaaaccaaaatccctgagtaattcctcttggggattttaaccgtccaattctttgcggcctgcaaaaaaaaggaacactggggtgccctttaaaaactcttgccaatttaagttcaattttttttt

SEQ ID NO: 96966 - DNA, 291 bp, Zea mays
  Clone ID: MRT4577_19949C.1
ggtcccttggtgtggtggtggtggagcccgccgagcgtatgccgctggatggccaggggagaccgcggggtggcttattagagtaccagtacgcgctgatgaccagggaacgagaaggacaaactatcacctctactccatccttgcggatggcgctagcaagaccagcgggaggaagaagagatgttaccttcttgcttctgcaccaacgtcgggaggggggggctgaccttcatgttgtgacacgctcgggaccagccgggccggggccggtactgacggcgcacccca

SEQ ID NO: 96967 - DNA, 435 bp, Zea mays
  Clone ID: MRT4577_1994C.1
taccttgtggaggaagggatcatgcacgagttctccgctcctttctaccacagcaaaatggtgtggtagagaggaagatctggacgctcatagacatagcgaggacgatgcttggagagttcaagacccccgagcgattttggtcggaagccatgaacacggcttgccacgccatcaaccgggtctaccttcaccgcctcctcaagaagacttcgtatgagcttctaaccggtaacaaacccaatgtgtcttactttcgtgtatttgggagcaaatgctatattctagtgaagaaaggtagaaattctaagtttgctcccaaagttgtagaagggttctttgttaggtcatgactcaattacaaaggcgtatagggtcttcaacaaatcatcgggtttggtcgaagactctagctacttcgtatttgttgagact

SEQ ID NO: 96968 - DNA, 313 bp, Zea mays
  Clone ID: MRT4577_19950C.1
cctattagatattgatccattcaccaatatgctcacacatgtatctgccgtacatcgaaccacataacacgttgcattactcagcttactataaaatacacaaagcgccctatcacgaggatcaacgagcctctcgccacagaacggcatcttacacgtctcccgacagcaggcaggtgtgagttctgggacaatcgtcagccagacccaccaacagctcatggacaacccttttttcggcaacgccagaaacagctcttttggcggacttcctttcaccccccttcctttcagtagtccgatgcttaacttc

SEQ ID NO: 96969 - DNA, 663 bp, Zea mays
  Clone ID: MRT4577_19951C.1
attgggcggtgctctgtacaaggactgcagggcctcgcctcgccaacctggaatgagacgcactaggcttgccttgattactagagccttggaggcgttttttcaaacgggcctatcattttactctctgtccttaaccatcggtcactgagtctagctgctcacttctttggtgttgctatctacggtgtccgccgcttgatgctccctcttcctctacctaaacgaatgaggatcgtagctagaccgatttttggagcatgcgggactatcctccttatcatcaaagctgaaggcgctagacagatgttcttccctgctacagtacctgcatattaccggtccgtacctacgggagaaaaggaatgaacagagaaccgattcctggctgctgttaccaccatgaatgatctcatggcaactgatgtttcacggatgacattatgctttgctagaggctacttatcgcttatagataaaccgtccatggaatgaagaaccatgatagtgtttgtgctgggcactggtgaaggagcataatgcgttgagttggctctctactcgagaagatcgctgccagattgtgcacgtagccacacatgattgtggagagcttgcgtgcatcacttggaaagaggaagaccgcacctaagctgccctctg

SEQ ID NO: 96970 - DNA, 420 bp, Zea mays
  unsure (1)..(420): unsure at all n locations
  Clone ID: MRT4577_19952C.1
ggaattggaacccaaaagagtttcccatgattaaaaaaagggggttttgtataagggcatccaggacaattacccccgttcgggattcccccccttcccgggaaaaaacgactaaccaggcggctccccccagttccgggggcagggatccccacggggaccccccagaaaaacaaacaggaaatgcccctgccaatccttgcagcccaacaactaaacttttcctcattttcaaccttgggaacccaaggggcaacccatcgttatcaaaaaatcccagaccagggccttggagtctattcatagcagggggagacaattcaatacccgaaaaatcagaaaaagctacaggctttcccccccggggacccatttaaaaaacatgaaacncacggcccttggataaaacctccttgagtc

SEQ ID NO: 96971 - DNA, 405 bp, Zea mays
  Clone ID: MRT4577_19953C.1
atgggacatacccagaccaatgggaggctacctgcctggtgcgttgtctggatgataatatccgaggtgcagaggcctactcagagcactattctatctctgagcgggatgatgtcgagtaccgggaatgtgattgtctcacccgttggtgagggcaatcctaggttgagcaacatggtcaacctggtcgctgtgctcaacaccaagctagaccacgcccttgacgagttgagcaaggctcgtgcggagatctcggaactgcatgctgagtgcgcagagcgtcgtgatcaggaggatggtttccctgcccctgctgggactcagcacccttaccgctcgtcgccccgtggtcatcatgcttatggtatccgtgaccgcaggaccaagatagacttggagccttag

SEQ ID NO: 96972 - DNA, 496 bp, Zea mays
  Clone ID: MRT4577_19954C.1
aattcggcacgaggaccgatccggagctaagggcaacagttagctatacatctagatctagcagctaggttaaggaacaagccggacggcaaggtaacacacagctagccaccggccactctatgttaagcacacaaatagaccaatctgaactacacgcaacgcgcaactagctaggtagccgcgcgccggctccatgatgaacacacaaacctgaagcaaactatggagctatccgcgcaccacagaagtggcgcaagatcgagcctgtggacgtcggcgacctcaacagctcgctcctgcaggaggacacaggatcctgtgttctgacgacccggctcccttccagacgtgcagctgcaccggatcagatccaacgacaccgaggaggtcaaaggtcccgaatgctccgcaaccgtaggaaggatgctcaccgctcaagtctacgacgaaccgtgagaccgcataccgcatgagctcttacagcgacgggtcg

SEQ ID NO: 96973 - DNA, 422 bp, Zea mays
  Clone ID: MRT4577_19955C.1
aaaaaaaaaaaaacaaaaaaaaaaaaaaaaaaaacattttaataaaaaaaaaaaaaaaataaaaaagggggaagaagagcgtcttcccctgtgaataaatcccaccttcccccccctttcttgccccctaatttctttcccctggggtccgcctatcttccattccctgtccggtctcccaacatccttcccacctggcaattctttactatgccctatttttaaaaccccgccccttttccccttttttccatttgcctcaaaccccatttgccccccttcctttttttttttcataaccttacccctctttactttcctatcttttcccccctttgccggtccatttgcccccccccttgtgccgccctttccccgctgttttggtacccttcttcccccgctaccccctttttcttctc

SEQ ID NO: 96974 - DNA, 415 bp, Zea mays
  Clone ID: MRT4577_19956C.1
ttttttttttttttttttttttttttttttttttgttttcttttttttttttttttcttttgctattggtaaaccttgtccgtgctattatcagagctctgggccttggtacaaaaagaacagaaccaaatggcctcgcccgcgggctgctccaaggggcggcggacatcatgcccctgaacacaacaaagcgaactcgcgggcctaaaacagaaccttggcaccacatgttttctccgctcgcagaaggcaaacgcacaaaaaaagggcgggcccacaaaagacggccaggcccaccattgagaccgcgcaaaagatgccaggcggaagggggaaaaagggacaaaccgccgggaaaactagtcccctccacaagcgagaagaatcatccggagcacccagggcgcttaagggc

SEQ ID NO: 96975 - DNA, 218 bp, Zea mays
  Clone ID: MRT4577_19957C.1
tccattctattcaaccacccacgcgtttactcttccctcccttctaggaaggagtaatttctacgagcaagcgtgcacacatttactcctcctggtaccactttaccctgctcagcctccaccgctccctaccctactaacggaccctaccttctatcccaaacagatttggtcccatgatctagctgcttgcccactccactccttcctcagcttaa

SEQ ID NO: 96976 - DNA, 164 bp, Zea mays
  Clone ID: MRT4577_19958C.1
cagagctgcagctgtcagtgaggcgcaagagaccagctcctacatagagatggtcatttggatatacaacgtgtagcccaggattaagttcgtcttcgacaagaactgtgataaagacgatgttgacgacgatgagatcgttaagtccttcgacgagtcaatgg

SEQ ID NO: 96977 - DNA, 834 bp, Zea mays
  Clone ID: MRT4577_19959C.1
ctcgaggccggccgggagcgtgatttgcgtctctctgtcgacgtcgtgcagagtactccctccctcgccaccgctacagccgccgcccaggccttgccaccgggctcgccgccgcgccaccatccaggacgcgccgccgccagagcccatccagaccacgccggctcacttcgtgctgccacacaaggcggcggaggaaaatggagatcggcgggtacctgatcccgaaggccacaacggtgaacttcatggtggccgagatggtccgggacgagcaagagtggggagaacctgatgcctaggaggtctcacttgaactaaaactactttaccatcttctgttattctatggtttcctcgttttgtcatggatataaacatctcatagctgtcaaaaattacggcagaaattgtaatgttcattgggcagtttcgtcttcgtgtcgatcgtggatggcttgtgaacacggaaaatcattagcaaaagtatgccgattataaacaacagggctgctcttctcaaaacttaaactgttgatgcaccttattcggatgctcttgattcattgctgtgacggctctggaaggattggttgaactttcgggttattgcttagtatccattagcagagtctatatattacagtattttctgcttggcttcatctcgatgaagactatagatgaatttgtttgtaaatgattgagagcactagcgttgtaattccattggtacgaacagagctactctcagataaatgaactgttgatgaatgtgacttgagttgttccagataaatgaactgttgatgaaaaaaaaaaaaaaaagcggcc

SEQ ID NO: 96978 - DNA, 285 bp, Zea mays
  Clone ID: MRT4577_1995C.1
tcccgcgtccgggcggatccgatccgtgcgcctgctgtgtgtgtgtcggtggagatgggcacagcttacgctcccatggcgagccaggtgatgaagagcagcctcgtcgtgcactcgaggccgagtggcctgtcaggcgctgctgcgctcacgatgcggcccctgttcaccgtcaaggccatccagcccgagaaggctacgtaccaggtggtgcagtctatcaactgctaccccttcatcggcagcctggagactcctgtcacctcgagcccgctcgtggcgtgg

SEQ ID NO: 96979 - DNA, 539 bp, Zea mays
  Clone ID: MRT4577_19960C.1
attccagaaagagtccgacgctcatggctcctgcgcgcctcagacatacgcgactcccgcagacgacaaagcgcgaattgccgacaacgaggggcttagataacaccaacctgacatccgtctgcggcccatgctgcatactcgtctgcatagcgagcgttgctgcaccgcactaggccaagagcagactggacacaaagttcggagcatcctccttccaccgagccgcacccattatccgttgatccattgtgcacgatttcgtgtgcggaggacgtgaactacgatggatgacctcgccacggaatgcaacttctcatatacagccgtgcgactagaatagtgcttatgaagccgactataccactcctgtgtgatactgaagccaactcagagcttgtaggtcgagtagatgacgtcaccgtacaaacatgcgcagatgctgcgtatggcttggatgcaacatggtgctcaaaccgtagaatcaatcattggacacctcgtgttacatatatacagagtggggggctgatcctcat

SEQ ID NO: 96980 - DNA, 536 bp, Zea mays
  Clone ID: MRT4577_19961C.1
atcacacaagcatctacactcacaaagtccgcgctctgcactctacactcgacaactagctactctactactcttcagtcatcacctacttcagaccaccaacacacagagagatcatggcgggtgcggcgaaggcgtcttggatggtggcgatgagtgtgggcgccgtggaggccctcaaggaccaggtcggcctctgccgctagaactacgccctcaaatccatccaccgggcagccaacgtccgcggcggcgtcttgcagggcgccaagcagcttccggcctctgctgaggcggcggccgagaagcggcgaggggagaaggccgaggaagggctgaggacggtgatgtacctcagctgctggggtcccaattagaagctgcaacttggtactagctaggcgtgtgtgtgtttgctgcaacaaccatggcctggaaccacgatgtaaaaacttggtactagctggcttcccgaggaatcccccattgtaaaaaccccgatgatgatgatgacaaatttctgttacttcagtacg

SEQ ID NO: 96981 - DNA, 124 bp, Zea mays
  Clone ID: MRT4577_19962C.1
cgcgcatatccgttcgcacaatcgcaccttcaccatcgtatcgcgatgacctcgtgggaacctcgtggatactagatcaatgagctgcataattaatcatgaccattttttccaggtaattagg

SEQ ID NO: 96982 - DNA, 251 bp, Zea mays
  Clone ID: MRT4577_19963C.1
gtcatttttgttttgaacattttttttttttttttttttcaaaagaaccttggcctcattaaaagaatattcctacatgaacaaaataacaaattttgggattttcataacatacttaatacgtgaacaaaatattgaaccttgggcgtacataaaccaaatatctggcagggattaaaatattcatgacgagccccaagacatacatgaaattgggattaaaaaagaaccagaaacttgccttttttaaa

SEQ ID NO: 96983 - DNA, 459 bp, Zea mays
  unsure (1)..(459): unsure at all n locations
  Clone ID: MRT4577_19964C.1
ggaaacaaagagggggggccccgggatttttttccaaaaaaaaacagggggggggaaaaaaaaaaatttggggaaaaacacaaacggggtaaagggaaaaaatttcgaaaaacgaaaaaggggggggggcttattttaagctttataagcggggggggggttacatattggggacacaaccaaaaaaaaaaagggccggtaaacttaatccttaatttaaggaaaaacaaggggggggtccaccggaagggccaacaccaagctaaaaaaaattatcccgaaaaaaaaaattcacccaatttgggggagggaacccagcgaccccagggggaccacctcccaattgcaaaaaccccggaagggggggntaaagggcccaaccccctttttccgaaggggccccggccttttggggggggaaaaaaagggagccgggtttggggggtttgggggctttgg

SEQ ID NO: 96984 - DNA, 376 bp, Zea mays
  Clone ID: MRT4577_19965C.1
gggaatgaaccgcattgtctcattttatacgaagcaaatagcgctcaggtgtaatgctacgacccaactcaacctaaggtccaaaaacctaacagggccgaatatgctatgctgctatagctacggcaacggaaaactggagatatattggtcgggctgctgcattgaccaccggccggcatgatttgcctcaggaagattgagatattggtgaaggcaacaatgtcacagctctggatgtactcgccggctggctcgacccaaagattgtcttccatccgagtgtcaacagacacaaggtcattaatgatggccgataaatctgaagcttatcgatgccatatacaaccggcatgagcttggaagcgccccacaa

SEQ ID NO: 96985 - DNA, 562 bp, Zea mays
  Clone ID: MRT4577_19966C.1
aacaccctcacatatagagagcatacgcaaccatgaacgcggcgaataatcaaccgcgcggcgcggtggcggtcatactgctggtactgcacactcatggcaactccaccgacggccatggccgcccggtcgccgggcgaagccgggtcggatggctccgtctccaccatccccaaggtgaccaagttgccaagcacgctgatgatacaccaggaaaacatgaaaatacatcgtccctagccttcactcctgcttggtcctgaacctttactgatcgcctctgctacagcatatttactcctgctgattgagtggagggcatatccacaaagccacaactcttacatgcatgcgccgctacgactacgacgacactgcctctcgtgagcttctgctcaagagatgcatgtttcaaggcatccatggatgctttacgtatatgagtattaagtagacgtgtcaaggaaccggacagatggagggtgttgactatatttacgcctgtcaggtgatcaaataaagggcaaatatatgacgcacggggacgatgacaaacttattg

SEQ ID NO: 96986 - DNA, 240 bp, Zea mays
  Clone ID: MRT4577_19967C.1
cgtcacctgacctcatagataactctaggtctgacggacgtacgctcgtctacggtactgtccggaatatcactgatccgacccaatccggccgccgatggagctcatgaagtccagggcgactgtatgcgcgctcctcctggcgctgctcttgctctcgcactatgacggcgggacgacgacgactatggtggcgtaggccacggagttgcatggcaagagccagcaccactcgttccc

SEQ ID NO: 96987 - DNA, 668 bp, Zea mays
  Clone ID: MRT4577_19968C.1
ggtaccgcgcccctctctcgagttttttttttttttttttttttttttttttttttttttttttttttttttttttttttttttttttttttttttttcccccaaggttaccccccttgttaaatttttttggtaaaaaggtaaaacccccaaggtaaaaatttaacccccttctttttaaaaaggaaaaggggttgggggtcggccccccccccctaaaatgggaacctttggcccgaaaggcaaaagggggggggggggttctttgggggaaacccaaaccccggtggttaaaaaggtttggggacccccccaatttggccaaacccttttaaagggggggcctttttttggaaacccccggggaaaggggttggttaaccaggcctttccccctgttttaacgggcttgggggtgggaccttgacccaacttttttttccttccttggttttttgggaccccgagggggacgggactttcttgaacccccccccctaatgggggttgttgaaaaatttaaaaaaaggcgggaacctggccttggaaaaatttgggggcttccccccggttaaatttttttttttggggccctaaccctcccttttttggggaaccccggggggggggaaaaccccttttttcccagggggggaaaaggggatccc

SEQ ID NO: 96988 - DNA, 351 bp, Zea mays
  Clone ID: MRT4577_19969C.1
attcggctcgagggatgctacactcacatttgttggctcaggcagaaaacgcggtttatgccatcctacttgtacctgaagtgacatcgcatatgaactgccctggttgaatataagaggaagaaaactgttatgatgcacaaatggaacgagactaaggaccctgagaaggctaagatggaaaaagaacggatacacggcccaaatattccagcccattcaagcctttaacacaaaagggagaaagtgaaccgcatgtacacacaacctgcacggccaaagaaacagctttgtacaggattattggacgacgctctagacgaggatgaggagccagactatggttctcgg

SEQ ID NO: 96989 - DNA, 1434 bp, Zea mays
  Clone ID: MRT4577_1996C.1
atggatcctatgggaaaggggatggtgatcaatgacaaggagaaggagtccttcctcaatgagccaaaagatgacaagcccactgactcaggctcaagtcataagaagaaggataggaagaagaagaggcacatcaagaaaatagtctactacgacatcgacgagtcctcttcttcccaaagagacgacgacgacaagaaaaagaaaacggtcaactcaaatttttcttttgattattctcgtattccgcaaaattccaatgctcatttgctttccattcctcttggtaaacctccacactttgatggagaggactacggattttggagtcacaaaatgcgtagccacttgttctctcttcatccaagtatatgggagatagtagaaaatggaatgcaatttgatagtacggataatcccatggaagagtatcataaggtgggaggcttggataatgccaagcaaatttgggacaccctcaagatctcacatgaggggaacgacgccaccatgatcaccaagatggagttggtggaaggcgaactaggaaggttcgcaatgatcaagggggaggagccaactcaaacgtacaacaggctcaagaccctggtcaacaaaatcaggagctatggaagcacgagatggacggaccacgatgccgtccggcttatgctaaggtccttcactgtccttgatcctcatcttgtaaactctatccgtgaaaatcctaggtacaccaagatgacgcccgaggaaatactcagaaagtttgtaagcggacgaatgatgatcaaggaggcaagatatgttgatgaggcgttgaatggcccaatgccgatccacgagcctcaaaccgttgctctcaaagcaacaagcagcaaggaggggctacctagcaagcgcttcaagacggcgctaaaaggacgcaaggaacatcccaacaaaagcaagacaaagggaaaacgctcctgcttcaagtgtggtaagactggtcactttattgctaactgtcccgataatgatagggaccagggacaagaaaagagtgggaagagagagaacaagaaggtttacaagaaggctaaagtcgaggcacaccttggtaaagagtgggactcggattgttcgtcgtccgactccgacgacgaaggactcgccgcctcagccttcaacaagtcgtcgctcttccccaacgagcatcatacttgtctaatggcaaaggaaaagaaggtttatgcatccgggggctcaagttggattatcgacagcggatgcacaaaccacatgacgggggagaagaagatgttcacctcctacgtcaagaacaaagattcccaggattcaatcatattcggtgacgggaatcaaggcaaggttaaaggactaggaaagatagctatttcatctgagcattcatatctaatgtgtttttag

SEQ ID NO: 96990 - DNA, 305 bp, Zea mays
  Clone ID: MRT4577_19970C.1
ccaactcgtacgattataacatcaggccacattacatgactagatacctcacttggtgggtcaaccgttgttttaataaatgcacttataggactatgcataagccaagtgaacaactgtatgtgtcccctaatttgcccaagcctgttcatatatacagcgtacacattctttccatgctgtcttttccaccactcttattggttttttttctttcctcagacctcataatcacacgctccttaaaattattgtacattataccattttttactatttctcaattttcctaattatttctacat

SEQ ID NO: 96991 - DNA, 403 bp, Zea mays
  Clone ID: MRT4577_19971C.1
gtaggcgctgaacaggctattacgaggaaggtggaggaatttctacattgtgacgggatcacacaagacagagatcgtggtgatgaagaatgtcgaatgaggatacacgaggagggagcaattcagattgagaaggaaaaagaagcacctgtaaaggaagacaagcggaaagtgtaacaagaaaaaaagaagagggaggaactagaaaaaaaactagaagatgaacgaaggaaagcttaagaggcgtggatgaaagaatggttggaacagtggcagaaagagctagagagcatccaggagtttgagaggcttccaaaagaaagacagtgggccatgacacggaaaaaaatggaggaagagcagcagaggtaaaaccagaggaagtttatgggaaagaacaagt

SEQ ID NO: 96992 - DNA, 364 bp, Zea mays
  Clone ID: MRT4577_19972C.1
gacaaggacattgacaggtttagtaaggctttgctcaattcatggttgcatgacaaatctctagatggcaacaattgttcaaaatgttgccagctaacaatggagcttgagtccatgagtattgcttccaaggaaaatggtaaagcaagacgacaaggcacacgaggaaagaagcaacaacatataaatgatagtaccaagtgctgcagctgcaagcagaggcgaatagcttcatatataagtgaagctaggagggcttgcaggcttccacttttgataggcgcatctcctgtgtgttacggcgtgcctacaatcattaggaagaaagtaatgacggattctaccacgagagagatgacctaaa

SEQ ID NO: 96993 - DNA, 959 bp, Zea mays
  unsure (1)..(959): unsure at all n locations
  Clone ID: MRT4577_19973C.1
cccgggttcaacccacgcttttcgtcccacgcgtccgggnaaaagtaaaagccccgagctcgattggggaagagaggaggggagggtaaaaaagaaagtggcgacccctgatgcggcttggccatactccccgaacaagcatggtcgcacgacgagcctgggtccttgtggctgaattcctccgtccgcccagccgtgggttggtgtggcgcgtgcatgcatgatgcatgcgctccttgggtctgcccctgggacctgcgcggcctcctcctgcagtgcacgctctccggccccttttgttgcctcgcctgcaaaggctgctgcccccttctcgcccgctctggcgccttgacctttccacgccctcccctccgatcctccccccccccccgatcggccggccgctctgatccttgcatgcacgacgacgagccccggtggcgccgtccggccgagcctgcctagctttttaacggtggtaatagtgatcccactgtagaccccctcgctgctcgctgcccgctgctgctacgtactacacgtatagtacctgctctgcagtgcttcttagccttgtggctgagctgaatgattccccaaccaccgagcgtcactggcacaaatgggcagggttatccggatggtgttgccatgtatagcaaagcaagcgccttcttcaccggtcaccactcattcactcactcactcagccctcttctctccctcctcagtctcccactgcggagacgatcagacgggacgacgctggttggctgataaatggatggtccttcctggccgctgcccgccggccgggtaaacactaacgcagtgccagtgctgctgttcctgctgccgctgcgtcctagtcctagcctagctaccgctggctggatggtgggtgttacactgttactacccaggaggggggagagttaccaggtgcatgcacccacggt

SEQ ID NO: 96994 - DNA, 1510 bp, Zea mays
  Clone ID: MRT4577_19974C.1
catttgcatccgcattccacccggggccgaggtctcagcgctcagatggctcagatgtcacccacccgcaacaagtgcgtcctaaccgccatctgagcgcgttcttgtccaccctaacctggtgcctctcacggccgcattcgcaccgcgatgaactacgccgcagccgccactaacgcccccgcggcggcgcccgcggcagcgccggcgtcgggcacagaacacgcccactacccgtattacgctggctattcttatccctacggcgcctatcaccaacctgccccgcccacgtactcctccgccgtggccgccgcctcgtcatcctactactaccccgtccctgccgccgcgtcgtccaccgccgcgcagtacgacccctattcgggttaccagcactacagtcacccggagggaggaggctcggcgggggctggcctggtgggctgctacagcaccgtcggcgaggcgttgcagcaggccgcggtagcatcgacgacgcaggctgctctggaggcgaccacaaaggaggcggggaagcaattcggtttcgatccccagagctacgctcaggcagcagttgccagagcctccaatggaattacacaaccagctgcagccccaggcttgcaccatgcccagtggaatgctcattttgggtatcctgtgccgaaatatgtcttgaggaaacaaatgaagaaaaagccgaagactgtgcaaccagcgccatgtgaggtgtgcaagattcagtgtgatacactagaagttctcctgagccataagcagggaaagaagcacaagaaaaatttggagaaattacaagactcaatcacccgtaaaccaattataaagcccccaagcaatgtcatcggtccaagtatgccacctgttgctgtatccaactgtgtggtgccctctgtacagccgaagaagaagagcagctcagcagcaacccgggaagatctggaggtgaagaagaggcgagtccttgaggctggagcagcgcagggcgaagtaaaaatctgccaagtgtgcaatgttgtagtgaacagccaaaaagtgtacgagttccatattgcggggcagaagcaccaggccttggtacgtaagcagcaaccgctacgttttgtcacatgatgcagagccattttgctcgtcgtctttcgtctggcctcatgcttgtccggaagttcctctggaacgagaactcacaacattcgtatcttcaactttgttagcacatttcctcgtttagtgctcgtgctcctgtactactggtagcgtgccaaaaggttaacaggttttcattggacttttgcctgctggtcataattctgagtgctgaaactgaagactatattgtatgtcgcaagttctttatcagcatggtttggttgtatctagtaaaaaatcatggttggattgtagatcgtcaaagtttgctgttgctataaagcactccttccattctaaataaaaaaaaaaaaaaaaaaaaaaaaaaaaaagagca

SEQ ID NO: 96995 - DNA, 327 bp, Zea mays
  Clone ID: MRT4577_19975C.1
aacgcctccgaagcaacctcactacgctgacatgattttacagtccatacgcttacctcaacgtgatcgaggctttaagctcgctagccatcagccagtacattgagggcaaacatggcgacaaactcgttaccaactttcacaagcagcttactgcgcagctcaagacgctcactgtcgacgacaagctgacgagggtgaacaactccttcaagctgcctgccaccgacgccaatcccatcgccagcaactccaaggtacccaacgacgcgcccaatagcaacacctcgcactaagcgaatgccaataccgcttccaagcccaagg

SEQ ID NO: 96996 - DNA, 1873 bp, Zea mays
  Clone ID: MRT4577_19976C.1
atggtccaccccaggctcgaggccgcccgcgaccccaagtcccgatcggccgccgatcccgatcccgaatccctccctggctccacagcacccctgctccacacggccgccagcaagccgccggccctaggccttaccgtcgcggcgtcgcctgctctccagcaagacttcagtcgcctgcccccagcggcccagcctggctgccgccgccctccagcaaggcagcaaacgccggcctccggccgcccgtccctaggccagaggccacccctaggccgctaggcttccaccgccgacgcccacagaaaccgtaggcgccaccaggccaccacgagatccctgccgtgacggagaatggaggccgccgcggccgtcctccccacgctggtgccctccgggagcgcggtggtggtgctcctcgcctacctcgggtatctcgccgccgctggagccatcctcccagggaagctcgtcgacggagccctactcccggactcctctcgcctccactatcgctgcaacggtttgctctcgctcctgctgctgctgggactctcggcgttcggtgtctacatggggtggatgtctcccacggttgtagctgacatgggactcgaacttctgtcggtgacctttatttttagtgtcattgtctcttttgcactctacattgccggcatcaagtccggccacaaaagttcttctttgagaccacatgttagtgggagcttcatgcaagattggtggtttggagtgcaacttaatcctcattttatggaagttgacctcaaattcttctttgtgagggcaggaatgatggcatggttatttattaacctctctttgtttgcaaagagctactttgctggttcagccaatctttcggtcattctctaccaatttttttgtgcgtggtatatcattgattacttcgtccatgaagaattcatgacctcaacgtgggacattattgctgaaagactgggtttcatgctggtgtttggtgatctagttttcatccctttcaccttcactattcaggggtggtggcttttgaagaacaaagtagagctgtcccttttgtctggtctagctaacttatgcatctttcttattggctacctagtgttccgaggagctaacaagcaaaaacatgtgttcaagaaggaccccaaagctcctatatggggaaaacctcccaaagttgtcgggggaaagctactagcatctggttactggggcatcgcaaggcactgcaattatctcggagacctgctgctagcactttcgttcagcttgccctgtggagtgagttccgtggtcccatacttctaccccacgtacctgctcattctactggtcttgagggaaaggcgcgatgaggcgaggtgctcgcagaagtacagggagatctgggcagagtactgcaagctcgtgccgtggaggatcctgccttatgtgtactgaagagacggtagaaaccaaggcagctcatggccctgggccagctgtaaaccttattttgtttgcccttaaccagttggtgaatgttgatgtagcactcggtaaactgtgaccgtgcaaacttttgttattgttggtccatacatgtttggaatcgtgaatcagaccgcctcacttggtggcatattattccctttagcgcttgcttgggagctaggacccgagaggattgaaggggttaaaattttcttgttattcaatattgaatattaaggaaattttagtcactttaatcctctcctctccggtatccttgctctcaaataagcccttagttatgtataatctaaatattatgttattgttcttcaaacattagatacatctaagaaatttattcatacaatct

SEQ ID NO: 96997 - DNA, 636 bp, Zea mays
  Clone ID: MRT4577_19977C.1
aattcggcacgagtaaaatcctcgcaaaacccttgcttccacttccgccattctttccccccaatgcggcagtagcctccccgcagcacccgcgaagcgatggccctctccgctgcgcttcgcctcccgctcccgctccctcgccttctcggtccctccgccgtcatcttcggcgccgcctcccgccgccgcgctgccgccgccgccgccaaagcggccgccctccgcctcctctcggcctcgtctcccagtcccgcgtccttctcttcgcggcccacgcgtcccctccgctcgcgccgccgcaaccgcggcgacgatgggagggcggcggcggccggcggggccggcggtggggagggcggcggagctggactggtggtcaaggagcggattctgcccgtcgagctgcacaaggaggccacggaggcctacatgtcgtacgccatgtccgtgctgctcggccgtgcgctccccgacgtccgtgacggtctcaagcccgtccaccgcaggatactctatgccatgcatgagatgggccttgcgtctcgtaggccattcagaaaatgtgccagagttgttggtgaggtactaggtaagtttcatccacatggagatactgctgtatatgaaagcttg

SEQ ID NO: 96998 - DNA, 846 bp, Zea mays
  unsure (1)..(846): unsure at all n locations
  Clone ID: MRT4577_19978C.1
ctcgaggccggccgggaaaacgcttcctccggccgcccgtccctaggccagatgcacccctaggccgctaggcttccaccgccgacgcccacagaaaccgtaggcgccaccaggccaccacgagatccctgccgtgacggagaatggaggccgccgcggccgtcctccccacgctggtgccctccgggagcgcggtggtgtctcgtcgctcatcgctcgcgaccgtggtggtgctcctcgcctacctcgggtatctcgccgccgctggagccatcctcccagggaagctcgtcgacggagccctactcccggactcctctcgcctccactatcgctgcaacggtttgctctcgctcctgctgctgctgggactctcggcgttcggtgtctacatggggtggatgtctcccacggttgtagctgacatgggactcgaacttctgtcagtgacctttatttttagtgtcattgtttcttttgcactctatattgccggcatcaagtccggccacaaaagttcttctttgagaccacatgttagtgggagcttcatgcaagattggtgggtttggagtgcaacttaatcctcattttatggaagttgacctcaaattcttctttgtgagggcaggaatgatggcatggttatttattaacctctctttgtttgcaaagagctactttgctggttcagccaatctttcggtcattctctaccaatttttttgtgcgtggtatatcattgattacttcgtccatgaagaattcatgacctcaacgtgngacattattgctgaaagactgngtttcatgctgggtgtttggtgatctagttttcatcccttt

SEQ ID NO: 96999 - DNA, 866 bp, Zea mays
  Clone ID: MRT4577_19979C.1
gggcttacgcacactatcctaccctaacattgatttgattttggcgtttcctaattgtcagatttgtggctcagatcactgcttctcttacattaaaacagtaggctgagaattaagctaatcaacaagtatgatttgtttgtcaggggtggtggcttttgaagaacaaagtagagctgtcccttttgtctggtctagctaacttatgcatctttcttattgggtactcttggtttttctccagaatatcaaagctatagcaatttgatatatacctgtttcttgcattgtaactttgttgtctacatgctataccatgtggcatgtggtactcagctacctagtgttccgaggagctaacaagcaaaaacatgtgttcaagaaggaccccaaagctcctatatggggaaaacctcccaaagttgtcgggggaaagctactagcatctggttactggggcatcgcaaggcactgcaattatctcggagacctgctgctagcactttcgttcagcttgccctgtggagtgagttccgtggtcccatacttctaccccacgtacctgctcattctactggtcttgagggaaaggcgcgatgaggcgaggtgctcgcagaagtacagggagatctgggcagagtactgcaagctcgtgccgtggaggatcctgccttatgtgtactgaaaagacggtagaaaccaagccagctcatggccttggcccagctgtaaaccttattttgtttgcccttacccagttggtgaatgttgatgtagccctcggtaaactgtgcccgcgcaaacttttgttattgttggcccaaaaaaaaaaaaaaaaaaaaaaaaaaaaaaaaaaaaaaagaaaa

SEQ ID NO: 97000 - DNA, 227 bp, Zea mays
  Clone ID: MRT4577_1997C.1
agcttggcaaggaagccattgccaagggattgctcaaggaggatgctctggttttaacaaggacgaatacctacagcagcattggagactttctggactccatgaacaggagaatcatggaaactgcttcaaagtctcagaccctgtgctcagaaaatgtcgtcaggaatgaactggcacataccctgtccaatgttatcctgaggcattccattgatgaagttcca

SEQ ID NO: 97001 - DNA, 349 bp, Zea mays
  Clone ID: MRT4577_19980C.1
actacacgcttgcatatatctcacgtttaaccaagataacatgagtaaaggatcaatgactttggtattcagcgtacaagatgcttgcacctcctagctagctgaacaaaattctgaacctgacgtgtacatgatttacaggaactaacagttttgaggtcggtaaacctaccaggctgaagaacaaatgacgacgtaagtcaagaactttgcttgcttgagtatcccgctgctgccagtgagcttccagtatacttaagactgacaaatatttaccagcctgcaaagctttcagggagtgaatagcgacaggaggtggaaacccagcgattttgagcaccgttctaca

SEQ ID NO: 97002 - DNA, 842 bp, Zea mays
  Clone ID: MRT4577_19981C.1
ttgggtacctcgagggccgatcccgatcccgaatccctccctggctccacagcacccctgctccacacacacggccgccagcaagccgccggccctaggccctaccgtcgcagcgtcgcctgcttgactatctgcctccagccctccagcaagacttcagtcgcctgccccagcctggctgccgccgccctccagcaaggcagcaaacgccggcctccggccgcccgtccctaggccagaggccacccctaggccgctaggcttccaccgccgacgcccacagaaaccgtaggcgccaccgggccaccacgagatccctgccgtgacggagaatggaggccgccgcggccgtcctccccacgctggtgccctccgggagcgcggtggtggtgctcctcgcctacctcgggtatctcgccgccgctggagccatcctcccagggaagctcgtcgacggagccctactcccggactcctctcgcctccactatcgctgcaacggtttgctctcgctcctgctgctgctgggactctcggcgttcggtgtctacatggggtggatgtctcccacggttgtagctgacatgggactcgaacttctgtcagtgacctttatttttagtgtcattgtctcttttgcactctacattgccggcatcaagtccggccacaaaagttcttctttgagaccacatgttagtgggagcttcatgcaagattggtggtttggagtgcaacttaatcctcattttatggaagttgacctcaaattcttctttgtgagggcaggaatgatggcatggttatttattaacctctctttgttgcaaagagctactttg

SEQ ID NO: 97003 - DNA, 333 bp, Zea mays
  unsure (1)..(333): unsure at all n locations
  Clone ID: MRT4577_19982C.1
gtcaggactcaacaactaaccccgtgctactcggcaccaagtggcggtccattgccccncnccacancancnnaacctaccatggtcatggcaacagccgtcgctctcgctcacttcctcggagcggcattgccgctactcctctgaggagcagcanaagcgggcgaggtgggcgtgaactacgggagggtggcgaacgacctgccggacccggcgtcagtggtgcagctgctcaagcagagcggcatcaccatggtgaggctggacgacgcgaatcccaaggtgctgacgtcgctggccaacacgggcatcaaggtgatggtgatgctccct

SEQ ID NO: 97004 - DNA, 437 bp, Zea mays
  Clone ID: MRT4577_19983C.1
acaaaaactttgtatcagtttgggtatatcgggaggatttgggacggggtacacgggacacacgtgcacgataacatggatggaacccacaacacaggggaaaccacgaatcaaacacgtccccacacacgatatatgcacgggcgatgatgtcacgatggcgccattacgttccaggaacagccgaccaggcgcgcgcttaattcaactcacccgattgatcgaacacgtagttactttccagggttttgaacaccgggggttccgccttcattacctgcaccaccttcagggccgggtgcacgtacaccacccagttaccgtccccgggcgcgcttgggattggcattacgtacccggggccgccgggccaggggaactgatactacgggaacgccgggcggccccacccgaagtccacctcgccgaggggaagc

SEQ ID NO: 97005 - DNA, 445 bp, Zea mays
  Clone ID: MRT4577_19984C.1
tagtcactcagcgagcgagagcagcacacacgcagctagataggagcatcagcagcagcagcggcaatggcggcctccatgatctcctcgatagctctggcggtggctcctgagggcctgccgcccgtcgtgcgacgcgcctgctgcttcgcctacgtctgctccaagaagaagatcaagaccgacaagccctacgggattgggggcggcctgaccggcgacctgaccgccaacgggagaaaggacaagggcaagggcgtggaccaggtcgtggacaagtacggcgcgaacgtcggcggatacagcccaagctacaacgaggatgactggtctgccacctgggacttctacggcggcggcaccactgggctaacgatctgggccgtgacccttgctgggatcctcggtggcagcgccctccgtggttacaacaccagctacctct

SEQ ID NO: 97006 - DNA, 435 bp, Zea mays
  Clone ID: MRT4577_19985C.1
cgccaaacgcaccatggagtcacttgtcccaacaaatttccagtcttcttttaaaaggggacacatacttaaaagcggggaacgttttaggtcaactagaatgggtctcttttggacatttaaacttctacgaacaaaacaaatagggcttagcagcaaaagctgttcttcccccataattgaaaaaatatgacggggggaaacttaacttcacattgtaacataataagtaacccactggagccattggaattgtgtatcagaaaccagggaaagaaacagccagatttttgcctcagggcacaccgctatacactcggaatttccccataggctctgggactgttatggctaaaaaaatacccactactctaagatttcggctctcatagcacccttcggataaacattcttcctttctgcagcttttccatt

SEQ ID NO: 97007 - DNA, 491 bp, Zea mays
  Clone ID: MRT4577_19986C.1
cctcgaggccggccgggaaatttagtttccagatccggcgcacaacaatattgtccaggaagatgtgttttagtgggtggccactgcatgacctcgatcgcaacgaggatgggatggtctccgatgagcgggtgttgccgtcgaatcgggtgctatccctcttgaacgagcgactcgattcctgtgaagactgccaccacaaccccagctttagatctctacgtgatcaagagttgtgcgcgacctgaataaatggcaagagttgctgctacggtgagttacaccgatggtgcagcagatatagccgccgtagcaagatgccgcacctgatgatccggcagttgctcctctacttgggcatagactacacgcgtaagaacacgttgtgacagatgaataaggattacctgccaggctcttcggccatctactataaccagaagatcaccatcgtgatcatgtcagatgacgaactcaagaaggagatcatc

SEQ ID NO: 97008 - DNA, 397 bp, Zea mays
  Clone ID: MRT4577_19987C.1
gtgtgggggggcgaccgacgataccacctattattgcttaaacctgccgagctacttttagactggccaaaattataaaatccaaaaaacaaaattataaaatctaaaaaacacattaaatctaataaaaaagaataaaaaacaagacaaatgaaattactaagtttctattaagttactagagctgggcaatgactggctcattaaaacccctctggtcagaagggaaaaaggctacagttagttttacatagaggtcataaggtctacaccatatcctctaattcaaaagctacaaaagaaacatctaattagcatcaactccagattcattctttatcaaagtgtatgaaagggtggaaaatacgaatccattaaaaaaatgtggttctcaaac

SEQ ID NO: 97009 - DNA, 218 bp, Zea mays
  Clone ID: MRT4577_19988C.1
aaggaagaaaattcctaacaggtcttttataaagttacatggaccctaggaggaaaaccctaaatttttacatgaacccgtcacacaccttaacgtttaccaataaggaataaatttccataaggtaagctttatgcccatttattattctcattgactataaaaaagttttacttgaacccccaaaatgaactttcgaaaattgcacacttaacctt

SEQ ID NO: 97010 - DNA, 421 bp, Zea mays
  Clone ID: MRT4577_19989C.1
ggccgacgggctcgctcttagcttctaaaggccagggaccaccctgtctaccattactatgcagacaagatctactattgtgttatgggactagcgcataaacgaactgccttacagaactccttatgcctaacagagatatatgttgtccatgacacacgccttacataaatcaagcgtatactctgccgtccttttatgagaagatgactatgctatcgtatcacccgagagtgaatctgtgccgatgttcaatggagaacatgtctcggaagcaaggaaccgcattcggtaccacgctgacctgcagttgtgtatgaattggtcaaactgataaactgatcaacactcttcccgcgggatctactgcaagaataggataatcgtacaacttcgactctggccattttatttactcatg

SEQ ID NO: 97011 - DNA, 705 bp, Zea mays
  Clone ID: MRT4577_1998C.1
gattcaaccaggtaaccctattattacccctattgttttgaagaaagagaacgagctttctcatcatattttctattaaaaatgtggggttgatggccaccatgttcgaaaccttagctaagtacataagtacgagaagagggcgaacatcgttgaatacctcaagccagggacgggacgacgtgcggaggacggcaagttgaggatggtgggtgactttggacagcggcggaggacgtcttggtcgcgatcgcgtcgtggacaatcgttggcgtttatgtggacgtcggcgaagcggatggtggcacgcagacggtggctccaaggcggatggcggcacgcagacgatggctcgcggtctcctcccctcctcccctcgccctcggtcaccacccctcctcgctggcggcgctgtagacgtcggcaaggtggacgccggcacagaggatggcggcgcgcacacggtggcatctgcagcgtgcagactttggctcgcgattgcctcccctcctcccatcacccacggggaatgttgctcggggttctgggtcgggggagcgttccccgtgtgatttgccggggtcgctgggagcattggcttagggaagcatgctccaaatagattgacaaatttccccgtagccctcggggcccgtttgtttgccttcattttgaggaattggaatttaactaatgcaataggct

SEQ ID NO: 97012 - DNA, 253 bp, Zea mays
  Clone ID: MRT4577_19990C.1
actctctccaatgcccctatactctcctccgggcccactaggggctatttggtcctttttggccacacccccacccctttgccgactcccctgatgactttttcccgcaacaaccggctaccaaaccttgatctcctcctccccatgactaccctagcgcagacctagccgactgctaatccgaaccattctatgaacgtccctttcatcgatttcttttcaaatttattaagcgacaactcatctaaagatt

SEQ ID NO: 97013 - DNA, 234 bp, Zea mays
  Clone ID: MRT4577_19991C.1
gctggtgatcacctcggtgaagcggtggcagaaggggcagagagagttcaagcgcatctgccgcagcatccgcgagctgcagtgctagtcccggcatcctgatggctccgacaggcctgctccagagcacggctgagcatttctgctccgggatctcagctcccgttccccaagcacactcctagctgctccagtctcagcctgggcagcttccccctgccttttgcacgtttg

SEQ ID NO: 97014 - DNA, 352 bp, Zea mays
  Clone ID: MRT4577_19992C.1
ccacgcgtccgatagaaaacatataaagcctaacgcactgggggtacaaaaaacaaaaaaaaaaaaaaaaaaaaaaaaaaaaaacaaaaaaaaaaaaaggggggggcccttttaaagaacccaacttaacaaccgcgggatggcaacgaaaaactttttttatagggcccccaaaatcaattcacctgggccgccgtttaaaaccgccggaatgggaaaaccccgggcgtcaccaacttaaatcgcttggaaaaaaatccccttttccccatcgtggcaaaaacaaaaaaggccccccccaaccccctttccaaacatttgccacccctaaaagggaaaagggacacccccc

SEQ ID NO: 97015 - DNA, 464 bp, Zea mays
  Clone ID: MRT4577_19993C.1
gaggcaggcagacatgcaggggcaggttatattgccttattcagaggaaaagcacacccagttgggcagctcacataacatcgccgccacttggctcggtgggggcggccaggtgatggcgatggggctggtcaccttatgctcgccgttgctccacacgatggaccccaacgtgtacttgtcgggcaccctccacatgcgtcgcgacgtgaaagtgatctcgtacccctgcgttttttgcgtcgcgctgaaccgtagcttccgtgggttcaccgtcacccgcaccccggccgggctggtgaccctggcccaatacgtggccctggcgctgctcccgacgttgcgcacgacgcggggctgcgtgacggcgtccctggtggagttgagtaccacaaagaaggcagggtagttgtggtcgccgacggaggccttgcgcctcaaacagtcgaccgcggggtcgtctt

SEQ ID NO: 97016 - DNA, 394 bp, Zea mays
  Clone ID: MRT4577_19994C.1
attcggctcgagcatggggttcgttttttttttgattgacagtcttaaagcggcgcaggaatgctacgagccactgaggcggtttcccagcttactccaggcccaaggcgcccggtcggcatgtactcccgctcctactccgacggcgttcggtccgagagctctctgtagttgggggagcgcctttgcgcgcactccttcctcgtcatcaccatcgtcgtggccgtcttcttcggcttcaccgactgcctcacggacctctgcaccgactccggctactcgcactcgcgccgcttcaatgcggtcgcatactcctccgccggcagaaacagtcggtgcaaccattgccagacccaccacagacctgttctacgtcgtgccactgcgggtggat

SEQ ID NO: 97017 - DNA, 490 bp, Zea mays
  Clone ID: MRT4577_19995C.1
aaaacaaaagaggcccttcgggttcttaacatttctttagggcgtcccgaccaactggctttgcaacacccccccccggggggtaacggaccactgttccattggcaaaatatcttttttttttctctatctagtatctttcgtgggggctaacggggctgggcccgttggccaggggaaaacagctttcatttttttgattggccccaagccctgcctccgttgggtataagtctcgacttttcctgcccattggaggacccattttttgctgccccagaaaaaaaagattccgttttttttaaacatataacctgaaaccctgtttatgccccttctccttgaatggaccattacaacttcgacctgggggcctttgcctcccgaagttccgggtacatatttgaaatttcctttgcaaagaatgtctttgcttgctgcctttggccctgcccaagttttgaaaagggagggggtgcaaaaggccata

SEQ ID NO: 97018 - DNA, 444 bp, Zea mays
  unsure (1)..(444): unsure at all n locations
  Clone ID: MRT4577_19996C.1
cgggctggacgccggcagctgacgttacctggttgcagtgccattcctgcagcccactgctaccaaaagctcgatacagcgttcgacaccatgcctatcagcactcctacgcgcgcacgcctcctgcagacttcacagagctgncgagacactgaacaccgcggtgtgccggaactaccacaggagcctgtctctactaagtggactacagcgacggctgctacaccgcgtgcgactggcacaccgatacactcaagctgagggactgcaccccggtcgacatcggctatcatggaagtgcgctcacgacaacgatggcctatattgtcagcaccatggctgtgttggcgctgaacgacgggccgttgtactatcattgacgaaatcgacgaggtcaccttcgcctactgcctcgtggacgggcactctgcgggcgatatcact

SEQ ID NO: 97019 - DNA, 226 bp, Zea mays
  Clone ID: MRT4577_19997C.1
atgctttgagggaaggcatatcaacctccaaaggcgggattttattggcaagatccctgaacaacagcacaaaagatgacatcggccatgaagagtaaggcctttgcattgcctgaagagccacaggaggcagatggatacgttcccatggaaaggtaggtcacaaatggaatgggaacaaagcccaaagcggaactggataaggatggttaaccggaaatgatcc

SEQ ID NO: 97020 - DNA, 2565 bp, Zea mays
  Clone ID: MRT4577_19998C.1
gaaagggagtaatggagggagaaactagacaccactaaaaaggaaaaaaggtgaaagagagaggaaagctctcgttcctagcttccttctcttcaactaagcgagcgaatccaactcggcccgtccatttcttccttccctgttcacggattccaatccttcctccacacccccaccctcccttcgcctccacatccaccaccatccaatccgcgcgggtgcttcgccaccctatcccgattgctacctcctcgtggtgggcgccgctccgatccgcccgatccgcgctgctcctggggctccggcgcgcggcggcgagcggcggaggcggcgcaggaatggaatccgaggacgatatgcacgacgcaaacgactccgccgaagatgacttctacagcggcggggaggctggtctcgccgccagcgacgacggagacgcagactacgacttcgcggaccacgactccgacgactccgcggagctcctctcccacagacagcagcaaaattacagtatattgagtgaagttgatatcaagcggcgccaagaggatgacataaatagggtttcaactgttctttcaatttccaaaccagaggcatgtgttcttctccgcaactataactggagtgttagtaaggtgcatgacgaatggtttgctgatgaagagcgtgttcggaaggtggttggtttaccagagaagcatattgaaatgccaaatgacagagaagtaacatgtggaatatgtttcgaaagttgccctctcggatcgatgagtgctgctgcatgtggtcatcctttctgcggtacatgttggcgaggttacattagcactgctataagtgatggtccgggatgcttgatgctgaggtgtcctgatccgtcctgtgctgctgctgttggacaagatatgataaattcactggctgatgttgaggatacggaaaagtatgggcgatatcttcgcagatcttacattgaagataatagaaagacaaaatggtgtcctgcgcctggatgtgaatatgcagcggaattcgtcatgggcagtggcagctatgacgttaattgcaactgttcatatgggttttgttggaattgcaccgaggaagctcatcgtccagtagactgtgccactgtttcgaagtggatcctcaagaacagtgcggagtcggagaatatgaactggatactggctaattcaaagccttgtcccaaatgcaagcggcctattgaaaaaaatcagggatgcatgcacatcacatgcactccaccatgcaaatttgagttctgctggctatgtcttggtccatggtcagagcatggagagaggactggtggattttatgcttgtaaccgctatgagtcagcaaggcaagaaggagcgtatgatgaatctgaaaggagaagagaaatggcaaagaactcgcttgagagatatacacattattatgaacgatgggcagccaatcagtcgtcgaggcaaaaggcactgggggaccttcaaagcctacagaacgacaagcttgaaaggttaagtgacatacaaagtcaacctgagtcacagctgaagttcattatagaggcatggttacagattgtcgaatgcagaagggtattgaagtggacttatgcctatggattttacctgccagagcatgagcatgccaaaagacagttctttgaatatctgcaaggtgaggcagaatcaggattggagcggctacatcaatgtgcagagaaagaacttcaaatataccttgatgcagaatctccctcgaaagacttcaatgatttccgtacaaagttggctggattaactagtgtgactcgcaattattttgaaaacctcgtccgggctctggaaactggattaaatgatgtaggtccttccactagccatggtacatgcagcaaaagcgcaacttcgaagagcctcggtggtaaaagtaagagtggcaagaaccgagcatcaagcaccagttccaagtcgggtggctcaagccgaggtgtggatgatagtaacatatggacgtgcgatcagtgcacatatgcaaaccccaaatctgccagagcctgccaggcttgtgatcaccagcatcgatagcgctgtcagtccttgctagagatttgaaccccatttgttgagaatcttctggtgctcccccgtgtaatacacaaacatacatgaaattgaatgctagctgatctctgggggtaattgcactaggaatgctgtaggttttcgtgtatctcggattgtttgtcgactgacatcgcctgagaagcctcaactcatcatccagttcgatttgtgtatataagtgtatcatctgtaacaatgttctttagatgagctaggaggcgtctgctgccaaaggaactgaactgttgtactgctgttgtaatataataatgcatttgtcaaatttaaagaaagttagccatcctgctacggcgtatgctgccaaaggaaccaacttgtagtgctgttgtaatgtaagatgcattggtcaaatttaaaaaaagttagtcaccctgttacaaaaaaaaaaaaactcgag

SEQ ID NO: 97021 - DNA, 253 bp, Zea mays
  Clone ID: MRT4577_19999C.1
cggaacaaaacttttttcttttcatttcaattggtcattcagggcattggtcacactgacactgccccccatggggatgcgggacacattattactcaatcatcgccgctaaaagacccaactagctagctagccagcggctttactacagcacatagtttcttcagggggggacaccccccgcagcaacgtaagggcatggagtcggtttttgcaggccccacattgccgacaggtgctgggctttttgggc

SEQ ID NO: 97022 - DNA, 2016 bp, Zea mays
  Clone ID: MRT4577_1999C.1
catcgtcgtctagcacatgttgggatgaagaacctttataagcttctaaagggagaacatgtgttaggagtaaccgatgtctgttttgagaaagacagaccttgtgcagcatgtcaggcagggaaacaagtgggaagcactcatcacatcaagaatgtgatgacaacatcaagaccactggagcttcttcacatggacctctttggacccgttgcatacctcagcatcgggggaagtaagtatggtcttgataagtcagaaaaccaaggtaccataaagtgcttcttgaggagagctcaaaacgaatttgagctaaaggtgaagaagataaggagcgacaatgggtccgagtttaagaatctacaagtcgaagagtttcttgaggaggaaggcgtcaagcacgagttctccgctccctacacaccacaacaaaatggtgtggtagagaggaagaacaagacgctaatcgacatggcaagaacgatgcttggagagttcaagacacccgagcggttttggttggaagctatgaacacagcctgccacgccataaaccagctctatctgcatcgccttctcaagaaaatctcctacgaactccttaccggtaacaaacctaatgtctcttactttcgtgtatttgggagcaaatgctacattctggtaaagaaaggtagacattctaaatttgctcccaaggcagtagaagggtttttactagggtatgattcaaatacaaaggcatatagggtcttcaacaaatcattaggattagttgaagtctctagcgatgttgtatttgatgagactaatggctctccaagagagcaagttgatcttgatgacatagacgaggatgaagttctgacggccgcaatgcgcacgatggcgataggcgatgtacgaccacaggaaccacatgaagaagatctaccatcttcctcaacaatggtacatcccccaactcaagacgatgtacagagcgctttcctcaacgggccaatcaaggaggaggtatacatggaacaaccccctggctttgaggatggcaggtatcccgaccatgtgtataagctctctaaggcgctctatggacttaagcaagccccaagagcatggtatgaatgccttagagatttccttatttctaatactttcaaggttgggaaagccgatcccactcttttcacaaagacatgcaatggtgatctttttgtgtgccaaatttatgtcgatgacataatatttggtcccactaaccaaaagtcttgtgaggagtttagcagggtgatgatgcagaaattcgagatgtcgatgatgggcgagttgacttacttccttggattccaagtgaagcaactcaaggacggcaccttcatctcccaaacgaagtacactcaggatcttctcaagaggtttgggatgaaggacaccaagcccgcaaagacaccgatgggaactgacgggcatattgacctcaacaaaggagtttctacgccttgcttcgggatctggtatccaaaggggtctacctttgacttgattggatactcagactctgattatgccgggtgcaaagtcgataggaagagtacatcagggacgtgcctatttctaggaaggtccctagtgtcctggagttcgaagaaacaaacatccgttgccttatccaccgctgaggccgagtacattgccacaggaaattgttgcacacaactactttggatgaggctaaccctccgggactttggctacaatttgagcgaagtcccactcctatgtgacaatgagagtgcaatatgcttggtggataatcctgttgaacacagccacactaagcccatagatatccggcatcacttcctgagagaccaccaacaaaagggagatatcgaggtgtaccatattagcaccgagaaccagctagccgatatcttcactaagcttttagatgagaaaatgttttgcaggttgcgtagtgagctaaatgtcttagattcgcgtaacttggattga

SEQ ID NO: 97023 - DNA, 330 bp, Zea mays
  Clone ID: MRT4577_199C.1
gagagagagagagagaggatcgtgatacccgctagaggctgccgaaacatggatccgaagactcatacgactgacgaaggagggataatggggatggccagtaatcggaccctatcaggcaggacctgggagccaggacattgcgcgagaataaggcacccaaggatcgtctacaaaaaagatgaaatggccgtaaacgccgaacaccgcaccggtgcggatatcataccataaataagtacaacgatggaacaaacaatgagtaatacagagagacaagccttaacaccatacaccacgacgacaacaccgaaaacctaaaccataatc

SEQ ID NO: 97024 - DNA, 164 bp, Zea mays
  Clone ID: MRT4577_19C.1
gactcaccctgtagccgaacattaatcgcgactggtgcattggctacacccagggtgcccgtctcactggccaggggcctagggtcagattgtttcgttctcttgccttcgttcctagccccggtcgttaggtttccccgcctttctttataaccccttcttct

SEQ ID NO: 97025 - DNA, 899 bp, Zea mays
  unsure (1)..(899): unsure at all n locations
  Clone ID: MRT4577_1C.1
cgccgcctcgaccgcccccgcatccgccgctcctcnatccatcctcggcccgcggcccagggagaagaccgcacgggcgggcgagatggaaggccgctcgaccggccgggtcgtatctcttgtttaggccgggctcgagagagttgggctccgaatcctgggtgggtttggagttggagaatcgccttcgtcgctcgacccagaagccgtcgatgccttcagccatcttgatcctgcctgcgcgtgcctatctggtgatgatggagagccacaacccatcgcactctcagatcgccgaagtgaagatggacatcgcagcgtcagcttctggagcggcagggagcaagttctgcaagggcgcagcctgcgacttctccgacgccagcaactcctcgaaggacgccagggagaggtcggcgtcgatgaggaagctgatagtcgcggtggtcctctgcgtcgtattcatggcggtggaggtggtggggggcatcaaggcgaacagcctggccatcctgaccgacgcggcgcacctcctgtcagacgtgggcggcgttcgccatctgcgctgttctcgctctgggcctccgggtgggaggcgacgccgcggcagtcgtacgggttctttcgggtggagatcctcggcgccctcgtctccatccagctcatctggctgctcgccggcatactggtgtacgaggccgtcgtgaggctcgtcggcgagagcggcgacgtgcgggggtcgctcatgttcgccgtgtcggcgttcgggctggtcgtcaacgttctcatggccgtgttgctgggccatgaccacggccatggacatggacattcgcatgaccatggccacgttcatggggattcggacgatgcccattccccccccacgacgaggagca

SEQ ID NO: 97026 - DNA, 200 bp, Zea mays
  Clone ID: MRT4577_20000C.1
catataataattattttttattttttttttgtttttactatagttttattactttatgaccagtcaaacgtccacaacatagcttacgggagaacgcgacaacatgaggggttgtcaaaatgaagcgtccaagataaacccccccaaggcaggggacatgcggaaaaccacgggcccgggaataaaaaggcaacgggccg

SEQ ID NO: 97027 - DNA, 2687 bp, Zea mays
  Clone ID: MRT4577_20001C.1
aattcggcacgaggagctctcgtttctagcttcaattcggcacgaggctcgttcctagcaaccaagctagcgaatccaacccaacccgtccatttctccacatccccaccctccctccgtctccgcctccgcctgcgccaccctccaatccgcgccggcgcgtcgccaccctacccgattgctacctcctcgtggtgggcgccgctccgatccgcccgatccgcgccggcgcctcgccaccctacccgattgctacctcctcgtggtgggcgcctgctcctggagttccggcgcgcggcgggggcggcgtagtaatggaatccgaggacgacatgcacgacgcgaacgactccgctgaagacgatttctacagcggcggggaggccggtctcgccgccagcgacgacggagacgccgactacgactttgcggaccacgactccgacgactccgcggagctcatctcccacagacagcagcaaaattatagtatattgagtgaagttgatatacagcggcgccaagaggatgatataaatagggtttcaaccgttctttcaatttccaaaccagaagcatgtgttcttctccgcaactataactggagtgttagtaaggtgcatgacgaatggtttgctgatgaagagcgtgtccggaaggttgtgggtttaccagagaagcataatgaaatgccaaatgacagagaagtaacatgtggaatatgtttcgaaagttgccctcgtgggtcgatgagtgctgctgcatgtggtcatcctttctgcagtacatgttggagaggttacattagcactgctataagtgatggtccaggatgtttgatgttgaggtgtcctgatccatcttgtgctgctgctgttggacaagatatgataaattcactggctgctgatgatgataaggaaaagtatgggcgatatcttcgcagatcttacattgaggataatagaaagacaaaatggtgtcctgcgcctggatgtgaatacgcagtggaattcgtcatgggcagtggcagctatgatgttaattgcaactgttcatatgggttttgttggaattgcaccgaggaagctcatcgtccagtagactgtgccactgtttcgaagtggatcctcaagaacagtgcagagtcagagaatatgaattggatactggctaattcaaagccttgtcccaaatgcaaacggcctattgaaaaaaatcagggatgcatgcacatcacatgcactccaccatgcaaatttgagttctgctggctatgtcttggtccatggtcagagcatggagagaggactggtggattttatgcttgtaaccgctatgagtcagcaaggcaagaaggagcgtatgatgaatctgaaaggagaagagaaatggcaaagaactcccttgagagatacacacattattatgaacgatgggcagccaatcagtcgtcgaggcaaaaggcactgggggaccttcaaagcctacagaatgacaagcttgaaaggttaagtgacatacaaagtcaacctgagtcacagctgaagttcattgtagaggcatggttacagattgttgaatgcagaagggtattgaagtggacttatgcctatggattttacctgccagagcatgagcatgccaaaagacagttctttgaatatctgcaaggtgaggcagaatctggtttggagcggctacatcaatgtgcagagaaagaacttcaaatataccttgacgcagaatctccctcgaaagacttcaatgatttccgtacaaagttggctggattaactaggtacatgttacttctttctatgccatctatgcttgctttgatgacatgaacaaaattacaaaataactgctatgttgtatccctgtggatgtttactgtgtttccttttttttcccgtgaggacttgaccagctctaaggctctaaattcaaaaacatgacctttttttttccatttgacatctttaattttacagtgtgactcgcaattattttgaaaatctcgtccgggctctggaaactggattaaatgatgtaggcccttccactagccatggcacatgcagcaaaagcgcaacttccaagagcctcggtggtaaaagtaagagtggcaagaacagggcatcaagcagcagttccaaatctggcggctcaacccgaggtgtggatgatagtaacatctggacatgcgatcagtgcacatatgcaaaccccaaatctgccagagcctgccaggcctgtgatcgccagcatcgatagcgatgtcagtcgttgctagagatttggaccccatttgtcgagaattttctggtgttgcgccgtgcgatacacaacatacatgaaaattgaatattagctgatctctgggggtagtgacgaggaatgctgtgtgcaggtaggttttcgtgtatcctggattgtttgtcgactgactgcgcatgtgaagcctcaactcagcatccactcccatttgtgtatataagtatatccatatctgtaacaatgttttgttcaatggaagtagcggagctaggaggcgtctgctgccaaaggaactcaactgttgtagtgctgttgtaatgtaagatgcattggtcaaatttaaagaaagttagtcaccctgttacaaaaaaaaaaaagaaaaaaaaaaactcgagagagggggg

SEQ ID NO: 97028 - DNA, 331 bp, Zea mays
  unsure (1)..(331): unsure at all n locations
  Clone ID: MRT4577_20002C.1
ggggccaggccgcacgttgtggtgtggttgcgctggtggctgatcggccctccttccagtgcttgtgggtcccctcctcatctgctgctctgttgttgctggtggctttgctctgccctgcctccggggggggggggttcttggtgctcgctctggggtcggtctcttcgcgcgtcggcccgggccctcgcttgccctcaactgggtctccgnggggcttttgttgggtggcggggcctgagactttttgctgtgctgcctgctgctggcgtgggcgtctgtctggcctgggctgtgcttggctccccctttctagcggtctgtcggtgct

SEQ ID NO: 97029 - DNA, 284 bp, Zea mays
  Clone ID: MRT4577_20003C.1
ccgaccctttgatgaagccggcagcgaacctgggaatggcgacggcggcgggatcccgtctgtgagctcgcgctggcggtaccggccattacggtgtacgggtatcgtctaaaattaaatcaagcaatagcatcttgttttgatatgttgctgaactatattctaacttcatttaattccatatgaaaagagtgattatgtgaagttatatgtaaatgaatcatatataattatttttaggtagccatatttatatagtttgtgatagttcaaaatagtacatc

SEQ ID NO: 97030 - DNA, 511 bp, Zea mays
  Clone ID: MRT4577_20004C.1
aaaaaaaaaaaaaaaaaaaaaaaaaaaaaaaaaaaaagaaaaaaaaaaaaaaaaaaaaaaaaaaaaaaaaaaaaaaaaaaaaaaaaaaaaaaaaaaaaaaaaaaaaaaaaaaaaaaaagttttttcctttggccgaaacccctttaaggggaatttttgcaaatttccttcacattgggggccgtttaacctttcttttaagggccccatttccccttttagggagtcgttttaaatttaattggccgtgtttttacaacgtgggaattggaaaaaccttggttttccccattttattccttttgaaaaaattcccctttttccaatttgggttattagcaaaaaggccccccccattcgcctttccaaacatttgcccaccttgattggcaattggcccccccttttaccgcccatttaaccgcgggggttttgggggttccccccaggtgacccgttacttttgcaaggcccttaggccccgtttttttggtttttttcctttcttttt

SEQ ID NO: 97031 - DNA, 312 bp, Zea mays
  unsure (1)..(312): unsure at all n locations
  Clone ID: MRT4577_20005C.1
agagtatagttttttttttttttttttaggttttnnnnnnttttttttttttttggggcccaaacaaataaaattcccttccatttttcaacccaaaaggtttgttcccaaaacaggggaacaacaactgttgctggacccaaccccaaggctgggggttagatccccccccaaaacaaaaattcccaccacccggaaggatgaataaaaaataagcccccccaataaggaggggaggaataccccatgttttcccccccgggcctcccataaggcataccccggttgggccccaaacccttttggtaaacc

SEQ ID NO: 97032 - DNA, 162 bp, Zea mays
  Clone ID: MRT4577_20006C.1
ccacgcgtccggcttcctaaatttcgtattatggaagtgtgaaaaatgcatttctttctgtgcatctagtgtttttatacaggtaccagtttgtattgtgagatgtcatcgataattgcttagttccaatgtcgaaacttagcggcaccaacagccattgct

SEQ ID NO: 97033 - DNA, 327 bp, Zea mays
  Clone ID: MRT4577_20007C.1
ttttgcggaagttgaactagctcaacacgccgtggagcttgattgcagtgcattcatccaacgcctcccgcctagtcgcattgaagagaggacgttgaacgcgaaccgtgcggccatcacagtacaaataatgagcttgaataaagcctatcgcgtcggctctgtgcccacgcttgacgtgtgggtgttcccccggctggtgggggctgccaaggcgagaagccccaccggtttgacccttctgctatcgatgatctgccgcccttaaatggggatgaacaccctggcgtgcgatgacccggaacaagtgaatgtgctcttgaacac

SEQ ID NO: 97034 - DNA, 449 bp, Zea mays
  Clone ID: MRT4577_20008C.1
acagcggcccgcaccgcgtacaacacctacaaggaggaccaggaaaacgccgtctcctgaccctcggaggtgcctttagcctctgcgtgaggctatccatgcttgagggccgatccgcacatattaacgggatatgctgcatgcaaatgcgaacgaactaacctattgcgggaggcactcgcgttgatgttcactgcaaagaccaactataggccgatgatctgcctccgccgaatatgcacatgcctgcgccgtcatgctaccgatgatgatgcagattgaggtcatcagaccggggtgagcacatcgcggaacgcgcgacaggccagacacatacccatatagaggcttacatcagtactctcctggcagtcagaccgctgcccattgtgcaccaggagtttgtgagtcccatcggcgtcaaatgcaacgtcaacaactaagacctg

SEQ ID NO: 97035 - DNA, 265 bp, Zea mays
  Clone ID: MRT4577_20009C.1
ggcacgcgtgccgcgagcgcatcaccggacggagaggaaggcacgatgctgcgggttgcgggaagaaggctctcggcttccctctgctggcgggccggtgtggcggcggccaggagcgccctcggcggctgtggtgccgccgagcgggacgacggctcggctcgcggctgtaggcagacgcggttctccagcgactgtcgcttcgttgtcgctgccagggcttcaggaaaaggttactcgtattaaactccctgacatcgtccaa

SEQ ID NO: 97036 - DNA, 2361 bp, Zea mays
  Clone ID: MRT4577_2000C.1
gactcatgagctgcctagtggctatccaatgcttcattttaacattaaagagaatataaacatgcttgctagctggaatcaagcagtggatttaatttccagctaggtctaagctatgagcatacaaatcagcaatataaaatcgcaaagcatctaaatcttccctaacgagaaatatgacagctacaacataaattgactcaacattttcagtctgagcatattcaagaaaacattgtcagaccaacggatattaacgcacgcaattcttcaatggcacattaccgtacaatggcaaactgaaaaaggtagcagttctccttagtaatcaaatttcaagcaccatcacagcatgccacattcctgctggcagcatagtaatcttagaacattctattaccaatctgaaggtacatttctcttcacccgactcttcattctatctgcccactgatagaacacattagatacatctaatttcccagcaaatttcactttctgagccaactcaaacaatatatctggtttcccagcctttgagaaatctgcagcaaacttattatagtctatttgtggagctttcatccctttattaatcatctcctcgatatatttatatgcctcctctggcctgccatgtcgtatatgcccattaatgaacactgtgtaagagttcacatcagggcaaatacccctctggtgcatctcctcccacactgcacaacccattgcatagttgctatcaccaacgaaatatgacttcatcatcatgttgtaagtatggattgtgggctcaagtcccttcttgatcatcttcttgtatatccttgcagcatcgtctggcatattcctatttgttagcaacttaatcagtgcattgtaagtccgagcatcaggggggcatcccttctgtgtcatctcctccaacacagcagtcactctgtccatttgttttgcattcccatatccaaccagcaaacatgtataggtagcaacatctggttggcatttagcctcctgcatctcctcaaagcactccattgccatgtccatcttcccctgcttacaatggtcacggattaacattgtgtaagtccacacatttggtggaggcccctttgccttcatcagctcaaacatcttcacggcctcgggtcgcctctgcccacgcagcaacccctcaatcattgtgttgtggacaacaacatctggatccattcccttctccagcatctcattccaaacccgccccgcctcaaccagattcctcgcattgcaccatgccagcatcagtgcagtataagagcgcaggtctggagagtactggccatgcattttgtcaaacacctgcctggcctccctacctaatccctctttggctaaagcaacgagcaagcaattgaatgattccaccccatcatcgaaaccgttctttctcatcaactcgaacacgccaaccgcattcttgatctcaccagccgcagcgaaggacttaatggcaaccttgaaggcgtccatggacagggcccccgccttccccatctcttggatcatcgcaaccatcgactcgaactgcctcgtcttgcctaagatgtgtaacatcttgcagtaggtaatggtggtgtgggtaaagccaccggacactgtggcccacctgaagaagcggtaggacggcctatgtgcgtgcttgaagcggtggagcacagcgagcacgaccgcttcgcagagcggtggcgagagcgcggatagcgccgcctccaggttcgcgtcggcaccggaggcgacgacgtccgcgatggccgcgcagacgcggtccacgccctccgggttgctcgcagccgcctcctgctccgacgagccctgatcttcgtcggaggcagccaagatggagaggaaccttccggctgcgaagccccagagcacgtcgtaagccccgcatgccggcgtcgcgaggagaggggaacccataacgtatcgggatctcggcggcagcagagggaacacgcctctgggaagcaggaccacgccagcgatgcgggcggagacggaggtcagatgtggtgggggcagcggtgcggggagatgaggtgggcaagaggagtgtggcagtagaggcgaaagtggacagtgagtgcgatggaggtgatgatgagagcgaggaggaagaacgccaggcacggacacagcatcactgtcgtggcagagggctcccgcggcgccgagtagagcggtggcgacttgctggtctccatggcgtgctgtggcggaggcggcgatgatggatgtgggcttaacggccatggaggatggtggagtgtcggccttgccagccaatttttcggccggcctcgagggtcccaa

SEQ ID NO: 97037 - DNA, 277 bp, Zea mays
  Clone ID: MRT4577_20010C.1
attgggtccttgacctgcacacctcgctgggattgaccttgttgagtcgaccaactggtctggccctttcttccgagaggctcgtagttatcgttgccgacatgtactatttgctggcatcgttggccggaagccatggatggagactgatttgctgttaattgcttctacatgtccaccatcttcttggttcgctagagatctcttcttgacgtggtaccacgactcgagccctggctggtgacttggccttctgtcagttgaggcctatgctgct

SEQ ID NO: 97038 - DNA, 798 bp, Zea mays
  Clone ID: MRT4577_20011C.1
ttgggtacctcgaggggccggccgggaatgccctggtgaagtcataacaccacaagttccgccattgcagctcaacacacaccccacacactccgaccatggctgaccagtttttgggcttcgacctgagcacccagcagctcaaaggaattattgtcggttctgacctcaaacttattcacgaagccaaggtcgactttgacgcagacctttccaagtacggcattgaaaagggcgtcctcacgaatccagatgagggcgaagtatttgcgccagttgctctttggcttgaagccatcgagctggtgctgcaacgcttgaaggagcagggtgccgacttttcaaagatccagggtatctctggtgctggcatgcagcacggtactgtcttctggaatcatgatgcagagaccctgctgggcagtcttgattctggaaagacattgattgagcagttggagggtggtgccaaaggagagaggaagggtgctttcagccatccattcagccccaactggcaggatgcgagcacgcaaaagcagtgcgaggcctttgacaagactctaggagacccaaggaacttggctttggctactggaagcagtgctcaccaccgcttcagcggccctcagatcttccgtttcagggagaaatacccccaggcttacaaggagaccgctcgtatttctctcgtatcctcattcctcgcatctatcttcttgggcaaggtggccccgatggacatctcggatgtgacaggtgcaaacctgtgggacattaaaaaaggacgctggcatg

SEQ ID NO: 97039 - DNA, 211 bp, Zea mays
  Clone ID: MRT4577_20012C.1
ccggacccgggggccaacttttaaaggatcacaattttacttaacctctttcttgcaaccccatagttcttttatagggaaaccaaatttaaatccccgggccggcgttttaaaacgttttgattgggaaacccctggggttaccacagtgaatggccttaacaaacatccccttttaaaaacctggggtaaaaccaaaaagagcccaccc

SEQ ID NO: 97040 - DNA, 379 bp, Zea mays
  Clone ID: MRT4577_20013C.1
ctatgcaagggtgtctgtaccatgttaaccatgaaacaagaatccctttgcctaacataacaatatacacccaccttttcagacaccacaactcattattagaatagtcgtactactggagcaaatgggcattaagttgccaaaacatgctaactgtttggttacattggtcagtactaaaaaaatgttgcttatgataattgtagtctgtagtcaacattttttcctgcatgatgccatgaaagatattacttttggtacacctggaaactactaagctaacatattttcctcaggcattttttctgtttatatgtcaaacattatggtgttacatgctgcggcaactcttgctgtggccaccttttcttttggattg

SEQ ID NO: 97041 - DNA, 683 bp, Zea mays
  Clone ID: MRT4577_20014C.1
tgtgcaggcgctcgatgccggccgtttctccacactatctctgcgcgctactttcttctctctctgctcctccggctccgcctgatccatcctggacaggaatcgccatgtcagactcggaggagcacgacttctaatcgtacgccgacgctggggcgtccgaccacctacccgcagcacgctgtaaccgtacggaagaacgcgttcatcgtcatcaagaaccgtccctgataggttgcggaggcctctacctccaagactggtaagcatggccacgccaaatgccacttatatcgccatagacatagtccatgggaaaaagcttgaagatatggttccttcatcacacaactgtgacattccgcatgggaaccgaactgactatcagctgatggatatttctgaggatggatctgtgagacttcttacttcagatggcgacactactgatggtcttatactcccagctgatgagactcttgtggtccaaattaaggaagggttctaaagcgcgaaggatcttgttgtgactgaccactctgccatgggggacgagcatatctgcgcgatgaaggatgatgaccccaagtaacttcctccgctttggagacagaaccctactgtatctcaacttaaatccgacaacaagtgtatcaccaaaggatgtctaccgagacgttcac

SEQ ID NO: 97042 - DNA, 686 bp, Zea mays
  Clone ID: MRT4577_20015C.1
tgtgcgagcgctcgaggccggccggtcctcccatcacttatcatctgcggcgctactttcttctctctctgctcctccggctccgccggatccatcctagacaggaatcgccatgtcggactcggaggagcacgacttcgaatcgtacgccgacgctggggcgtccgacacctacccgcagcacgctgtaaccgtacggaagaacgcgttcatcgtcatcaagaaccgtccctgataggttgcggaggcttctacctccaagactggtaaccatgtccacctcaaatgccacttatgtacgccatacacatagtccatgggaaaaagattgaagatatggttccttcatcacacaactgcgacattccgcatgtggaaccgaactgactatcagctgattgatatttctgaggaaggatttgtgagacttcttacttcagatggcaacactactgatggtcttatactcccagctgatgagactcttgtggtccaaattaaggaagggttctaaagcagcaaggatcttgttgtgactgaccactctgccatgaaagacgattatatctgcgcgttgtaggatgatgtacccaagtaacttccttgactttggagacggaaccctactgtatctcaacttaaatccgacaagaagtgtatcaccaaaggattgctaccgagacatt

SEQ ID NO: 97043 - DNA, 237 bp, Zea mays
  Clone ID: MRT4577_20016C.1
acccacaccacacactcaatttcaacaaccccaaactcacattattttctccatttctcattaacttcctctggcgtatttttaaaaatctggggacccatataaaacacaaattcaatattctttccatcttatcattttataacttcaaacatcaccaataacatattcttccatactttcttatcatatcccacttctaccatttcaccttcttattccctacacttattacac

SEQ ID NO: 97044 - DNA, 799 bp, Zea mays
  unsure (1)..(799): unsure at all n locations
  Clone ID: MRT4577_20017C.1
ctgtaagcaacatatcatggaaccattttgcaattgctatactgaattatcctgtttccatcatcttcatggacaacaacttgaaaaatagctcttccactcgccatatgtattctttctcaatcccaccatgaagcacaaactgcacaagtggtggccatggaggctgtctgggaaaaatgtaatacttcccaaccactagatcagaagaaggtagagtgagaaactcacggtctgccacaaattcacctgttgacatattccaggaagctgctggtatatgatgtgtactgctcaaagctggtattactaaacactgagtagccatttccaccgacccctcaggaggcccatgaacttcaatggcgtagcgcaatagaacaacaccactcgaggccaacgaatcgatgggaatgtaccttgtgaacatgttgttgggaagctcgaccgctgctcttggtgtagcaggcacgagcgtggacattggcacaacactgataggcttcaatatgtcaatgtcctgaatgaggcattatgtcgaacgcttggggggcgaggtgtggaaaacctcatcatccttgcagcaggtgcgccccaagatactgtggtgggcgagggacttcaacagccgttcatggggcacgagggccctgttggcggactcgtggatggtggcgagcacgccggagaccgacggggtgtgccgcttctcagcggttgcgtcaagttgagacgcgtgcgcaacgcgttggccaccagggtcgntggtggccgttcctatcggcttggtctagcgtag

SEQ ID NO: 97045 - DNA, 483 bp, Zea mays
  Clone ID: MRT4577_20018C.1
cacgttctgccagcgaccctcatagggtaccgtgaggccgtgagctgaagaagtacatcagctcgacgccacggccggtggcgaggatcgtattcggcggcacgcggatcggacgagcgcgcgccccggcggtggccgtgttctcggcgcgcgggccgagcctgaccaacccgtcggtgctgaagcccgacgtggtcgcccccggggtgaacatcatcgcggcgtggcccgggaacctgggcccgtcggggctggagagcgacgcccgccggtccaacttcaccgtgctctcggggacatcgatggcggcgcctcatgtgagtggcatcgcggcgctgatccggtcggcgcacccgtcctggagcccagcgatggtccggtccgcgatcatgaccgcggcaagggcgggaagggtctgggcaagggcggcgccaagcgccaccgcaaggtgctgcgtgacaacatccagggcatcaccaagcc

SEQ ID NO: 97046 - DNA, 446 bp, Zea mays
  Clone ID: MRT4577_20019C.1
aaaaaaaagaagtccaaaatggggataacctgtcaaaacccccaaatgaagttggggggggggcctaattttgtgcaggtttttttgggagggggggggaatcctatcatggggggggtgggctatatttcactttgaaaaaggggggacataaaaggaccttactgttgatttatccaaaagtttggggtttttaagcaaattggtgggcaagtgagggccacaggacgtgtccctttgttcattggtaatttcacaattttttttgggaaattaaaaattcttttgatcttttttttggacctcccacttgggaaactgaagcaggttttttttcacttatgaataactggccaaaaccaaaaaaaacattttctaccttttttgaaattagggcaatttgggttttatggtggactggggacccccactgttctggtgggata

SEQ ID NO: 97047 - DNA, 419 bp, Zea mays
  unsure (1)..(419): unsure at all n locations
  Clone ID: MRT4577_2001C.1
tcttcctnttccttcttcttcctcgtcctcctcccgtgagccatgaatgaactctgcgacctcgaggtgcacatcaatggtcatcacacgctttatctccaccagagcgtgatgtgcgccttctatgggaggctgaagacactggagaagcaggagaagaagaataagggcggcggcaggaaggaagccgtgttcatcaatctcagcggcggcttcccgggcggcgccgacgggttcgagctcgtggccaggttctgctacaacgacaggcgggttctggctctagccttccaacctaccgctgctgcactgagccggcgtgtccctggagaagaccgaagaagtgtgcgcctgctacctgctggcgcaaggggaggcccttatgaacgggctctactactggacctgggccgacatgc

SEQ ID NO: 97048 - DNA, 500 bp, Zea mays
  Clone ID: MRT4577_20020C.1
tttttttttttttttttttttttttttttttttttttttttttttttcttttttttttttttttttttttggacccccaaaaaaccggcccatgtaataacgcaaaaaaaacacaaatacatgcatataaattttaaatccggcccgaaacggacatgaccgggagcccgttacaaatgaacatgaaccccaggagcgaccatggatcgataatggggggggcagttgacaggattttatttaaaccccgtttttatttttatacgactcgggggcgtccttttgacttttgggcgccatcgcctgaccggtttaattgcagttgcagcaggagcagccgcagttggggccgcatttgcaggtgttgcagtcgcaaccgccgcccttgggggccgccttaaaaccgccggcgctggccttggtggtcggcgcggcgaggaccgtggtcttgatgctgttggcggggggggtctccacgttaggggacatgcagttgcatg

SEQ ID NO: 97049 - DNA, 310 bp, Zea mays
  Clone ID: MRT4577_20021C.1
cttctacctggactacattggcttaaaacgggtcaagcatgacacctacatgattatttaccggtgcgggaacgacaccgaataccgcctactttaccttaaccacattgtactcacggtgtccaccgccaaccttcttaacagtgcgatcgaagaccttcagggggaatacgacatgaaggacctgggggctactaaccacttcctacgcatgaccgggaagcgccgggctcagggtctttttcttcaccaacgccagtacggcatcgacattctggagcggactgacatgtatgactgcaaggcttgc

SEQ ID NO: 97050 - DNA, 330 bp, Zea mays
  Clone ID: MRT4577_20022C.1
tatgttcttgatcgtgagcggacgcacgcgagttagaactaatgagatggtggccggtgcgcaaaaaaacaagctgcgagttttctactacatcaaaggcgtagagacggatcctgctccttttgacattaatagggattaggggactgctacattgatgacgaagggaaagaatatcctgaactattaccagcctgcgatctgcacaatatgcaaatagctggaggcgcagaagactgctgccagagctaaatgaagagatgtgccctatatgaccattacttgataacatggtggacgacaccgttctaaatttcacattaatatggc

SEQ ID NO: 97051 - DNA, 126 bp, Zea mays
  unsure (1)..(126): unsure at all n locations
  Clone ID: MRT4577_20023C.1
tnnnnnnnttgggggaggacaaacaaaaatcgcagaccaaacatgtactggggtcagaaaataaggtcccagggcaatggcttccctggtgtagcagtacaggccatttcacaacttccatgcaca

SEQ ID NO: 97052 - DNA, 501 bp, Zea mays
  Clone ID: MRT4577_20024C.1
ttttttttttttttttttgttttttttttttttttttttttttgtgtttttttttttttttttttttttttcgttttttttttgttgtttttgttgtaaaaaaaggaagagggccgcgccctcgggggagcggtagtacgacgggcgaccaaggaggccgaggggactattgaaaagcccccggttcccgagggcccacagggcctttgggggggacgcacacataggccatgggcctccgcggggggggggacctccccccccccttcgatgtgaacaagggggggccggaaaaaacctcctttttcattgaggggacgggcaaacaaggggggggccctaagggcatgcaccatgtccggggtagatcagccctttagtcacggggaacaaaattaggggggtttccccagacgttgtcggcaaccgcccggaaattgagaacacgaccctggaggggaaccacttttccttatggggagtggtttaaaagatcggggt

SEQ ID NO: 97053 - DNA, 485 bp, Zea mays
  Clone ID: MRT4577_20025C.1
gccggccgggttgggagagtctttccgcatcatcttctccgctcgaagaacccccagtcgaccaccagatcacttgttaaactttgataaggggtgatgggggtttctttcacaaacctcaactccgaggaaaagggtcaaaaagcgttgatgagtaccttctcactcgcagctacatcactggctaccaagcttccaagagatgacttgactgtctacacttcgctttcaagtgctccctcctgcaagaatatccacgcagcaaggtggttcaaccacattgatgcgctcatgaggctgagcggaattactgcagagagccaaagtgcgaaggttgaatccacagcagttccttcagcccccactccagatgttggtgaagcacaggccccatctgctgaggaggacgacaactatgacgtttacctttttggtgatgagacccaacatgataagaaagctgctgaacatcgcgctgcatctgc

SEQ ID NO: 97054 - DNA, 478 bp, Zea mays
  unsure (1)..(478): unsure at all n locations
  Clone ID: MRT4577_20027C.1
cggacgcgtgggcggcgcgggcgccgccgccgcgctgaggaagctcgtgggcgagctgcggcggaggcgggatgctgctgcccttgccacggccgtagcaccgccggaataaaaccagccagggatcctacgtagcgcgccaccatgcatagctgcctagtcagcttccattactttgatgctaggtggtttatttattgagtcgtgacggtgcaatgcgaagtgtcgtgtgtcaggtgtttcccttctcatttagtttgggttcgtgtttttgtgtcgtgctagtacgtacggatcccgtaggctaggcagccaataagccaataatggacgctgattacccaggcacaacaatactgttatatgacagagctcgcccattgcatgcctntataagaactatgtgccatttgtgttaaagctcgtatgcatatgacttgacttgcatcgccctctatcgtgatacataaacataaaa

SEQ ID NO: 97055 - DNA, 306 bp, Zea mays
  unsure (1)..(306): unsure at all n locations
  Clone ID: MRT4577_20028C.1
cnntntttttttattttatttatttaaattttggttttgtttaaaaaaaaatgtaccggctacaaatttattagcttaaggattagccattatttcataaatggtctataaaaaaaaattcaaaacaattgtcttttttctcgtaaaaaatattgaaatctcctaaaaacctccaacaaaaacaaatgaaatttttcaccacgtaaacgtggaatttttataaatgtaaaaaaacaaatcaccctaaagtccaaaactgcaatcataaaaaaaattccaggcacgggttttctacaaaatttgctt

SEQ ID NO: 97056 - DNA, 129 bp, Zea mays
  Clone ID: MRT4577_20029C.1
tgggggtctttttcctaaagctgggatttattcctttgcagaactgttgggaattgggttctataggttactggcacttttccgggaaaaaattaaaacgctttttgctgcgaacatggggacccttta

SEQ ID NO: 97057 - DNA, 360 bp, Zea mays
  Clone ID: MRT4577_2002C.1
ggccggaacaaaaataagttttggtttcaaaaatccgggggggatacatttttggcatgcaacaaaacaacttttgccacagaaacaagggagcttaccaagaaaatctggtcattacttattacaatttcacacattaacttacactagacattacacactgggcacaacgcatgggcatgaacccacagggggttagttagcttgcagccccttcagggaatcctgatgggggggcgaggaccacaatatgggggggcctaacggggttgaagaccctgcaaatgggcctggacttgccctggggccccgcgaggaccttgaactgccccaatttgaacaagggcccgggaaacttgg

SEQ ID NO: 97058 - DNA, 487 bp, Zea mays
  Clone ID: MRT4577_20030C.1
ctctactcgttcgtgctattccatttttttacacataatatctcgtgcgaccccgaccttccccttccactcaaactaaaggcagcaagcagaagccaacaggcatggggatacccgaggcggttaacgtcaaccaagtctacttttgctggtcctaactagaaacaataccgatggccggcctcaaaccgggaagggcgcaaaggggttcgcacttctaactggaaaagacgaaattcaaggtgtcctactccacccggggcagaggctgatacctccccgctgtggttgcttctatagccctaaagcccattatgctcccctccatttaacgctgtgggctctgcagcagggggcttttcgcctccttccccaagatctttttttaattgacgtgaaaacccctttcgcgcctgggggaaaccttttaccggatttccgacgctgcatcccatcaccgggaagagcttgcacccgaacactaacg

SEQ ID NO: 97059 - DNA, 995 bp, Zea mays
  Clone ID: MRT4577_20031C.1
aagaaggccggcgccatgaacgcgctggtgcgcacgagcgccatcatgtccaacgggcccttcatcctcaacctggactgcgaccactacgtgcacaactcggcggcgctccgtgaggggatgtgcttcatgctcgatcgcggcggcgaccgcgtctgctatgtccagttcccgcagaggttcgagggcatcgaccccaacgaccggtacgccaaccacaacctcgtcttcttcgacgtcgccatgcgcgccatggacgggctgcagggacctatgtacgtcggtaccggctgcgtttccgccgcaccgcgctgtacgggttcagcccgccgcgcgccacggagcaccacggctggctcgggaggaggaagatcaagctgttgctgaggaagcccacaatgggaaagaagacggacagggagaacaacagcgataaggagatgatgctgccgccgatcgaggacgacgccttccagcagctcgacgacatcgagtcgtccgcgctgctcccgcgacggttcggcagctcggcaacgttcgtggcgtccatccccgtggcagagtaccaggggcggctcctgcaggacacgcccggcgcgcaccagggccgccccgccggcgccctggccgtgcctcgcgagccgcttgacgcggacaccgtcgcggaggccatcagcgtcatttcgtgcttctacgaggacaagacggagtgggggcggcgcatcgggtggatctacgggtcggtgacggaggacgtggtgacggggtaccggatgcacaaccgcgggtggcggtccgtgtactgcgtgacgcggcgcgacgcgttccgcggcacggcgcccatcaacctcaccgaccggttgcaccaggtgctccggtgggcgacggggtccgtggagatcttcttctcccgcaacaacgccctgttcgcgtccccgcggatgaagttcctccagcgcgtggcctacttcaacgtgggcatgtacccgttcacc

SEQ ID NO: 97060 - DNA, 225 bp, Zea mays
  Clone ID: MRT4577_20032C.1
tttttttttttttttttctttaataaacattttttgggtggtttttgcacgagggaaggagaagctgtaaacacccagattacatgcatcatcatcatcatctaataataataattcaatattattgcccacattacagtaccaacgacctatgaccaaaccactgagctcctctcgtactgcatggaaacgaacggtttcaaaaacacgccaacacgcattttt

SEQ ID NO: 97061 - DNA, 412 bp, Zea mays
  Clone ID: MRT4577_20033C.1
atacacctcccatctatcgttcttcgccgacgcctgctctctgctgctcgtcgaacatgggagagacggcctgcgcgatgctatcgccggatcgagaactggccatagccccttctgcagctactgtcgatgttccactgatctgacatttcgactatccgggctggatgtgtagacggggagctctgggcgtactccattgccggctactgagtatctaggaaagctactgtagtctccactcacgtcccggattatgaccctattgtctgtcactgtatccgggagctgttgctgatggtgtgccttcgaccttctccaacgatttctcctatttttgttcttcatcatactactttctgatttatttggctagctcctctttagatacgcactgaaatgaagagagact

SEQ ID NO: 97062 - DNA, 640 bp, Zea mays
  Clone ID: MRT4577_20034C.1
caatgcatcattttgtccactaagacagtgcatgccctcctgcatgttagctattgcagggtccgttgtgtccaaaccaaggaaaggagaggcaggttcctcacatctctcctgccatatctgctgctccagaagctttcctccccctctctgcttcaagagttcaaggtagctggcgctgcacgctccgtcctagcagcaagcttgcagccatggagcccaggaagtcgaattatctcgtcgccctcgtcttggcgtcgttcttgctctccgtcgccgtcgcaggagggcataggaagaagctcgatgacgcatcagaatcaatggagacatcggaatccacgcaggaagatgacgaaatagcggtggtggtccacgagagaattctcagccaggtgaagatgaacgactacgcgagatacgacccttcaccgaccatggctaagcctcgctccaaggacataccgaactagtcagcccagcccttgtattgagattatatgtagagaaagaagatctctctctctctcttatatatatatatatatatatgtatatgtggaatcagagaaagagttgcatatattcatttctttaatatgaatatatgaataatttaaaaaaaaaaaaaaaaaaaaaa

SEQ ID NO: 97063 - DNA, 236 bp, Zea mays
  unsure (1)..(236): unsure at all n locations
  Clone ID: MRT4577_20035C.1
ataaaaaaaatgggagaagttttatactttccatnaatccacaagaaatctgatgggatcgcacaagggcttattgctttataagggctggtttgggggataggaaaatggagagaatccatgaggcaggaatccccttattaatttataaataacaagggggttcctgtctcaggcctgatggatcccccgtattttccatgttcaaactagccctaaagtaaattccacattgg

SEQ ID NO: 97064 - DNA, 322 bp, Zea mays
  Clone ID: MRT4577_20036C.1
aatacaattaatgaagctactatgtgtcgcgtaaggataatctgacttaatagagagctagcgcagaaggacgggaccgacgcctggaaccaccggatcggcggaatctatataagactaagaagacgattaacctaggataaaagggggggtcctttctggggttcctgcatacagcgaggtggcttccgagcagagaccttgccacctgggggccttaaagacaatcttgggctccccgttcaatagcgccttcgggggaaaaccgagggcgtccaaaggtgattctgctggatctaccgcaattgtgaccagcaggggt

SEQ ID NO: 97065 - DNA, 618 bp, Zea mays
  Clone ID: MRT4577_20037C.1
aaaaggaaggtactgccaaactatgttcaccaacatttacttaggcaacatatacgacgggatcagtggcagtcaagaaataatagaaaattgcaaccacgcactgaaagagcgggagagaaaagacggacaattactatatagaaatctttcagtctgctttaattcgtaccggcttctactattcttatagtgttttgtctctatagattgtagatacaacaactgactttaagttgaagcgaacagttcatttcatcggccaatgcaaacatcagcctgccggccacactttgtctccgtgcagaacgaaccttctgtgtggaagccgtcctttatctgcattttctggaacatcatgcataaaaaatttatctgcacggcaagcttcccgacaaaggaaccagttgagcaggtgcatccaaaacctggccttccggacccattcgtgttggtgaacgaatagcatctgcgaaaagggaaaaaaaaagaacggccaggcctttccgaaccatctgcgaacttccaaggatcaaggagagcagtataatcgtctgcacatgctttctgacttgcgatttgaagctttgtgtctgtgcaggtgagagaaaccctgcc

SEQ ID NO: 97066 - DNA, 1272 bp, Zea mays
  Clone ID: MRT4577_20038C.1
accccgatgtcacatgttaaatttgtgcgtgcggtcattgagactgactatctgacatatattttgtggtaaacatttttcactaaatctgtgcatcgctcgcctcgaggccggacgggcttgcccctccctttctcttctccccttgtgtcgcgctcgcgcatctgaagcaagggggggaagggccaagggggatcggtcttgttctcggagagggttgagctgcttgacggttttgactcggatcatggtgtgcagctctatcagatagagagctgacgtgaggtgtgagacgcggatcgtggagtactactcagtaggagatcaagaggaaggaggtggggagggggaagaaggcgatagccggggaggatggtgcttgtgcttgcgctgggggatctgcacatcccgcaccgggcgcccgacctccccgccaaattcaagtccatgctcgtgcccggcaagatccaacacatcatctgcactggcaatctctgcatcaaggaagtccatgactacctgaaaagcctttgccctgatctccatattaccagaggtgaacatgatgaggatgctcgatacccagagactaagacacttacaattggtcagtttaagcttgggctgtgccatggccatcaggttgttccatggggcgacctggactccctggcgatgctccagcggcagctggacgtggacatcctggtgaccgggcacacgcaccagttcaaggcatataagcacgagggaggcgtggtgatcaaccctggctctgccacgggcgcctacagcagcatcacttacgacgtgaacccaagctttgtgctgatggacatcgacgggctccgtgtggtggtgtacgtctacgagctgattgacggcgaggtgaaggtggacaaaatcgacttcaagaagactgcgacgatgcacggctagccctatccttccactccgtgattgagtgcaagacatgtctagcttctgtttcttttctttcagcttcttgattcagagcctcctgaacacgctttctacctgttcatgcgcaaagaactttttaggtctggttgttaacaatgtttctcggagccatgaatttaaatactatacttttaaaaaaaaaaaaaaaaaacataactttggctagcttaaaaccccggctattgtttagataaagtattgtaaatgatgacatttgggcataagttaatcatactatgaaaaatttgggttggagtgaaaaaaaaaaaaaaaaaaaggcccctatgc

SEQ ID NO: 97067 - DNA, 1095 bp, Zea mays
  Clone ID: MRT4577_20039C.1
gatcgtgctagggatttgagtggaagatttgatcatcgcgttccaggagagcagagcgggctgagcgattcggatcgctctccaccttccgccgccgtcccccttcctccccccgatccccaatccaatggtgctggtcctagcgctgggggatctgcacatcccgcaccgtgcgcccgacctgcccgccaagttcaagtccatgctcgtcccgggcaagatccagcacatcatctgcaccgggaacctctgcatcaaggaagttcacgactaccttaaaagcctctgtcctgatctccacattactagaggtgaatatgatgaggatgctcgctacccagagactaaaacagttactattggtcagttcaagctagggccatgccatggccatcaggttgttccatggggcgacctggactccctagcgatgctccagaggcagctggatgtggacatcctcgtcaccgggcacacccatcagttcaaggcatataagcacgagggaggcgtggtcatcaaccctggctcagccacgggcgcccacagcagcatcacatacgacgtgaacccaagctttgtgctgatggacatcgacggcctccgtgtggtggtgtacgtctacgagctgattgacggcgaggtgaaggtggacaagatcgacttcaagaagactgcgacgatgcacggctagccctatccttccactgcgtgattgagtgcaagacatgtctagcttctgttttttttctttcagcttcttgattcagagcctcctgaacacgctttctacctctaatgttcatgcgcaaagaacagtttaggtctggttgttaacaatctcggagcttaaatactatttttaattgtcatgataaaaaaaaaaaaaaaaaagggcggccgccaccgcgggagagcacattagctgatcatattccgacggcgtgatgttcaatgtcaagtaccttaaggcctgtttggcatggctctagagcacaactccaaggaggagctgcatgtcaaacatccagactccaaagttgtaaattttatggagtgttttggagctgcggagtagctcttttgctgatactg

SEQ ID NO: 97068 - DNA, 1655 bp, Zea mays
  Clone ID: MRT4577_2003C.1
gcgtcgactttttttttttttttttttgaattcccaatgtaacatatatttgaatttcgatcggtgcctgcccgcgtgccgcgtggccttgtggcatctgcgtgagactgctgggcgcctgtccggctggcgccgtcgccccactccaaatcgacaaggaattttccctccctatgaatgacccaccccagtgcacgctgcagggccttatacatatgcagaacccgagtgggggttcgcccatcgatctttcgagccaggaactccatcgataggtttccctacatggacatgtagacaacaaaagcggaacttgtggccagccatctagggcgttctgcacctgcgtggggatccggggcccctagaccccggccacacgccgctcgcactggagacatccccagtgggctgctggcagccgagccggcgggcatggtcctcccacgtcacgcatcctcgtgaggcgtcggcccccccatcctccgcgcgttctcaccccccagcagcctaccccgcatttttttttttttttttccttttaaactttctttattttaggcagtcgcatggaattcccaatgtaacatatatttgaatttcgatcaatgacagcccttgttgcatgttgcaaagtagaaaaaggaaaaaaaaaagttgaggggtagaacggcgttgccgttgcatacgagaattcgacagatatatatccctacttgtggttttccaaacaaaattgggatttttgtcctatatataagggggcctccagtgaagagtagatcagcattctatagaggcaggcaagccatcgatggtattgtgaacatgcctagtgaggcagtgacagcggaacatgcaggcaagctgctagaactttaggcatcttcgtgagacttctggacgcctatccatctggcatagtcaacccacagcaaagagccaaggaatgtgttgcccgtacgaacgatgaagcacattgcactcagcagtagcttctggttatgcagcaacggctccagcatcctctgctcgatcacaccagccagaagctgatacctgaggttactagaaatggacatgtatacaccataggcaacactagttgagacgactggaatttccatgacttcgtcctcaaggtccttatcaacagccctctttgctttgagcgctgcattcgtgacactagtgccaatcaaagaagcagtagttcccactgccaaaagctttataccattcctcacaaaagctccaatcctctgcagaagtgagaatgaccttccagccatagcaatttggaaagtattatcagggcagttatagaaaaagttggcaatagctccagcgtttcttgccagtggcggctgtaaaccaatagttggagcaggaagatagacaagcatgacgtccgcaacaatcgccatgaccacatcagatatgacaacttcaatctctttgaagaaattgtcccccctcttctggaactcagccacggtcttggcgacgagaccgatgccgcactctatgccgagcttggtgaggaagagctcgtcggcgaggagcctctccctgaagccctggaactggaggagccatcggaagaagccgttggcctcgagttcggtgaagcggcgcacgatgtcggccccgat

SEQ ID NO: 97069 - DNA, 886 bp, Zea mays
  Clone ID: MRT4577_20040C.1
gctctctcacgcagcccatgagccagcagctaccgtcggctcggccaccttcagctgggggcagcataggccacggcctctggccgacaccacaccgttgcgcgccctctgcccacttccttcccgcgcgagccgcacaagcttctgggcccggctatagccagcagcaagcgcttgtttttcatccacagcgaaggacgtatctctttggggcgggggcgctcaaattggttgttccatggggcgacctgaactccctggcgatgctccagcggcagctggacgtggacatcctggtgaccgggcacagccatcagttcaaggcatataagcacgagggaggcgtggtgatcaaccctggctctgccacgggcgcctacagcagcatcacttacgacgtgaacccaagctttgtgctgatggacatcgaaggactccgtgtggtggtgtacgtctacgagctgattgacggcgaggtgaaggtggacaagatcgacttcaagaaagcagcgacgatgcaagcctagcactactatccttccacggtgtgattggtttcaagacacgtctaggttctgtttttttttctcttcttgattcagagctccctcaacactctctttctaccacttgtgctaacctgttcatgtgcaaataactagtttaatacacattagctgatcatattacgacggcgtgatgttaaatgtcaagtaacttaaggcctgtttggcatggctctagagcaaaactccaaggaggagctgcatgtcaaacatccagactccaaagttgtaaattctatggagtttttggagctgcggagtagctcttttgctgatctgaaaactctaaaaaaagcaatcatggaagttttgagttatct

SEQ ID NO: 97070 - DNA, 231 bp, Zea mays
  Clone ID: MRT4577_20041C.1
gctttccctcatattggacactggaacgctatggagaagaattccaagaattcaacgtgcctaaacagccaacaacctttggcaacgaatctccaaaaatctcttcatcgtaaacagacaccaagaccatttcctacctacacaattttgaagaaaacgggggggggccaaaacgcggaccgctcccgcccattccccaagcccccaaacaaaaaaacctttgaaaacaaa

SEQ ID NO: 97071 - DNA, 429 bp, Zea mays
  Clone ID: MRT4577_20042C.1
agaacgcaggcacaagctttttttttttcttttttccttcttttaaaatcagaaaatgtaacttcttatatgctggttggccacatacataatgcaaaaaccttaattattgaattacaacgaataaacactctaaaagagggcactaccaacgatgacctgttagcaggaggccgttgagtctgccaaaacaagttggacaaagggcaccaattgcagcaggtgaaagaaggatgcggggttagccgaaaactgttggtacaaaggcaacaactggtgctgtgacaagaaggaagcacggtttcgctgcagctagctggataaaagggagcagcatttgctgctgcaaataaccagcggagctcagtgcggacaattggttaaatggaagaagttgatgttactaagagtacgcactaaagctcgcta

SEQ ID NO: 97072 - DNA, 1405 bp, Zea mays
  Clone ID: MRT4577_20043C.1
acccacgcgacccactcgagcgcaagaacctagccacacggaccatagagcgcatcacagcgagccggaacatcggggcagtgctaacacgacccagatatgagcccaatacgggcccactttgtacagcgaagctagcaaaccccctgttctcgactatctgccgcgctgcttctcgaacatgcaacctcgaggccggccgggaaaaaagcgcaagggggatcgatcttgttcgcggagaggggtgacgtgcttgacagttttgactcgaatccatggtgtgcatctctaccagatagagagctgacctgaggtggagacgcggatcgtggctcctggggtggaggtacaagcgtacagctcaataggagatcaagagtaaagagtgtggggaggggaaggacgcgatatcgggggaggatggtgcttgtgcttgcgctgggggatctgcacatcccgcaccgggtgcccgacctgcccgccaaattcaagtccatgctcgtgcccggcaagatccaacacatcatctgcgctggcaacctctgcatcaaggaagttcatgactacctgaaaagcctttgccctgatctccacattactggaggtgaatatgatgagtatgctcgatacccagagactaagacacttacaattggtcagtttaagcttgggctgtgccatggtcatcaggttgttccatggggcgacctggactccctggcgatgctccagcggcagctggacgtggacatcctggtgaccgggcacagccatcagttcaaggcatataagcacgagggaggcgtggtgatcaaccctggctctgccacgggcgcctacagcagcatcacttacgacgtgaacccaagctttgtgctgatggacatcgaaggactccgtgtggtggtatacgtctacgagctgattgacggcgaggtgaaggtggacaagatcgacttcaagaaagcagcgacgatgcaagcctagcactactatccttccacggcgtgattggtttcaagacacgtctaggttctgtttttttctcttcttgattcagagctccctcaacactctttctaccacttgtgctaacctgttcatgtgcaaataacttgtttaatacacattagctgatcagattacgagggcgtgatgttaaatgtcaaacatccagactccaaagttgtaaactctatggagtttttggagccgtggagtacctcttttgctgctctaaaaactctaaaaaaacaacccaatcatggagttttgagttatttacccgccattgttactggttagtatttggtcttgctttaagcaagaacgggcgccctttaattttcgtttattttatgtaaaaaatcataaatggagtaattgcaaaataaatttgcttccc

SEQ ID NO: 97073 - DNA, 946 bp, Zea mays
  Clone ID: MRT4577_20044C.1
ccacgcgtccggataggtcttcaaaactgaaaccacatgcgtcccctcgttgatagattacaacttccataaggctgcatgtggccatactcttacgattgggttgactacctcagggcacatttttactgttggaagccctgtgtatggacagcttggcaatccaaataatgatggaaggtatcctcgcctggtcgaagagcagcttgggggtggcggtgttgtggaggttgcttgtgggtcttatcatgtcgcggttttgacaaatgctggtgaagtttacacatggggtaagggtacaaatggaagattaggccatggtgatattgcggatcgtaaagtgcctacactcgttgaggcattgaaggataggtctgtaaaacgtgttgcttgtggatcaagctttacagcagccatctgtcagcacaaatgggtgtctgggatggagcagtctcagtgctcggcatgcaggcagccatttggtttcactcgaaaaaggcacaactgttacaattgtggtttagtacactgccattcgtgcagttcaaagaaggctctgagagcagcattgtctccaaacccgggtaagccataccgtgtctgtgattcatgttacgtgaagctaagtaaagttttggattctggtgttagttatagcagaaatactatcccccgcttacctggtgatacaaaggccgagagaatagacacaaaggcaaccagagttgcacagtctaatagttcagatatgattaggaatttggatgtgaaggcagccaagcagacgaagaagtctgagtattcgtcgcaagttccagcgacgttgcagctgaaagacatccctttcatcagcgcacctgacctgcagaacctgtctacagtggctaatcagtacccttatgaccccagatctactttaccatccttgagaatgccatatctgaac

SEQ ID NO: 97074 - DNA, 178 bp, Zea mays
  Clone ID: MRT4577_20045C.1
gctgttatgtgtggatcggcgtggagtacaatatagcctgtgtagatcatatagatgtgtaacgctagtaatagtagactgagacatcaggttatcagccgttgcatggctacagtactctgccggcgcgtactctgtcgatctagcatgcgatgacgacagacttgtgttgttagta

SEQ ID NO: 97075 - DNA, 315 bp, Zea mays
  unsure (1)..(315): unsure at all n locations
  Clone ID: MRT4577_20046C.1
tttatcatgtgaaatcattcattttctgggtgttttcttaaccatatcattgtgaaattattcataattattatntggccctctgcccagaaacctttgtgtgcatctgaaaattgatgggatttggtcaacactaacatgattagcggaaggagcagtcagatagaattagtactcgcactcttgaactangttgtagtccaaagaggctatgtaggcatcatgtgctcaacatgtcggtttttaaaacggtagaactagtgatattataaataaaacctggatgcgcgcgatagtactgtgaccggattatcg

SEQ ID NO: 97076 - DNA, 307 bp, Zea mays
  Clone ID: MRT4577_20047C.1
gcgcttttcctcgtgtttcaatggggcgttcaggctcaagggatggaacctcgccttccgcctctggaacgcgtgcgtcgaccgcgccaaccactttgctgcgaggggtgccgaggccgcggtcgtggagacggagatccgacaggcggtgccggagctcctgctaatagctggcctcccggaaggcgtactcaacgccgttgagaaggcggcttcccttttccaccgcaccggcctgttctggcttgacctatggcgcgccgacctcgcttccgtctgttttgagaaggccacgccggtggtctgc

SEQ ID NO: 97077 - DNA, 300 bp, Zea mays
  Clone ID: MRT4577_20048C.1
caaaagaagcaccggaaagagcagctgctttatctcgttcacaatcagcgagagaggcaagccttcgttcagaacgtgctgctatgcagagatcccaacacgcagtccatcggaggccgcgttacatgctacaagagcaagcagacagggctactgtggcaatgaagcaaaaggcttgcgctgaacgtaaggaaaaagctcttagtaaagccaacgatagggctgaagcatacagatcttctaagatgagagctttccaggaagcgctgaatacagctctaccagcagaagtggaaaggg

SEQ ID NO: 97078 - DNA, 453 bp, Zea mays
  Clone ID: MRT4577_20049C.1
ctccatcacctgctctggaagcagcagcaatgttggaaatggatatgtgagctggtaccaggtgatcccaggatcgggcgcccagaaccctcatctatgatgacaccagtcgagcctcgggggtccccgaccgattctccggctccaggtctgggaacacagccaccctgaccatcagctcgctccaggctgaggacgaggcagattatttttgtgcatctgctgaggatagtagcagtaatgctgttttcggcagcgggaccacactgaccgtcctgggtcagcccaagtccccaccctcggtcaccctgttcccgccctccacggaggagctcaacggcaacaaggccaccctggtgtgtctcatcagcgacttctacccgggtagcgtgaccgtggtctggaaggcagacggcagcaccatcacccgcaacgtggagaccacccgggcct

SEQ ID NO: 97079 - DNA, 206 bp, Zea mays
  Clone ID: MRT4577_2004C.1
tccctggtctacccactcgtcctcggacttcgtgggctgactcttgagatctcgagcgctcacccattcatacatacaacaagatatttttaaaattatatgacctatattacatccactttcctaaattatacaacatattaactaataaaaccctaatcatacataacttaatatcatatcaaaacatcctcatatatctatca

SEQ ID NO: 97080 - DNA, 207 bp, Zea mays
  Clone ID: MRT4577_20050C.1
tccacgcgtaatgccaaatcagtcgctagttttgtttatatccaccttgtgcttaggggctacccttacttcgattgctgcgcgtcttgtcattcatccgttcgtcgcctcgtgcagtttcgtccgcccttcctgactaacttaggccctcccgcttaccgcggattctgtaaattctagacctacgaccgtcgtcggttggtgccc

SEQ ID NO: 97081 - DNA, 109 bp, Zea mays
  Clone ID: MRT4577_20051C.1
cccacgaatccaaccacgcgtctgcccacgcgtcagtgtaacccacactcagccgcgtctcgtcgcatcctacgatccaaagctctcactgctcgcaggtctaacccat

SEQ ID NO: 97082 - DNA, 285 bp, Zea mays
  Clone ID: MRT4577_20052C.1
aagatatagaacttttaattgtagattaattagattgatttaaatgtaattgatcaatgttttattatttttgtagttacaaacacttaatttatattataaattaattgaagttaatattaaaacaaatttaaaatgttttctttttactttgtatccaatcaaatttatttttttgccgccaaaagttgtttgagaaaaaacaatttaaaatttaaagtttattatgacatatttacaattatatgacttaaattttacaaatgaattaaagttgatttctta

SEQ ID NO: 97083 - DNA, 442 bp, Zea mays
  Clone ID: MRT4577_20053C.1
gccggccgggccgggcatttctacttttagacacacaaactagaaggacagggcacgctgattcaccaattttgattcggcgtagtcttcagatttctctggcgactagctacggctgttctttgtgatgattgagaggatactacgtcgggatcgtggttgggggcctcagcttcttgtcatagctctttctgaccgacgatacgctgatcccgtcagctgggaccacgctggattggctctcctcgtgctgcgatgctccacgtgggtgtacttcaaatgtatcttatcctgatgctgcaagacgaatcctttgtgtacgaaccagacaacgcagtaactatctcagtggcgaaggtgacatgatgcgaaacttccttacgaaccgacctctcgccagacgtgtccgtgatgctgaaggaggatcttccctgggatacct

SEQ ID NO: 97084 - DNA, 459 bp, Zea mays
  Clone ID: MRT4577_20054C.1
aaactggattcaatcttcacatatatacaagaatgtcatatgttatatagtcatgtttgtggtgatcaagtgcgaacaaagaagcagccaagcaggacaacagtgcagcttagctagcgatgctcgaaggcatcaataaacaggccatacgatgaaacccatcttgaaattgttgaggagagcaacggggaagctgtcacatactctgtcagcaggacgcaaacaactgctgctataacatcattcacgcccaaggtaccgaaagagagctagattgtcggtgcaacgtagaagctgccaagcagcgagatgccaccaaaaggagctcgcctcgatcggcttttaaaatagtcccttatgagttctggaatgattcggattatgtgaaccggccttcaacgacgcccaacatttccctacactgcacggattctgaggtagaatacagaacaagcttaa

SEQ ID NO: 97085 - DNA, 191 bp, Zea mays
  Clone ID: MRT4577_20055C.1
tctcatggcagtggtgcggcactaatccgctggggtgcacttttgggaatcgttgtttcaccacttcgacctggcagcattacgcctggtcctattccattttaaactacacgaattccaattacgtttagtaccagctgttggacgtgcttgtgatttacaagccagtgcaccaattgggaacactgctg

SEQ ID NO: 97086 - DNA, 136 bp, Zea mays
  Clone ID: MRT4577_20056C.1
ttctttttcagggggtgcgacgcgtcggggcgtgctgtacccgacgccggcgaacccggaaacatataatactgcgcctatcaacattgggctggctgcgttcgaggtgatcgactagatcaaggtttttcttgag

SEQ ID NO: 97087 - DNA, 600 bp, Zea mays
  Clone ID: MRT4577_20057C.1
cccagcgtccgcccacgcgtccgaggggccttgtgactatcttttcgtcagcaagagaacaacatcgatcttggtagttcttagttgcccctgtgtttcggaagtgttgtgtcagattattatatacccatttctagaaataaccaattgctcatattgcttacttagacaaataagcaatcttgaatctggaattttacagtgtacctgaactatcaactcccttcaacaaacttttttgtatggaacaggagcagcagcacccccccccccccccccgcctagtgaaaatattatgaacagaaaaagaacatcaaacagcaaagaaagaaaccaaaaagttcaacaaacattgcttatcatcaccagcaattattatccttattcctcctaatcagaaatcagctttaacgacctgtttggttgattgtctggtacttctctcaaaatatttatttgatttagctttaggagctatcttgtttccctatgcagggtcttcatttaaacttcctcaggattttatcagtatatattttacttttgcagtttaaacaatggaatgtagcatttatcggttccagctttcaatcttgcaaa

SEQ ID NO: 97088 - DNA, 537 bp, Zea mays
  Clone ID: MRT4577_20058C.1
atggactggtgattatcattatgattccatgtggcatgcaagaagcatatatatatcaccaatagatgctgttaaagggtttaaggtgtatttgaaaggtcttcctagttatactgcgaatcttttagataaacccttaagaaattggagggcctagtatatggtgattttttttttgctaggcccagcgctaaaaaaccgattatggggtttattcaaagatgaaatttcatcctgtaactacaggttcaaggtgtatttggtttgatggatatcactatggacaagcgatggttggtttttgtacaagttggatgttgataaaaatgttggtatccatgccacacaaaaaaagcctaaccagcacccatattttgtaatccttgtcaagtatgttatatggtttacttgatagctctagcgaggctatccagtacctcaccttcaccctcatatttgtaatccttgtccacataattattagtatgttatatggttatttagtaataaaaaaaaaaaaaaaaaagaatcatattg

SEQ ID NO: 97089 - DNA, 516 bp, Zea mays
  Clone ID: MRT4577_20059C.1
aattcggcacgagggaaactagaacggaacgttggccggaggctgcctccggatcgatctgggcaaccatggcgacttctaacacaggaccgatggaggaccgcgggggggacctgtcgagacggtgctgaactgcaactaatggtgtacaatacctacctcaacttccagacgactggcaccgacgacaagggcatgggcaatgccaaggagtgcctgcactacacctgcttcaacatccatcactgcatgccgcacctcatgagcccccacgccatctagacccataaggacgtacactggcgattagttcatctacgggaggaagatgcgcgcacgagtaagaaagacgcaagctcaccggccaatgctggtatttacatggacaacgcacgtgatcaacaccagcagcataccatagtttcatgtatcacggaaggacaaataagctcgacccagagcacaatccctttggccagttaaagaacaccaatggacgtcaaaaagaaacagtga

SEQ ID NO: 97090 - DNA, 292 bp, Zea mays
  Clone ID: MRT4577_2005C.1
gcgggcgagggaccttgctgacgtctccttgcttccgtaaggggcttagagccaccgtcgtcatggacgcacgcggggagccatcattacctgttaccggggcgagtcctggatggtgactgccggtcttgtgtgcggggtgtgttttttttgctatgctagagggtatgggtaactgatgtagcccgccgtgcggctgtgtgtcgagtgccgaggcccaaggctcgtggtcggaggtctgtgagacttcgctctcttgagtgtcgcagagtgccagtgggctctggggctg

SEQ ID NO: 97091 - DNA, 135 bp, Zea mays
  Clone ID: MRT4577_20060C.1
ttactggtttgtggagctactggtggtaatctattgcattggcggtgtacatgggtacaatcatgctgaagctctgttatcaagaatgtaaaccagtgtgaatcttctgtgaatgaccttcttggagccgttgca

SEQ ID NO: 97092 - DNA, 610 bp, Zea mays
  Clone ID: MRT4577_20061C.1
ggtacccgcggcccttcctcgagttttttttttttttttttttttttttttttttttttttttttttttttttttttttttttttttttttttttttttttttttccaacccacaccccccccacccgtttgggttgtttaaaacaaaaccaacagggttcccctggaaaacaagggttccggcccctgggaaaaaccattttttaaaaaaaaaccaaaccccttaaaaccaggggggaaaaccccttggaaagccccaactggattccttggggggggaacaaacccaaccaaattttcccccccccccccaaccaaaaatttgttaaaaaaaaaagggggacccaacccacccccgggccccaaaggggagggaggaggtttttttcctggttaaaaattccccccccccgaaggtccccccctttttttcaaaaacaaacccccgttaataacggttttttcttaaaggacccggggcccttgagggcccccccccggagaatttcctgggggaaaaagcccccaatgcccccccccacaaagggccccccccaaaaaacccaggggcccccccagggtttgtcctttttgaaaataacgggggccc

SEQ ID NO: 97093 - DNA, 2513 bp, Zea mays
  Clone ID: MRT4577_20062C.1
atcgctgttaaactcttgccaacgccaacgccaactgcttgctgtgcaattgggtgtgcttgctactgctcgctccccccgcggccgccctcgcttgctccgggcgccaccgtggggtcctccccccctgctctcccacacccaccctgtccttgtcgtccgctctgcgcaaccaaaccggcgaaaccgcccccctttcactccccctcctcctccagatccatccgcctctcctcgaaaccgtctctctgtgcgtccggagtccggggagagggtggcggcggcggagatggagagcctggcgcagcgcgcggcgctgctgcgggagtcgctgcagaagagccagcaggtcaccgacgccgtcgtctccatactcggctccttcgacagccgcctcaccgcgctcgactccgccatgcgccccatccaggtgaggacgcacgccgttcggaccgcgcacgagaacatcgaccgcacgctgcgctccgcggatgtgatcctcacccagttcgacaggacccgagaggcagagcgtgaaatacagaaggggccgcatgagaaccttcaaggtttcctagatgcagttgatcgcttgagaagtattgagcgtttctttagttcaaatcggagttaccgtagtagcgatggggtgctcaaccacgtaaacgcgctcctttctaaggcccttgtcaggatggagggtgaattccagaatcaattatcccagcgcagcaaaccgatggagcctgatcgtctttttgattgtcttccaagtacacttcgaccatcgtctgaatctcagcccgaaggtgggaaaaacccatccgagaatcagcaaaacccagaggctgttgtatatagtcctcctgctcttattgagccaaagtttgttccactactctctaaattagcacaacagttggttcaagctggatgccaacagcaatgctcagaaatatatagtgaagctcgttcttcagctttagaatcaagtctgaagaacttgggcgttgaaaaacttagcaaagatgaagtgcagaaaatgccgtgggaaattttggagtctaaaatagggaattggattcatttcatgcgaattgctgttaaacttctttttgctggggagcgccaactttgcgaccaagtttttgagtgcagtcaatcgttgagggataagtgctttgctgcaataacaaagaacagtttggctacactactcagttttggagaggctattgctatgagtaaacgatcaccagagaaactctttgttctgttagacatgtacgagataatgtgcgagcttcaaacagagattgataccattttcgttggagaatcaggttcgcaaatgcgcgactctgcactgagtttaacaaaatgcttagcacaaacagcacaaaagactttcagtgattttgaagaagctgttgaaaaggatgcaacaaagaatattcatactgatggaacagttcatcctttaacaagctatgtgatcaactatgttaagtttttgtttgactaccagtcaactctaaagcagcttttccaggagttcaaggaagatgggacaggttctgagctggcagctgtaacaatgaaaatcatgcaagccttacaaaataatttagaagcaaaagcaaaacaatacaaggatcctgcattgatgcacatatttttgatgaataacattcactatattgtcaaatctgtccgcagatcagaagccaaagatttgttgggtgatgactggattcaaaggcaccgaaggattgtacaacaaaatgccaatcagtatagaaggattgcttgggcgaaggtgttgcaatgcctctctggtcaaggtttgacttcatcaggtggtagtggtcatgtaggaagtgatggtggcaatagcagtggagcttcaagaacagctgtgaaggagagattcaggtctttcaatgtgttgttcgaagagatctaccacaagcaatgtggctggtccgttccagacactgagctgcgcgagtcactaagactcgcggtcgctgaaatcctgttgcctgcctaccgatcattcataaaacgttttgggcctctcattgagaatagcaaagcacctgggaaatacgtgaagcacactcccgagcaactcgagctgctgctaggcaatttattcgaggggaaacaagaacgtgcttgatagtttggtaccgcccgcagcaaggatgtgctgctcttctatgtaaaatacaaaataataaaaataaaaaagatctggaggccctgttagcgttagcattgcttgtgttctccccaatccttgtttagccgcattattatttgtacagaagaatatatgtgtcagctgtgccttgtgttgatctgatagcaggcgtgttcctggtttctttaatgactggcgttggtcattcgttcgggtggagcactaagatggcgacccatctgtagtttttgagatagaaaaatacttccccctcgtcgttatttattttcggatggtgtacgcg

SEQ ID NO: 97094 - DNA, 204 bp, Zea mays
  Clone ID: MRT4577_20063C.1
aattgcaattggaaaaggagaggctggaaaagaggcagcccgaagagaaagcaaggatcgaggcccaggtgaaggctgctgaagcagctgcacaacaaaagtttgaggaagaaatgaggatgaagagaagcaggaagggagcagcacgctgcacacgctgtgagagacgtgtatgacacaggctctaagggcggaactcagcaa

SEQ ID NO: 97095 - DNA, 1360 bp, Zea mays
  Clone ID: MRT4577_20064C.1
tttttttttttttttttttttttttttttttttttttttttttttttttttttttttttttttttttgacgagggggaagtatttttctatctcaaaaactacagatgggtcgccagtcattaaagaaaccaggaacacgcctgctatcagatcaacacaaggcacagctgacacatatattcttctgtacaaataataatgcggctaaacaaggattggcgccacatcagctgtatacttgactcccacggggagaacacaagcaatgctaacgctaacagggcctccagatcttttttatttttattattttgtattttacatagaagctgaagagcagcacatccttgctgcgggcggtaccaaactatcaagcacgttcttgtttcccctcgaataaattgcctagcagcagctcgagttgctcgggagtgtgcttcacgtatttcccaggtgctttgctattctcaatgagaggcccaaaacgttttatgaatgatcggtaggcaggcaacaggatttcagcgaccgcgagtcttagtgactcgcgcagctcagtgtctggaacggaccagccacattgcttgtggtagatctcttcgaacaacacattgaaagacctgaatctctccttcacagctgttcttgaagctccactgctattgccaccatcacttcctacatgaccactaccacctgatgaagtcaaaccttgaccagagaggcattgcaacaccttcgcccaagcaatccttctatactgattggcattttgttgtacaatccttcggtgcctttgaatccagtcatcacccaacaaatctttggcttctgatctgcggacagatttgacaatatagtgaatgttattcatcaaaaatatgtgcatcaatgcaggatccttgtattgttttgcttttgcttctaaattattttgtaaggcttgcatgattttcattgttacagctgccagctcagaacctgtcccatcttccttgaactcctggaaaagctgctttagagttgactggtagtcaaacaaaaacttaacatagttgatcacatagcttgttaaaggatgaactgttccatcagtatgaatattctttgttgcatccttttcaacagcttcttcaaaatcactgaaagtcttttgtgctgtttgtgctaagcattttgttaaactcagtgcagagtcgcgcatttgcgaacctgattctccaacgaaaatggtatcaatctcccctcttgcagccggcgacgcggaggactggaagcggaggtcggtcttgaactcttgcccgatctcgcggaccaggcgttggaagggcagcttgcggatgagcagctccgtgctct

SEQ ID NO: 97096 - DNA, 344 bp, Zea mays
  Clone ID: MRT4577_20065C.1
gctctgtgcgctcacacacgcgggttttcatcacccaactatacaatcctacatgcgtcaggatgatcatacaacaacatcatctaacattaactaactccttaacccaccaacacacctttaccttattgctccaaacctactacatccatctgtctttccacataatttacatcaatcatctccagaagctgatgtctaccaacatcaacaacagtattagcaccaacaataactgctactacaccacatccacacaacaacatcattgagtaagccaacttcaacataaccaactatcacaatgccatgtgcaacaacaccaacagttacatgaactacac

SEQ ID NO: 97097 - DNA, 295 bp, Zea mays
  Clone ID: MRT4577_20066C.1
aaagaaataggtacttatattgaatggcattccccttccacacgttatccgacgtcgtacgcatccttcctcccacacgttattttacccgtttccaacattattgatgcatgttaatttcactcgctaccctgaagttgccagcgccgcgagctgggcaagcaaagcatcgacgtgttgtggcttgacgaacttggacgacacgaccaccccatcgcatccatgcctcctcgccctgcgcggggggcacaccacacagcccggcaccattgccctcctgtcgggcctcagcagc

SEQ ID NO: 97098 - DNA, 495 bp, Zea mays
  Clone ID: MRT4577_20067C.1
aactggagtatctgcaactaatggactacacgagtgggcgctgacgaaaactgaggtcatagctgttctgtatgctggaattgttgcgtcttgtttgagctactcaatcatgacatgggcaaacaaaattcttggaccttctctagttgccctctacaatccgctccaaccagccttttccactgtcctctcaactatttttcttggtgacccagtttacatcggaagcattattgggggagtttccataattgttggtctatatctggttatctgggctcgctacaatgaagagcaacgagcacctatggatggttatttggaccctcttattgtggataatccaagaatccccaagacagaagaaatctccttcatatagatccttaaatgatcagcgaattaaatgggttgtgctcggtgaccttgaactaccgtcgacactacccttgtaacaaaactactctttctgcttaatgaaaaacatgctttggc

SEQ ID NO: 97099 - DNA, 553 bp, Zea mays
  Clone ID: MRT4577_20068C.1
atttacgccatgcctgcccaccctccttcccttttccttcctcttctccccagcgacgaggccgcccggagaccgagcgaggcatggaatccaccaccgacaggcaaggacaggaacaggaaaacggaggggaaaatgtcgacggcgttcagcgaagatgaaacgggccgcttcttcgggtgcctcggggccgccgccgccctcgtcttctcatgcatgggtgccgggaaaaggaccgctaagagcagcgtgcggcgagcggtccatgcgtgtgatgcggccgtagctcgtaatgaatcccatctggcccgcggtaatgcgtggtgagcgctgcatctacagactcatcatcgccgatatcatcaggacgcggatctaccgcaaggccgaagacctactacctcttggatggctactgccagctttgatcagcgcttgcctgtgtgtgctctgcaattgaagctgtgatggcctgccaaaatgacggtgaagatggagtccagtgagatgagcaacggacgaaagtcttccaagaaatgagcctcgtcctcct

SEQ ID NO: 97100 - DNA, 380 bp, Zea mays
  Clone ID: MRT4577_20069C.1
tgggtgtaccgcacgggggtgttcctgctggtgtgcgtgctgttccgcctcacctgcgagctccagatcctgcgcttcgagggcatctaccgcatgttcgacgtcgaggcgcgccccaccgccgctgagatcttcgcggagcaccgccgcatccgcacgcagctgctcgccaccagccaccggtacagggtgttcatcctctgctgcctcgtcaccatcaccatcagccagctcggcgcgctcatcgtggtcctctcgtcaagggacgccaagagcttctccaacaccggcgacctcgtggtcggctcggcggtgcagctgagcggcttcttcatgtgcctgctgggcgcggccaggatcacgcacagggcgcagaggat

SEQ ID NO: 97101 - DNA, 218 bp, Zea mays
  unsure (1)..(218): unsure at all n locations
  Clone ID: MRT4577_2006C.1
tattcggcacgagggtttggggctggtaagctggggatttggtgtgccgagctattccttgctcaattggatctcctccgcgcgattcgattcgattcgattcgggtcgggtcgttccaatcggggttttgctacttccgctgccaccggggtgctccgagctgctcaagctgggctcgggagacctnnctnttttttttnattcnnncnccaacacc

SEQ ID NO: 97102 - DNA, 906 bp, Zea mays
  Clone ID: MRT4577_20070C.1
cccccccgcgcgcccgctactgtcaattcgtcgctctcgactctggaagaggtggctaatgctgctaaggggaagagggcacatagggttatgctcactcgattgcttgctttggcaggccatgctttggcagagagaccaggcctgaacctaaggatttgtgggaagagccgataaatgctactttgtggcgaccgtgttctgaccaaagggattggaaagcctcagagggaaccaatggctacatcatgatcagtgcgaatggtggcataaaccaacaaagggttgcgatttgtaatgcagttacaatctcgcggttgctcaatgcaactcttgtcctcccaaaattcttgtacagtaatgtttggctggacaaaagtcagtttggcgatatatatcaggaggaatattttatcaaatatctgaaatctgatattcagattgttaaggatcttccagtagagctgcagtcattagacttggaggcgattggtagcctagttaatgatacagatgtcatgaaagaggcgaagcccagtttatacatgaaaaaaatactgccaattttactgagaaacagagttgtgcactttataggattcggcaatcgcttatcttttgacccaataccttctgaccttcaggtattgctccaactagttacgtgacgtaagttcattctggacactgaacagttctctttaacatcatttgggttgccatttatttgtgatatatctgtagactccttttaaaccttggccggtgggtaggtttttcccggccgccgccaccggattgcgatgcagatgtaattttcatgctcttcgttttgtatacaaaattcaagaaactggtgcagttcttgtagagaggttgcatggccatagggcctcttcgtcacct

SEQ ID NO: 97103 - DNA, 340 bp, Zea mays
  Clone ID: MRT4577_20071C.1
attcggctcgaggagagagttcaaggatttttgtttcagccgcacgtacaggagctaatgtcttgcggtgctgacatgggacactaacttgacgagctcgcccagctactggcaacgttgcgtgctctacatgaactgatgctgttaggtctacgggcttcaattggtgaaccactgaccagggaggttttacatcacctgcccgcctggggggatacgctctgcttgattggtggagctctaaatgttggcctatccatgatcccctgtgctgcgcccctggtgttgagatcggggcctgctgggaccttgcgagcgaggcgattttttgaagagaaaa

SEQ ID NO: 97104 - DNA, 168 bp, Zea mays
  Clone ID: MRT4577_20072C.1
gaagccacgacagacgcctctgctctgactttgctttttaaatctgatccacccatcgagacccccgcatctcagttggccttcctgcccggagatgctgaagcaggcagtggaacacagaggaggcttctctttcgagaactgccagaggaatgcgtccttggaaca

SEQ ID NO: 97105 - DNA, 209 bp, Zea mays
  Clone ID: MRT4577_20073C.1
gtggaagggccaggcacttccagctgtcctcgtcggtctgcatcgtctcgtcgacctccttggcagccatcgccttgaacctgctgttgctgctggagctcttgccatggtaagtcacggacgctgagacctgccgcttgttgagcttcttcccgatgaagctgctcctggtctgcgtggaggacggatctccgactgtggatgagaat

SEQ ID NO: 97106 - DNA, 1454 bp, Zea mays
  Clone ID: MRT4577_20074C.1
accgagcgcggattcgttctattcctatcaggacttcaacgccttatttgtacccgccttaccgcgcgccctaaccctaggccctcaattccactctgcccgagcaagccgaattgtcgtccgaattcgctcgcggggagcacttgctacctcgcgcccgccttctgtcgcgcggattcgttgctgcgcctggagatggacccgatggacatcgtcggcaagtccaaggaggacgtctccctccccaaatagttgtttaaaatcttctactgctgattgaactttctgctttgcactttagcaacaatgtttaagataattaaggagatgcttcctcctgatgtacgagtggcaagagatgcacaggatcttcttgttgaatgctgtgtagagttcatcaatctcctttcgtctgaatcgaatgaagtgtgcagcagagaagagaaaaaaacgattgctcctgagcatgttatcaaggctctaagtgatcttggcttcagagagtacattgaggaggtttatgctgcatatgaacagcacaaacttgatactttggattctccaaaagctggcaaattcactgggattgagatgacagaggaagaagctgttgctgagcaacaaaggatgtttgctgaggctcgagcaaggatgaataatggagcccccaaaccaaaggagacagaacaagagccgccacagcaaccacaagcacaaccccaacttcagctgcatactgaaccacagcaacccgtgcaatctcaagtgcagttgcattcgccaacacagcattccctccaacctcaagtgcagctgcacccccagccacaacagctcccacaagtgcaggtgcactctcagacgcagctgcaccctcagccacagcagccccaagtgcaggtccatccgcagctgcagcaactcccacaattacaggcccactcgcagccaccgcaaccccaagtgcaaatccaccacagccgcagcagcccccacaagtgcagttgcagtcatcagtccagcagacctcccaaccccaacctcaggtacatctctacaatcacagggggggctcacaagcgcagctgcagccccaactgccaggtcagctgcagacacaggggcaaaccggacctggcattgacagttagagactactgctggcatatactaggaacctgtatgcttgcttgtgactcgttagatcctgatttaggtttctgtgcttcctgtacaatgtaaatccagtgtgattgcagttgccttgttgctaataatgcgaaaccgttagttactgatgatgtccttactgtgtcgaatactgaatgtcatggcgtggcttatgtgccatgctgaatgatgttctgtggtcattgtaatagcctaacttgacatctgtccatgatgatagtgattgatttgaatgagctcttggtgcaaaaaaaaaaaaaaaa

SEQ ID NO: 97107 - DNA, 1395 bp, Zea mays
  Clone ID: MRT4577_20075C.1
attcggctcgagatttcactctgcccgagtttgccgaattgtcgaccgaattcgctcgcggggagcacttgctacctcgcgcccgccttctgtcgcgcggattccttgctgcgcctggagatggacccgatggacatcgtcggcaagtccaaggaggacgtctccctccccaaatcaacaatgtttaagataattaaggagatgcttcctcctgatgtacgagtggcaagagatgcacaggatcttcttgttgaatgctgtgtagagttcatcaatctcctttcgtctgaatcgaatgaagtgtgcagcacagaagagaaaaaaacgattgctcctgagcatgttatcaaggctctaagtgatcttggcttcagagagtacattgaggaggtttatgctgcgtatgaacagcacaaactcgatactctggttggtaccacttgttactcacagggctctgcatatcattccctctaatctgtgtactatgcttgacaccaatatgttttgagcaggattctccaaaagctggcaagttcactaggattgcgatgacagaggatgatgctgccgctgagcatcaaaggatgtttgctgtggctcgagcaaggatgaataacggagcccccaagccaaaggagccagaacaagaaccgccacagctaccacaagcacaaccccaacttcagctgcatactgaaccacagcaacccatgcaatctcaagttcagttgcattcgcaaacacaacactacctccaacctcaactgcagctccactctcagccgcagctgcaacccctcagccgcagttgcccccacaattgcaggtccatcagcagctgcagcaacccccacaagtgcaggtccaccagcagcccgaagtgcagccccaagaagcgcagttgcaatcatcagcccagcaaacctcccaaccgcaacctcaggcacaactacaatcacaggggcactcacaagcgcagctgcaagccggactgctgggtcagttgcagacacaggcgcaaaccggacctgacatggatagttagagactattgtgtagcctgagtataagcaaaaaagggaaaaaaaaccaggcacttttgctgcatctactagaaacctgtatgcctgcttgtgactcattagatcctgatttaggtttccgtgcttcctgtagaatgtaaatgcagtgtgattgcagttgccttgttgctaataatgcgaagccgttagttactgatgatgtcattattgtgtggaatactgaattcgtgacaagtgtcatggcatggttttatgtgacgtgctgaaagatattccgttgccattgtaatagccgaacttcgacatttgtccatggtgatagcgactgatttgaatgagttcttgctgc

SEQ ID NO: 97108 - DNA, 120 bp, Zea mays
  Clone ID: MRT4577_20076C.1
cgcggaattcggttcgaggtctatttattacaccccgcattgttagccccccactaatgcctctaatagggggggatttttaaaaggagcaccggggaaacaacattaaagtgaaggttt

SEQ ID NO: 97109 - DNA, 1527 bp, Zea mays
  Clone ID: MRT4577_20077C.1
ccggccgggatagctctactcctatatcttagtggtgacaatttccccgtgcggcagccagaaaactgcactcgaatccgagcagccacaattgtttttatgacaaagaaaaggaccggccgggccggtccggatatcaacccctcccctcgtattaggccccacctccccgcgcgccctaaccctagcttctcgattcaactctgcgcgagacgaattctctcccgaattcgctcgccgaaagcacctgctacctcgcgcccgccttccgtcgcgcggattcggtgccgtgcgtggagatggacccgatggacatcgtggggaagtctaaggaggacgtttccctccccaaatcaacaatggttaagataattaaggagatgcttcctcctgatgtacgagtggcaagagatgcacaggatcttcttgttgaatgctgcgtagagttcatcaatctcctttcgtctgaatccaatgaagtgtgcagcagagaagagaagaaaacaattgctcctgagcatgttatcaaggctctaagtgatcttggcttcagagagtacattgaggaggtttatgctgcgtatgaacagcacaaactcgagactctggattctccaaaagctggcaagttcactaggattgagatgacagaggaagaagctgttgctgagcaacaaaggatgtttgctgaggctcgagcaaggatgaataacggagcccccaagccaaaggagccagaacaagaaccgccacagctaccacaagcacaaccccaacttcagctgcatactgaaccacagcaacccatgcaatctcaagttcagttgcattcgcaaacacaacactccctccaacctcaactgcagctccaccatcagccacaacagctcccacaagtgcagctgcactctcagccgcagctgcaaccccaagtgcatctgcaccctcagccgcagttgcccccacaattgcaggtccatcagcagctgcagcaatccccacaagtgcaggtccacgagcagccccaagtgcagccccaagaagcgcagttgcaatcatcagcccagcaaacctcccaaccgcaacctcaggcacaactacaatcacaggggcactcacaagcgcaactgcaagccggactgctgggtcagttgcagacacaggcgcaaaccggacctggcatggatagttagagactattgtgtagcctgagtataagcaaaaaagggaaaaaaaaccaggcacttttgctgcatctactagaaacctgtatgcctgcttgtgactcattagatcctgatttaggtttccgtgcttcctgtagaatgtaaatgcagtgtgattgcagttgccttgttgctaataatgcgaagccgttagttactgatgatgtcattattgtgtggaatactgaatgtcatggcgtggcttatgtgacgtgctgaatgatgttctgtggtccattgtaatagcctaacttcgacatctgtccatgatgatagtgattgatttgaatgagctcttgct

SEQ ID NO: 97110 - DNA, 384 bp, Zea mays
  Clone ID: MRT4577_20078C.1
aaacgcccgcaggggaaatagccctttttattgacaacgaacgggggggaagggtaaaccttcaatacagggcttttttatatccaaaacaccggccaatcgggaactccttattagcataatacaagggggatataaccccaaccggcccaaaaatcccttgcatagctaaacaaggaaaaagggggctggtcgtcccatgtttaaacaaagggggctgggggttatgatccatcccggccaacacgagaaaaaagatttgttccgggaacaaaggccataaaaaattgtacattggctacatgggaccaacttaatttttttcctcacgaaacaccccaaaggaaaagggggcgaacttgtaaccatcacctttataaaact

SEQ ID NO: 97111 - DNA, 482 bp, Zea mays
  Clone ID: MRT4577_20079C.1
taccgggcactctctacgagtttttttttttttttttttttttttttttttttttttttttttttttttttttttttgtttttttttttttttttttttttttttttttttttttctttttctttatgttttttttctttttccgggggggccgaagaaaaaaccccccggaagcaagcgaaattcttggcccacgggagccgccacaggacgtaaagaggaggaacaaaattggaacggggcccagctccagaaaaaaacggggggacggccgggcggccctcaccccaaaaaacggaaggacccgggctggggggaacaaaaccttaacacgccccccttccaggcgggggggaggggggggccccccacgaacccacccggaagccccaaagaaccccccaggggggggccctgccccaaaagaccgcgggggccaggctcctcgcagggttgcccccaaagccggccccccccaaaaa

SEQ ID NO: 97112 - DNA, 416 bp, Zea mays
  Clone ID: MRT4577_2007C.1
tcctaaaccaaaatctccttaccctttatcaattattatcaaagtggaaatttttaaaaggttttgcggtttccccccaaaaccaaggagaggggggcccccccctcggggggaaaaaaagggcagggtttacaacaacccaaaccctttacaggaaaacggggggggggggtttttcccccaaaaaaaaaaacccgcccccccaaaaataatttttcaaaaaaaaaaagccccaaaaagccgccgccccaaggggatggggggggggaagaaaacccccccccccgggggggaaagggccggccccacgggcccacccatcccggggatatttccgggaaatggtttgtttttggaggaccccccccccgggcccaagggcgaggccccccccccaaacccaaaggggggggggg

SEQ ID NO: 97113 - DNA, 467 bp, Zea mays
  Clone ID: MRT4577_20080C.1
ttcgtttagaactaggagcacatacccttgtctgctctgcctttatataatgatggtgagggacagcgccaatatcttccccaggcctggacggtctctgtttaaaacccattatctgttaggacaaaggttcgcaccatcaaggtaggtcacctcttgttgtgcaagggtaaataacaactgtaggttctttggttagttgtagatgccatctttagaagtcttaacaggtgtatattttgtatatagatcattacagcttgacaaatataacttagaaaatgatttgcgattaagtgagtagtttttgtgtttaatatagatgtttatgttttgctgtatgaactaataggtgtcccattttttattaataatatttaccaagatttttcttttgtatttcttgccatcccatggaagctgagctaactcaatcggctaagggtggggatgtacactcagatcac

SEQ ID NO: 97114 - DNA, 661 bp, Zea mays
  Clone ID: MRT4577_20081C.1
ggtccggaaaattcccggggctacaaacaggtaaattgcatagggtgtggcggataaaaaaaacggagcacgtcactcatgtgcatggcaaggtgcctcgggtagcaggcaggggggaactgtgtctatcttcatggcatggcatgcgcatgagcacaggcgtgcatggcacggagcattggcatggctggccagcagggtttgggcgctttttgtgagcatttcggaacatgcgttgtgcggttgaaccttcccggatctgtcctgcctgcacggcatggtatcccacacgatgagagagcaacctcctccgcctgtacggaggtgtagatacagttttctcttgttttttcatgtgtgtgggcctgttcgcctgtacgaatggtgaaggtaaacagagagtcgccgctggattagggagacgcccgtgtacttgctgctggacgctgatctgttgcttgctgctccacttgtgcgcacaagtagggagtaaagatccagatcccgcgctcgtccatacgtgtttgttgtacctgccccccgtcccacgctggggaaagctgggagttgtcgagcgcggtgtcacatgattggaagatctgtgtctccttcatatgccccgtaatcattgtggatcaagattacttccagcagctggtca

SEQ ID NO: 97115 - DNA, 430 bp, Zea mays
  Clone ID: MRT4577_20082C.1
gccggccgggttcgcaaatccgagtgtgtcgaataagcctctcaatctcactgtcacccaccaagcgcgtaccccactggagtcaccgtacgccctcccccggatagctgatggctacggaggtgatggggacgcatctgcgcgtggacgacggtgccgacctgcccaacgcgatctacgtgtccgtccgcgtgaagggccactacgtcacctccggccgcgtgtcctacgtgacccggcgacgacctacgtgcgacttcgctggtcgcgagggcaactgcgacctcgggaatatgtgcaaggacgaggtcgacgactaccgggacctctccgttgctcatcgagaaggatctcggcgtcctcggcgactgggataccaatgtccatgtcaagtacgccgccgtcgccctactcgatgacgacgactgag

SEQ ID NO: 97116 - DNA, 1067 bp, Zea mays
  Clone ID: MRT4577_20083C.1
aaaaaggaaagctgctcgacaattaacaagccccctacatcagcatcagctcaagctgctcaattcaaattaacacactgatccccacacccacgccaggcgccattataccaactccatccaaccggctgcacctaaacctctccaagaacgcgccaataaacatcccctaaatctcagccacaagtcaccacacaagatctcacgccgaggggcgatccaaggcacgagagaccatgtcagcgtcgccggagaacgtcgtcgcaggcggcagtggcccgccggtcgcgtggtggagcgcggcctcgccggtgggcggcgacgtcgtcctctgcagcgtagccctcctcttcgtcgccctggccttggcgttcgtcctgtaccactactccacggccacggtcagtcgccgcggcggcggcgcgggggtggggggcggcgccaacgagcgcccagcagcaccagcagcacggcacgctgggacgaggacgcgacgccaccggcggccttgacccgtcggtgctccgggcgctgccggtgacggtttacgaggcgaaggacgaccaccgggcaggcgaggcgctggagtgcgccgtgtgcctcgccgagctcgccgacggcgagcccgccaggttcctgcccaggtgcgcgcacggcttccacgccgagtgcatcgaccagtggctgcgcggccactccacgtgcccgctctgccgcgtcgacgtcggcctgctccctgcgccggcgccggcggccgtcctcggccctccctccggcgctcccggcgcccgccacctaccccacggacctgccgacgaacgtcctgttctggggatcccagggcgcggtcaccgtggcgagggcggcggtacgcagcggcccgagcgctccccgtggagcgccgccgccgctggtcatccatgtcagggaaacggcaccggcaccgccaccgcctccgccgccgcgtgaaggcggcgcggcaaaagcgcagggcttggcgcggctgagttctctcaggcggctgtggagccgagggaggcatgacgacgctgcggctgcgaccaccc

SEQ ID NO: 97117 - DNA, 543 bp, Zea mays
  Clone ID: MRT4577_20084C.1
caatgagataacagttttatttacatccttttccatttaatatatcacatcttcaggatgggtggtagtaacctgttaaaaggctttgctcattctcctcaggctacggttataagatcccagagtagcagaagctgttggtctgaaagctttcaagtgggggaagaaccgtggagattgtggagattctttgacttgacgtacccctcaaacaccattcatacacaaataagtgcttgtcttctagctagacacaggctcaattagtttttcaaatactctcaccctggcaatatgttacttgggaaatctgagacagaattgctcaactcagtcattaacttctgtcgtcaatatgtacaccttgactgccaaaaacagcaacttaaatttcttacagaatgcaccattggaaaaagctaaaaggacaaaagaaaaaaaatgcattcagaatatgttttcttaccgtaatagtttctaaactggtatcagcctgtaagtagttatgagcaatagtagcatttatgtttcccccttgcctga

SEQ ID NO: 97118 - DNA, 461 bp, Zea mays
  Clone ID: MRT4577_20085C.1
gttctagatcgcgagcgggcgcccttttttttttttttttttcatttaaaaggtcatagtttcatagaaattattgtaacatgtctactgtcgtacatacattgaaacagagagagttgctcacaagacataactgtgcactacttcagtccattgcccatttcccaactactctttctttcgcagacattccagccttttctttcacaggcactccagccacattgctaaggccaagggtacttgactttggtccagacctttcaaccaatgcgccctggaaaacacagtaagctatgaaggagagtatgcgccgaatctgccgcagcacaagcaacaacgaattgataacagaagccaccagtatattgaagtttgcaatcaggaaaaacgccgcgataatgccaaggattgtaagaacagtttgttttgctgcatcccagaaaccttcaccagtaagc

SEQ ID NO: 97119 - DNA, 425 bp, Zea mays
  Clone ID: MRT4577_20086C.1
gacaaattttgaccggccaaagcatgactgttttttgctttgtctgcacggacctagatttcattggcagatttgatctcagtgttatgttatggtatgaattgaagggcaaagtaacagaactgaaaacgcactgctatgtagtgtgagagaaactatgaatgaataagtttatttttgctttgatttcctctcctgtgcattttttgaatcagagattcttctcaatcttgcaggtgattaaattaagtatacaaaatggtgttccgtcggagtacacagatatgatctttcttcaaacaaatctggataaagtagaaggaacacaaaaggtcaagcaaaaactgaaaggacacaaaggcagagatgagcaacagatttatggcctgaaactgggattcggtaacaaagatgctacacgggat

SEQ ID NO: 97120 - DNA, 542 bp, Zea mays
  Clone ID: MRT4577_20087C.1
ggccgcttttttttttttttttttctttttttttttttttttttttttttttggtttttttttttttttttttttttttttttttttttttttttttttttttttttttttggaaggggggaaggaaaaccggcccagttcaaagaaacggaaatggaaaacaaaaaacccgggggccaaatggcagacttttttgggacagaggcccaaccccccaccctaaccggaaacacacccacattttgttacatgatgggggccccaaaaaggcacccaaaacaaaactctttaagtaccaacgggttaacccctacggggccttacaaaaaaattcacttttagccaagttaggggcccacagctcctaatcaaaaaccaaagaacccaggcttaggcgccctttcctttccaaaggtttcgaagaatgggaaaaagatggccacagggggcaaaataccagttccggaaccaatcgcccccaggaaaacagccaggacggtcaatgccccaaggcatacaccaccaaatgcctcagcgggggg

SEQ ID NO: 97121 - DNA, 319 bp, Zea mays
  unsure (1)..(319): unsure at all n locations
  Clone ID: MRT4577_20088C.1
tagcaggcagcanccatttccaatgtcttcaccctcgacgctgtctccaatcagaacttgaannatggttgctgggtcatgatctncntcaangtgtattatnttactaactttttcgtagaccacctcaaacgtgattatcgtctggtggcctcaacttgcaaggatgctacttattatttcgaggatgtctgtcacagcaacactgccctcgcgattattgatgagtacttcgggggtgaaatctactcttctaccatcccttccaggactaagtatgttccccctaaacaacctcactacaaccaggacaagactc

SEQ ID NO: 97122 - DNA, 1368 bp, Zea mays
  unsure (1)..(1368): unsure at all n locations
  Clone ID: MRT4577_20089C.1
gtcatcaacgaacaaaggcacagcgcacctcatttattacgaaccccctctgtgccactgcccactgccacctcaaatccccgcgaacctatctttcccttcccccgatccaggcggttctcttcccagaagccagcccagaatggtgggatccgacgcgctgcagtccatcgtttacagccgtgggtcactccgcctcctcgatcaggagttcttgatggggttttcactctgagttagtttcaattcgacgcagaggaagctgccgctcgagatggagtacatcgacgtcaagagttccgccgatggctggaatgcaataagagacatggttgtccgtggtgctccagcaatagccatagcagcggcactagcattagccgttgaagtttctgatttagattttattggtacgcctgaagaagcagcttcttttgtttcaaagaaattggaataccttgtatccagccgaccaactgcagtgaacctatctgatgctgcaacaaagctccaaactttggtatcaaaggcagctgaaactgcaaaagattccaagtctatctttcaggtctacattgaggctgcagagacgatgcttgttgatgatgtggcagataataaagctattggctcacatggagctgtatttcttcaaaggcagcttgcaaattcaaaaaagatatctgttctaacccattgtaatactggcagtcttgcaactgctggttatggaactgcccttggggttatacgcgctcttcattcggggggagttttagagaaggccttttgcaccgaaactcgtccatttaaccagggatccagacttacagctttcgagttagttcatgaaaaaatacctgcaacactgatagcagattctgctgctgctgcgttgatgaaacaagggcatgttcaggctgtcattgttggtgctgatcgaatagcagcaaatggtgacacagccaacaagattggcacatataacctcgccatctccgcgaagcatcatagcgtccaggtctatgtggcagcgccggtggtctgggaaagcaagttgctgcatccggtatatcagtctggaacccagctttcgatgttacttcagcaaatctgatcactgcaatcataacaganaaagggtgtgatcacaaaaactgatgctgatggatctttcgacatcaaaggattccttctgcccgcaaaataatactctctagcgtggcttccattctgaatgacataaatgtctggatcaacactggttggattctgttttctctattatacacaataataaagtcatgtccctctcataggattttgaatcctaaaaaaaaaaaaaaaaaaaagggaaagcgacgagca

SEQ ID NO: 97123 - DNA, 349 bp, Zea mays
  unsure (1)..(349): unsure at all n locations
  Clone ID: MRT4577_2008C.1
agcgtccggncccnncgccaagccccggcgggggcgcgggggacagcacccgcacccacaagaggccacaccgaacgggcccngggccgcgccgcaggcgaacccggccgaccggncggggggagncccccagcaaggcggggcagagcaggcccaagggccagggacagaggccacacaacaggaaccagnnagcagcggcgaggggagagggcngcnaggcaccaaccacacgcaggccccccacccacaagagcccaacagaaagcagnggggcnccggcgggngaagagaacgnacaggacgcggggcagcaaaacgcaccgcaaagacaagccgcngggaggag

SEQ ID NO: 97124 - DNA, 482 bp, Zea mays
  Clone ID: MRT4577_20090C.1
gggactcgtggttcgtaccaagactctagagtaacgtcgtattaactcgccttttctcatctccctcaagacacacaaagcataccctacaatggccgtcactctccccacccctactcacgctgacacccaggtgctcagcaaggctgtccagtctaaggactcgacctacaaattcctgtactttggcctccacggccgtggcgagttcacacggaccctcctcaaatatggaggcgtcaaagttgaagagctgacagctgactggcccgctcaaaagtccctcgttccattcaggtgcctccctgttgtctatgagaccactacagacggcactgtgctcgagctcgcagagtcggcggccatcgagcgctatttgtccaagaagttcaacctcttgggacagaacgattacgagaacctcctgcttgatcagtacgtctcttccacggattctctcgcccagaccttcagcgtcaaga

SEQ ID NO: 97125 - DNA, 448 bp, Zea mays
  Clone ID: MRT4577_20091C.1
gcgttcggacgggacgcgcttgtaacactaacgcgctttgtttacctacatcagatattcgactaccagtgagtctttaacataccgggactactagcataccttgcctcactttccatctattctatgaaaacctgcgtactgaactaggactctagatactagctctcattactacattataccgctcaatatgcatggcctaatgacagttaaacaatcatgcaaacatcatactaactcacattctacatgatccaaacttacgaactcattcattctaaaacataattttaatatactgccactttagatgaacccactttacgtactcatacatcctacttactagcaaatccctggcgtcacccaacttaaatgcactgcacgacatactactatctccagactgcgaaatatctaacattacccaacttattgcccttgc

SEQ ID NO: 97126 - DNA, 521 bp, Zea mays
  Clone ID: MRT4577_20092C.1
gcggttttagagaaggccttttgcaccgaaactcgtccatttaaccagggatccagacttacagctttcgagttagttcatgaaaaaatacctgcaacactgatagcagattctgctgatcgaatagcagcaaatggtgacacagccaacaagattggcacatacaacctcgccatctccgcgaagcatcatagcgtccagttctatgtggcagcgccggtaacttccattgatctctccctcccatctggggatgagatagtcatagaagaaagatcaccaaaggagttgctgaactctgaaggtggtctgggaaagcaagttgctgcatccggtatatcagtctggaacccagctttcgatgttactccagcaaatctgatcactgcaatcataacagaaaagggtgtgatcacaaaaactgatgctgatggatctttcgacatcaaaggattccttctgcccgcaaaataatactctctagcgtggcttccattctgaatgacataaatgtctggatc

SEQ ID NO: 97127 - DNA, 384 bp, Zea mays
  Clone ID: MRT4577_20093C.1
atgtctatcattcacaaacacaccaagcgaaacgcactagcaacaacctaccatcaggggctaccaagatattacccctgcttgcgcttcttgcccttttagtgagcgcaacaaatgcgttgattattccacagagctcacttgctcctagtgccattatgccacagttgctaacaccagatacgttaatgggctataaacatccagccactgcaagcctacatgctaacaatatcgcttgcggtgagcgtattacaacaaccaatggtccaactgcaacaacaatacttggcacatataatcctacaaaccatcacagcgcagcatgcacaacagtttctgacatcactgacccacctagccatggtgaaccctgtcatctac

SEQ ID NO: 97128 - DNA, 1829 bp, Zea mays
  Clone ID: MRT4577_20094C.1
ctcggggcagctcgggattcgatcccgaggcaaacgaacaaaggcacagcgcacctcacttattacgaaccccctctgtgccactgcccactgccacctcaaatccccgcgaacctatacttttccttcccccgatccaggcggttctcttcccagaagccagcccagaatggcggcatccgacgcgctgcagtccatcgtttacagccgtgggtcgctccgcctcctcgatcagaggaagctgccgctcgagatggagtacatcgacgtcaagagttccgccgatggctggaatgcaataagagacatggttgtccgtggtgctccagcaatagccatagcagcggcactagcattagccgttgaagtttctgatttagattttattggtacgcctgaagaagcagcttcttttgtttcaaagaaattggaataccttgtatccagccgaccaactgcagtgaacctatctgatgctgcaacaaagctccaaactttggtatcaaaggcagctgaaactgcaaaagattccaagtctatctttcaggtctacattgaggccgcagagacgatgcttgttgatgatgtggcagataataaagctattggctcacatggagctgtatttcttcaaaggcagcttgcaaattcaaaaaagatatctgttctaacccattgtaatactggcagtcttgcaactgctggttatggaactgcccttggggttatacgcgctcttcattcggggggagttttagagaaggccttttgcaccgaaactcgtccatttaaccagggatccagacttacagctttcgagttagttcatgaaaaaatacctgcaacactgatagcagattctgctgctgctgcgttgatgaaacaagggcatgttcaggctgtcattgttggtgctgatcgaatagcagcaaatggtgacacagccaacaagattggcacatacaacctcgccatctccgcgaagcatcatagcgtccagttctatgtggcagcgccggtaacttccattgatctctccctcccatctggggatgagatagtcatagaagaaagatcaccaaaggagttgctgaactctgaaggtggtctgggaaagcaagttgctgcatccggtatatcagtctggaacccagctttcgatgttactccagcaaatctgatcactgcaatcataacagaaaagggtgtgatcacaaaaactgatgctgatggatctttcgacatcaaaggattccttctgcccgcaaaataatactctctagcgtggcttccattctgaatgacataaatgtctggatcaacgctgttgtattctgttttctctattatacacaataataaagtcatgtcctctcataggattttgaatcctaccgcgacggtgtaagttttatggataggagatcgatgctagggtgtgtacccctagcgctgcatatgagccgtgttttcacacgagcgggcgagtgaaaaacagatgtgggagatgacctctgaggctaaggggatgtttgatttttagaaactaattttttagtctctttattttattttattttagttcctaaattgctaaatatggaaactaaaatagagttttagttttcgtgtttgataatttaggggctaaaaaaaaataaaataaaatggaaggattaaaattagtctctagaaattaaaccccccctaagcaagatgattgtcttgcttgctttcaaaataataccattatctctatattataaaaaaaaaaaaaaaaatcctaaaaaaaaaaaaaaaaaaaaaaaaactcgagagggggcgcggtc

SEQ ID NO: 97129 - DNA, 328 bp, Zea mays
  Clone ID: MRT4577_20095C.1
gtgatgatagtgctaggagcgccgtactcgctcgattcgctcagctgagtctgacgtgagcattacatcgagtgcatttgcaggttccatgctgggctatacgcttcgacatctggcgcactgacatccacttggggcctctgacgtcaagtgagggaatttgactttcccttctactctggagagggtgacatctacaccctctttcactttaggtgcggccacatttaaggctacttctgacatagagatcctacaggttccggttttcccggaaggactgccaagcctagcgccttgcaagggtccctctaggtttgggggctct

SEQ ID NO: 97130 - DNA, 217 bp, Zea mays
  Clone ID: MRT4577_20096C.1
aaaagcgggtcatagagaaaattatgcttgctacaggccattatgaaaaatgcacatatacaaacgcacacaaacagaaacgaggaactttttatgatactctgtactgaattattaaaattgattattgcattctgcatggttttgtgaattaatgaggttgcttatgtaatggtgtccctaacttgcagtggcatacgaagttgctgttttggtg

SEQ ID NO: 97131 - DNA, 634 bp, Zea mays
  Clone ID: MRT4577_20097C.1
tctcgagatacttcactggcaccattcgattctgacgccgtccgcttcggccgacgccgccttatctccctccgcatcaccagtcgccaatctcctgagcagaagtggaagcggcccttaggcaaggtaaccaggtgccgaatgtggcatccgatgacgcctgcttagggcgaatcctctcctccatccgaggcatgccctacttgcccaatgcacaccatcgtggtccatgacattgctaacaccatgctcaatacccacgagtaccgggacaccatcaaccactgaggcgagagaaatgatgaccaaaggatcaccccggcagccgctgtataatatacacgatccaactccggacctcctatcgcactcagcatagaggacaaactatagcgtatgacagaagcctaacatgttgccaggcgagagtgatctcacggggaccatatctttgcaatatggaactgacaagatagaaatgcctgtctgaactgaacagatcaacgaccgatctctatgcaccaatgatattattgctaccggagcaacactatgcgaaactgacaaacataatgaacggtcctagccacgttgtacaacgtgcttgctgcattgaatcggcagaaatgaaagt

SEQ ID NO: 97132 - DNA, 400 bp, Zea mays
  Clone ID: MRT4577_20098C.1
aaagaaaaggggccccagggcccctcccatttttattcaaggggcacccccccatccagaaaacaaggggggccccccaccggatgggacaccaaccaccccccccacggttccctttaaaccggctcaccggaaccctcaaacagcccataaaacttcaaaaggccacccccataccaatgaggaaacaagcccttgacagggggggtaaccttacctttggacccaaaaaccaatgcccaccccccccccccaaaaaaaaacaaactttttttttttcccctccgggagggaaaaagaaaaacaaaagaatgggcaggggaaaaaacccacccctcggggggctccctttgcctaatagaacaacaaggtttggggccgccgggccacatcattgggg

SEQ ID NO: 97133 - DNA, 832 bp, Zea mays
  Clone ID: MRT4577_20099C.1
aaaaattcaaaaaaaaaaaaaaatgccagcgcttcccgcttttcccctcacccgccgcccatccgatgccagacgccgcggtcgcctcgtcctttccctcgtcgtcttcgttgctgtctccgccgccgcagccctcgcctacctatctttcccctctgccgggcggacatcgcccccggcggtccggacggaggccgactgctgcaggggtatggagggcctcgagctctggggcccggcggtcaagtggggctcagaccaccgcctgccctccgccgccgcctgctgcgccgcctgcaaggccatgtgccctcaccctaaggacggggcctgccgctgcgactcgtgggtcttctgcggtgacgagcgcaaatgcaaggacaggctcggggaggggattgtggggcttgaaacaaatttagggacacttcatattcaattgctgcctggttgcgcgccccgttcagtggaccacttcatcgagctcctgggcttgcgcaactgtgctggatgcagattttatcgtgcagaaggacgtgggaacgtctgggatgcaaaaggcgaccatgaaaaaaatgttgcatttggccccccatatgcattgcttcaaggaacactggaagttgatggtgtgcccttcaagaagataccaagagaagcatgtccggcggtgaaaagagggtccgttgcctgggtagggtcagggccagagttcctgatcagcttagcggaccacgaggagtggagggacgcctacaccgtgttcgggaatgtgcttccatgggacatggcgatcgctgaggagatgacactgctgccgacaagcacagac

SEQ ID NO: 97134 - DNA, 145 bp, Zea mays
  Clone ID: MRT4577_2009C.1
tgaactcgaggttctcccggccggcgttccactcttcgatccaccggtttttgtgcacctccatgccccctgttccatctcatctgtgtgcggcttttgtttgtgctgtgtcatctacctatctaatccatctatgctatcctct

SEQ ID NO: 97135 - DNA, 369 bp, Zea mays
  Clone ID: MRT4577_200C.1
gggggggggggggggggggactatccggaagatagatgcgagtggacactatagtcataataggcatctgccgacagagggatacgataggcctactactataaatattggacactaagatacattacaccgactcttcgactacgaggtaccgataactgaggtttaggagcccaatggttaatgtcattgatagtatacatggtcggtgccggatgcactgttaagtagtacttcctgcgagcgaagcggcgcggtatacagtatcaacgctacgcgttacagccaagtgttaagtgactggttatatcttacctatgtggtttccggcggtaaacaatacattagtgcgcttaggggactcgtgat

SEQ ID NO: 97136 - DNA, 462 bp, Zea mays
  Clone ID: MRT4577_20100C.1
cccccccctttttttttgtgtattgtttttttttttttgttgttgttgttttgctacctagcttgtttgtttactcatttagcggagaagagtaacgcagtagaaaccaacaccatgggtggcagggggagcaaagagcggggggaaacactgcaacgcaaggggaggggggaaaaggaaaaaagagaggggggaaaaagagaaaaaaagcgagaaaggaaagtaggcagggggtccatgaaaaaaaaaaagaaacttggggggggggaacctaagggggaagtcggcaaaaagccaaaaaaaggggggcgggggggggtttcattgggagggcccaaatggcccaaaaggggggggaaaaaaaaataacggggcgacggttaaaaaagttttaactgaaaaaacccggggggaacccaactaaaaggccttgaaaaaaaacccccgttgcccagggggggg

SEQ ID NO: 97137 - DNA, 1376 bp, Zea mays
  Clone ID: MRT4577_20101C.1
actgctttttcggtctggtggaacgtggaattgcggccggccgggccgggagacctgggcgggtaaagcgtgaacgcctgtactcctgaagcgagtcgacgcaacacgccgaggcggtggctgcggcggcggcgcgccggtatttcgattgtgaattccctcctgtctcctgaagcaagcgcagcaatgccagcgcttcccgcttttcccctcacccgccgcccatccgatgccagacgccgcggtcgcctcgtcctttccctcgtcgtcttcgttgctgtctccgccgccgcagccctcgcctacctatctttcccctctgccgggcggacatcgcccccggcggtccggacggaggccgactgctgcaggggtatggagggcctcgagctctggggcccggcggtcaagtggggctcagaccaccgcctgccctccgccgccgcctgctgcgccgcctgcaaggccatgtgccctcaccctaaggacggggcctgccgctgcgactcgtgggtcttctgcggtgacgagcgcaaatgcaaggacaggctcggggagtgctggctgaagaaacagaaggatgtcatggcccctgctgttattgcaaagggggaggacgtcatgtggacttctggtctaatctttggaaaaggagaggggattgtggggcttgaaacaaatttagggacacttcatattcaattgctgcctggttgcgcgccccgttcagtggaccacttcatcgagctcctgggcttgcgcaactgtgctggatgcagattttatcgtgcagaaggacgtgggaacgtctgggatgcaaaaggcgaccatgaaaaaaatgttgcatttggccccccatatgcattgcttcaaggaacactggaagttgatggtgtgcccttcaagaagataccaagagaagcatgtccggcggtgaaaagagggtccgttgcctgggtagggtcagggccagagttcctgatcagcttagcggaccacgaggagtggagggacgcctacaccgtgttcgggaatgtgcttcccatggacatggcgatcgctgaggagatggcactgctgccgacaagcacagacgtgtggagcaacgtgaaagtgaaggtgctgaaagatcctgtctacttcaaggtcaagagaagcagcaatgctagcgctgtctaggtgatgggcatatttcttcttgcttgtttggatggaaggctgtggcaacaccggcaaatggttgtttgaccatgaaaacctgtgttataactcacaggagacgatggtctcgcttcattgtgcaaagaaaggggagagttctaatacaacagtaatatactagcacagtagtaatatactagtacaatactcctagt

SEQ ID NO: 97138 - DNA, 382 bp, Zea mays
  Clone ID: MRT4577_20102C.1
ataggcggcggcccaacctaaaagagcggacaaccccataagaccaacgggccaccaacaataccggcgcggttttacacccccccaatgaaaaaaccgcgggcagacaccaacgggggcaaaccccccccggggagaaaaaccaagggggtgccaccaccgggggacaggacactggagtacacaaaaaacaaacattgaccccccgggggtacccgaaaccgggccccccagaaacccaagggggttcgcccagaaggtcgcgccccagccgccacccaagggcgaagggaagggcccccagaaaaccaacgcctgttgagaaccccgggggccactaaaccggcccccaaaccccaaactctcaagaacaacccagatg

SEQ ID NO: 97139 - DNA, 847 bp, Zea mays
  unsure (1)..(847): unsure at all n locations
  Clone ID: MRT4577_20103C.1
agttttcgaccctttagaactgatttggtgataggggatacataggaagaaatctgcttgctatttaatttgaatagcaagagaatttgtcatcccctaatttcatgtttaccaaagccctagcttataaatataagttgcacgagcaattgcgatgtctaacacacaatcaaacaaaaactatagctgaatgtatgtgaaagatgatgacacaggttctggagtgggcccaacgccgcatgcatcggccgcacgtcagggagcatgccagtaggcatctttgagctccctgctcaccgggaaacctccatttttgcaccatgagccatacatacagctctcaagtgaagaagagggaggattaaatctgtgaaagcaaaagtcctgctggtcaacaaagactaggtcgtctattaggctagcaaagtggagtaaatacacttattaattagctactgcctacacggcaatgcatgcttgattgttaattctgttggctgcatttcgattgtgaacagaatagcaacgacggcaatggcataggcaggaggatgtgatggcatgcatctcggtcactcactatagaaagaaaaaagattacctgcatgctaacatgcgtcgcttacgtgctaatggcgggcgtcacgccgtcacctacacctacctaccatctaatgtggcgtcagctacgtcttctgtgtccgcgtgcgctgggacgatgaggacggcggcgccgtcggtgggttgggtcggaacggctccgttgctcccaccgtcgccgcccgcgcgtggcggcgacgccggtggcgtgtagancggtgtctccgtctcccctggtggcgaattc

SEQ ID NO: 97140 - DNA, 201 bp, Zea mays
  Clone ID: MRT4577_20104C.1
gttcaatcaaatgtcgaaccactagtctaccagacgtacacgaccaggcgtcatgactcgctaaggatcatatcgctggctgaatgtgctagatatctgggtaagccgtaccagattacagtagctgtatcctgctggcttgcagactaagcgatacatagagtcgctgcaagatgctacctgacggatttctgctagccc

SEQ ID NO: 97141 - DNA, 249 bp, Zea mays
  Clone ID: MRT4577_20105C.1
atggtggcggcggaggcgaggaggaggccggcgagagtcgcgcgctattcgttggcaagatcccggtcggaggggcctgagccgcaagcgcacttcgcggccgcgacgagccgacgagctaatcgaagatgtttctgtgaagttacttgcagtttgtgtgtagtaagaacaagccatttggttaaaccccaaactcttccattacctgaacccctactctatgatgatctgttaattgcgagagcctga

SEQ ID NO: 97142 - DNA, 438 bp, Zea mays
  Clone ID: MRT4577_20106C.1
tttcttccggaacccggatgttttctgccccaattgggggtgaaaaaaccttttgagtcacccattttcatgaaaacatacactggccgggtgggttccacatcaccaggaagggtgaacaactttttcgagagccaaacaacacccatggagagcgggggggtgctttctttgaggatcaggaccaaccctttacgaggtcaaggtaggggtccttgacccacctgaagtttttggggggggagcccttaaccctgcctttaacgcggtgcgccttgtacgccaccacccggcgcttggggaactatgtcggatcccacaaccaccggcattataattggcttcggtttaaattgtaataacccgccccggggatttgtgacctcaactggttgaccaaggaggaggacggtcccctccctcccagttttttaaaat

SEQ ID NO: 97143 - DNA, 415 bp, Zea mays
  Clone ID: MRT4577_20107C.1
gcggtgcgtacgataatacatgtacaagcgctatatctacttcaatctactgaatggcgtgtcataatcacaccttgattataaggcaatacttagggaaaaagcctgacgacggtcacagcatccatcaaaccacagtccatactcttttatgcatgggggtggtccagcccagtatgaacactgcactaacaactgacacaaagcgaccttgcaatgaaaaacacagatgggcaacaacaaacacgagactaacgaggatcaaccctatgcactagggtaaacatcacggcgacgaacaggatcacttggccgagcaggccccaccgctcagttacttcaataactgtcggagcagtctgagcagcactcacagttgtcaccgacaaaaacgtcgtcaccaccaccgtacgta

SEQ ID NO: 97144 - DNA, 188 bp, Zea mays
  Clone ID: MRT4577_20108C.1
gggagtgagacacatatgctgacaaggcagagagggtgaacagaaatgcatacacagcaacccgtagcgcacggagagcaacctaggaacgaaccagggccaaaccaagaccgggccagctgcccaggtcaggcccgagtcccaaggcccaaacaccggcacacccgacgcgggacccataacggcat

SEQ ID NO: 97145 - DNA, 440 bp, Zea mays
  Clone ID: MRT4577_20109C.1
tgtctgtcttggtggctgattgcaacggtcatggcaaccacgtctcaccggatacccgtgcggctgctatgcctgggcagtgctggtgacctactccttcgaagcaggcagcttggaccacgagctggacatcacgtgctgcgactgacggtacaaggtccttgacaacagacagctgctgacgctgacgctagaccgcacatacggctccaggttccaatccctgcacgagtacctgttcagcaagatcgacatgcagctgcagctggtagccgatcaactacgacggcaccgtcaccgactactaccatgatgtgcaaagccagacgcacgacgagatcgacttcgagttcatgggcaacttgtccggcgaaccctacacgctgcacaccaacatattcacgcggggacatgggcatcatgagcagcagttccgactc

SEQ ID NO: 97146 - DNA, 260 bp, Zea mays
  Clone ID: MRT4577_2010C.1
cgcagagagagacgggtacgtagcgtacgttcctcgacgacgactggtcggtcgagactgcgcgcgcgccacggccagcagaatggcgaccaagctcatcatcatcggcagcgcgcgggcgccggcggctggagtcgtcgtcggccttctgctcttgacgacgtgcctgttgctcgcggcgaccgtctcgagtgccagcaggccgctgaaggtatcgtcagagggcgatgatggtggtgcgcacagcatacggtggagga

SEQ ID NO: 97147 - DNA, 624 bp, Zea mays
  unsure (1)..(624): unsure at all n locations
  Clone ID: MRT4577_20110C.1
ctcgcgtacgcgcaggttcctgccgacccggaagcggatctcgcggggctactggcgctctcggcccacacaatatgacctcggggaggatgcgaggaagatgaactgtgatgatccacttcttcttaatgaatgactgacttacctgagaaagaaactcagaggaagaggaaagaaagaagaggagggaatggctctttctcagggactgtttacattcaaggatgtggccatagaattctctcaagaggagtgggagtgcctggaccctgcccagagggccttgtacagggacgtgatgttggagaactacaggaacctgctttctctcgatgaggataacatccctccagaagatgatatttctgttggatttacaagcaagggattatcaccaaaggaaaataataaagaggaattataccatctggtgatattagaaagaaaggaaagccatggcatcaacaattttgacctcaaggaagtctgggaaaatatgcctaagtttgacagcctgtgggactatgatgtaaaaaattacanaggaaatgccttgacctgtaacaaanatctcactcacanganagatcaacnnacatataaatncctcatacatttctcttt

SEQ ID NO: 97148 - DNA, 611 bp, Zea mays
  Clone ID: MRT4577_20111C.1
gaaaccggaaaaggggacgggtttaaatagttggggggccaaggccacagggaaccctaagttttagctttgaaaatattttttaggacttaggagaccggggctaattcccctttacagggggggccggcattcattcgttttttgaaaaaaaaatttttgccttgcccgctttaaaagctacaggagttttcgaacagcaggccctttaccaaaaggaaaccgggatcatcatctacctttttaaaacgactaggtttttcccaaacaaaagggcctggaactgggaggttcttaacccaggaaccaaacgacttggggggggaaaaccctgcaaaggctggattgccggttttggttaaaagtttaaaaacccggccttcccctaagtccttttaaggagcccaaaggccccacaggcccaatgctgccggggaggttttccccctcggggcctgcaaaataatcgaaaaaaaccctgccctgaaaaatcctcgttccaggcgcaaacaaaaggtcccctccccccccgggggccatttggtgggggttttggggggaggggatttttttgccccctacccttttaaaaaactcctgccacgggtcgt

SEQ ID NO: 97149 - DNA, 442 bp, Zea mays
  unsure (1)..(442): unsure at all n locations
  Clone ID: MRT4577_20112C.1
ggggggggcctcccacgcggccntagccctatgtgcgcgggtcctggagctggggggccaagaccagtctgcagcgctccgggacctccttgcgggacacccgtgccttgctgaccagcccccgccctgggactccccggggcgcggggcggagcctatgagcgcggctcatgggcccggggggctacggggccgtgggctggatcgatgtgctactctctcccgccaccagggcgagcccaaccgcgcctcacccgggtgcctctccaccgcgcttcatcttgcgggcagcgggggggcttccactgcgccgggggcggggtcccggctcctaggtgctgnggcccaccccacgtgtggcgagcacctccatcggcggccggccgacgtgntgactctcccacccaactcggtcccggtcaagaaccaccttctctccctc

SEQ ID NO: 97150 - DNA, 317 bp, Zea mays
  Clone ID: MRT4577_20113C.1
gccaagcggacaagtgcaacttattttcaacatcgaacgcacacttgaggagggagatcagcaactcaaatatcgcgcccccttatgctccctgtgccttcttcaagggctacctcgggcagcatttccccacacagctcacaatctaatatagggtcccttatttcgcagaccctattaccaacgggtgctatagaggatgtgaaaacccaatttttcaaccctacaggatccaacaggcaatcgcatctagcattctacctttatcacccttgttcgtcctactactcatcatgcctattacaagaaataccgtt

SEQ ID NO: 97151 - DNA, 299 bp, Zea mays
  unsure (1)..(299): unsure at all n locations
  Clone ID: MRT4577_20114C.1
ccgnacgacgacaccacgagggagngcannncganccacancggccaggccggcagccaggncggaaacgcgngcngggagcngcaccaccnngagcanggcanncaggggggggggcagangcccggcgacaagaccancgggggaggggangangcnngcaacaccggcggcagngagacgggggcggggaagcacgngcgacgcgccgggggggggggcccggngcccgcgggggngggcgagggggggacgggggcgggcccncggcgcgggcgcccccgggccggcccgcgggg

SEQ ID NO: 97152 - DNA, 252 bp, Zea mays
  unsure (1)..(252): unsure at all n locations
  Clone ID: MRT4577_20115C.1
ctatgaatccctggtangattatgtgatgccgagtcagtgaggacaagagtacttcaaagaagaactcgtgactcctgatttccgcgatttggtgnactgataatttaatcagatcttgccagtggtctcggaaacatggcctttgntttattgagactcgattggcacccagagggnctggcgccttcccatacctttggctatacctctcaaaagttgatcagacggctgcgaatgattggcgagtccag

SEQ ID NO: 97153 - DNA, 556 bp, Zea mays
  Clone ID: MRT4577_20116C.1
ggccgcttttttttttttttttttatttttttttttttttttttttttttttttttttttttttttttttttttttttttttttttttttgggggggctacattggggtcttaaaagggggggaaaaaaacacatatgcctaggaccccgggggaaaaactggtgccccacccccaaatgggggggccagtcacaacaacaagcccccaacagaacatggaggaacaaacttgcctttttccagctaaaaactagttggggaacttaattttatcaaggaattcctattttttcaaggaaaaagaactaattttccttgaaaaaatataaatcttttgaaaaaagggggtcccaaactagcccaaatttagtttcccgcccttttaggttccacgggggggccggttgtacctttcccggccctgtttggtggattggggccctgactgggggttttttccgaaaacttgggaaagggaacggggggggctggttttacatcaaagcctttttttggtttttttgacgcaattgggttttttaccgcattttggaa

SEQ ID NO: 97154 - DNA, 253 bp, Zea mays
  Clone ID: MRT4577_20117C.1
cttagtaaagatacggccgacatagcggggagcttatgtggatgtcttgacttccgacagctacatgctgaccgtgttctgcattggaaataccacgaggcgcccaaaccaggacaagagaacctgctatgctcaggcatcccacattcggtcgagacgcagtaagaaggttgggatgataagcaaccgggcttgtacatgagaccttaaagaactagggtgtaagttcatgccggaagttattggcggagag

SEQ ID NO: 97155 - DNA, 322 bp, Zea mays
  Clone ID: MRT4577_20118C.1
agccacaaacatccttaagggttctatcaccaaaaactatacttagcccaacaaagattatccaactacaaagcaggggaaaaccaacgggaaccccaaccccccccacgaccaaagggggaatcaaatgggtccaactcgaactttaatttagggggggaggcagaaaaagacccctttctctcacccaaggccccttggggggaggaaagctagctaaaaaactagccaggtttttccatgcataaactccctcaggcgactcagttgaaaactgggattgattggtactaccctaaataacgaagaccttacttttttt

SEQ ID NO: 97156 - DNA, 346 bp, Zea mays
  unsure (1)..(346): unsure at all n locations
  Clone ID: MRT4577_20119C.1
tcacacttggtcttggttgctcataattagttcatcagnaaacaacaaacaatggcaccgaggctagcgtgcctcctagctctggccatggcagccatcgtcgtcgcgccgtgctcggcccagaactcgccgcaggactacgtggacccgcacaacgcggcgcgcgccgacgtcggcgtccgcccggcgtcctgccacgacaccgtggccgcccacgcgcacagctacgccgcgccccgccaggaccgactgccagctgacccactccggcgggccctacggcgacaacctcctccgccgcccccccgcccccgaccgccccccaccccgaccccccgccctccct

SEQ ID NO: 97157 - DNA, 395 bp, Zea mays
  Clone ID: MRT4577_2011C.1
gaagcacattgttgagcaatattatttagagaagaagaaagccattcaatacatgaccggaattaaatcccgggttgctatcactagtgatatgtggacctataataaccaaaagagaggttacatggctatcactgcacactttgttgatgaatcttggacactaagaaacattatcatgaggtttatatatgtgccaagccctcacactcatgatgttattggtgatgtactttatgagtcactaatggattggaatcttgatgagaaggtgtcaaccatcacactagataactgcactacaaatgatagtgccatttcttatttactgagaaagattgaaaggagtaagctcatggccaatgagtagtcatattgtggcaatccattgatag

SEQ ID NO: 97158 - DNA, 502 bp, Zea mays
  Clone ID: MRT4577_20120C.1
aaaaaacaaaaccggggttaatcccaaaaaataaaaataaggggcaaaaggttttttttgaaccaagtttaagggcccattttttcggggggcctgggccgtttaccggccaaaggggaaccaccaagcccaaaaagtataagtggggcccgaccccgaaaacaaaaaaggggggggtcccagaagtggaaccggccgggggggggcgccccaaacccaaatccttggtttcccccaaaaaaaggggggggaggggaaaagcgcaaggggtccaccccaaaatccatgggcgggggcccgggggggggggcccccccctccctctccaggttggaaggcctccctaggccaagggaaaacccccctttttgggccccggggacccccgggaaaaccccccaacatgggaaaaagaagggcccccaaaattggaagcggggcccccccggggggccgaacggcccccccattttggcgcggaaaaaccaagattaccccccct

SEQ ID NO: 97159 - DNA, 258 bp, Zea mays
  Clone ID: MRT4577_20121C.1
gggttggtgttttttttttatttttttttctttttttttttctggggaaaaaaatcttttcccctaaatttaagggggttcccccctcccacaataaataatcctgtggtagtttgcccctatacctggtgggcccaccacaggttactttttaaggggcacttcctggcccgtaaaaaaatttttccttgaagaatgggctccccccgggggggtctaaaaacttgcaactccctcttggccccccctggtgcttcc

SEQ ID NO: 97160 - DNA, 365 bp, Zea mays
  Clone ID: MRT4577_20122C.1
gggttggggcatacaaactacagggacattcatccatagcataacttacagcacatgatacaagctaccgggcccgggcaaattttaatatataaaaaagacaattttggaggctcccatttgaatgggggctgataaaagaaaaaaaccaggggagggtttccccggaaataccgggaaagtacttttaacccagggccttttgactccagggtcttaaattttaaaaaagaaaaaagagccaagctttttttgcccaagattccattcaaaatgccctttctgggctggtaggggatgaacaagctttagctcttgtttgagggtttggatggaaagcccactgcctattttgacccccttgc

SEQ ID NO: 97161 - DNA, 589 bp, Zea mays
  unsure (1)..(589): unsure at all n locations
  Clone ID: MRT4577_20123C.1
aattcggcacgaggaaagcctgcaaccaaacaggccctctcgattagcgaaaaaaagcccagcgaaaactaaaaccctcgcatctttcctttcctccccaactgcggccgcctccacccgctccaccgccgatggccgagcctgagcctccgccgcaggtgtcgtctgaacctaccactccgccgcaggaaggcagcggaaggactaagaaaaagaacaagaagaatcgttccaagaagcaaccgaagcgagccgccgctgacactgacgggttatcctcaggcgccagcaccatggctgaggaccctttcttcgtcctcgccggcggaaaggaaggagggtttctggatttggaggagatcgatgaggcagacttcggcatcttcggaggcgtcttggatgacgtaggacagagcgtcgaggaagctgggaaggatcatgggaagaagaagaagaaaacaaagaagcggaagcgtgggggtgatggcgagggctttcagtggcgacgctgcgttggtagctgagaatgaccaggtggatgtcgagaaagtggagaaaaaggtccaggatggggagaaaggngataaga

SEQ ID NO: 97162 - DNA, 1089 bp, Zea mays
  Clone ID: MRT4577_20124C.1
ggggactacaaactagatgccacagtgaccatagcttcaggggatgatatttatctgggtgacctcgtgtatgagccgccaagagacgggccgacgatgtgggagattggagtacctgatcgatctgctgctgagttttatgttccggatcctaaccccaactacgtcaatagattgtacgtcaaccaccctgcagatagatttagacagtatgggctctgggaacgatacgcggaactataccctgacagtgacctggtatacacagttggccaaagtgactatagcacggattggttctatgctcaagttaacaggaaaattgatgacaacacttaccagccaacaacatggcaaatcaagttcgatcttgacagtgtcagcccaagcagcacctacaagttcagggtggctctggcgtcttctgcgctcgctgagttgcagatttccttcaacgaccaggacagggctgttcctcacttcgccaccgggctgatcggcagggacaacgccatagcaaggcacgggatccatgggctctactggctgtttaacatcgatgtggccagtgcttggcttgtgcaaggggtgaacaccatctacctgaagcagcccaggagccagagcccgtttcaggggttgatgtacgactacttgcgtttggagggaccatgcggcttctaatcgatttttgtgtgaaattgcgttgctagatgtgaaattacaactgcattcactgtgtaaacccaatgcatacgattgggggaaagatgttgcggtattataggcactggggttatgtaggtaatgttagtttaattttcgcatttataaccgtgcaagctatgctgatttgtaactataatgatgtaagtgtgtacgcaataatgggtgtttttagtcaggtaactaattacggtcaacttcaacacaaggtcaaaaacggaggttgtttgaagggtattgtagacccctttatctataaagcaaaggtgatactcgggttcagaagagagcctctcccagatcatatggatgtactccagaaaaatcaataaacaccatagagcgctttcattatttttgttt

SEQ ID NO: 97163 - DNA, 411 bp, Zea mays
  unsure (1)..(411): unsure at all n locations
  Clone ID: MRT4577_20125C.1
catcaaaccattatgtgccaaagtgatggaatttcataatcttgagagaccaaagaacatcttagctaccctactatgtacccagatttacactcctaaaaaggaacagattttgaaactcctaagtcctaaccaaactgattcgcgcgctgatcacacaccgtgttgtgtacgtagaaatgaaacggcacaagggacgggacgaaggcacgaagcaatcagagtagcagaggccagacacacnaccgcgagagagagagagagaggaaaaaaaaacagccctaacgacggccgcgcggacgccagcggcgtgacctcggcaagcggcgtgggcatggggctgggcagcggcaacgtgcggcagaccgggcacgtggggcgctgccggagccaggggtcgacgcaggcgcg

SEQ ID NO: 97164 - DNA, 443 bp, Zea mays
  Clone ID: MRT4577_20126C.1
ctatcacttaacttgttgttgggggccttcttcgccaccgaaggtcctctaagcaaaaacaccttcggcaagacgatgtgcaaatagatacgacatgaagacatatgtcgaagctacaatcgaaagagcttcggcatgatggcgtgcataagacgaaggatggcaccgacttaaagaggaaaagaccacatagtccctaataatttgtattatggttatgattagttatcaaggacacgaatgtaattttgtccgggctgtgtcccgtgcctataaatagatgaacagtacccccgtactgttcacgctgactggtaatcgctcacgcgtcacttcgggatttttgccttctgtcaagccgaaggtacaatgtaatttaaacatcattgatgtttgttcatgattttataatgataatgtggataatataatgatttaaaata

SEQ ID NO: 97165 - DNA, 136 bp, Zea mays
  Clone ID: MRT4577_20127C.1
ccggctagacgtacgcgtccggtccttacttcagtgtagtataaggttaaaactatgtatgaccgaattaggtgggatccttgactcaatgctgctgtatccaaacgaacgtcaccatgacaggcctatacagaac

SEQ ID NO: 97166 - DNA, 265 bp, Zea mays
  Clone ID: MRT4577_20128C.1
tttattttattttgttgacctcggtgcagttttttttattattaaaaaaggaaggagcagcattcataggtgtagcttacagtatcgatcatcttgaaaccaaaaccaaaagaaaaaaaattacaggtgggctgggggatttgcaatgccttaaaggttattgttttttcatgtctacaggaagttttctgatgtatcaatttcctgtcataagtcatttacttattttggaactccatccttttgagttgagtcttcattgtct

SEQ ID NO: 97167 - DNA, 322 bp, Zea mays
  Clone ID: MRT4577_20129C.1
cgacagtcgcgcgcgcggagcatccgttgtcgggttacagaagtgtgcatgatgaaccgggcgatcttttgttcgatctagctccaccgacgtgcgacgaagaagatagaatgaaactacaacagctgcaatacatttgagctgcagagctagcttagtgcctgtttgggatcctggtctttcactgcctggtgtggtagatgaacggtggtgagcactcccttaagcctagtgtttgggaggaaaggggggctatacctagagagggaaaaccccacagataactaaatatcttatttaaatgtctttttaagccttgttc

SEQ ID NO: 97168 - DNA, 608 bp, Zea mays
  Clone ID: MRT4577_2012C.1
ggcgaccatgcccgccgccgccgccgccgcctccgggacggccgtggcttcctacaccgactacatccccgactccgtcaagagcttcgtctccgacctctaccgctccatccgcggcggcgacgtggtcgggaccgacaagctgtacgagggcgacttccaccgcctctccgcccgcgtgtaccgcgacgcgccctggccgcccgccaaggccgtcgcgacctactgcgacgacgaccacgtcttcctcctcctctacagcgagctcacgtcccgcgacgcccacgcgcgcctcccaggcctcaccctcacgcgccgcgccgactcctgggacacctactgctccctcttcaccgtcgtcctccagaacgccctcaccatgcagctgcccaaccagtggctctgggacatggtcgatgggttcgtgtcccagttccagacattctgccagtaccgcaccaaactcgaggacaagaccgaggaggagatcagcctactccagcggttcgaccaggcatggagtgtgtatggggttttcaattacttgaaggcactggtggagaattcgatgatcagagaggtcctggagagggaggagcggcttgagc

SEQ ID NO: 97169 - DNA, 487 bp, Zea mays
  Clone ID: MRT4577_20130C.1
agccggggcccaaaccacattttttttttgccctgcccactttacaacgaccctggtgagcaacagcccgaaaagggaaaaaccccaacagctagccccccttggatggttatgggtgggggggcccgtgttttattttgccccagccctcgtttaaccacctggggacgggccaacgaccaaccccacgggccaccgcccacccccgcaggatagaaatgagcaaagcagcaggcaaccaaaaaaacccctttgggggtctggcccctatcccggggatcacccacaacctgggggatccaccccgagggaggtaggtaggtaggtaggttggtaggcaggccaccttaatttacaaaaaaaaaacaggaccgggttttcggatcaacaaatggcccaagaattgggggccccctcggccctttggaccgcgtactggggcgggtaccggggggggggggacttctgcccttcggcgggggggttc

SEQ ID NO: 97170 - DNA, 1536 bp, Zea mays
  Clone ID: MRT4577_20131C.1
agctcgtggccgggataatcacttcgcctccgtctccgtggcgcgcgcgctcgcacgaacacgagtcccatgtcgtccaccgcagcgcgcgtcgtccacccggctgccgcggcgccgccgcctccccgcccacgccgcctggcgcccgcgaggtgcgcggctggatccgcgacggacacggccaccgcgggtccgacaagggtgacgaccgtcagcaaccgcggggactccttggcgatatgccgggtgctcaacggcatgtggcagaccagcggagggtggggccgcatagaccgcgacgccgcggttgacgccatgctcgcgcacgccgacgccggactctccaccttcgatatggctgaccactatgggccagcagaggatttgtatggcatgttcatcaacagaattaggagggagcgcccacctgagtttcttgaagaagtcaaggggcttacaaagtgggtaccacccccggttaagatgacaagaagttatgttgaggataatatcaacagatccaggaagaggatggatgttactgcattggacatgttgcagttccactggtgggagtactcaaatccaggctacttggatgcgctaaagcacatcacagacctgaaggaggaaggcaagataaagactgtggccctaacaaacttcgatacagacagactgcaaataattctcgaaaatggaatcccagttgtgagcaaccaggttcaacattctatcgttgatatgcgccctcagcagagaatggcagagctttgccagctaactggagttagacttataacgtatggcacagtgatgggtggtcttttgtctgaaaagtttctcgacaccaatgtatcaataccttttgctggtcctcctctaaataccccatccttgcagaaatataagaggatggttgatgcttggggtggctggagcctgttccagactttgcttcaaaccttaaagaaggtgtcactgaaacacggtgttactatttcaacggttgctgtgaaatacatactgaaccagacgtctgttgcaggttccatggtcggtgtgagattgggactctctgaacacatcaaagacaccaacgccatattctcacttgaattggatgaagaggacatgaacatcatcactgaagtgtcgaagaggggcagaaatttgatcgatattattggggattgtggtgacgagtaccgagcttagttggccatgctgctgctgggctactacagacctatatactcgtgcccaattttgcacagctctaaatttttgcctatttgggtctagcggctcagcgcactgttgaggcaaccatatacctgaatgcctattattcaggcgctagcatgtaccctccagtcctcaacagccagttataaaactgtaaatacacagcgatgcagatcgctaatgtggtaacttgttcagtcctttttagcgattactgtcccaatgcttatctagatagtacatagcaaaaagtgcatttattctaaaaaaaaaaaaaaaaaagcggcc

SEQ ID NO: 97171 - DNA, 2084 bp, Zea mays
  Clone ID: MRT4577_20132C.1
ccgggccacgtttctttaccctaacctttccactgctccatcttcctcgcagcgccggcgatccatcctccgctccctcccttactcgcgctcggcacgcaggcgacgccggcggtggtcaggctcgggctctaagcgacggcgtcagtgtcttcccctcccacctctcggcagtcgcctcgcgccctcgcctccggtcctccacgcaccagccggctactctgcgctgagctgattgtcccattcaataaagaaagcgaagggcatagataccagaagcaacactgagcccatcttgcttggaattctatctgctgttggaacaacttacaccaatatcatggcaaaccttgctgattcttttctagcggatcttgatgaactgtcagacaatgaaggctatcctgaagaagacaatgctgaggcagcgggtagggatgacgacgaagatgatgatatgcctgaccttgagtctcttaattatgatgaccttgatagtgtctcaaagttgcaaaagacacaacgctataatgatataatgcaaaaagttgaaaatgcacttcagaaaggtactgatttctctaatcaaggttccatcctggaggaggatccagagtaccagcttattgttgactgcaatgctttatcagtagatattgagaatgaaataatcataatccataatttcatacgggacaagtataggttgaagtttcctgaactggagtcccttgttcatcacccaatcgattatgcccgtgttgtcaagaagattggaaacgagatggatttaacactagtagatctggaaggacttttaccttctgcaattataatggttgtctcagtgacagcatcaacaacaagtgggaagccctctttctgaagacaattttggaaaaaccactgaagcatgtgacagagcccttacccttgatgcgtcaaagaagaaagtgcttgattttgtagagagcagaatggggtacattgcaccaaacctttctgcaattgttggcagtgctgttgcttccaaactgatgggtactgcaggtggtctgggagcacttgcaaaaatgcctgcttgtaatgttcagttactcggtgcaaagaggaaaaatcttgctggattttctactgccacttctcagtttcgtgttggctatcttgaacaaactgaagtatttcagagcacccctccacctttaaggactcgcgcctgcagacttattgctgcaaaatcaactctggcagcaaggattgattcaattagaggtgatccaactggaaaagctggacggaacttgttagaagaaattcgtaagaagattgagaagtggcaagaaccgcctcctgcgaagcttccaaagccactcccagttccggactctgagcctaaaaagaagagagggggccgtcgtcttcgaaagatgaaagaaagatatgcgcagactgatatgatgaagcttgcaaatcgaatgcagtttgggattccggaggagagctcactaggtgatggcttgggggaaggttatggcatgcttggacaagcagggagtggcaagctacgtgtctcagctggacaaagcaaacttgctgctaaagtggcgaaaaagttcaaggagaagagctatggtagcagtggtgcaacatcaggattgacatccagtttggcatttacaccagttcagggaatagagttgtcaaatccacaggtccaaggaaaccttctcggaggcggaactcaaagtacttacttttccgagaccggcacattttcaaagatcaggaggacgcaatagaatcctctttgcaaccatcacatctcatttgcactgcatttgttgatatccttgggatgcactgtagaaaattcaaaagtcaatcttgcaatgttccagagactttagaatggcaattcacagttaacagtgatgcttcgagcacttaatcccaggatatttgcgaccgaacctgacttttgagaattctgatgtccatagtctatattgcctcgtgtacaagttcaagcgaacaatttttatctcatggttactactagatgagattggttcacgggtctggct

SEQ ID NO: 97172 - DNA, 296 bp, Zea mays
  Clone ID: MRT4577_20133C.1
cccacgcgtccgcacctaccatcttcatcttcgacaacagcgtaatgtagtgtacatcgggagaggttacttgagagaagtaccaatccacactgtcaaccgagcaagcttctaaggctcatgtcaaattgacctacgtgccatcccatgatccttcgcaccaggtatctcgaagctcccaaggctaacattgctcccaaggataagaaggcgcataaccagactaaacttttcatgactaccaagccgtcgatataaccttcatacgctgagatgaatgtacaggcaatcgttga

SEQ ID NO: 97173 - DNA, 477 bp, Zea mays
  Clone ID: MRT4577_20134C.1
aaacaaaaaaagagtatcccctttttacactggttacaacaaaaaaaaagtacaccatgcattgcactcgcaccaagaacattccattattgacaggttactaaaaagtccttccccaccaaaaaaaatgggaagtttcatatatattggccataaacctgacaatgcatgtgtggaaacactcctaaaaatgctaaaaaaaagttgaacttattatttggggggaaaagcctgaaaaaagggggcgtggccaaggtcggcaaggggggcaaaaaggttttcaatggggccggtgccggtgtactcggcctgaaaccaagcgcccattacgggaaacatgggaaggcctcccttcttgaactccttggggcgcaacttcttgatttttttcggggaaccgctgccccaaccgagcgggtcaaaccaaaggccaccaggtaccccacgtcggggccgggaaactttttgttgggaaaa

SEQ ID NO: 97174 - DNA, 488 bp, Zea mays
  Clone ID: MRT4577_20135C.1
aaggtaaggaagggatttttttaatccaaataaaagtacaatttgacttaaaatatagggagccaagaaaaaaaaaaaaaggaggggcggagagcacaaggcaggacacgaagggcggaatgggaggggagggccaaggggaagcaatgggtcggaaggggctcagacttgaaaacaaaagtggggaacgtggaaaagagagagactcggtgaaccgtggggggagggaagggcccagcacaaagaaatggaggaacgaaaaggctagagggccggaaaaaaaagaacccaggactgaaggaatgtcatgaaagaacccctggcttaaaggggggaagaaggcccctttgaaaagggaggaagggggaaccaaacgcttttaacaaggttaccgagagcatctgccagtatctgggcagcgcaacaaaatgtgtaccctggaacaacaaaaaaaacggtttggatcaatagcaggaaggtgcggtggg

SEQ ID NO: 97175 - DNA, 990 bp, Zea mays
  Clone ID: MRT4577_20136C.1
attgggaccctcgaggccggccgggccggccgggccgggaagccgaagagaggaggagagccaagcggcgactggacctggagagccggcatggcacgcctgctcctctccgtctcagtccccatgtccgctagcagcagccgccgcattgtggttcctggtaccgcgcggcaccgaggccgcagcggcgtctgtgtcgctgtgcccgccacctccaccgccaccgccacccaacaagaatttgaccccgcggcggcgccaccgttcgggctgggcgacatccgcgccgccatccccaagcactgctgggtgaaggacccctggcgctccatgggctacgtggtgcgcgacgtggtcctggtgctgggtctcgccgccgccgcggcgcgcctcgacagctggctcgtctggccgctctactgggcggcacagggcaccatgttctgggcgctcttcgtgctgggacacgactgcggccacggcagcttctccaacaaccccatactcaacagcgtggtcggtcacattctgcactcctccatcctggtgccatacaacggctggcggattagccacaggacgcaccaccagaaccacggccacgtggacaaggacgagtcatggcatcccctccccgagcgtctgttcaagagcctggacagcgtcgtcctgatgctgcgcttcaggctgcccttccctatgctcgtctacccattctacctggccaacaggagccccggcaagtccggctcccatttccacccggccagcgacctcttccagcccagcgagagcaaacaagtgctcacctccacggcgtgctggctcgccatggtcgcactcctagctggcctcgccttcctcatgggccctctgcagatgctcaagctctacctggtcccctactgggtttttggcatgtggctcgacttcgtaacctaactgcatcatcacggacacaatgacaaagcttccatggtacccgaggaa

SEQ ID NO: 97176 - DNA, 274 bp, Zea mays
  unsure (1)..(274): unsure at all n locations
  Clone ID: MRT4577_20137C.1
tcggtactggcgccggtttattcgaagttgttaaaattggagatgaatacttttcatttattaatgattgcaaaaatccaaaagcatgtaccgttatgttgcgaggtgcatccaaagatatgctaaatgaattggaacgtaatttacaggatgctatgagtgttgcaaagaatttgcttattgaaccttacatcgttccaggtggtggagctactgaaatgttggttggaaagtatttacttgaaatctanaagtattactgatgtggcacaat

SEQ ID NO: 97177 - DNA, 296 bp, Zea mays
  Clone ID: MRT4577_20138C.1
ggacctttgggctgatttatgtgcttgtttatgtgcttgtctatgtgctttgccccagagtcgaaaaagcacacgacggactggagaatcaggtaatagcctccatccgaagtcgtttactgccgctaagaggtcgggtctcacgataaagtcgcggaaacctataaacgagcaggagttcccgttacggtctcctagataacaaataagcgtccgctcgacgtaactcgcgttacggtatggtacacgtcagacggtgagagctgcgtcgtcgattcaacctacctcggtaacga

SEQ ID NO: 97178 - DNA, 410 bp, Zea mays
  Clone ID: MRT4577_20139C.1
aaaaaaaaaaaaaaaaaaaaaaaaggggggggaaaaaaaaaaaaaaaaaaaaaaaaaaaaaaaaaaaaaaaaaaaaaaaaaaaaaaaaaaaaaaaaaaaaaaaaaaaaaaaaaaaaaaaaaaaaaaaaggggggggcctttttatggtacccaactttccttaccccttcgtttgccccccccttggctttttttttggtgtcccccccaatttaattcccttggcccgggcttttttcaccgccccgccttgggaaaacccttgccggtgccctatttaaatttacttggcggggataaccccttttctttcccctggttttttgcttaggggcccccccccgttcccccttccttccatttgctcaccctgactggaaaggggcccccccccctccttggccctttac

SEQ ID NO: 97179 - DNA, 503 bp, Zea mays
  Clone ID: MRT4577_2013C.1
atggctgccgctgcagaggtcgtcgccccgcaggcccgaggtcgctcgtaccctcggggacggaaccggagtcccgtttgtgatggcaccttggatgccacggagccgacgccaaagtcggtcagtcgaggcctcggatcgggctggcgcccttggaagccggttgaccgaggccccaggggtaaccggttgagccgcctgctcgggccggattcccggaggagcccctggaccgcggcgccgcccgaggctgggtcgggctttgctgaagacgtcgtcgatgccgagggtgctacggctcccttcggcgtgaagacccgagcctgcaggatcagatcatcttgtagcgtgtgctttctgcggccgccgaggccagaagaacacgccctcgccgcgctcgcgaagctgcatcttttttcctcctgttccgagcatctggactctgtcggtaacagggatgtttgtgtgagcgagagttgcttttcgcggaagggacgagtgag

SEQ ID NO: 97180 - DNA, 199 bp, Zea mays
  Clone ID: MRT4577_20140C.1
cgtatgcttccatcggccggagctgctgccctttaacagcgcggttcgcacaaatattcactggtgatgcactaccacactgagagcgacgactaccttgaggcgtgatatacgggcaagcagctactactgggtctcatggtctagaagacttgcgcgccgatcatgctccgccttgcaagacactcctgagacacct

SEQ ID NO: 97181 - DNA, 436 bp, Zea mays
  Clone ID: MRT4577_20141C.1
aagggacaaaagcggagctcgagggccgcttttttttttttttttttggtggtgttttttttttttttttttttttttttttttttttttttttggtttttttttattttttttttttgtgttggtgttcttttttttggttggttgtaggagcatgagggtggtcggaaaaaaaaaccagtctaagaactgttgcgaattgtgaagggggggggaggcgataggtggaaggaaacatagatgcagacaggcagaaatggtgagggaatagctgggatggaacagggggggtaaataggagggggagcacacggcacacgcaaggggggggaaaaaaaaggggagagatcgggggggataactaaacaccgggcagagagagggggaaacattgcgaaggaaaagagggggcgggcggaggctaacaaggtgacct

SEQ ID NO: 97182 - DNA, 141 bp, Zea mays
  Clone ID: MRT4577_20142C.1
taatcaaaccctatcacagacgggtttaatttaaaagaaactggcggtctgcccctgcgaccctatatatgggagacgagatcatgctttgtccaccacactcccaatgaacttaatatcgttggaataaacgatgaggcg

SEQ ID NO: 97183 - DNA, 559 bp, Zea mays
  Clone ID: MRT4577_20143C.1
ctctaaacggccggccgggggtgggggtttttttttttttttttttttttttttttttttttttttttttttttttttttttttttttttttttttttttttttggacacaagaacggggtttttttaaaccaaaggcggggggtcatcagcgatctgatacaaattcgggggggggggggggattaatctaaacatccacgttctaaaaaaaggacaggttcaaatcgggggcaaaaaagcaaggactcccgaaaccagaacaactcctcgtttaacccttaaaaaaaaaccttctggttctggtaaaggaactagcataaaaactgaacagccagcattggaggcaaggggggattgcacaaagctagaaatagcctttccgtttacccccggggtacttcgggggggggggcacaaaagggcctctttttctaaacgggtccttttttttaaggagccagcccttgcctttgccggtttttttcggtttttgccggtttttcggcctattcctttaaaataggcccactgttctgtcgccattttcgccactggtt

SEQ ID NO: 97184 - DNA, 361 bp, Zea mays
  Clone ID: MRT4577_20144C.1
cccacgcgtccgcccgaccaactgaccaggttcccatatggggatatccaggcccgggtctatgtaattttggcaaaaaaaaaaaaaaaaaaaaaaaaaaaaaaaaaaaggggcggccgtttaaggggaccaaggttaacttccccttgcttgcaacgtaatagttctttaatggggcaaccaaaatcaaattaatgggccgtggtttaccaccgccggaccgggaaaaacctgggcgttcccaaattaaatggccttgaagaaaatccccttttggccggtgggggtaatagcaaaagggccggaaccaatggcctttccaaaaattggccaatcctgaatgggaaagggaacccccctt

SEQ ID NO: 97185 - DNA, 173 bp, Zea mays
  Clone ID: MRT4577_20145C.1
gttattggtttttttgtccatcttaaaattttttttatattgcctactatgaagacacgcctgcattccacgtaaaaaagccgaagaatttattatttaaacccacagcctgataccccacatacacagaaactcaccgcacccctaaaaacaacacactcctcacaacaaaa

SEQ ID NO: 97186 - DNA, 448 bp, Zea mays
  Clone ID: MRT4577_20146C.1
ccaaaacttattatgaccttgcatatattattagtcataccacacatgatatagagtgttgtcttactggattattccatatataaatagggacagtatggttacaggaaatttcccaagtataatgagtcagtaaaaaggcggattggcactgaacattccacaagggttgggagcggtagctggtcttatgatattgggaaaggctacctatggcctgcttgttctgcaccatcatcatgagcatggggttgacaccttgggttgccaggattttttgtttttgctgtttctgaggtgcctccaacaaattgcttttgcagggaaaagcaaactcaatctgcataatcatctgtaactgttaaggaagggactgtaacaatatgatctgtcaacccttgttggcagctctgttgatcaaaacacgagcatcatgaaggtactttgc

SEQ ID NO: 97187 - DNA, 575 bp, Zea mays
  Clone ID: MRT4577_20147C.1
atccccgcggggggcgagccgacctatcgtcctgtcgtggaggaagcaatggcggtccgtggcaaggcgattggcgctggtgccgctgaagaaggcaacgtcaaggagctccaagctgggctgcagtttcccgtgcggcagagatcgcctcggatcctcaagggcgggggggacgccaagcgcgtgggcaccggcgcccctgtctacctcgcagatggcctggagtacctcgccgatgaggtcctggagcttgctgggaacccaatgagggataacaagaagacccgcatcgtgcctcgtgacatgcaactcgccgtgcgcaacgacgaggagctgaccatatctgcttggtggtgccaccatctggagcggtggcgttatgcccaacatccaccaccacctcctacccaaaaaggctggctcgatcaaagcttacaccggcactaacgatgacaactgatactgcccactggagaatgcattcaataccggcttgtttcctaagtttagcacgcacctacacggcatgtctttgatagctctatgtgtttgacaatgacaatagtttctttctt

SEQ ID NO: 97188 - DNA, 500 bp, Zea mays
  Clone ID: MRT4577_20148C.1
ggcacaaaacttggacaattttaattaatgtgcaaaaacctttcctttaggacaactgtttttccccaacaatccttttaaaaaattttttttaatccaacatctggcctttttggaacggctttttgcccaaaaaatttgtttttggccaccaaaccctttactttttaaccctttttattaaggcttgaaacaccttaaccagtgatcatggggcccgtgcccccctctgtgaaaatctcaaacaaaaaaaagtggggaacccccccataaatgatccttggggggggcccaccctgggcaaggggcgtaaacacaacactccaccttgggtattaaaccaacaatttcctttccggaagcccccatttttcccaccccaagaattttaaccacctttaccaggcttccaaggttatttccggccctcaaaattccaaacacacttttttaacaaaaatattttttttggcccccacgggaattgtaattttcccccc

SEQ ID NO: 97189 - DNA, 294 bp, Zea mays
  Clone ID: MRT4577_20149C.1
aaccaaaaaagggtttattaaaacatgttctgaaaaaaaaacaacccctcgatgttcgagggaccctcgaaaaacaaggttcgacccgacggtaacaagcatacccccgggggggggcctatttgtgtaataggaggaacccccaggcggggtactaagcctgtttgcaaaacacagccaaaaaaatatgccccccctcaaaattatataaaaaaacccggccctgcatgcagggttggtttgctatggaccccggggttgctcaaaaaccaaaaaacttggagggcccctttt

SEQ ID NO: 97190 - DNA, 4641 bp, Zea mays
  Clone ID: MRT4577_2014C.1
atggatcctaaaggcaaggggatggtgatcaacgacaaagaaaaggagtccttcgtcaacgagccaagggatgacatgtccaacgactcgagctcgggccacaaaagaaaagatgggaggaagaagaagacaaggcgcatcaaggaaattgtctactacgacagcgacgaatcttcctcctcccaaaaggacgacgacgactatgatagacgaaagacgcgcatcccgcatagttcaaatgctcaattgcttcccattccacttggcaagccccctcactttgatggagaggattacggattttggagccacaaaatgcgtactcacctgttttctctccatccaagcatttgggagattgtggaaagtggaatgaaatttgatagctcggatagccctatgtttattaatgaacaaattcatagaaatgcacaagctactactgtattgctagcctctttgtgcagggacgagtatcacaaggtgagcggcttggacaatgccaagcagatctgggacaccctcaagatctctcatgagggaaacgacgtcaccttgctcaccaaaatggagttggtggaaggcgaacttggacggttcgcgatgataaggggggaggagccgacgcaaacatacaaccggctcaagacccttatcaacaaaataaggagctacgggagcacgcgatggacggatcacgacgtcgtccgcctaatgctaaggtcatttaccgttcttgatcctcatttggtgaacaatatacgtgaaaatcccaggtacaccaagatgtcgctcgaagaagttcttgggaaattcgttagtgggcgaatgatgattaaggaggcaaggtacgtggacgacgccttgaatggtccgatcaacgagccgcaaacccttgctctcaaagcaacacgaagcaagaaggcgctacctagcaaggtggcacagtttgaggcggccggacttaatgatgaagagatggtcctcatcatcaaaagattcaagacggcgctaaagggtcgaaagggacagccaagcaagactaagaccaagggaaagcgatcatgcttcaaatgcggtaagcttggtcattttattgctaattgtcccgacaatgatagtgaccaggaacacgggagcaagagggaaaagaagaagcattacaggaaggccaagggcgaggcacatatcggaaaggagtgggattcggattgctcctcctccgactccgacaatgaaggactcaccgccactgccttcaacaagtcatccctcttccccaacgaacgtcacacatgccttatggcaagggagaagaaggtatgtaatcaaaacaatgtcacttatgattcttctagtgacgatgagtctagtgatgatgaaatagattactctagtttgttcaagggattggatagaactaaagtagataaaattaatgaactgattgatgccttaaatgaaaaagatagactcttagaaaaacaagaggatcttttgtatgaagagcatgacaaatttgtagaggcacaaaaatcttatgctttagaagttaaaagaaatgaagtgctttctagtgaactatcttcgtgtcatgaaaccattgctactttaaagagtgttaatgatgacttaaatgctaaactagaagtagctagtaaatctaattcttgtgtagaacatgttgagatttgcactaggtgtaaagatttcgatgttgatgcttgtagtaatcatttagtttcaatttccaaattaactgaggaattggctagtctcaatgcccaacttaggactagcaagaatgaatttgataaactaaaatttgcaagggatgcctacacgattggtagacacccctcaattaaggatggacttggcttcaagagggaagccaagaacttaacaagccataaggctcccattcccgctaaggagaaagggaaggcccctatggctactagtgctaaaaagaaccatgcctttttgtactatgatagaagacaacctagaaatgcttataggagttgtaatgcatataatgcctttgactctcatgccatgtttgcttctagttcttcatatgtgcatgatagaaatgttggtagaaggaatgttgttcataatatgcctagaagagatgttgttaatactcctaggaaagttaatgagccttctacaatatatcatgctttgaatgcttcctttgcaatttgtagaaaggatagaaaggtttatgcatccgggggttcaagctggattattgatagtggatgcacaaaccatatgacgggggagaagaagatgttcacctcctacgtaaagaataaggattcccaagattcaattatcttcggtgatgggaatcaaggcaaggataagtctgaaacccaagggaccctcaagcgcttcctcaggagagctcaaaatgagtttgagctcaaggtgaagaagataaggagcgacaacgggtccgagttcaagaaccttcaagtggaggagtttcttgaggaggaagggatcaagcacgagttctccgctccctacacaccacagcaaaatggtgtggtagagaggaagaacaggacgctaatcgatatggcgaggacgatgcttggagaattcaagacccccaagtgtttctggtcggaagccgtgaacacggcttgccacgccatcaacagggtctaccttcatcgcctcctcaagaagacttcgtatgagctgctaaccggtaacaaacccaatgtatcttactttcgtgtatttgggagcaagtgctacattctagtaaagaagggtagaaattctaagtttgctcccaaagttgtagaagggtttttgttaggttatgactcaaatacaaaggcgtatagagtcttcaacaaatcatcgggtttggttgaagtctctagcgacgttgtatttgatgagactaatggctctccaagagagcaagttgttgattgtgatgatgtagatgaagaagatgttccgacggccgctatacgaaccatggcgattggagtagtgcggccacaggaacaagatgaacgagatcaaccttcttcctcaacaatgatgcatcccccaactcaaaacgatgaacagcctttcagggtagaggaggccttgctagatccggactgggtgttggccatgcaggaggagctcaacaacttcaagcgcaatgaagtttggacactggtgcctcgtccgaagcaaaatgttgtgggaaccaagtgggtgttccgcaacaaacaggacgagcacggggtggtgacgaggaacaaggctcgacttgtggcaaaaggttatgcccaagtcgcaggtttggactttgaggagacgtttgctcctgtggctaggctagaatcaattcgtatcttgctagcatatgccgctcaccattctttcaggttgttccaaatggatgtgaagagcgccttcctcaacgggccaatcaaggaggaggtgtacgtggagcaaccccctggcttcgaggatgaacggtaccccgaccacgtgtgtaagctctctaaggcgctctatggacttaagcaagccccaagagcatggtatgaatgccttagagactttttacttgctaatgctttcaaggttgggaaagccgatccaactctgttcactaagacatgtgatggtgatttgtttgtgtgccaaatttatgtcgatgacataatatttggttctactaaccaaaagtcttgtgaagagtttagcagggtgatgacgcagaaattcgagatgtcgatgatgggcgagttgaactacttccttgggttccaagtgaagcaactcaaggacggcaccttcatctcccaaacaaagtacacgcaagacttgctgaagcggtttgggatgaaggacgccaagcccgcaaagactccgatgggaaccgacggacacaccgacctcaacaaaggaggtaagtctgttgatcaaaaagcataccggtcaatgatagggtctttactttatttatgtgctagtagaccgaacattatgcttagcgtatgcatgtgtgctagatttcaatccgatcctaaggagtgtcacttagtggcggtgaagcgaattcttagatatttggttgctacgccttgcttcgggctctggtatccaaaggggtctacctttgacttggttggatactcagactccgactatgctggatgtaaggtcgataggaagagtacatcagggacgtgccaattcttaggaaggtccctggtgtcgtggaactctaagaaacaaacctttgttgccctatccaccgctgaggccgagtatgttgccgcaggccagtgttgcgcgcaactactttggatgaggcaaaccctcagggactttggctacaatctgagcaaagtcccactcctatgtgataatgagagtgctatccgcatggcggaaaatcctgttgagcacagccgcacaaaacacatagacatccagcatcactttttgagagaccaccagcaaaagggagataacgaattgtttcatgttagcaccgagaaccagctagccgatatctttaccaagcctctagatgagaagaccttttgcaggctgcgtagtgagctaaatgtcttagatttgcggaacttggattga

SEQ ID NO: 97191 - DNA, 237 bp, Zea mays
  unsure (1)..(237): unsure at all n locations
  Clone ID: MRT4577_20150C.1
ccaggcgccacaggagccgcccncacccaaggacanacccggagagaccggaaagaagcggacancnggccccgccaagcgcaacagcgaccagcacagaaacccnngagcaggcgaggccacgccagcaaagcagggggggcgacccngcaccagaagngcccnncgagcccgganngggnngcggacacgcggcngcancaccgacaanagaaagnagcncnggcacagcnacag

SEQ ID NO: 97192 - DNA, 685 bp, Zea mays
  Clone ID: MRT4577_20151C.1
gcacgagggccataccgctcgctcgctcgcactttgcccgcaccccacccgacccacaccctgcacgcagcagcaacgagtctccctgggaggagcgagcgagagagcggtatggccggtggcagcatggtgttcgagccccacgcgggcacggtggcgggcggcgacgtcgtgttctgcgcggccatcgtgtgcctgtcgctcctgtccatgatcatcttcgcggcttccggctcctctggcgctggggacggggaggaaggggtgaagccgcggcggcgcggacgatccaacgggcctgtgttcgtgggcggcaggggctgcggctgcggcggctgcggcgcgggggccggcgtctgcggcacctacctctcctgaccggccactgcgtcggggcagagcacgcacgacgcgaccgccgatggactctccgcatcggcggcgtgcacgctggctgtacatactcgcatatatactagtacgctgcacggcagagcatgtcgtaataatcagaattaagctcgatttcagtgtccatggtcatggctgctgcgcttaatttccctttgatgttctcttcattcccctgctactactaataaacatgatgatgcaattattaccatgtaagtagttatctaaagaagagacggctcgcttttaattttaaaaaaaaaaaaaaaaa

SEQ ID NO: 97193 - DNA, 167 bp, Zea mays
  Clone ID: MRT4577_20152C.1
tagtgcccacatgtaagactccgccgggcggggtatgaacaatctggcacgatactcactagccacggtgtgcgatctcggacgcgctagctgttttccccctcgttgcacaacaatagctacatccccttcaccacctacctcagtacatacactatctgctacta

SEQ ID NO: 97194 - DNA, 302 bp, Zea mays
  Clone ID: MRT4577_20153C.1
aaaaaaaaaaaagtaaaaaaaaaaaaattatataaaaaaaaaataaagaaaaaaaaaaaggggtgaaaaaaaatggaaaaaagttaagaaattatttaatgagggcgtctgttttaggggatcgtcgttttcttcctcgggcttgctctggtcatgcgttttttgttggttgacttaacttcattttactggatgttgctttccttagtcgtgactgtaaagaccttggcgttcccgatcttaatggccttgtactgctttgccttttttccggttggggctttccctgtagggtctgaccc

SEQ ID NO: 97195 - DNA, 220 bp, Zea mays
  Clone ID: MRT4577_20154C.1
ccggtttccaccaaccgcgtccgcccacgcgatccgggaactcataactggcatgctacgctctccgccaatatgcacacaacgggcacgctcaataaccactgagcgagaacaagggtgacacgtccaggctacccccccagactgcctgcccacccttgcttctaacatgaccagaagcctgcgatccaaatcctgcactcaactcctcatccactga

SEQ ID NO: 97196 - DNA, 574 bp, Zea mays
  Clone ID: MRT4577_20155C.1
gcgccggggacggccacaccacctacggcttcgccacgcgtcgcctcgaccatgggctcgggcttcatcgacaagggctcaccatggacaacagcagccgggccagggaaagggcaggccgtggcgctgcgcgtcggcggcgacctctgcgtggaggaccagggcgccatccatacgtaccaagacacgctctacgtgcactgcgcgcgccagtcctacacctacgactacatatacggcgcggtggactgcatcttaggtaacgcacccgcggggctccaaaactgcgacatgcaggcccggaggccgagccctggacaaaaagacacggtgacggcgcagggacactaccgaccccaaccaaaactcccgcatgtgcatgcaccgatgtaggatcaccggcgcgccgaacctctgggggactccagagtacctgaggcgtgcgaggcatacgtactcggggacgggcgtcatggagagcttactagaccgctcggtctcgccggacgggtggctcgagtggtcgggccagttcgctatgagcacgtagtactacggggagtacggaaatacc

SEQ ID NO: 97197 - DNA, 230 bp, Zea mays
  Clone ID: MRT4577_20156C.1
tttttattttttttcgaaccaaataagccttttcctgaaccggatcctggagatttacattgttacttttcaaggtggataattacatcgtttcaaggatcacttttaaagatttcagtaaagcaaggaaacattttaattttaggacggtcacataaaggtgttcgttatttaaacgattcattaactcattattttaaagttttaataccaaactagtgtactataat

SEQ ID NO: 97198 - DNA, 475 bp, Zea mays
  Clone ID: MRT4577_20157C.1
ggggggaaaaccccgggaactttttgggttttcagggggggttgggaaaaaaggcacccgggtttaattttacaaccaggaaaataaggtcaaatgggaatgggcctttaattaaggggggccctcctccgggatttttaaccccccgggggggggcccgagaaaacccccaatctggtgggttttttggaaaaagggccaatgttttaaactttcatttacccaaacccatgggggccaaattggggggtttaaaaagcaacttaggggcaatagtttccccccctggggccctaaaagggtcaaaaactttcccaacaaatcggaaagcgttgagggggtgccccaaaacaaaaaaaggaattcccattcttaaaaaggggacaaggctcccttccctccccattataaaacccctcattattagggttttgaaaggggcctgggcaactttccaaagttttttggcctttca

SEQ ID NO: 97199 - DNA, 272 bp, Zea mays
  Clone ID: MRT4577_20158C.1
ctcatctataacttttatttcctttttcgacaaacccaccacggggggagatataaatgcattcacttaaaaatacaaccataaattataacatacatccactaatatacctatgaatatgcccttatcaacaggtgcaaacatataacaaaaatgtttatcacatacgccaatgatcacgcctaatccaaaatttctacatacagaacgacacatacgttaaacatgacatggaccagcagaaaaacaaactgacgaaggcactttatttt

SEQ ID NO: 97200 - DNA, 495 bp, Zea mays
  Clone ID: MRT4577_20159C.1
ggcccaccgggggggaaggcccgcatataaaaatgggggggggaaaacctttttggcatggccaagtccaaaaccaatccctttttgcaattttggacacaaaaaaaattttacctaatcaccccttccacaaacaaaattagcagcagcccgtagtagctcaaaaaattttcaggcccccttgggaaaacaatattatttgggatggggggaacccagctttcaaaaggaataatttcaagctcagcccaccaaaggggggacacctttgggggtgccccatcaggccccaggggggggattttttttattcgaggtgggaccttttttatttgggggcttttttttggatcccgatcaaaggaggaccccacaacctcacaaagggctcgggcaaggtccccggggaaaaaacccatgctaggggaaaaaaactcctaaaaaagcatcccgcctttaaaaagggagacacccaattttccagggggccggcat

SEQ ID NO: 97201 - DNA, 771 bp, Zea mays
  Clone ID: MRT4577_2015C.1
atggctgccgctgcagaggccgtcgccccgcaggcccgaggtcgctcgtaccctcggggacggaaccggagtcccgtttgtgatggcactttggatgccagtgagttcgttcattgtggctgtcgaggcctgaacgtcttagttgaagagacccctcggccgcccttcggtggatcgaggccgggggtagcgatatcagtacgaacggaggcggagttggctcgagaatggggaacctggttggccggagcctatccgtgttgtccgtcagcggggccgacgccaaagtcgatcagtcgaggcctcggatcgggctggcgcccttggaagccggttgaccgaggccccaggggtaaccggttgagccgcctgctcgggccggattcccggaggggcccctgggccgcggcgccgcccgaggctgggtcgggctttgctgaagacgtcgtcgatgccgagggtgctacggctcccttcggcgtgaagacccgaacctgcaggatcagatcatcttgtagcgtgtgctttctgcggccgtcgaggccagaagaacacgccctcgccgcgctcgcgaagctgcgtcttttttcctcctatttcgagcatctggactctgtcggtaacagggatgtttgtgtgagcgagagttgcttttcgcggaagggacgagtgaggtatccgtataccagaggcgtgggaatccctcggatcggtcggccttgccgcttacgcatactttcacccgtccatgaggctctgtccccgacttag

SEQ ID NO: 97202 - DNA, 747 bp, Zea mays
  unsure (1)..(747): unsure at all n locations
  Clone ID: MRT4577_20160C.1
tgatacaggggtaggagaaggaggaggaggagtanaagcagctccacacctgtacgtagctgccgcgcgccggtgagcgaggtcgttcttgagagctgtatatatatatatagctccgcgacgacgccgatgatggccatcaagtcgctgagcatggtggaggccagcctgcctccggggttcaggttccacccgcgcgacgacgagctcgtgctggactaccgggccaagaagctcggcggcggcggaggcccctgtggtggtgagcatctacggctgccccaccatggtcgacgtcgatctcaacgagtgcgagccctgggaccttcccggtatgtaagacgacggcgcctacacatgctaatataacttgcttgttcctgtccttgatttctggccaagattgatatgatcgagcttttccccttgccaagtccttaattgcgcagcgaattcttcttccttccttcccttcccttcccttcctcttgggtttttgaattaatccccccctgctgtgtgagagcgctattaattattctctttggggtctgatctgttattatggtatgggttcctgatgactaaggagttgaattggtccctcacataatcctttatgttatggccatcaaaggatttttnttaagtgggaaaaaaaaaaaaaaaaaaaagggcgccctaggggccccccgaggcccccccccctttntgggcccccccccccctgagagggggggggggggg

SEQ ID NO: 97203 - DNA, 505 bp, Zea mays
  Clone ID: MRT4577_20161C.1
tatgctccctttcctgcggtgtttctgccgctagaacaagttcccccaaagatccagtaggagaggagcatggcagaagcggcggccgtcggcgggcctcacctccctgatgagatcgtcacctgggagattctcatccgcctgccgccgaagcccctcctccgctgccgcgccgtctgctgctcctggcaccgccgcctcacctccgactccaaattcctcctcgcccaccaccgccgccagccgtcgctccctctcgtcaccaccggagaaacccatgagagaaggatcgacgccctggaccactgcacccgcgagcagcgccctgtcgcgcggacggccaccgccggggacctcgacgtgctcgcctcctgcgacggcctcctcatcctcgtcgcctacggcggcctccacatctgcaacccggcgactggccagcgcgctcctctcccgctgcttcacgccgcctgcatctccgggttgtaccctcaccgcccatcggggt

SEQ ID NO: 97204 - DNA, 407 bp, Zea mays
  Clone ID: MRT4577_20162C.1
gaccgaccacacccgtccaagcacacctaatggccgagtttatttttgagttccaaaaaaaggaaaggcaactgaaggaggagaccagggttttgaaaaaggaacttgcggagaggcaaaaggccgtcgcaagccgccagaagaaggtgcaggggaaccagaaaacacatgcccaggcccaaacaggctaataatggtcctccttaatgagagggcaggatcagcagggatggccgcttcaaaacaaaatttgtttcccgccgtggccaatggaaaatagaggtgaaaagctggttgcggcggcccacaagaagccattgccggggcaggcccaaccgaagttccgaatggaaggtctgccaccatggatgctgagcacacctaaatgcataaggaaagggtcgatg

SEQ ID NO: 97205 - DNA, 390 bp, Zea mays
  Clone ID: MRT4577_20163C.1
tcgcgatctagaactagcttaatattattactgagctcagagatcgatcaacaagtcatatgctctaatttagaaaagaactatgtgcatttacttactggaggaagaaaccaaggtcaaaaggcaaaatggcagtcttcatatcgtgtgtcaagcataactatattgccttatgaactgaagtaaaaattagaattatcaagcaacagtacgaacaaccaacagtgacgagacttgctcttgcacaaatgtttatcccaacaaaggatcacgaactcgctagatacactaactgaggctcattccctttgcttgaggcactgtcttaggaacaacttcagagtaggtcgactgaaacttagaagaaacagagatacatatgttaactta

SEQ ID NO: 97206 - DNA, 359 bp, Zea mays
  Clone ID: MRT4577_20164C.1
acggccgacccactcgtgcgcatggtctatgggacgatgactttgacgattacgaccactcatgccgacgttctagctgagctacaataacaagtcgacggaggtgttccagtccgtgccgtacgtggtggccctcttcatcgtcatgctgtggatctactacgcgctgctcaagtccaaccagctcctgctcatcaccattaactccgccagctgcctcatcgacactctatacatcgccatgtacctgctctacacgcccaagaaggcaaagatgttcacggtcaagatcctcctcctccttaacgtagaccttttctggctcatcctccttctcacgctgttgctctccgtcagac

SEQ ID NO: 97207 - DNA, 1943 bp, Zea mays
  Clone ID: MRT4577_20165C.1
cattgggtacctcgaggccggccggggagagagaaactgaagaaacaacattttccgtttttcttgcttagtgaaaccagtggaagagggagagaaaagaagacgaagacgacaatataagtaaataaaaaaaaaggcagcgagcgaggtggggaaaaaggggcgagttgatagagagaaagatagagagagaaggcgagggaggcagggatcacgaggtgtgcttcctcctccgcccaatcgggcccaaccaaatcccgccagcgccgcctcctttatactcccacctctttcccggagcttcttggatcacgggacgcgcgccgcgggccggtacgctgctggtgctggaccgctcgactctcgcctaccagctgctgctttggctggcgcgccggcgagagagagagagagagagggacgcgacggcgatggaccgggcggcgctcaccgtgggcccggggatggacatgcccataatgcacgacggcgaccgctacgagcttgtccgcgacatcggctccggcaacttcggcgtcgcgcgcctcatgcgcaaccgcgccgacggccagctcgtcgccgtcaagtacatcgaccgaggcgagaagattgacgagaacgtgcagcgggagatcatcaaccaccgctcgctgcgccaccccaacatcatccgcttcaaggaggtcatcctcaccccgacgcacctggccatcgtcatggagtacgcctccggcggcgagctcttcgagcgcatctgcaacgccggcagattcagcgaggacgaggcgcgtttctttttccagcaactcatatcaggggtcagctactgccattccatgcaagtatgccatcgtgacttgaagctagagaacaccctgttggacggcagcaccgcgcctcgcgtcaagatatgtgatttcggctactcaaagtcatcagttctacactctcagcccaaatctaccgtgggaactccagcatacattgctcctgaggttcttctgaagaaggaatacgatgggaaggttgccgacgtgtggtcgtgtggggtaaccctctacgtgatgctggtcggcgcgtatccattcgaggacccagacgagcctaagaatttcaggaagacgatccagagaatactgggcgtgcagtactcggttccagactacgtccacatatctccggaatgccaggacctaatctccaggatcttcgtcgccaacccgtccaccaggatcaccatgcccgagatacggagccacccttggttcctgaagaacctcccggccgacctggtggacgacagcgcgacgacgacgagcaagcagtacgaggagcccgagcagccgatgcagggcatggacgagatcatgcagatcctgggcgaggccaccattccggcggcggggtcccgcgggctcaaccagttcctgaacgacggcctggacctcgacgacgacatggaggacctggactcggacgccgacctcgacctggagagcagcggggagatcgtgtacgctatgtgacggcgccgagtgctcagcgacgaggcaatgtctcgttgcgctcgcaggttgccgagataactagagagacggagagggtgggtgtgtgctgctgctgcctgcagcctgcgtgtagttgtgtgctttcaggtctctgctgctcatgcctgatgccgtcgttcgtgatggcccctttttaccgtcctgttgtgtttggccgttgttatttggtgcgccttcagtgcagtgttttgcaacggtttagccatttggaatcgctactgctacaacctcgttcatccgagaggaccctttgtttctgcatccccagcgatgtacttgtattactacactgtatcatatgttatatttggtgtaggaaaataaaggaactccattgcccgttcaaaaaaaaaaaaaaaaaaggcccctagggcc

SEQ ID NO: 97208 - DNA, 517 bp, Zea mays
  Clone ID: MRT4577_20166C.1
tccacgcgtccgcccacgcgttcgcccacgcgtacgcccacgcgtccgttatgacttacctgccaattgatttcaagaacaaatgcaatgttggatacgcgttcgttaacatgatatcgtcggtgcacattatatcattctaccaggcttttaatggtaagaaatgggagaagttcaacatctagaaggtagcctcgtggcttatgctagaattcatggacggtctgcactgatatcacattttcaaaattcaaggacggtctgcactgataagaggtgtcgcccgattctttttaatcccaatggaagcatttccaatcaatggcatatgcatccacatgctttcgaaagatgattaccctgacaacgaagaagacgacaagggtctaaacgagaagataggagagagctcgaccgatatggctgagagttgtgacgtctgatagcagacaggatcaggatggccggacatataaatctaactgtctagagagtatccacccccatattgtataaa

SEQ ID NO: 97209 - DNA, 2118 bp, Zea mays
  Clone ID: MRT4577_20167C.1
ccctcgaggccggccggggcagccctatcgtcgtcttcggttcgtctcttctgttgctgggctcgtcgcgagggtagcagaggccagatgagggacagagcaagtgagagaagctgaagaaacaatttgtttttttctttcttatcgaaacagcacagaccagtgaaagagggagcgaattagtgaaaagaagacaataaataaatacaacgaatgcagcgagcgaggtggaggtggggggaaaagggcgaggtgacaccgtgacagagagaaggcgagggagggatcacgaggtgtgcttcctcctccgcccaatcctgcccaaccaaatccgccagcgccgcctcctttacactcccacctctgtcccggagcaaaaaagggagggagaggctcgcttcttggatcgcggggtcacgggacgcgcgccgcgggccggtacgctgctgctggcggactgctcgacccttgcctaccagctgctgcctgctgctgcttccttggctggcgccggcgagagacggaggcgaggcgaggcgaggcgacgacgatggaccgggcggcgctcaccgtgggcccggggatggacatgcccataatgcacgacggcgaccgctacgagctcgtccgcgacatcggctccggcaacttcggcgtcgcgcgcctcatgcgcaaccgcgccgacggccagctcgtcgccgtcaagtacatcgagcgaggcgagaagattgacgagaacgtgcagcgggagatcatcaaccaccgctccctgcggcaccccaacatcatccgcttcaaggaggtcatcctcaccccgacgcacctcgccatcgtcatggagtacgcctccggcggggagctcttcgagcgcatctgcaacgctggcaggttcagcgaggacgaggcgcgtttctttttccagcaactcatatcaggggtcagctactgccattccatgcaagtatgccatcgcgacttgaagctagagaacaccctgttggacgggagcaccgcgcctcgcctcaagatatgtgattttggctactcaaagtcatcagttctacactcgcagccgaaatctacagtgggaactcctgcatacattgctcctgaggttcttctgaagaaggaatatgatgggaaggttgctgatgtgtggtcatgtggagtaacgctctacgtgatgctggtcggcgcgtatccgttcgaggacccagacgagcctaagaatttcaggaagacgatccaggttctctctccgcagacgcgcgcgtttattacatccagtgttccaaaaccgccgacgagattattcttgtcttgcagagaatactgggcgtgcagtactcggttccagactacgtccacatatctccggaatgccaggacctcatctccaggatcttcgtcgccaacccgtccaccaggatcaccatgcccgagatacggagccacccttggttcctgaagaacctcccggccgacctggtggacgacagcgcgacgacgacgagcaagcagtacgaggagcccgagcagccgatgcagggcatggacgagatcatgcagatcctgggcgaggccaccattccggcggcggggtcccgcgggctcaaccagttcctgaacgacggcctggacctcgacgacgacatggaggacctggactcggacgccgacctcgacctggagagcagcggggagatcgtgtacgctatgtgacggcacggcgccgagtgctcagcgacgaggcaatgtctcgttgcgctttcgcaggttgccgagataactagagagacggagagggtggggcgtgggtgtgtgctgcctgctgcctgcttctagttgtgtgctcgcaggtctctgctgctcatgcctgatgccgtcgttcgtgatggcccctttttaccgtcccgttgtgtttggccgttgttatttggtgcgccttcagttcagtgttttgcaacggtttagccatttggaattgctactgctagaacctcgttcaaccgagaggaaccctttgtttctgcatccccagcgatgtacttgtattactacactgtatcatatgttatatttggtgtaggaaaataaaggaactacatttcccgtttc

SEQ ID NO: 97210 - DNA, 115 bp, Zea mays
  Clone ID: MRT4577_20168C.1
ccagcttcagcgacctcaaccatctcattttcgccaccatgagcggcatcacctgctgcgtcctctttccaagggagctggactctaacctttgtaagctgtccgacaacctgat

SEQ ID NO: 97211 - DNA, 472 bp, Zea mays
  unsure (1)..(472): unsure at all n locations
  Clone ID: MRT4577_20169C.1
ttntttttttttttttttttttttttttctttttttttttttttttttttatttttttttttttttttttttttttcttttttttttttgatcaagggacaggctaccccagtcaaacaacaaacagaagcacccaaagctgaatccagccaaaacggagaaggcagaaaatggggcagcaaaacagggacccaccccagagaggtggagcataagttccagacccacccaaacccccaattccaaaacaggcaaaacccccccaaacccaaggggctttaaggaaccggcttttcccacctccaacggaaacgcctttactcgtttaaggaaaaaacaccgggccatcttttaagtcacatcactggcaggcgcttccttttgggggaaaagggaaagggttttagaggaaaaaagttaaaaaaactgggaaaaatcaccttccttcaatctttgggaaaaccccgggtaa

SEQ ID NO: 97212 - DNA, 1873 bp, Zea mays
  Clone ID: MRT4577_2016C.1
atggatcctaaggggaagggaatcgtgatcaacgacaaggaaaaggagtccttcgtcaacgagccaaaagatgacaaatccaatgactctggctcgggccacaagcacaaagatgggaagaagaagaagacaaggcgcatcaaggagatcgtctactacgacagcgacgaatcctcttcttctcaaaaggacgacgacaacgactacaggaagacggtcaattcgaacttttcatttgattattctcgtattccacatagttcgaattcgcatttgctttccattcctctcggcaaacctccacactttgatggggaggactacggattttggagtcacaaaatgcgtagtcatttattctctctccatccaagcatatgggagatcgtagagaatggaatgaaatttgatagctcggatagccctatgtttattaatgaacaaattcataaaaatgcacaagctactactgtgttgctagcctctttgtgcagggacgagtacaataaggtgagctgcttggacaatgccaagcagatatgggacaccctcaagatttctcacgaggggaacgacatcaccatgctcaccaaaatggagttggtggagggcgagcttggaaggtttgcaatgataaggggcgaggagccaacccaaacatacaaccggctcaagacccttatcaacaaaataaggagctacggaagcacgcgatggacggatcacgacggcgtccgcctaatgctaaggtcattcaccgttcttgatccttatctcgtgaacaatattcgtgagaatcccaggtacacgaagatgacgcccgaggaggtactcggaaaattcgtaagcgggcggatgatgatcaaggaggcaagatacgtggacgacgccttaaatggaccgatcaacgagcatcaaccccttgctctcaaggcaacaagaagcaaggaggcgctacctagcaaggtggcacaaattgaggcggccggacttaatgatgaagagatggctctcatcatcaaacgcttcaagacggtgctaaaaggtcacaaggggcagccaagcaagaccaagacaaaggggaagcgctcatgcttcaagtgcggtaagattggtcattttatcgctaactgccccgataacgatagtgaccaggaacaggggaacaagagggaaaagaagaagaattacaagaaggccaagggcgaggcacacatcggaaaggagtgggattcggattgctcctccgactccgacaatgaaggactcgccgccaccgccttcaacaagtcatccctcttccccaacgagcgtcacacatgccttatggcaagggagaagaaggtgagtactcgagactccacttatgcttcttctagtgataatgagtctagtgatgatgatgacatagactattcatgcttattcaagggcttagatagatctaagatagacaaaataaatgaattgattgatgccttgaatgataagaatgtgcttttagaaaggcaagaggatttgttgtatgaagaacatgacaagtttgtagaagcacaaaaatcacttgcattagagattaagagaaatgaaatgctttcttgtgaattgtctacatgtcatgattcaattgctagtttaaagagcataaatgatgatttaaatactaaactagaaaaatctagtaaatcaacatcttgtgtagaacatgttgagatttgcactaggtgtaaagatttcgatgttgatgcctgtagcgatcatttagtttcaatttccaaactaactgaggaattggctagtcttaatgcccaacttaagactagcaagaatgaatttgataaactaaaatttgcaagggatgcctacacgatcg

SEQ ID NO: 97213 - DNA, 376 bp, Zea mays
  Clone ID: MRT4577_20170C.1
gccacgcgtccggccacgcgtccgctcgtattctagcaccacagcaaacaggatcgaaggagaagaaactaatagttaccgtccaggtggtcgatcgaacgaagctcctgctgcataccggccgtgcgcacatgaccatgacacggacgatgtgcctagacctgctccttctactactggcggacgcgtctacagccacggtgcatttgactattcaccgatgtggatgactacctctccaagcgcacgcagtactaccgccacaagaacaacgatctcgcggccatatatgaccttaactccaaagcgcaacgcttccacatccactgacatgcacgctcctatggccctatatacgacctgcatgacgaggcaa

SEQ ID NO: 97214 - DNA, 410 bp, Zea mays
  Clone ID: MRT4577_20171C.1
cttccccttcttttccctgcctcctcaatgcacgccgtctccccttctcagaggcaccagctcctccgggcatctggggacttgtactgtcctttccccgttcaggtggaaagtaaggaattcctcttctggctgcgaggtatattctgccgtccgctgtgtaatctgttcacaatgtcaacaggtgctgcaagtgcaccaatgcttttgactccggagaagaggtctcactaccactacaagtacaccgaatgaagcgtgactcccagtgtgctgatgccccatttcactgaccaggtcccagaccaaattgcgaagtcgtgttttctacgacgtggactgtggatttctcaaaaactgtctcgcaaatgatgtcggccctcagtacgtcaccggcacaccagatgctc

SEQ ID NO: 97215 - DNA, 490 bp, Zea mays
  Clone ID: MRT4577_20172C.1
tgaggttcccctttttttaaatttctcttaaccgaagacgaaagaaaaacaaggttttttttaattatttaaccaagcctccctaaatattattcaagggcaaaagggaaatcgtacaacaccatcccggtttttacaactggtaggccggccagcgcgcacccgttttgtgccctagcttgtgcccctgccccggttggtttacgaccactaatattttgaaaactttttcccccaggcggtagacgtcccgttgcctgggcaaaaagggggacccaatcgccggaaagtcggcaaagggcttttttcattccctggcacacttgacgggggccgacagtttctttgttatttctgtcgtctgggcctggggtccccccgccctcccagtggttaaaatctttcctcccctctttatgctgttcgacaactttttcccatccctttttttcaagcccccgaggttgtactctctttggccggccccctt

SEQ ID NO: 97216 - DNA, 519 bp, Zea mays
  Clone ID: MRT4577_20173C.1
gcgcgaaaagggctgaggctggaagagtactgccaggaacataacatcgcttacattccctttgatacctttgcggacatcaagcgcgagattgaaaagatacttgcagaggatcaggccaagacgtgtggccatggaaagccattgcttttcaatccgagagcgaacatgtggcagcgtgtgtcgagcaagcaagctgtccctcgcttcgttgctatgactccctcaaaagaagagcgcatgttcctctggccagagactttctccgagttgaagcctggtcagccagatgcggcagccttgaagtcgccgggcgtgactaccagagccatggcatagatatgtttttattcatcttgttttgatgcatcacgatcccacaaatattgcaaagactggcgttatggatacccacattgggtgatatagggtgatctctttttgtttcgcagtactacatgctagatcgattgattattctacggcaatgattttctccgtcaatcaatttgacgtatc

SEQ ID NO: 97217 - DNA, 191 bp, Zea mays
  Clone ID: MRT4577_20174C.1
gcggcgctcgaggcggccgggctcatcacagaggtgtaggtacaagatacgaaagaaacaccgccgccgccgcgccttccattccagtactcgcggaggaaatgaacaccagtcagcgccatgatcacgtcgacgaccgccgccgccgtgatgtacccgccgaccgtggccggacttctcctggcgccgtc

SEQ ID NO: 97218 - DNA, 343 bp, Zea mays
  Clone ID: MRT4577_20175C.1
attgtttgaattttgaaatactttaaggaggtttctagaggcagcggggaaagaaagtttattgctttcaatattaggttacgtgtataattgattaattgcatgagtagggcttatcactcaacttgctgattgcatgctgggttccataactgaccatgagagggcattgggagacctttttagtgaaaatgcagaaggatctcacaattttaatgctcgtcctaacacaagggctcctcgcatattcacagtctttgtatcaatgagggaaccccctctcgtacactaccgaattggccagacgattggtgcttttgctttgacaactctacgagactta

SEQ ID NO: 97219 - DNA, 463 bp, Zea mays
  Clone ID: MRT4577_20176C.1
cctgcgcgtgcacgtaccgaatcgcaatttcgacccacacgtaccgcgaacttcatgctactcattcagtacctctttacttttctgcgaggcctggttctgaatcttatatgttaaaacagcactttatatttcccgcaaaaaaaaggagcacatgatataggtatcaaatggctaatctgctattataacttgttgagcagttctgcccatatttccagattgatggttgaatgaaaactctttagttattgtgcttttggataaaataatgatacctgtttcaaacagaagtacaaataaatatcggttcagatctttcaaaatttatcttttaggggtaccatgttagtcaaggacttagccaacttcatggcacttttagtaaccatataccatgactctataacttatcttttagggattatctatagcacgttcatgttctctctctataagtctt

SEQ ID NO: 97220 - DNA, 665 bp, Zea mays
  Clone ID: MRT4577_20177C.1
gggtacctcgaggccggccgggaaggagtttcttgctgttctcttttcgctacttcctagctggaagcgacagacttccttgcctgctctcttctgtccccgtattcccgccgtcatggccgggcgaccgcggcgcatactcctcttcctcctaacaggtaacgatcaggcaggcgatacctgtactctaccagccctctgccgggtctgcgatggggggtcacgaccatcgcggacctcgtcgcttgccctcttgctcggcgtgcgccatctgcctcgtccggatagcgctgcccaaagacggacctcgacaaggtctgcgacctcggctactgtgtgacctgcctcttgagggggctgtcctactgggataaccctctctgccccccctgcaacagccattcatattccgcgcgagaccgctctttcgaccgtcggtacttgactacctgcaacgagcgtacagtgtcctgcctccctgagatgcgacttgttgtgaacctctgaacctggaggctcacgaagacgatctggaagaagaagagccctctccaccatcagcaccctcacgatgctgaccaagatgatcttgactggcaactttatcacgtgaggaagcccccaagcattctcattggtcacatgacacggagtgacgatgttga

SEQ ID NO: 97221 - DNA, 1234 bp, Zea mays
  Clone ID: MRT4577_20178C.1
acatggttttgttcttgatttgaagaaaatttggtcagaactcaggaccgtttgtagtacttgtcactcgagctctctgtacccaagtgaaagtgtcaggtgttcgaggaaatgttatgttaaaaacatcaaagtgtctcttagactgctactagcgtagcaacaaagacacaaagtgtgcttagagttatcatgttcacagctgtgcaatactacagtcaaagatgcacgacacatgacactggttgtacacacagcaggagaagaaacaaaactcgtccccccccttttattttagccgagatcagggacgatgaggtggtcctcgtcgtcggtgacctcggtccgggccttcttgctctggcgcaccccggtgccggcagtggcagtggctttggccggcctgtagtacgccgcgccgttcgcggcctgggttccggaaagctccggtacctcggccaacctcctgccggctttcggcgtctgcccgtggaagaggtcgatgtcggtgaaccactccagctccttgaacccgagcggggactccttgtgcagcttgtcgctggactcgcagtcggagaactgcaggagctcgtcgacggcccagccctgtggcaggaactgcggcggcgagggcacctgctgcgccgtgcggtggcgacggcggccttgggcggggcgtggtggtcggagtcgtcgtgggcgtcgcaggcgtcactgcacgctgacgaagcggaggcgaagccgacgcggatgccggtggcgaggtagcgctggtggttcccggagagcgtgcccgggacgtggatgggctcgtcgcagtcccggcagaagagcgcccggtcctccacgcagaagatgaacgccgctttctcctggcagacgtcgcagcgcgggaggctggcggagagcgcctcgagcgggaggcgctggtgcttgctggcgagcttgttggcggcgtggatctcgacgtcgcagcgcgcgcacagcgcggcctcgtcggcgcagcacaccacggtggcagccgcgccctcgcacgcgtcgcactggatcttcatggccgctccacctctctgtctgcggtctatactcccaggcccagctcgctatcctgtcccgccggctcgcaagtcgcacccccctgggggccgaggacgaacaagataaggccactgactgcgatggaggaggacgagcttgcgcgcgcgagcacgcaactggagcaatcagtgag

SEQ ID NO: 97222 - DNA, 427 bp, Zea mays
  Clone ID: MRT4577_20179C.1
gccggcaccggactgtgcttccacggcggcgacatgtttgagcacatcccgtcggctgatgcagttatgctcaagtggattctacacgactgggatgacgacaagtgcgtcaagataatggagcgctgcaaggaagcgatcagtggcaaggaagggggaggagggaaggtgattataatagaaacggtgcttggatctcggccagacgacgacgcgacatgcaaggagacgtatgtcttggatctccaaatactgagcttcgtgaacggagccgagcgagaggagcacgagtggaggaggatcttcctagctgctggattccgtgactacaagatcacgcacactcgtggtatcccgtcgatcatcgaggtcttcccatgatggatgagagtcgatcgatggatcgagagagagggcagggaataag

SEQ ID NO: 97223 - DNA, 1424 bp, Zea mays
  Clone ID: MRT4577_2017C.1
atggatcctaaggggaagggaatcatgatcaacgacaaagagaaggagtcctttgtcaacgagcctaaggatgataagcctaccgactcgggctcgggccatagacacaaagatggaaggaagaagaagtcgagacgcatcaaggagatcgtctactacgacgacagtgatgaatccacttcttctcataaggacaacgacgacaatgactacgacaaacgaaagacggatcaagggaacaagagggagaagaagaagaactataagaaggcaaagggtgaggcacatcttggcaaggagtgggattcagattgctcctcgtccgactccgacaatgaaggactcgccgccaccgccttcaacaagtcatccctcttccccaacgagcgtcacacatgccttatggcaagggagaagaaggtttatgcatccgggggttcaagctggattatcgacagcggatgcacaaaccatatgacgggggagaagaagatgttcacctcctacgtcaagaataaggattcccaagattcaatcatattcggtgatgggaaccaaggcaaggataagtctgaaacccaagggaccctcaagcgcttcctaaggagagctcaaaatgagtttgagctcaaggtaaagaagataagaagcgacaatgggtccgagttcaagaaccttcaagtggaggagttccttgaggaggaggggatcaagcacgagttctcccctccctacacacctcagcaaaatggtgtgatgaagaagacgttccaacggccgcgatacgcaccatggcgattggagatgtacggcctcaggaacaattggaacaagatcaaccgtcttcctcaactatggtgcatcccccaacccaagatgacgaacaggtacctcaagtggaggcgcatgatcaagggggagcacaggatgttcaaattgaagaggaagaagcacctcaggcacctccaacccaagttcgagcgacgattcaaagggatcatcccgtcgaccaaatattgggtgatattagcaagggagtaactactcgctcgagattagttaatttttgtgagcattactcctttgtctcttctattgagcctttcaggatagaagaggccttgctagatccggactgggtgttggccatgcaggaggaactcaacaatttcaagcgcaatgaagtttggacactggtgcctcgtcccaagcaaaacgttgtgggaaccaagtgggtgttccgcaacaaacaggacgagcacggggtggtgacgaggaataaggctcgacttgtggcaaaaggttatgcccaagtcgcaggtttggacttttgaggaccattgtgccctgttgaactcatgtattaccttgtgaagtccgttgtgtctggtttctacctgaccgtttcgttatctgatgctgtt

SEQ ID NO: 97224 - DNA, 416 bp, Zea mays
  unsure (1)..(416): unsure at all n locations
  Clone ID: MRT4577_20180C.1
atgtatttttttttttttttttttttttttttttctttttgagacgaactcagaagtctttccgcggaaatcgagcaattggaacgcttgggcggagcgcataacctcatttaaaggacaagctataaagccgaatcatccagaaaaacaaggttcttccgtggtaggattaaaatggctgggcgaccggaaagttgggatgaggcaatctggcccacgacatcaaagtcttggcacacattccactgttttcccccctgagcctggcttggccacggtggttttaacatctagcctgcgtgtgccgccccccgggatcttgcaaaccctggtggggcccggggggtgntcctgnggngggggggcttgcgtccgcgcgcccggttgggcttggtcggggcgggggcgggcgccgg

SEQ ID NO: 97225 - DNA, 148 bp, Zea mays
  unsure (1)..(148): unsure at all n locations
  Clone ID: MRT4577_20181C.1
ggggaaggaaatacataactntaacttactcattaatttttacacacgcaattacttataatctgccttgcggatttacaacattttgcatccttcccaaccntgctcttaataatacaacacttaatacctatcacaaccaattctt

SEQ ID NO: 97226 - DNA, 392 bp, Zea mays
  Clone ID: MRT4577_20182C.1
gaaaaaaaggggggcctttaacccaccaaacccttaagggaaaaagcaaaaggggggcggggtgcaaaaaggggtactatttttgctttaaaaaaaaaaaaggggggaaacccaaaccttactggtttacactcgcaaaaccaaaaagggcttctggggaaaaaaaaaagggtaaaagcccggtttggaaaaaaaaaagaggggagatcaaggggggggggggcttaaaaagcccagcgggttcaaaggaaaaggggggggggacctgttttgccaagctagactgactgaaagaataccgggggggccaccccggctttcccgaggggttggggcgggttttaaaaggggtttggggggaaaccggcccccaacgagaaaaaaatgggtcc

SEQ ID NO: 97227 - DNA, 637 bp, Zea mays
  unsure (1)..(637): unsure at all n locations
  Clone ID: MRT4577_20183C.1
attttcaaaagaggcgcgaccaagtgagcgtctctggcgacgggaatgccggagtgctccccggccttgctgctggctgccggcctcgccgtgctagcgatcggctcgtaccttgccgccatcgttgtcggccgcggcgccgcgcggtacccgcctgtggccggaacggtgttccaccaggtataccacctccggcggctgcacgactactacacggacctgttccgcgagcacgcgacgttccggctgctcgcgccgggccggaggcagatttacacctccgacacggcggtggtcgagcacatcctcaggaccaacttcgccaactacggcaagggcgcgtctcactacgacaagacgagcgatctcttcggagacggcatcttcacggccgacggcgacaagtggaggcagcagaggaagatcgccagctacgacttctccacgagggccctccgggacttcagcggcggcgtcttcaacagggacgccgccaagctcgcgcacatcgtctccggcaacgcagccgcgaagcaacccatggactttcaggagttgctgatgaaagcgacgatggactccatcttcaccatcgccagcggngtggacctcgacacgntgtcggggtctgacgagg

SEQ ID NO: 97228 - DNA, 322 bp, Zea mays
  Clone ID: MRT4577_20184C.1
caagaactgtcaagttacatttaggatggaaccacacatctttagagagctggcaacttatcttagaaggagaagaatcatcgttgatacaaggatcacgatcgaggagaagttggggttcttcttatacatgctaagtcacaatgcctcatatcaagatctttaagtgtactttggacatagtaatgataccttccatcatcacatcaaccacttctttacgaaggtcattcctatcctctctcgtcgtttcattcagtcttctgatcctaatcaagtgcatcaaaaaattcaagataatcctagattatatccattcttc

SEQ ID NO: 97229 - DNA, 185 bp, Zea mays
  Clone ID: MRT4577_20185C.1
accaaaattaagctggttgaggggggatttttaaagactgtctgcccttttcaaccgacaatacatgaaaggaaactgaatgatacagttctgaaagaggaaggaatgcaccaaatgcatcactcaggttatacctaaacatgattggtgttacatcagggagaggcacaaaagagtcacgagga

SEQ ID NO: 97230 - DNA, 353 bp, Zea mays
  Clone ID: MRT4577_20186C.1
aatacctagtcgtcgtcttcgcagaaaccgggaacaggggaacaccgcctcatgacgcggaaatacataaaccgccgccaaacttctgtatgtgcgagccacaatacgagaactatacatgaacaagaacacggcggtttagtgcgacctagctgctgagaatcgccgcactgcagtcacagccggatcatggttcaactttataaattaggggagacccttgtcagctatagttgccatggtggtgctcctagtcagcccacctcccatacgatggggaacttgagcaccgcggctgtatgacggatgctcccagcagcatataaagacatattaacaggcggcctggacat

SEQ ID NO: 97231 - DNA, 1655 bp, Zea mays
  unsure (1)..(1655): unsure at all n locations
  Clone ID: MRT4577_20187C.1
ggcatggcatccataggcatacatctcctcgcggagcctggggtggggcggtcaccaccatgcctaatcctatcgcaccaaggagtctgtctcgtgctcctcgtagtcttcctacccacccctccacccccccccccctttgcccccaatccctagccctgcccctctcctccagcgccgctcgccagctctctgcccccgccgcgcccagagatgcagatcccccaccgccgttaccgctgggtgaaggagtgggtcccgcaagatctggtcgtcaccggaggcccctgcacgctctacaagtgggtgcgagaggacagactagcagctttgaaggctaaggacaagaagcatgggggcagaatctgcaactcctgaacccaactctgaggttctcttcctgtgcagctacgaaggatgtgggaagacattttttgatgcaggggctcttaggaagcatgctcatgtccatggggagaggcaatatatctgtcactatgagaactgtggcaagaaattcttagatagttctaagttgaagagacattttcttattcatacaggagaaaagaattttgtgtgcccacatgaaggttgtgggaaggctttttcgttggattttaatttaaaggcacacatgaaaacacattctgcagataactatcatgtgtgccagtacccagaatgtggccgaagatttacacaagaatcaaaactgagagctcatatcagggcacaacatgagaaagctgttggcttgcagaatccaggtgcgtcatcaatgaaccacagtgcaattggaggtccgcaccagccccctaagccagcgaaggtctcagcagcacctccagctccctcagctgagcgcccttacgtctgcccctacgatggttgtgacaaggcatacatccatgagtacaagttgaacctccatctgaaaaaagagcatcccaaccactaccaggatggtggtccaaatggtgctgccgccccttcaaagcgcagcatctcgaagagttcccacaggagcaagctggacatcacctctaggatgccaccggccaacatccccaagcacagagggtatgcaacaccattgccagctgtggtgagcctccctgaggagcagcagttgctaaggaaagtggtgtacgaggatgacagcgaggagactgaagaagagggggataacaatggcgaggacagatggaactacaagagagctgctagcagcgacgacgaggaaaccgaagacgaagaatgagctgctagcagggattcatttttttttcttctgtagctgtgcatataccataatctatagactggtggttatagatttcaatacatgtacatttttaaaatacggctggcctatagtagacaagaggttgttgctgccatgccccttctcaactacacaggccatgagttcagaaaggataatggatcattgctcccgtctgcctgtgtttgtgccttttggtttgttgtcataaatgagttctcagttatcgtagccctgattgagtggatgtcaacagatctcgtcaaccgtacatttgtatgagcatgccatgtttactttgagaaatttatgcatccaccggtttcagaaaaaaaaaaaaaaaaaaaannnnnnaaaaaaaaaaaaa

SEQ ID NO: 97232 - DNA, 1162 bp, Zea mays
  Clone ID: MRT4577_20188C.1
ggacagactagcagctttgaaggctaaggacaagaagcatggggcagaatctgcaactcctgaacccaactctgaggttctcttcctgtgcagctacgaaggatgtgggaagacattttttgatgcaggggctcttaggaagcatgctcacgtccatggggagaggcaatatatctgtcactatgagaactgtggcaagaaattcttagatagttctaagttgaagagacattttcttattcatacaggagaaaagaattttgtgtgcccacatgaaggttgtgggaaggctttttcgttggattttaatttaaaggcacacacgtgaacgctgtcggcagataactatcatgtgtgccagtacccagaatgtggccgaagatttacacaagaatcaaaactaagagctcatatcagggcacaacatgagaaagctgtttgcctgcagaatccaggtgcttcggctatgaaccatagtgcaattggagaacagcatcagccccctaagccagcaaaggtctcagcaacgcctccagctccctcagctgagcgcccttacgtctgcccctacgatggttgcgacaaggcatacatccacgagtacaagctgaacctccatttgaaaaaggagcatcccaaccactaccaggatggtggtccacaaggcgctgccccttcaaagcgcagcatctcgaagagttcccataggagcagaccggacatcactgctagaatgccaccagccaaggtctccaagcgcaaaggagggtacgcagcgccatcgccagctgtgaacctccctgaggagcaccttcccgaggagcagcagtggccaaggaaagtgatgtacgaggatgacagcgaggagaccgaggaagaagaggggggcaacaatgtcgaggatagatggaactacaacagagctgctagtagcgatgacgaggaaaccgaagacgaacaatgagcttctagcaggcgtccatctgttctgtagttgtgcatataccataaattttaaactttgagggttatagcttttgcatacatgtaaaattttaaaataaggcggacttgttgtagacagcataggttgtaggtggtctgccccttctcaatcagacatgccatgagttcagaaaggataatggatcattgttctcgt

SEQ ID NO: 97233 - DNA, 257 bp, Zea mays
  Clone ID: MRT4577_20189C.1
gggttgaaacactacatacagtgggtggaacacattcttttacttcctttttttgcaatacataatcattattacccttctataactgataacatgcacacttacatttccaatacattatcatttaaaaacacacatttacattcacatataactctttccattgaaattcttatacttattaacacttcacagccatattcactaatagctctatatccacttttactacaccttattttcattaaggaaccatt

SEQ ID NO: 97234 - DNA, 4788 bp, Zea mays
  Clone ID: MRT4577_2018C.1
atggatcctaaggggaagggaatcgtgatcaacgacaaggagaaggagtccttcgtcaacgagccgaaggatgacaagcctactgactcgggctcgggccacaagcgcaaagatgggaagaagaagaagacaaggcgcatcaaggagatcgtctactacgacgatagcgatgagtctacttcttcccaaaaagacgatgacaacgactacaaaaagacggtcaattcgaacttttcatttgattattctcgtattcaacatagttcgaattcgcacttgctttccattcctcttggcaaacctccacacttcgatggggaggactacggattttggagtcacaaaatgcgtagtcacttattctctctccatccaagcatatgggagattgtggagaatggaatgaaatttgatagctcggatagccctatgtttataaatgaacaaattcatagaaatgcacaagctactactgttctcttagcgtctttgtgcagggaagagtacaataaggtgagcggcttggacaattccaagcagatatgggacaccctcaagatctctcacgaggggaacgacatcaccatgctcaccaagatggagttggtggagggcgagcttggacgattcgccatgataaggggagaggagccaactcaaacttacaaccggctcaagacccttatcaacaaaataaggagctacggaagcacgcgttggacggatcacgacgtcgtccgcctaatgctcaggtcctttaccgttcttgatcctcatctcgtgaacaatattcgtgagaatcccaggtacacgatgatgacgcccgaggaagtacttggaaaattcgtgagcgggcggatgatgatcaaggaggcaagatacgtcgacgacgcgttgaacggtccactccacgagcctcaacccattgctctaaaggcaacaaggagcaaggagtcgctacctagcaaggtggcgcaagttgaggcggccgggctcaatgatgaagagatggctctcatcatcaagagattcaagacggcgctaaaaggtcgaaagggacagccaagcaaggccaagaccaagggaaagcgatcatgcttcaaatgcggtaagcttggtcattttattgctaactgtcccgaaaatgatagtgaccaggagcaagggaaaaatgggaagagagagaacaagaagggttacaagaaggccaaaggcgaagcacaccttggaaaggagtgggattcggattgctcttcgtccgactccgacgacgaaggacttgccgccactgccttcaacaaatcggctctcttccccaacgagcatcacacttgcctcatggcaagggaaaaaagtgataatgaatctagtgaggatgagattgattactctagtttattcaagggattggatagaactaagatagctaagattaatgagttgattgatgccttaaatgaaaaggatagaatcttagagaaacaagaagaccttttatatgaagaacatgataaatttgttagtgcacaaaattcacttgctttagaagttaaaagaaatggaatactttcttgtgaactttctacttgtaatgaaaccatttcttctttgaaaggtgaaattaatgttttaactgctaaactagaagtagcaagtaactcgtgtgttgaaaatattacaatttgcactaggtgtaaggattttgatgttaatgcttgtaataaacacttagtttcaatttcaaaactaaatgatgaagtggctagtcttaatgctcaacttaagactagcaagagtgaagttgataaaataaaatttgcaagggatgcctacacagtgggtagacacccctcaattaaggatggtcttggcttcaagagagaggccaagaacttaacaagccataaagctcccatcttcgtcaaggagaaagggaaggcccctatggctagtagtgctaaaaggaaccatgctttcttgtaccatgataggagacatgctagaaatacttataatgactttgattcacatgtttatgattctcatgccatgtttgcctctagttcttcctataagcatgatagagatatgtgtaggagaaatgttgtgcctaggagaaattttgctcatgttcctagaaaagttgtgaacaaaccttctaccatttattatgcttgcaatgctccctttgctatttgtagaaagggtaggaaaatagttgctagaaaattaggggcaagatgcaagggtgacaaaacttgcatttgggtccctaaggatatttgtgctaaccttgcaggacccaacatgagttgggtttatgcatccgggggttcaagctggattatcgacagcggatgcacaaaccatatgacgggggagaagaagatgttcacctcctatgtcaagaataaggattcccaagattcaattatattcggtgatgggaatcaaggcaagatagaccttgtgcagcttgtcaagcaggataagtccgaaacccaagggaccctcaagcgcttcctcaggagagctcaaaatgagtttgagctcaaggtgaagaagataagaagcgacaatgggtccgagttcaagaaccttcaagtagaggagttccttgaggaggaagggatcaagcacgagttctccgctccctacacaccacaacaaaatggtgtgaattcaagaccccccgagtgtttctggtcggaagccgtgaacacggcttgccacgccatcaacagggtctaccttcatcgccttctcaagaagacttcgtatgagctactaaccggtaacaaacccaatgtatcttactttcgtgtatttgggagcaagtgctacattctagtgaagaaaggtagaaattctaagtttgctcccaaagctgtagaagggtttttgttaggttatgactcaaatacaaaggcgtatagagtcttcaacaaatcatcgggtttggttgaagtctctagcgacgttgtatttgatgagactaatggctctccaagagagcaagttgttgattgtgatgatgtagatgaagaagatgttccgacggccgctatacagaccatggcgattggagaagtacggccacaggaacaagatgaacaagatcaaccttcttcctcaacaacggtgcatcccccacctcaagatgatgaacatgttcatcaacaggaggcggatgatcatgtgatggaggaagatgcgcaaccggcacctccaacccaagttcgagcgatgattcaaagggatcatcccgtcgaccaaattctgggtgacattagcaagggagtaactactcgttctcgattagttaatttttgtgagcattactcctttgtctcttctattgagcctttcagggtagaggaggccttgctagatccggattgggtattggccatgcaggaggagctcaacaacttcaagcgcaatgaagtttggacactggtgcctcgtccaaagcaaaatgttgtgggaaccaagtgggtgttccgcaacaaacaggacgagcacggggtggtgacgagaaacaaggctcgacttgtggcaaaaggttatgcccaagtcgcaggtttggactttgaggagacgtttgctcctgtggctaggctagaatcaattcgtatcttgctagcatatgccgctcaccattctttcaggttgttccaaatggatgtgaagagcgctttcctcaacgggccaatcaaggaggaggtgtacgtggagcaaccccctggcttcgaggatgaacggtaccccgaccatgtgtgtaagctctctaaggcgctctatggacttaagcaagccccaagagcatggtatgaatgccttagagactttttaattgctaatgctttcaatgtcgggaaagccgatccaactctctttacaaagacatgtgatggtgatttgtttgtgtgccaaatttatgtcgatgacataatatttggttctactaaccaaaagtcatgtgaagagtttagcagggtgatgacgcagaaattcaagatgtcgatgatgggcgagttaaactacttccttgggttccaagtgaagcaactcaaggacggcaccttcatctctcaaacaaagtacacgcaagatctgctgaagcggtttgggatgaaggacgccaagcccgcaaagactccgatgggaaccgacggacacactgacctcaacaaaggaggtaagtccgttgatcaaaaagcataccggtcaatgatagggtctttactttatttatgtgctagtagaccggatattatgcttagctatccaaaggggtctacctttgacttagttggatactcagactccgactatgctggatgtaaggtcgataggaagagtacatcggggacgtgccaattcttaggaaggtccctggtgtcatggaactctaagaaacaaacttccgttgccctatccaccgctgaggccgagtatgttgccgcaggacagtgttgcgcgcaactactttggatgaggcaaaccctccgggactttggctacaatctgagcaaagtcccactcctatgtgataatgagagtgctatccgcatggcggaaaatcctgttgagcacagccgcacaaagcacatagacatccggcatcactttttgagagaccaccagcaaaagggagatatcgaagtgtttcatgttagcaccgagaaccagctagccgatatctttaccaagcctctaggtgagaagaccttttgcaggttgcgtagtgagcttaatgtcttagattcgtggaacttggattga

SEQ ID NO: 97235 - DNA, 180 bp, Zea mays
  unsure (1)..(180): unsure at all n locations
  Clone ID: MRT4577_20190C.1
cgcgagcgccgccctnnnnttnngggggggtttttataagggaaagcccggggaaacaaccaaaccacatttgattatggccaaaaggacacactaacaggaacaggaacagggggccacaagagcaggataacaacaaaacgaaagggcgacgatggaaggaaaggacacacgaaaaag

SEQ ID NO: 97236 - DNA, 437 bp, Zea mays
  Clone ID: MRT4577_20191C.1
cctttacgccagataagaatgagaactccacgccgcacaccgccaggggaaatatgccgccctgcttcctcctatcctcttgatccatctgccataccatccccgctatggcagtggcccatcgcttcctcttgggctcttcatccccatcgatccgtcgcccgtgctttcttctaactatgtccagtcccctctccatcttgtcgccctgcctccccacatctgcgtctgcagcatgccttcggcgtccagagccatatacgggttgggctccacctacgcacccggctatagccataagagccactcccgggtctgcctttagagatctggtacctgcacatcggtgtgtagggctcctccattgcctacatctactaaagcgagtgagcctacagagctggccttattcaggctccagattcaccccacggtca

SEQ ID NO: 97237 - DNA, 181 bp, Zea mays
  Clone ID: MRT4577_20192C.1
aatgtctaggaacaagactataaaaatggcatccatcatgtggctgaaaacaggggggcatggtgtggttgacggaaggggtagatcgatggcctagacaagggttaaggctacgagtaggttttacaatggcacagaggagattgctcagccatttctaagatgattcgatgtatcaaaa

SEQ ID NO: 97238 - DNA, 568 bp, Zea mays
  Clone ID: MRT4577_20193C.1
ataataacaaagtgtatagagataaatgtcataataacatcagagtacttattacatagcggaagtcttacaaaataaaagataaatataacaggatctaaaatccatccttggcgccagaaagtcaactgggagacaccacctagatcgaatcgaactcctcgttgtgtggctcctcttgaaccacctgttcttctccatgaatcacgcgatgcgaggccctatccacggtgtagcgcagacccgcggtggcgatgtgtcgtcagcgagcaattaacagagactcaccggttcaccgcccctggagtcgccctgtccaggtccctcactcgcaaacgatgcgctctacccacatccggggagccgaacggcaccacagaccaaatacgggtgcggtggtgtcttcaagctctcctttgcggttgcgaatagcggaacaccaagctctggcccaagttcctaggtgctggcgtggagcgaatcggaggggcaaggggaggtccggtatgcatgactagcacaaccacccccggattcccccgggccggtgtgcgggcgacccggccga

SEQ ID NO: 97239 - DNA, 586 bp, Zea mays
  Clone ID: MRT4577_20194C.1
ccttcatgcattgtttaatcatctcacaataaatgtcagataatataagttgctcttagttacaataaaaatcactgtacctaaggtgtgactgaaaattgctcaaagctcaatgtccatacaagaattgaacggaaattgacaccacggagaatagaggaccaatagatcagatgcttcagcacaaccttgataaacacgtacaaacacacaatctaactagagcaagcgcttctgtccccgcaattccccatatcactctccactcatgcatcccatagagcatactgttttgagccttccttacggaattggttagctgtaatgccctatgagattcaggataaattagaataatctctcagctcagttgattgtgtcagaatccctcggtgcaattttgtggcttcaatgcaaatcctcttttctgagtaaattgtggaaatatctcccaaagaatattttaaaaatcaacattccagtaagaaaagaatggtgcatgtaaacatgtttcttttactccgcatatccaaactctgggtccatatcaagtttccgttttaaacgagacttgtctgcgctgttc

SEQ ID NO: 97240 - DNA, 682 bp, Zea mays
  Clone ID: MRT4577_20195C.1
tcgaggccggccggatcacgtctccgacggcgcatggttacagttcacaagcacaagcagaacgaggcgccgagcagcagctccccacctcgagtttgccaccatggctataggatctgaagaacatgtgaatacgctcaaagcgcccaatgattggatgctgaacaagcttgccgcatattttgatcccaaggcatcttctgtacctcacaagtctatcggagtgcactgccactgatcctcattatcaggaacaggctcaagtatgctcttacataccgtgaggtcatttccatcctgatgcaacgacatgtacttgttgatgtctacgtcaggacagacaagaactaccctgctggtttcatggatgtcattatccatccctcgagaccaatcacaactacaggttgctgtaccataccaggggacgcttctcgccttcaccacaagtcaggtatgaggatgctaagtcctggttttgcaagattaagaactgtatcagttgtgtgcataatggtatcccttatctgaagacgtatgacggacggaccatccgctagcctgtccccctcatcaagggcaacgacaccctcaggatcgatctgggataccaagcggatctgcggacttcatcaagtttgatgttagcaacgtcgacatgctgactgggggaaggaacact

SEQ ID NO: 97241 - DNA, 146 bp, Zea mays
  Clone ID: MRT4577_20196C.1
tttctttctactatatctcattgtttttttggaacaaaaaggttctccggatatatcaacacaaattgtttggtttcaaaatctctatgggctaacaaccattcttttcctcacacagccttcacttttgttttctattgacatgt

SEQ ID NO: 97242 - DNA, 252 bp, Zea mays
  unsure (1)..(252): unsure at all n locations
  Clone ID: MRT4577_20197C.1
aatctgagaatttccttagcgggnnggggcgcgtcgagaacgtctggttcgaagactgttataacctggctagggcatatcccaggagcgttctgtctttttgtagaggtggtgggtattggttacttgggtgagattttttttaggcggggaccttatatgttgtcggagcctgaatcgggacaggggcaaagcgccgcgctgctcggaccaatccaacacttgagtgatncgatgatgccctgtgattcg

SEQ ID NO: 97243 - DNA, 286 bp, Zea mays
  Clone ID: MRT4577_20198C.1
aggcctcctgcggctgctctaagaggggcacaggcactcacacgctacacatgagcatcggggacatgggcatgacatgcatggccactgcgacgagcaccagcattcagacaccgttgctgagaatgcttgcgaccatgagtgccacgctgagctcaacagtgtgcactctgcgtaaacacaccactgccatgaccacgaccatgatcacggacagcatgatcttgcagagatcgaggaacccgtcaaagactgccactaccacgaacagcactgcttgcatgag

SEQ ID NO: 97244 - DNA, 669 bp, Zea mays
  unsure (1)..(669): unsure at all n locations
  Clone ID: MRT4577_20199C.1
cccagcgtccggtggccttgntagtctttcttgctcnatatcggagctttgttcctgctgattctgctattgttggattgacagataggatattctgtgcaatgggaagcaaatccatgacaaccgaacagtcaacttttatgattgatttacatcaagttggaacaatgctcagacatgcaacatcgaggtcactttgtttgttggatgaattcggtaagggcaccctaacggaagatggcattggtctgcttggaggtactatcagtcattttgcaaactatggttcccccccaaggttagatagctatcttgggaaatgttgttttagaaattcaatctgataggtttgccagtctggtcttgtgggcttcctttcaatcactttgaatttgtgaacttcattgcaggatatgcttagctcaaagtttcagcagtctaattttcttatattttcctcctgattcgtttcagttcatttagtaaatcgatgttgtttttctgcttaagtggagaattgagctgcgaatgtaaaaaaacagcttagactagaaaggcagattgactgtaatgtgtatgaataggaaaaagttatcaggccagtttctgaaatcatatcatttctccgcattcctttatgttcatttcattcacgatgcttttacacaa

SEQ ID NO: 97245 - DNA, 704 bp, Zea mays
  Clone ID: MRT4577_201C.1
cccgcccgtccgaccacgcgaccccggccatcgcagcagctttaccacgtgccccggtccttcctgcggcagaaggacaacatgctggtgctgttcgaggaggagttcgggcggccggacgcgatcatgatcctgacggtgaagcgcgacaacatctgcaccttcatctcggagcggaacccggcgcacatcatgtcgtgggagcgcaaggacagccagatcacggcgaaggcgaacgccgacgacctcagggcccgggcggcgctggcgtgcccgcccaagaagctcatccagcaggtggtgttcgcgagctacggaaaccccgcgggcatctgcggcaactacaccgtcggcagctgccacacgccgcgcgccaaggaggtggtggagaaggcgtgcctcggcaagcgcgtctgcacgctgcccgtggccgccgacgtctacggcggcgacgccaactgctccggcaccaccgccacgctcgccgtgcaggccaagtgctccaagaggtcgcccagcgcggcgcagtaattcagtcgctcgtcgggacatcctattcgtggctgggcggggaacacattgtcggtactgtcattgtaagcttaaaaaaccctatattgtactcgtggctgggcggggagcatctaacaatatatttatagattgttcattttagtgaaaaaaaaaaaaaaaaatttgcggcc

SEQ ID NO: 97246 - DNA, 293 bp, Zea mays
  Clone ID: MRT4577_20200C.1
attcggctcgaggacggcagaacgctccgtaaagacagagccgcgaaggtgatcaggtgcctggaagcagcgatctcgagacgagtatccgcgggattcacgctggaagtgtgctgccggaaccggttggacttgctgtcggacgtgacaagggtgctccgtgagcacgggctcacagtgagccgctccgacgtgactacaagaagacgggcaggccaaaaacgttttctacgtccggaacccctctggccagccagtcgacatgaagaccgtctaggggctcaggggccaat

SEQ ID NO: 97247 - DNA, 380 bp, Zea mays
  Clone ID: MRT4577_20201C.1
cgatctcgcccttctcgccgtgggaccgtcggcgcatggcctccggcggcaaccccaacccaaccggcgctcccacccagccgcgcccaatgcatcagcagcagcagcctcaaacgggcggctcaccggcaacgcccatgacccacctccgccctccctccctcgccggctcccccttccagggcctcttccacacgccgcctacccacaaccccgccttccagatccacatgggtgcctcgtcctcaccccagactccgctcatggccgccactgcaggatcggccaagcgccccccgcaaaagccccctgtccggcccctggcacccggctcaacctcgtcggccgcagcggcctcggcggctgccgcgtacaaggct

SEQ ID NO: 97248 - DNA, 966 bp, Zea mays
  Clone ID: MRT4577_20202C.1
atgctctcggtttcctttcgtctcgtcccgttccgccgtcccgtgccggaccgccccacccaccacctccacctcccactcccgagcagttcacagtctccactccacctcccacctataagtttcctcatcgccaccattcctcgtcccgttctcagttcctcactcccccccttccacaatcccctcgcttcgcacggcgaagcagccagagccagagcccgccttccagaaccagcccgcccgccatggcgagcttcgcgaggcaggagcaccagttcctcgccgagctcggcctcgcgccgcgcaacccgggctccttcgcctgcggcgcctggggcggctcgggccccgtcgtcagcaccaccaaccctagcaacaacgaggtcattgctgaggtcgtcgaggcgtccatggacgactacgagaaggggatgagcgcctgcttcgacgccgccaagacctggatggctgttccggcaccaaaacgaggagaaattgttaggcagattggtgatgcactgagagcaaagcttcatcaccttggcagacttctctcactcgagatggggaaaattctccctgaaggaattggggaggttcaggaaattattgacatgtgtgattatgctgtggggctaagtcgtcagctaaatggatccatcataccatctgaacgcccaaaccatatgatgatggaggtctggaatcctcttggagttgttggtgtcatcactgcattcaatttcccttgcgccgtgctgggttggaatgcttgcattgctttggtgtgcggcaactgtgttgtctggaagggcgctccaactactccattgatcactatcgcaatgactaaaatagtggctagtgtatttgagaagaacaacttgccaagtgcaatcttcacagcttttttgtgggggtgctgaaattggccaagcaattgctcttgacacagggatacct

SEQ ID NO: 97249 - DNA, 457 bp, Zea mays
  Clone ID: MRT4577_20203C.1
aattcggcacgaggctgttatggtcgctagatcggtgagggattggagaggggtatcgatgggcaggaacgccggccgggggcctctgcccacggtcgagcaagaggagggtttctcccttctaattcttgcctgctttatttctcatccattgattacataaataggccggttggcgctgcccctatctagctatagatccttatctcctaaaaactctcaacaaactactaactgataaccttcctagataatctcaactaatctcctaaataatctcaactaatcttctaatcttatctctaactatccttatctaatcccccttgagggcccatggctgctgctaccgcagcccctccgtgggcctccttaggccctgacactacacctctcctggacaagcagctcgccctcgagctgccgcatggtggatgctcaaagaccggttctactt

SEQ ID NO: 97250 - DNA, 261 bp, Zea mays
  Clone ID: MRT4577_20204C.1
tgatgcccaacattggttatggaagcaacaagaaaacaaagcacatgctgcccagtggcttccggaagttcctggtccacaacgtcaaggagctggaagtgctgctgatgtgcaacaaatcttactgtgccgagatcgctcacaatgtttcctccaagaaccgcaaagccatcgtggaaagagctgcccaactggccatcagagtcaccaaccccaatgccaggctgcgcagtgaagaaaatggtaggcagctcatgtgca

SEQ ID NO: 97251 - DNA, 951 bp, Zea mays
  Clone ID: MRT4577_20205C.1
attgggacctcgagccggccggaactgtgtcacagcgctgctatttctctatctggcctgctctgatccttgcttgcgtttcgcgtcccgtctgatcttctcgggaagatcatggaggcctacttgtttttccacagcgggagggcgcacgaggtcgcgtgcgcggagcaggaggaggacatcggctcgccgtcggattccgagtccccgtccccgtccacgtcgagggagtccgcgggctcctcgtcggagctcgatgacgacgccagctcctccggctcggaccgcttcgagatgtccgccctcatgacgcagctccccctcaagaggggcctgtccaggttcttcgacggcaagtcgcagtccttcgcctcggtcgccgccgtggggtcgctggaggacctggccaagccggcccggaagcgcctcaagccgtcgcggagctgcggcggcgccctcgacgcgcaccgcggacgccttctctcgccgcgcaggcactggaccaagcccgccgccgcgtccggcgccaggaagacggccgcgaggagcggcgggttgtcggtgctcacggccgtcgcgccgagaatgccgccgccggtgcgaggcctgaggacgtggccgccaaggttctcatcgttaattgagccacggatcagcctgcctgagctcgacattgacgcacgccttcacgtcacggggtgcgctgtcgcaggcacagctacgcatcagcgcatccacccgtgcctgaactaacagccaaatcaatggcatgctcgtatcctcttctgtttcccaatgcgtttgtggtctttgcagaatgcagactgacctttttgtaatgaaaatccacagctcaattagcaatggacttcggttgggaacttactggggtgtttggtttaagaaatcactacatccaaattaagatggtgcatcatgagtttattcctt

SEQ ID NO: 97252 - DNA, 1978 bp, Zea mays
  unsure (1)..(1978): unsure at all n locations
  Clone ID: MRT4577_20207C.1
ttttttttttttttcttttttttttttttttttttttttttttttttttttttttttttttttttttttttacaacccaccgggaacagggcgagggtcctgttcatttatttataggggggggacccggctcaaacacaattacatttttttccctgacatttacatgcaaggggggggggggggaccaaggactaaacattatttttcccttgagtcggggaccaccttcagcttcgtcataatactaagctgaagcttcttcagccatagcttcggttttctttcgcatcgtcatgtcgcgtttgcctttgtattatcttgctgaaggggtttttgctttgatgaccttcgggggggaaaaaaatccccaacactaccattttttaacatatttttatttattttaaccccaaaaaggatggccggtactaaatggggtaaagtcagggtctaccgggtatccaaaggcctgcgctccttgctgttgctccttgccgcagcccccttgggccctgacactacacccctcctggacaagcagctcgtcctcgagctgcagcatgacgggtgcccaaagatcgactctacttgacccaaaaccaaacacctagaagacaagcattttacatctcggcttaattttttcgaatctgattttttaccccttaagataaggcggacaccctacacgcattggacttgcacgtgtgcaaccaccaacatcccatggacaccatttggacaaaaggggagcacatggatggccacctggagtaggtcgcaataatgaccagcggaagcgccctcatggcgaccgacagcggaatatggtggcgctaagcagtgcgcccttgccgatgacgaggggagtgccttccctaccaccgttgccgtagacttgaagttcgtcgcctgcgggacacgcaccatgctcgcacttggagacagcgcccgacgccactgttgatggttgtccgataggccgaggtcgcgcccccatgtgccgaggtcaaccgttaccaaggcttcctcgagcatctgccgatgcatctcccgcactctccatcgtgcaaggaagccacaaacagcagcctgtatgcccatagccgccgacgtctggagccgtgcggacaacgctagctgttgctgctcatgttgcactgctgccttgatttgcagcagcccctgctcaaccatccggagcgagtcttgcatttttgcgagatcagcccttatgttggtccacaagtcccccatcgatggagctggtgattgttgagccatggctgcctctattggcgtcgtccatggagacagagacgtcgtcaacgaagatgatgtgacaaaatttggcattgtccctggagatgggcacgccgacgtccaggatgtgttgacaaaattggcaggcgatgctgcccatggagatggggacgtcggttgccaagatggcgtgacgaaggtggcatgtggcgcagcccatgcagatggggacgtcggttgccaggacagcgtgacgaaggtggcatgtggcacattccatggagatggggacgccggttgccaggacgccgccgcgaaattggcagcagaagccatgggatcggattgaaacccaagctagccgataccagatgttatggtcgctagatcgatgagggattggagagaggtatcgataggcaggaacgccggccgagggcctctgcccacggccgagcaagaggagggtttctcccttctaattcttgaatgctttatttctcatccattgattacataaataggccggttggctgcccctatctagctagagatccttatctcctaaaaactctcaacatactactaactgataaccttcctagatgatctcacctaatcttctaatcttatctctaactatccttatctattcccccttgagggcccatggctgctgctgccgcngcccctncgtgggcctcctttggcc

SEQ ID NO: 97253 - DNA, 740 bp, Zea mays
  Clone ID: MRT4577_20208C.1
ggcttgtacgcgcgctggttgaggtgtgatggtgagcgacgacgtagatgtggcggacacacggcggagatgtggtggaggctgcgtgttgcgggcgaacagcgcaggaacagacgcggtgaaagagcgatgggaaaaaattagctccgaataccaggtgttatggtcactagatcggtgagggattggagaggggtatcgatggacaggaacgtcggccaggggcctttgcccacggtcgagcaagagggtttctcccttctaattcttgcctactttatttcccatccattaattacataaataggccagctggctgcccttatctagctagagatccttatctccttaaaattctcctaaaaactctcaagaactagtaactgataaccttcctatataatctcaactaatcttctaatcttatctctaactatccttatctaatcctccttggagggcccatggctgctgctgccgcagcccctccgtgggcctccttaggccctgacagatacaccatgaaactcattgcttgttgttttgtccttattctattcagtagtgtatcttgtactcagcttttggataataaacaggttgatgatttatcaatggaaccacaagttgaaagagaacttatgcttataaaagtaaatgcagagcgagaaagttacctgagatatgggtttggttcgcatttcaaagcaaagtggttgatctttcagactcacactaac

SEQ ID NO: 97254 - DNA, 1164 bp, Zea mays
  Clone ID: MRT4577_20209C.1
ctgacgcgtgggacaaaattggcaggtgatgcggcccatggagatagggacgccggttgccaggatggcgtgacgaaggtggcatgtggcgcagcccatggagatggggacgttggttgccaggacggcgtgacgaaggtgacatgcggcgctgtccatggagatggggatgtcggttgccaagatgacgccgcgaaattggcagcagaagccatgggatcagatcgaaactcaagttagccgataccagatgttatggtcgctagatcggtgagagattggagaggggtatcgatgggcaggaacatcagccgggggcctttgcccacggccccacggccgagcaagaggagggtttgtcccttctaattcttgtctgctttatttctcatccattgattacataaataggccagctggccgtccctatctagctagagatccttatctccttaaaactctcctaaaaactctcaacaaactactaactgataaccttcctagataatctcaactaatctcctaaataatctcaactaatcttctaatattatctctaactatccttatataatccccttggagggcccatggttgctgctgccgcagcccctctgtgggcctccttagaccctgacacatcagttgttgaaaatctccggccaacaaacaagattgtatgcaacataactcccaatttttgcactacagtatcatagccacagcagggcctaagactccaattagcagtgttatcaagtcatccagttaatcgtgattagtcgtcctagttggtatcctggactcgactaggggctacaactcgattaggctgattagttttctggtcgtctgattagttagacaactaggaggtggataactggaattgatgagcaacttaggacatgggttgcatctaggatggcttgctcgtgttttcctgtccaatttgaaaccctgcgtgcagctatcaccctagagttatcttcatgcttgatttgtacgcattgtctttgtgtagaagggaaggaaagaaggatgaaagtgatattggggactggctgtaaagtgtaaatacactaaaagctccctcctgtggaattactgcttgtaacattgtatacactgactgattaacctagtaaaaaacttccatgtttc

SEQ ID NO: 97255 - DNA, 1999 bp, Zea mays
  Clone ID: MRT4577_2020C.1
atggatcctaaagggaagggaatcgtgatcaacgacaaggagaaggagtccttcgtcaacgagccaagggatgacaagtccaacgactcgggctcgggccacagacgcaaagatgggaagaagaagaagacaagacgcatcaaggagatcgtctactacgacagcgatgagtctacttcctcccaaaaggacgacgaccacaacgaatacgagagaaagaaaccggtcaattcgaacttttcttttgattactctcgtattcctcaaagtactaatgctcatttattatctattccacttggtaaacctcctcattttgatggagaggactacggattttggagtcacaaaatgtgtagtcacttgttctctctccatcctagcatatgggagattgtagaaagtggaatgcactttgatagtacggatagtcccatgtttattaatgaacagattcataaaaatgcacaagctactactgtgttgctagcctctttgtgcagggacgagtaccataaggtgagcggcttggacaatgccaagcagatctgggacaccctcaagatctctcatgaggggaatgatgtcaccttgctcaccaagatggagttggtggagggcgagcttggacggttcgcaatgataaggggcgaggagccaactcaaacatacaaccggctcaagacccttatcaacaaaataaggagctacggaagcacgcgatggacggatcacgacgtcgtccgcctaatgctaaggtcctttaccgttcttgatcctcatttggtgaacaatattcgtgaaaatcctaggtacaccaagatgacgcccgaagaagttctggggaagttcgtaagcgggcgaatgatgatcaaggaggcaagatatgtggacgacgcgttgaacggtcctattcatgagcctcaacccattgctctcaaggcaacgaggagcaaggaggcgctgccgagcaaggtggtgcaagttgaggcggccgggctaaataatgaggagatggctctcatcattaagcgcttcaagatggcgcttaagggtcacaaggggcagccaagcaagaccaagacaaaggggaagcgctcatgcttcaagtgcggtaagattggtcattttatcgctaactgccccgataacgatagtgaccaggaacagggaaacaagagggaaaagaagaagaattacaagaaggccaagggcgaggcacatatcggaaaggagtgggattcagattgctcctcctccgactccgacaatgaaggactcgccgccaccgccttcaacaagtcatccctcttccccaacgagcgtcacacttgcctcatggcaagggagaagaaagtaagcactcatgatactagtacttatgcttcttcaagtgaggatgaatctagtgctgaggatgaagtagattattcatgtttgtttaagggcctagatagaaccaaggtagacaaaattaatgaattgattgatgccttgaatgataagaatatgcttttagaaaagcaagaggatttgttgtatgaagaacatgataaatttgtagaagcacaaaaatctcatgctctagaagttaaaagaaatgaaatgctttcttgtgaattatcttcttgccatgagacaatttctaaattaaggagcattaatgatgatttgaatgctaagctagagattgctagtaaatctacctcttgtgtagaaaatgttgtaacgtgtactaggtgtaaagatattaacattgatgcttatagtgaacacctagcttgcatttctaaattaaatgaagaggtagctagtcttagtgcccaacttgagactagcaaaagtgattttgagaaattaaaattcgctagggatgcctacacggttggtagacacccctcaattaaggatgggcttggcttcaagagggaagtcaagaacttaacaagccataaggctcccatctccgccaaagagaaagggaaggcccctatggcta

SEQ ID NO: 97256 - DNA, 402 bp, Zea mays
  Clone ID: MRT4577_20210C.1
ggctcgcatctatcccgctagagagcgagagaaacgcacatgtatcggtgatgcggcgccggcacctagatcagagtctgacgccaacacccggactgcagcagctggctgcatgccactacgctagtgatgcttgaagatcatactgacctacctccccaagctacctttgaaagtgtttagcgtgcccgaggcggcaccctttaccgaggagctcaagtacgccgtggaggcattcaagagtgccgcccataccagcgccatcatcaccaacgatggacttggcatcaaccccgagcaaagtgcaggcaacgtgtttctgaaacatggggcggagctgtgtataatacctagggatagagtcgcagctgtacacatgtcttccggttagaggatatatac

SEQ ID NO: 97257 - DNA, 132 bp, Zea mays
  Clone ID: MRT4577_20211C.1
gtgcctttctcaagaaagaataattcaatttcaggccactccatgtccaaaagaaccaaataaagagatgattaatgatggcgcttcctggacaatcattaggcagagtatacattttatgagggaatgggc

SEQ ID NO: 97258 - DNA, 525 bp, Zea mays
  Clone ID: MRT4577_20212C.1
tgggtaccggcggggctttcgagtggtttttttttttttttttttttttttttttttttttttttttataatttaattaggggggcggtgggcgccgttttcctttatcttgcaaagccccccaacaacaacaaatctcccaaacccaaaaaaggaaaaaagcaaaacaaaaccaaaagaggaaccaggcaccccccgactcccggacgggcgccccccaaaaccacctcccaaccaggggggggggcctcggccatttttttaaaccgaaagcgcgcccccctacccaccaaaaacaaaacaaaaacccccccccgcccaaaccccggcggcccggggaacccactaaatccaaaccgccccccccccgggagaacccccatctttcgttcccttaaaggggggcaaaggccccccggcgcgaaagaaaggacaaacctgctcccgggagaaaagggccatcccccccccaccccacaaaacaaaccggccgaaaacaaagaggggaaagccgggggccccaaa

SEQ ID NO: 97259 - DNA, 835 bp, Zea mays
  unsure (1)..(835): unsure at all n locations
  Clone ID: MRT4577_20213C.1
cctcgnagccggccgggaccattcttatcggctgcattggcggagtgggcttcttcctcattgtgactggcattgaagtgtcagctcgtctcgaaggcaacctcaattatgatctcgagaccctgcacaagctcttttcctccgacacttggtacctctggacgctgccgcttgcccttgccattttgatcatggtactgcggcggctatccaagagcccgtttgtcttgcctgctttcttcgtttctgtatttgccattttctaccttgttgtcaagggtatccttcacaaggatctggagcctgtgcgtaatgcgggctggatattcgagctgccggaagccggtgtccagttttacaggttctacacctactttaagtttggcagtgtagacgcaggagcccttgtgagcaccattcccactatgtttgctctatcctttttcggtatcattcatgtacctatcaatgttcctgctctaggtgcagctgtgagggaggacaatctcgatgtgaaccgagagttgatcgcccacggcatctccaacaccctctctgggtgcttgggtagcattcagaactatctcgtctatgcaaacagtgtcatgttcgtcgacaacggtggtaacagccgtacagctggtgtcatgctcgcatttgccacgactgctgtctggctagctggcccagccatggttggctatatccccatctgcctagttggcgcactcattttccctctaggtattgaccttatgaaagaagccctttgngatacctttggcaaatggcacaaactcgaatatctgacccatcctggtcatcgtgctcatca

SEQ ID NO: 97260 - DNA, 353 bp, Zea mays
  unsure (1)..(353): unsure at all n locations
  Clone ID: MRT4577_20214C.1
ccagccgccgccatgtcaaaacgaggtaggtgaggttcggcggcaaacaagacgcgcatgtcgctgggggtgggagtggccacnaccgtgaactgcaccaacaacaccggcgccaagaacctctacataatctccgtcaagggcatcaagggccgacttaatcgccttccgtccgcctgcgttggcgacatcggacatggccaccgtcaagaaggggaagcccgacactcacgaagaaggtgatgcccgccgtcatcgtccgccagcgcaagccgtggcgccgcatggacggggtctacatgtacttcgaagataatgctggagtgattgtgaatcccaagggtgagatgaaa

SEQ ID NO: 97261 - DNA, 483 bp, Zea mays
  Clone ID: MRT4577_20215C.1
ctctcagagtttgggtctggcatcacgctcagatccaatccaaggccgcgccctagctcggcggatggattccgtcgctgtggccatcgtgacggtgtcgttcccggcgcagggtcacctgaaccagctgttgcacctgtccccgctcctcgcatggcgggggtttcctatccacttcgccgcgccggagtcgcacctcagggaggtccgcgcgcgcctgcacggctgggccccgaccccgcgacggtgtgtttccacacaatgaacgtgaccgcgcacgaccccctcccctcccccgttcccggcgcacatgcaacccttgttcgaggccttctgcaccggcgcgcgggcctcgctagtcgcgctggagaggaggcggaggaaatgggggaggaggcgcgacgcacggacgaaagatgttgatttgatgatatagatggacggtccagattggttcgaggccgaactggtggagtcatacta

SEQ ID NO: 97262 - DNA, 595 bp, Zea mays
  unsure (1)..(595): unsure at all n locations
  Clone ID: MRT4577_20216C.1
ccctcgagttttttttttttttttttttttttttttttttttttttttttttttttttttttttttttataaaaattttggtttattaaaggagaggcatgcccccccataaacagcgcgcggaaacatttatttattttttttttgaagcggcacacacgggggaaacgatggcatgcatatgcatccgtttacttggggctaacaaaaactggggggggagggcaggggccctcgcaaaagttaaaaaggatgtcggcccaacggtaggcgtccccgggcggaatgtcaaccccaccgtcgggggggaacctgatgcactgtttgcactttggggggcaccccaccgtcaaaaagtccaggctttggcactggggggggtcaaacaggtaacaaaaaccgcacttgttgcaaaatggccacaagctctttccgggggngggggtccacggggggaactgcctcccctcctcctccttcctcctccgnccttttgttgaggggcaaagctgcaaggaccaccacaataacagccagggggacaagtaacgacccctgaggtctcatgggttgcttttttcggccagaaactttg

SEQ ID NO: 97263 - DNA, 286 bp, Zea mays
  Clone ID: MRT4577_20217C.1
caccccaaaaaccccggggaaatccacttttgggcaaaaattaataagggcgaaacaaaagaaaatttttttgctggattggcgtctaggaaaccaaaacattttctgttttttaactgggggatttttcagggtccctaaaaccccccccccttttttattgttgaagccagaacattaaaaagttaccttggccttgaaccaaccaaattttattttgaccaggtgatgagcttgtagggttgctccaaccaggtgctttttttttgacaccttttgccactgg

SEQ ID NO: 97264 - DNA, 325 bp, Zea mays
  Clone ID: MRT4577_20218C.1
aaccccaaagggcctccccttttttttgccttttccccccacaagtttttttcccctttcaaaccccccgttttatttcagggccccccccgggggcaattttaactttcccccaaccccggtttttttcgcaggccttccccaacagttttttgcagttcccctcaaatccccaaaaccggctttcaacaatgcttggtgtgcaatgccccccacaacagccttcctttttataaaacttttttggacaatttttggaaaagggccctcacctgagttttccccttggcgatggcattggccttcctcatccccttggcccttt

SEQ ID NO: 97265 - DNA, 134 bp, Zea mays
  Clone ID: MRT4577_20219C.1
tcgctcatgctttcttttacgcttccgagaaaaaaggataaaaacatatgttatagcctgtaaatcaccacaggattatacagctaatgaaaaagtgaaggcaccttggtcttccctatgaactacccacccat

SEQ ID NO: 97266 - DNA, 549 bp, Zea mays
  Clone ID: MRT4577_2021C.1
gcttttgacatccttgaccagtacataaaagaggcatcagaatcagccaggggtcacagtttcattactcctatgactggtaaatgcaagggaatgaaacagacatctgcatcgaagtcaacatcacaagcagttgttgctgtgttcactgttggatcactgatcctagcttgtcctattgccaatgtgaaggacatcacccctttgctacacacaattgtaacttctggaaattctgagccaaggccaaaaaaccttattggcgggaccatttctttcaaagagttagctccatcattatatatacaatcctgggatacattagcaaaaatatgccttgtagatgaaaaagtggccaaacggtatattccaatttttgttcacgagcttgagaggagtgatatggctacccttcgtaataatatcatgattgcgatggcagacttctatgtccgttatactgcattggttgactgttatatgccaaaaataacaaaatcactacgtgatccctgtgaagtagtacggagacaaacatttatcctactc

SEQ ID NO: 97267 - DNA, 495 bp, Zea mays
  Clone ID: MRT4577_20220C.1
aaggaaagggcctattttttattggaataaggacgaggggttccttttatttacaattaaatcacccaccgaaaacaaagacggtaactaggagggatgttcgaccagccctttgttccaggagcacaaacaaccacaatatccacaggcccaaaaaaggcccggggcctgaccaaccagaacacacacaggtcatgttatcaaaccaaaccccgcatgaccaggggacacggaaaacacttggggcaggagcaggggaaacccaaatggaaaaagggagctgggagcaagtcacaaactttgggaaaatacaaaagccaggtggggggggaaaaaccacaggccttttccatacttttccagctgggggggggggcaaaggacccaaaataggggtgggcggccggccttttcccgggtcccccccaccgtcgagcataaaaggcataaagttgcccccatgccccggcctttatgggccggggccgcccaaag

SEQ ID NO: 97268 - DNA, 479 bp, Zea mays
  Clone ID: MRT4577_20221C.1
ctagtctagatcgcgaggccgcccttttttttttttttttttggaaagaaagaaccagagcactgttacgcacactcacgctacaaggccgcagctaagctataagcgcctaagcaatccaattactctactagcaagtttaccctgtactgtacattttttttcctcgctccgatccatggcatcgtcgtcaggcatatgcatgcgtgtgcgaactgcgaactgcttgattccgacgcgccattgcaagccgaccgtcgatcgacgagacctctcatcgtcagcgtcaacataggtgcggtgatccagtggtcccgaacgacccgtggtcggcggcatgcatcggcgacggcgaggaggtcgcggcggggcagaacgcgagggacgccacgaggagcagcaagaccacggggacgaacaacagctgcgtgggcggcggcggcagcggcggcagcgccagcgggagcagcagcagcagc

SEQ ID NO: 97269 - DNA, 314 bp, Zea mays
  Clone ID: MRT4577_20222C.1
cccacgcgtccgcggacgcttgagcggattcatggtcacacacgtggggggctcttagggcgcctcccaggtgtacaaggagctgcatgaggccatcaaatcctacccggacgccttccaccgcgtcatcgacttaaacaacatcaagcatacacactgcgtcagcttcatcacctacaagcccccggtcagcgactataccgagctcgtcggccgtcctcctgcggctagctagctagctagctcctgcgtgagctaatagctagtgccatgcgtagtctatgacgatcggttttgcttcaagtcaccgtgta

SEQ ID NO: 97270 - DNA, 337 bp, Zea mays
  Clone ID: MRT4577_20223C.1
ccgggggattattttattatttttgggggggttttttatttatgttttaactgcaaaaaaacccagggggggcgggacccgatcaaatcaaccatacaaaatttatgggtagaatagtcagattaggccgtcaccaaggggaatgaatgtcttttaaacaccccaaacaaccaaccggtttcacaacatgatcccctggaaaaccataaaatccccctggatggatccttgcccagcaacccaaaacccacactggtccccaagcctttggctccccaacaactggggggtgcttcctagatccttataccggggggcttttgtcttggccaaaacc

SEQ ID NO: 97271 - DNA, 319 bp, Zea mays
  Clone ID: MRT4577_20224C.1
ctctaaaaaaaagacggcctttttagtttggtcgttttcctcatcatttgtgcatgccgcacttgcgtgagtggcgcaccatcaagacaaggctgtgagctcttaactttttttgatgaatgcaagggcccgtttgacccttgacctcaccaccaaaaaggagatttgggtcaaaagaaagcagaaagggctacactgaggactttgatgacatatcgcttcacgccgagtctcgagaacccaaagaaaaagggggcggcctgtttttagaaacaaaatttaacccccggctttttcagacgaatagttttttttttgg

SEQ ID NO: 97272 - DNA, 266 bp, Zea mays
  Clone ID: MRT4577_20225C.1
ctccgcagaacctgctactatcgctgcgctgatgccgctaactcgtacaacatgctaaggtccgaaacccacgggcgctcatcctgtaccttcacgccatcgaggcagagaagctgggctcattcgtgcaatcgggctcaagtctggcatcaagcttccccatgataccgcgacatacacgcgctcgtcatacacccacgcctgcactgcgatgttgccacgctactcgatatgcccggcctcgtatgcaacgtgcgctacacagc

SEQ ID NO: 97273 - DNA, 171 bp, Zea mays
  Clone ID: MRT4577_20226C.1
cggattgaccgatgcgtccacgcgtacgcagacgacagattttttgttcccaggcctatgatcgcttcttagcgagggcatgaaggacacgccgggcgcaggtagctgagaacggcagcctccgtggcaatggaactgaccaaaaaggcagagtaatctatacaaaactga

SEQ ID NO: 97274 - DNA, 1312 bp, Zea mays
  Clone ID: MRT4577_20227C.1
tttggggtaccctcgaggccggccgggccgcgggcccttcgcgagtccaatggccgcctcgccctcttcacccttgacagcgccgccagagccggtgaccccgccgtccccatggaccatcacagacggagccatctctggcacgctcccagcagccgaggccttcgcagtgcactacccgggctacccctcctctcccgcccgcgccgcccgcaccctcggcggtctccccggcctcgccaaggtccggagttccgatcccggcgcccgcctcgagctccgcttccgccccgaggacccctactgccatccagcctttggccagtcccgcgcctccactggccttctgctgcgcctctccaagcgcaaaggagctgcggcaccttgtgcccatgtggtcgctcgtgtccggactgcttactacttcgaaggtatggcagattttcaacatgttgttccagtgcatgctgcacaaacaagaaaaagaaaacactcagattctcaaaatgataatgagaattttgataagacaggacatgatgaagcagatggagatgtcatgatgttggtaccccctctcttttcagtgaaggataggccaacaaagatagcgcttgtaccatcgtccaatgccatatctaaaaccatgcacagggggagttgtacaagaacggtgggagatgaatgttggaccaactctggcgcttccgttcaacactcaagttgtcccggagaagattaattgggaagaccacattagaaagaattctgtagaatggggttggcaaatggctgtttgcaaattgtttgatgagcgccctgtgtggccaaggcaatcactttatgagcggttccttgatgataatgtgcatgtctctcaaaaccaattcaaaaggcttctgtttagagctggatactacttctctactggaccctttggaaaattttggatcagaagaggatatgaccctcgtaaagactctgagtcacaaatatatcagagaattgattttcgcatgcctcccgagctacgatatcttctaaggctgaagaattctgagtctcgaaagtgggcagatatgtgcaagcttgaaacaatgccatcacagagtttcatctacctgcaattatatgaactgaaggatgattttattcaagcagaaattcgaaaaccttcttatcaatcagtttgttcacgttctacaggatggttttctaagccaatgatcaaaaccctgaggttgcaagtgagcataaggctcctctctttattgcataatgaagaggctaaaaacttgttgaggaatgccca

SEQ ID NO: 97275 - DNA, 466 bp, Zea mays
  Clone ID: MRT4577_20228C.1
ggccgcttttttttttttttttttgctttttttttttttttttttttttttttttttttttttttttttttttttttcttttttttttttttttacaccggcacggaggggggacaggaattgccactatccaaaaaaaaaaaggaccctattgactggggaccaacttttaggaacaccattggagaagcaaccccctttagccggcccaggggcccatggaaacttcctcaagcctaacacaagggccctgaggaattgaccctcaacagccgtcccccgataccaaaacccccaaccgcggggaatactggcggcccgcccaacctttttttatgcctgacacaaaaaaaaatcgggggcgctccccgcaaaaccaaactgttataaaaaacgggcaacccgtttttctcctcttccttccgggaatccaaaccaagggggagggggggggtattaggccacc

SEQ ID NO: 97276 - DNA, 248 bp, Zea mays
  Clone ID: MRT4577_20229C.1
ggggacgcaacacaggctttttttcttttttttaaaaatacccctttggatacaaaaacgatctttatgctccttaccgccgtgtcacaacaagaaaaccggctgcttacgggaagggggcgtgtcttttcattttggccgggacgacctttaccgggaacccctttgcgggcaacccccagaagtcggggttcggggttatcccctccgggttgtccattttcacccttgccgccttgagcccccct

SEQ ID NO: 97277 - DNA, 840 bp, Zea mays
  Clone ID: MRT4577_2022C.1
atggatcctaaggggaagggaatcgtgatcaacgacaaggagaaggagtccttcgtcaacgagccgaaggatgacaagcctaccgactcgggctcgggccacagacgcaaagaagggaagaagaagaagacgaggcgcatcaaggagatcgtctactacgacgacatcgatgagtctacttcctcccaaaaggacgacgaccacaacgactacgagagaaggaaaccggaacacgggagcaagagggaaaagaagaaaaattacaagaaggccaagggcgaggcacatctaggaaaggagtgggactcggattgctcctcctccgactccgacaatgaaggactcgccgccaccgccttcaacaagtcatccctcttccccaacgagcgtcacacatgccttatggcaagggagaagaaggataagtctgagacccaaggaaccttcaagcgcttcctaaggagagctcaaaacgagtttgagctcaaggtgaagaagataaggagcgacaacgggtccgagttcaagaaccttcaagtggaggagtaccttgaggaggaagggatcaagcacgagttctccgctctctacacacctcagcgaaatggtgtggtagagaggaagaacaggacgctcattgatatggcgaggactatgcttggagagttcaagactcccgagtgtttttggtcggaagccgtaaacacggcttgccacgccatcaacagggtctatcttcaccgcctcctcaagaagacctcatacgagctgctaactgatgaagaagatgttccgacggccgctatacgaaccatggcgattggtgaagtacgaccatag

SEQ ID NO: 97278 - DNA, 306 bp, Zea mays
  Clone ID: MRT4577_20230C.1
acccacaaatttaattctttggggaaaacactggccaacaaaaaacagattggtttttttaaatccattaaaactttaatccatgaaaaaaaaaatatgcgggaaaactaaaacatttaataaaatggaactgttttttttacttccgccccacgaataaaggaataaaaaccaaggtaaacaaatctacagaaaagggaaggtttaaaaacaatttaaactcttcgaaatttaagctgcggggtgttatttaacactccaaaaagacaggtcaaatttgaatgctacaaaagactgaaaaacaaa

SEQ ID NO: 97279 - DNA, 510 bp, Zea mays
  Clone ID: MRT4577_20231C.1
catccatcggccggagaactggcacctaggaagcagcggctgccaaaaagctgccgcacgaagttgaggtggaggaggcgttggacggattacgaggcggtcgtatgggggaggcgacggttacgaggacgactatggagaacgcggtgacgaggcatgatgatgatgactgagtggatggggatggatatagatgcggactgccttgccgatatctacgtcaaaaaccacgacgacggcaacagtgaggctgactgacgacaacgacgatgactgggatgactacaaccatcacgacgactacttagaccaccaggaacaggtctacggagaaaaccatcaggaggaacagctgccaacctactctttggttcagcctcttgggcgggcttatgacgaacagctctctaccgactttgatccgaacaaaaacagcgaggtttcctacaattacgacattgatgaatacgactatgacggctacgactatgtgaaggcgcacacctgtac

SEQ ID NO: 97280 - DNA, 398 bp, Zea mays
  Clone ID: MRT4577_20232C.1
tcgccgggatgcttttaacagacctggatggggccgcacggatcctcacccatgttgggtgcttatgcttgaggtatgttctgctgggacttctcagtttgttcttgtgttttatgtgtggaccaaagaagcgcaatgacatcatcatgcaccttcacccattatgatctgaggtacttgacaatctaccacatgaccttgtctattcaccagatcaggtctctccatggatggaagtggggattgaaaaagtaaaaggcggacagttcacaagccttcgaagtctatgagccattacaagacccattgatttctcgctgtggtgatattattggcatgaatgacgacaaagcttctgtcagtgaaaaactagcatttgctggaaaaggagttctatc

SEQ ID NO: 97281 - DNA, 824 bp, Zea mays
  unsure (1)..(824): unsure at all n locations
  Clone ID: MRT4577_20233C.1
cagttagagaaccagtataataatactctggatctaaatanccgaatgttccttggacaatngtcaccacatgtgtttcatcaagggatagagatcttgaagcaccaaaatctgaaacctttacagtgaagttgtcgtccaagagtatattagaagacttcacatctctatggaaaattggtattgcagcagctgagtgtagataagcaagtgctcctgatgcttccgttgcaatcctaattcgatcatcccatgacaacaagcattttgttgcaatattttcatgaagaatgtcatacaaagtgccattcgatatgaactcatagactagcaagggtacctcatcttctaggcaacaaccaaaaagcttcaccacattgcggtgaatgatttgagataaaatagcaacctcattgatgaactgatctatctctatttgctccactattttagattttttttatagccacgacacgctgatcagacaaaatccctttgtaaacagtgccatgcccaccatgacctagaacacgagtagcatcaaacttgttggttgcttcctctagttcatccaaagtgaatatctttgttttggttgtagcattttcattcgatattagttgctccaagagtagaccttgatttttcttgaagtactctcttcgaattctcctttggatgccttttttccacttatcggtgagtacaattgcaccaagtgcaaaacttatggatccaagaccacaaacaagcccaattacaatccctgtacagttattttgaaggtatgggataccttgcccggccggcctcgaggtacccaa

SEQ ID NO: 97282 - DNA, 943 bp, Zea mays
  Clone ID: MRT4577_20234C.1
actccatagggcgattgggattctcgagggcggccgggacccatcagctatccccttttgctgcaatctttctctgaattgtgggtctccgacaatggcggcgctcgctccatccaagattctgggcacccagctcaacttcgcgggctcctcccgctacgccaccgcagcgcccaccgcgggggctcagaagattgtctcccttttcagcaagaagcctgcccagaagcccaagcccgctgcggtatcgtcctcttctccagacatcagcgacgagctcgccaagtggtatggtcctgacaggaggatctacctgccggatgggctgttggaccggtcggaggtgccggagtacctcaccggagaggtccctggagactatggctacgacccttttggcctgggcaagaagccagaggacttcgcccccgcgccgagtactaccggatcaccaacggactggaccttgaggacaagctgcaccccggtgggcccttcgaccccctgggcctggccagcgaccccgaccaggccgccatcctcaaggtgaaggagatcaagaacggccggctggccatgttctccatgttcgccttcttcatccaggcctacgtcaccggcgaaggccccgtggagaacctcgccaagcacctcagcgaccccttcggcaacaacctgctcaccgtcatctccggcgccgccgagaggacgcctagcctgtaaggacggacgccacgccgccgagcaatgccaagtcatgcgctgctgcatgccgtctttgattttaccgggataaaaagctgtatgtgagggtctgaagaatgtgcaatgcccacgcgtgtaaattatcgagagggggaacaaaccttttcattctgattgtaaaaaaaaaaaaaaaaaaaggcccctaaaaaatattaaaaatttaaaaaaaaataaaaat

SEQ ID NO: 97283 - DNA, 438 bp, Zea mays
  Clone ID: MRT4577_20235C.1
ggggggaacccccccgggtttttttccgcaaccctggccccccggggggggcccaaatctccaacccgaaaaagggaaagcccccctgttctgttcatttggggacaaacgggcccccgggcttgcttgacaaaaaaccccccggggccgggccccaaaacccttaaaccaaccccaaccccgttgaacttgaaccccctttaaaagcaggccccaacataaggagaggttaagggttccccccccggcccgttcctttttttaaaaaaaaaacgttcctttttttataaaacaaagtttccctcgagaaaaacttaaataaaggggggggggtaacaacaagggccgggggcccccacaaaaaaaaagccccagggcttttttttccccccaaacccaaaactggaaaatttcccccggggggggttgattccaaag

SEQ ID NO: 97284 - DNA, 289 bp, Zea mays
  Clone ID: MRT4577_20236C.1
cactcatccggggcaacttacatggacaatctcgctttacatccttcaccacactaattggctccagcatctctaaccacctatcaggatctaccaagttgccacatatcctttgacccaccttcactctatccatgctacaatactcccaacatatctactatccccagactatctgactgaccttcatagatatggtaactctcaagactatgaactttaacaagacacttgcaaagaatctttccaatacataccatcctatcttgccatcagacgccatcatcac

SEQ ID NO: 97285 - DNA, 700 bp, Zea mays
  Clone ID: MRT4577_20237C.1
ctgccagaagcccaagcccgctgcggtatcgtctcttctccagacatcagcgacgagctcgccaagtggtatggtcctgacaggaggatctacctgccggatgggctgttggaccggtcggaggtgccggagtacctcaccggagaggtccctggagactatggctacgacccttttggcctgggcaagaagccagaggacttcgccaagtaccaggcctacgagctgatccatgccagatgggccatgctcggtgccgctggcgctgtcatcccagaggcctgcaacaagttcggcgctaactgtggccctgaggctgtctggttcaagaccggcgcgctgctcctggacggcaacaccctcaactacttcggcaacaacctgctcaccgtcatctccggcgccgccgagaggacgcctagcctgtaaggacggacgccacgccgccgagcaatgccaagtcatgcgctgctgcatgccgtctttgattttaccgggataaaaagctgtatgtgagggtctgaagaatgtgcaatgcccacgcgtgtaaattatcgagagggggaacaaaccttttcattctgattgtgatatgactgctgcttccattggtgcctgagacatgctacttacttaagtttttgaaagttaattagttcgtgcacgcctgagatatgctacttaagttaatttgtgtttt

SEQ ID NO: 97286 - DNA, 1117 bp, Zea mays
  unsure (1)..(1117): unsure at all n locations
  Clone ID: MRT4577_20238C.1
gccggccgggtcgggacccatcagccatccccttttgctgcaatctttccctgaattgtgggtctccgacaatggcggcgctcgctccatccaagattctgggcacccagctcaacttcgcgggctcctcccgctacgccaccgcagcgcccaccgcgggggctcagaagattgtctcccttttcagcaagaagcctgcccagaagcccaagcccgctgcggtatcgtcctcttctccagacatcagcgacgagctcgccaagtggtatggtcctgacaggaggatctacctgccggatgggctgctggaccgatcggaggtgccggagtacctcaccggagaggtccctggagactatggctacgacccttttggcctgggcaagtaccaggcctacgagctgatccatgccagatgggccatgctcggtgccgctggcgctgtcatcccagaggcctgcaacaagttcggcgctaactgtggccctgaggctgtctggttcaagaccggcgcgctgctcctggacggcaacaccctcaactacttcggcaacagcatccccatcaacctggtggtggccgtgatcgcggaggtcgtccttgtcggcggcgccgagtactaccggatcatcaacggactggaccttgaggacaagctgcaccctggtgggcccttcgacccgctgggcttggccagtgaccccgaccaggccgccatcctcaaggtgaaggagatcaagaacggccggctcgccatgttctccatgctcgccttcttcatccaggcctacgtcaccggcgaaggccccgtcgagaacctcgccaagcacctcagcgaccccttcggcaacaacctgctcactgtcatctccggccgccgagaggacgcccagcctgtgaggacgcacggacgccatgtcatgcgctgctgagctgtatgtgagggtctgaagaatgtgccatgcccatgcgtgtaaattaccaagagggggaagaatccttttcattctgatctctgatatgagtgctctgcttcaatttgtgcctgagatgtgctactcacttaagtttttggaagttaattagttcgtgcgcgtctgagacatgatactntagt

SEQ ID NO: 97287 - DNA, 999 bp, Zea mays
  Clone ID: MRT4577_20239C.1
ggccgcttttttttttttttttttctttttttttttgtgcaagaactaattaactttcaaaaacttagcacatctcaggcgcaatctgaagcagcagtcatatctgagatcagaatgagaaggtttcttccccctctcgataatgtacacgcatgggcatggcacgttcttcacttcagaccctcacacacagctctttccccggtaaaatcaaggacggcagcagcgcatgacttggcatcgctgccggcttgtggcgcgtcctcacaggctgggcgtcctctcggcggcgccggagatgacggtgagcaggttgttgccgaaggggtcgctgaggtgcttggcgaggttctcgacggggccttcgccggtgacgtaggcctggatgaagaaggcgaacatggagaacatggcgagccggccgttcttgatctccttcaccttgaggatggcggcctggtcggggtcgctggccaagcccagggggtcgaaggggccaccggggtgcagcttgtcctcgaggtccagtccgttgatgatccggtagtactcggcgccgccgacgaggaccacctccgcgatcacggcgaccaccaggttgatggggatgctgttgccgaaatagctgagggtgttgccgtccaggagcagggcgccggtcttgaaccagacggcctcggggccgcagttagcgccgaacttgttgcacgcctctgggatgacagcgccagcggcaccgagcatggcccatctggcatggatcagctcgtaggcctggtacttggcgaagtcctctggcttcttgctgaagagggagacgatcttctgagcccccgcggtgggcgctgcggtggcgtagcgggaggagccggcgaagttgagcttggtgcccagaatcttggatggagctagagccgccatcgccggagacccacaattcagagagacttgccgcgggaggggatggctgatcccggcccggccggcctcgaggtaccc

SEQ ID NO: 97288 - DNA, 4968 bp, Zea mays
  Clone ID: MRT4577_2023C.1
atggatcctaagggaaaggggatagtgatcaatgacaaggaggagtccttcatcaatgagccgaaagacgacaagcccactgactcaggctcaagtcataagaagaaggatgggaagaagaagaggcgcatcaagaagatcgtctactacgacgacagcgacaagtcctcttcttcccaaaaggacaacgacgacaacgactacgagaaaaagaagacggttaactcgaacttttcttttgattactcttgtattccgcatagttcaaatgcacatttgctttccattcctcttggcaaacctccacactttgatggagaggactacagattttggagtcacaaaatgcgtagtcacttgttctctctccatccaagtatatgggagatagtagaaaatggaatgcaatttgatagcacggatagtcccctattcatcaatgagcagattcataaaaatgcacaagctactactgtgttgttagcctcattgtgcaaggatgaataccataaggtgagtggcttggataacgccaagcagatttgggacaccctcaggatctctcatgagggaaatgacgtcaccatgctcaccaagatggagttggtggagggcaaacttgggagattcgcaatgatcaggggggaggagccaacccaaacatacaacaggctcaagaccctcgtcaacaaaataaggagctatggaagcacgcgatggacggaccacgacgtcgtccgcctaatgctaaggtctttcactgtccttgatccacatcttgtaaacaatattcgtgaaaatcctaggtacaccaagatgtcgcccgaagaaatacttggaaagttcgtaagcgggcggatgatgatcaaggaggcaaggtacgtcgatgaggcgttgaatggtccaattcatgagcctcaagccattgctctcaaggcaacaaatagcaaggaggcgctacctagcaaggtggcacaagttgaggcggcggggctcaatgaggaagaaatggccctcatcatcaagcgcttaaagacgacgctaaagggtcgcaaggagcatcccaaaaagaccaagacgaagggaaagcgctcctgcttcaagtgtggtaagattggtcactttattgctaactgtcccgataatgatagtgaccaggaacaaggaaagaatgggaaaagagagaacaagaaggtttacaagaaggctaaaggcgaggcacaccttggaaaggagtgggattcggattgctcttcgtccgactccgacgacgaaggactcgccgccaccgccttcaacaaatcgtctctcttccccaacgagcatcacacctgcctcatggcaaaggagaagaaggtaagcactcgaaatgctattacttatgcctcttctagtgatgatgaatctagtgatgatgaaatagactatgctagtttgttcaagggcttagatagaactaaaatcgataagatcaatgaattgattgatgctttgaatgataagaatagattgttagaaaagcaagaggatcttttgtatgaagaacatgataaatttgtagaggcacaaaaatctcttgctttagaagttaaaaggaatgaaatgctttcttgtgaactatctacttgccatgagaccatttctagtttaaaaagtgttaatgatgatttaaatgctaaactagaagtagcaaatagatctaactcttgtgtagaacatgttgtgatttgcaatagggatgcctatacgatcggtagacacccctcaattaaggatggacttggctttaagagggaagccaagaacttaacaagtcataaggctcccatctccgccaaggagaaagggaaggctcctatgactaatagtagtcaaaagaatcatgctttcatttatggtgataagagatattctagaaatgctcatagaagttgtaatgcttatgattcaaatgtcatgtttgcttcaagttcttccattatgcatgatagaaattttgctaggaaaaatgttgttcatcatatgcctagaagaaatgttgttcatgtacctaggaaagtttatgcatcagggggatcaagctggattatcgaaagcggatgcacaaaccacatgacgggggagaagaagatgttcacctcctacgtcaagaacaaagattcccaagactcaatcatattcggtgacgagaatcaaggcaaggttaaaggactaggaaaaatagcaatttcttccgagcattctatctctaatgtgtttctagttgaatcgcttggatataatttgttgtccattagtcaattatgtaatatgggatataattgcttattcaccaatgtagatgtgtctgtctttagaaggagtgatggttcattagcttttaagggtgcattagacgacaaactctacctagttgattttgcaaaagaggaggccggtctagatgcatgcttaattgctaagactagcatgggctggctgtggcatcgtcgtttagcacatgtggggatgaagaaccttcacaaacttctaaagggtgaacatgttataggtctaacaaatgtaaccttcgaaaaagatagaccttgtgcagcttgtcaagcaggtaaacaggtgggaagctctcatcataccaaaaatgtgatgaccacatcaagacctttggagttgtttcatatggacctcttcggacccgtcgcctatctaagcataagaggaagtaagtatggtcttgttattgttgatgacttttcccgcttcacttgggtattctttttgcaggataaaacagaaacccaagggaccctcaagcgcttcctaaggagagctcaaaatgagtttgagctcaaggtgaagaagataaggagcgacaacgggtccgagttcaaaaaccttcaagtggaggagtaccttgaggaggaaggaatcaagcacgagttctccgctccctacacaccacagcaaaatggtgtggtagagaggaagaaccggatgctcatagacatggcgaggacaatgcttggagaatttaagacgcctgagcggttttggtcggaagctgtgaacacagcttgccacgccataaaccgggtctatctccatcacctcctcaagaagacatcatacgagcttctaaccggtaacaaacccaacgtttcgtattttcgagtttttgggagtaaatgctacactctggtgaagaaaggtagaaattcaaaatttgctcccaaagctgtagaagggtttttgttaggttatgactcaaatacaaaggcgtatagagtcttcaacaaatcatcgggtttggttgaagtctctagcgacgttgtatttgatgagactaatggctctccaagagagcaagttgagcttgatgatgtagatgaggatgatgttccaatggacgcgattcgtaccatggcaattggagacgtacgaccgcaggaacacaaggaacaagatcaaccttcttcctcaacgacggtgcaccccccaacccaagatgatgaacaggtacctcaagaggaggcgtgtgatcaagggggaacacaagatgtccaagttgaagaggaagaagcaccacaggcccctccaactcaagttcgagcgatgattcgaaggaaccatcccgtcgaccagattttgggtgacattatcaagggagtaaccacttgctctagattagttaatttttgtgagcattactcttttgtctcttctattgagcctttcagggtagaagaggctttgctagatccggactgggtgttggccatgcaggaagagctcaacaacttcaagagaaatgaagtttggacattggtgcctcgtcccaagcaaaacattgtgggaaccaagtgggtgttccgcaacaaacaagacgagcacggggtggtgacaaggaacaaggcacgacttgtggcaaaaggttatgcccaagtcacaggtttggactttgaggagacttttgctcctatggctaggctagagtcgattcgtattttgttagcctatgctgctcaccattctttcaggttgtaccaaatggatgttaagagcgctttcctcaacgggccaatcaaggaggaggtgtacgtggagcaaccccctggctttgaggatgaacggtaccccgaccatgtgtgtaagctctctaaggcgctctatggacttaagcaagccccaagagcatggtatgaatgccttagagactttttaattgctaatgctttcaaggttgggaaagccgatccaactcttttcactaagacatgtgatggtgacttatttgtgtgccaaatttatgtcgatgacataatatttggttctactaaccaaaagtcttgtgaagagtttagcagggtgatgactcaaaagttcgaaatgtcgatgatgggcgagttgaactacttccttgggttccaagtgaagcaactcaaggatggcactttcatctcccaaacgaagtacacacaagacttgatcaagcggtttgggatgaaggacgccaagcccgcaaagactccaatgggaactgacggacacgtcgacctcaacaaaggaggtaagttcgttgatcaaaaagtataccggtccatgatagggtctttactttatttatgtgctagtagaccggatattatgcttagtgtatgcatgtgttctagatttcaatccgatccaagggagtgtcacttagtggctgtgaagcgaattcttagatatttagtcgctacgccttgcttcgggatctggtatccaaaggggtctacctttgacttaattggatattcagactccgactatgctggatgtaaggtcgataggaagagtacatcggggacgtgccaattcttaggaaggtccctggtgtcgtggagttctaagaaacaaactttcgttgccctatccaccgctgaggccgagtatgttgccgcaggacagtgttgcgcgcaatactttggatga

SEQ ID NO: 97289 - DNA, 841 bp, Zea mays
  Clone ID: MRT4577_20240C.1
gattgtgggtctccgacaatggcggcgctcgctccatccaagattctgggcacccagctcaacttcgcgggctcctcccgctacgccaccgcagcgcccaccgctgagactgaaaggtattgtctcccttggcagcaaggagcctgcccagaagcccaagcccgctgcggtatcgtcctcttctccagacatcatcgacgagctcgccaagtggtatggtcctgacaggaggatctacctgccagatgggctgttggaccggtcggaggttccggagtacctcaccggaaaggtccctggagactatggctacgacccttttggcctgggcaagaagccagaggacttcgccaagtaccaggcctacgagctgatccatgccaaatgggccatgctcggtgccgctggcgctgtcattccagaagcctgcaacaagttcggcgctaactgcggccccgaggccgtctggttcaaaaccggcgccctgctcctggacggaaacaccctcagttatttcggaaacagcatccccatcaacctgggggtcgccgggactcgcggaggtcgtcctcttcggcggcgccgagtactaccggatcatcaacggactggacctcgaggacaagctgcaccccgggggccccttcaaccccctgggcttggccagggatcccgaccaggccgccatcctcaaggggaaggaaatcaagaacggccggttcgccatgttctccatgttcgccttcttcatccaggcctacgccaccgggaaaggccccgccaagaaccccgccaagaacctcaggaaccccttcggaaaaacctgctcaccgtaatctcc

SEQ ID NO: 97290 - DNA, 1304 bp, Zea mays
  Clone ID: MRT4577_20241C.1
tcggccgggagctccgatggcccagctctgctaggccccagcatcctccgatcctcattttcatccatttaaactagctcgccttttcctccacgagcccccatcagccatcccctcccgcggcaagtctctctgaattgtgggtctccggcgatggcggctctagctccatccaagattctgggcaccaagctcaacttcgccggctcctcccgctacgccacggcagcgcccaccgcgggggctcagaagatcgtctccctcttcagcaagaagcctgcccagaagcccaagccctctgcggtgtcgtcctcttctccggacatcagcgacgagctcgccaagtggtacggtcctgacaggaggatctacctgccggatgggctcttggaccgctcggaggtaccggagtacctcaccggagaggtccctggagactatggctacgacccttttggcctgggcaagaagccagaggacttcgccaagtaccaggcctacgagctgatccatgccagatgggccatgctcggtgccgctggcgctgtcatcccagaggcgtgcaacaagttcggcgctaactgcggccccgaggccgtctggttcaagaccggcgccctgctcctggacggcaacaccctcagctatttcggcaacagcatccccatcaacctggtggtcgccgtgatcgagaggacgcccagcctgtgaggacgcgccacaagccggcagcgatggtcatgcgctgctggtccttgattttagagttgagcatgggaggtcgtccttgtcggcggcgccgagtactaccggatcatcaacggactggaccttgaggacaagctgcaccctggtgggcccttcgacccgctgggcttggccagtgaccccgaccaggccgccatcctcaaggtgaaggagatcaagaacggccggctcgccatgttctccatgctcgccttcttcatccaggcctacgtcaccggcgaaggccccgtcgagaacctcgccaagcacctcagcgaccccttcggcaacaacctgctcactgtcatctccggccgccgagaggacgcccagcctgtgaggacgcacggacgccatgtcatgcgctgctgagctgtatgtgagggtctgaagaatgtgccatgcccatgcgtgtaaattaccaagagggggaagaatccttttcattctgatctctgatatgagtgctctgcttcaatttgtgcctgagatgtgctactcacttaagtttttggaagttaattagttcgtgcgcgtctgagacatgatactttagt

SEQ ID NO: 97291 - DNA, 607 bp, Zea mays
  Clone ID: MRT4577_20242C.1
acctcaagagaaaagcaccttacccaagaagataccgggaagcttacccttgaagcctggaataagccgtgctccccgcatgcgtgccctgcctccatgcgcactaccaccgccccatgccccctttgcagcgcacccaccgccgccattaccgccagcaacaccatcccccctccatcgcacttgttgccttgtgtcacctgctccatcaccaccactccgcaaccgagcacccacactcgctataaacccccccaccagctccctcagttcccatcccaagcaaaacactccagataaaaacccctctgccaaatcgcaagcaaccccattttccactccctcgcccctaagatcacaatgcttggtgattcttgggttgaagactgttgtacatggttcaatatcttcgatgtcctcctctgtatgatggtaatactctttgatagaatcctccagtgggaagagcaaagagaaagaaagggtcagtgaaaagaagatagtgaagataagataagaagaaggttctcctagaatcaaccctgtgtcagtcatttctccgcagcctgctcgagcagcaacagcagaagaaggccccgtaacaccc

SEQ ID NO: 97292 - DNA, 842 bp, Zea mays
  unsure (1)..(842): unsure at all n locations
  Clone ID: MRT4577_20243C.1
gaccctccgggctggccgggatcagccatcccctcccgcggcaagtctctctgaactgtgggtctccggcgatggcggctctagctccatccaagattctgggcaccaagctcaacttcgccggctcctcccgctacgccacggcagcgcccaccgcgggggctcagaagatcgtctccctcttcagcaagaagcctgcccagaagcccaagccctctgcggtgtcgtcctcttctccggacatcagcgacgagctcgccaagtggtacggtgagtagacctggccccaactgctggcagcgcacgacttctaggacccagatttgcttcagggctccctcgtgttgggcgtttgatagaactttggcatgaaaaatcttcagaagcttcctctgcactaattttatcttgtttggtgtctgagatgtagaactttgcccatgaaaaccttcagaagctccctgtatagtaagttagtaactgtctcttgttctatgttcaattaggtcctgacaggaggatctacctgccggatgggctcttggaccgctcggaggtaccggagtacctcaccggagaggtccctggagagtaagtcacatcactccaactttgccttccataaaggtttttgcttgtttcagaaattctagagaccagttggtagtttaatgaaatcaggttagggctacaagaatcttgaaaaaaagagtttgtggtcaaaatccgattttttcaccaaaatggtgcatcattgcagcttgtagaattcgttcttaaagtacacacgtctctcaaccagcatttgaaataatcttcgttacagntttaaacacaatctt

SEQ ID NO: 97293 - DNA, 306 bp, Zea mays
  Clone ID: MRT4577_20244C.1
gccacgcgcagctccacagcgccgtcaataactcgccttgccctgggcaggagccgctcaggatcgtacccatatcatgcggcaccttattcgtcgtgcctggtaagatgcactacccgtccgaggaatgcgtcgtcgcgtatctctgatgccacatcataaaacacttagtagatttactttacaaggcaccccatccgttgccagatctccacccgatgccttgccacatcaaggcgacgtttccttaataccatcctgttcctgatcacaataagcctgcgccagaataccttgattgcacgc

SEQ ID NO: 97294 - DNA, 910 bp, Zea mays
  unsure (1)..(910): unsure at all n locations
  Clone ID: MRT4577_20245C.1
gctagtgcccacgcgtacgaacaagataaagatcgaagctggttggtctcatcactttatcagatatatagcagacgatacttgctacgccgaagtgctttggaattattcatggtagataggtcgaatttcttttttgactttgcggatattgatgcccgtaaaaacgcttatcgggccattgttcataccaaacctcctaacttgaatgacatctttttagctacccagagagctgagcagattcttaaaagaactcagttgatggagcgctgggctaattgggagatcaacaattttgagtacttaatggaacttaacacactggctgggcgcagttacaatgacattactcagtaccctgtttttccctgggtagtagcagattacaaatcccgagtgttgaatctggatgaccctttgtcgtatcgagatctttcaaagccaattggagcactaaaccctgaacgtctaaagaagttccaagaacggtactctacattcgaggatccaatcataccaaagtttcattatggttcacattactccagtgctggcacggtcttgtattaccttttcagagtggagccttttacaacactgtctatacaactgcaagacggcaaatttgaccacgctgatcgcatgttttctgatctttctggtacatgggatagtgttcttgaagacatgagtgatgtaaaagagctagtacccgagatgttttacctccctgaggtatttaccaacataaatggcattgactctgggacaactcacttggagggaagctagattccgtagaattgcctccctgggctgaaaatcatgtggattgtgtccataaacatcggacggctcttgagagtgagcacgtctctgctcatttgcatgagtgggtngatctaat

SEQ ID NO: 97295 - DNA, 302 bp, Zea mays
  Clone ID: MRT4577_20246C.1
gggagacagaaccaatcttcgtaccattaccgccaccacccaagagtctactgtcctgatctctgcctacctaacatcgcaagccgcagcatgtcaccttgtcctgctctagcaccctcactggcgagaggcctcaccgttgcgacgacgacatcgaaccctcagcacccccacacgatatccctggctcggatgacgcctataaaaataacatccagctccacatagacaggctcagtgagatagaaagcctacttcgtcgagatgaggccattctcctcgtgacgctacgagtgcggctg

SEQ ID NO: 97296 - DNA, 2425 bp, Zea mays
  Clone ID: MRT4577_20247C.1
aggcggcggccgccttttaaaatacacatcactattgagaccgaaattaacagacaataacttttttttttttttggggtcttccacgagaagactgaacactgatcatcttcatatattgaccatcaggcaaccatgttattcactactatcagtctatcctggtctactaattttatccaggtaatgatttgcatacaacaatagcatcatgaaaatacacatcaatatatcgaccgaaatgaacagacaataactgtctgtatctcctgttcacaaacaacacacacaactgaaacttaaataactaccgaattataaacacttctgactgataggagccgatgccgaaaacccattcttctagcatcctacttgatagctacgtatatatgccagaactggatggatggatggatggatggccattgtcttcatatgaaagaaaacaacttgaagtatacaaccaggtagagtgaaagagagaacaccgcacaaatatgctgccagaacagaagggcggatgcttccttgacgccatagcctctgagactggcgatcgctccaagcaggatagcactcggggtggagtactgcagggagagcacaaagcggtacatatggttttcctccacgagcagatgcaacctgtctgccagggtcacaacaccgatgccaatgcatgggagaaccaagagcctggccacaatgataccgatgatagtcctcatgcccaaggcgttgtcttttgggccttccgcgagcatgcctccgagaatcaacatcaccgacggaaccacagcagcggctaggatctccaaactgtcggtgaagaacgagagcggcgcatcagccccgaaaacaaaatctttcaggacaggaaccatgccgatggtaatggcaagcaaagaggcgatcgtcgggggctgaaggacgtgctggatcggagtcttctcggcgacaaccctaatcctcctgaccactcttggctctgccagacatcggagcgacttaggactgcttggtccagctgcagaagttccttcttcggtgaaatcgatgtcagggaacgtgttctgtgaggaacctgaaatgctcatgaaaactctcgcgatgaacggtgtcttcgaatgctcagtttccttgtcgaccatccctggccactccgcctcatgaagcagggacctactgtagttgctgaccagctcgggttcctgctgtatctcattcccttccccgacgatctcgtagaactgcatcggtggctccatcatgtggtagaccagagtgtacacaagaatgaccgcaacccactgcgcgaacgagacataggcgatgcccatggtgtcgcacccagggccgaaggggtggtcgttggtgtggcagactgacccgatgatcgcgatcgggaggttccccgtgttaccgaacccggtcatgatcaccgtaaaccggaacaggtgcggcggcgggcggcagatcagggccacgatgtacccaagggcgcacccgatggcagtgctgatgagcacgttgacggggatgaaccaccagtgcagggacgttgtctatggtgaccgacttgccgaggtggacgaagatgaggcaggggaggaagagcgcgaagacgagcttgctcaggagcttgaaggtggccctgggcacgacctggaccccgcgggttggcgaggagcaggccgatcaccgccaggcacagcagcttcatcagcggcaccacggctgacacccagtcgccgtggacggtcacctgcgggtccattgaccagaccattgccgctgctaaagcttctcgcctttctctgacctgggtcctcgaaacagtctcttctaataaactctgaaaaatactcccacttctttttgtttgtatgtacaactaaattgttctcttgcacaaagacagtgctcaatcagatgcaaaaggatggttttttctgcacaccaaattaatggagaagattcagcaacggaggaaaaaactacgaaacggtattatacaggatcaataggtggaacaattctagcttggaaccggtgcggatcttgcaaatactcggtgcttggtacctgactcgtgttctaaacttcctacatctctcgaatttcaggtcttggcaaagattcaggcaaccaatcagcaagaaaaccagaaaccgcgacggaaccaaaacttgcaagattcacgcaatactcacatggaccttcgatctgggaatggagaaaggatggggaggaggcgctgtgctgtccctctccgcgagtcgatgcgccgaggcaggaaggcaggagccacaacgacgaagagagaaggaaaaaggggagagtggcggcgtgaaaggattacagatttgagaggcctggcatccggcgtggcattgtataaactttcgagatccccggccgg

SEQ ID NO: 97297 - DNA, 630 bp, Zea mays
  unsure (1)..(630): unsure at all n locations
  Clone ID: MRT4577_20248C.1
ccacgcgggcggagcagccgcatcgaactctacctgcctttctctcgtccctggcggcggcgccaggatggcggcttctactgcgaggacggggaaggatgtgaacccccacgagtgtgtcaagggctactccgcccatctcaaacgctccgggaagatggagcttcctgagtggggtgacattgtgaagactgcgaggggcaaggagctccctccttatgaccctgactgggactacatcagggctgcgtctgtggcaagggaagatctacttgagacaaggcgttggggtgggggggttccataatatttatggggggcgccagaggaatgggtcacgcccacctcacttctgcgagagcagtggggccatttcacgcgacatcctccatcgggtgcgggagatgggcatcattgatgtcgatcccaaggggggacggggcatcacctcccatgggaggcgtgatctgggccaggtgggtggaaggggtgctgttgaaccttgagcaatctcatatttgggttctatgatgtcatgtgtgattgtggagatggctacactttatttgcactttggattangatttttgtgtgaagagaactcaaggggttctanctatggggcatact

SEQ ID NO: 97298 - DNA, 1560 bp, Zea mays
  Clone ID: MRT4577_20249C.1
ccacgcgtccggcacccagccaatggcagctcctatggccaaatctctgcttggcccacagcatcctccgatcctcatttctccatttaaactggcccgccccctccacaaacgcccgatattctcgttcttcatcgtatccggattcagtaactttggggacctcgagggggcggccggccccatcagccatcccctcccgcggcaagtctctctgaattgtgggtctccggcgatggcggctctagctccatccaagattctgggcaccaagctcaacttcgccggctcctcccgctacgccaccgcagcgcccaccgcgggggctcagaagatcgtctccctcttcagcaagaagcctgcccagaagcccaagccctctgcggtgtcgtcctcttctccagacatcagcgacgagctcgccaagtggtacggtcctgacaggaggatctacctgccggatgggctcttggaccgctcggaggtaccggagtacctcaccggagaggtccctggagactatggctacgacccttttggcctgggcaagaagccagaggacttcgccaagtaccaggcctacgagctgatccatgccagatgggccatgctcggtgccgctggcgctgtcatcccagaggcgtgcaacaagttcggcgctaactgcggccccgaggccgtctggttcaagaccggcgccctgctcctggacggcaacaccctcagctatttcggcaacagcatccccatcaacctggtggtcgccgtgatcggcggaggtcatcctcgtcggcggcgccgagtactaccggatcatcaacggactggacctcgaggacaagctgcaccccggtggccccttcgacccccctggggcttggccagcgaccccgaccaggccgccatcctcaaggtgaaggagatcaagaacggccggctcgccatgttctccatgttcgccttcttcatccaggcctacgtcaccggcgaaggccccgtcgagaacctcgccaagcacctcagcgaccccttcggcaacaacctgctcaccgtcatctccggcgccgccgagaggacgcccagcctgtgaggacgcgccacaagccggcagcgatgccaagtcatgcgctgctgccgtccttgattttaccggggaaagagctgtgtgtgagggtctgaagtgaagaacgtgccatgcccatgcgtgtacattatcgagagggggaagaaaccttctcattctgatctctgatatgactgctgcttcagattgcgcctgagatatgctaagtttttgaaagctaattagttcgtgcacattaagggtgcgtttgagttggattatttgtgaatgctagcttattttaacttatttatgattttaaagtgatattttacccctctagtataattcaacgtataggaggaaacaaacgtagcctaagttactttgtggtcaatctaatagagctcctgaattttacatcaaaaaaaaaaaaaaaaaagcggaaaaaaaaaaaaaaaaaaaaaaaaacccaaaaaaaaaaaaaaaagggggcc

SEQ ID NO: 97299 - DNA, 229 bp, Zea mays
  Clone ID: MRT4577_2024C.1
atcgaggaaaatctcaatcaatatattgattatttttagggaacgacagccgctatgagggcgccgttgtcgagtgcagcccatgtgtaagctaacaggaggccccaccaacgatgggttgctgccgcgacaaggcggggggcatcaaagagaactggccgtctggcagccattgttgctgctggcggaaggccgtgaccactgggttagccaccgcctgtggattaag

SEQ ID NO: 97300 - DNA, 676 bp, Zea mays
  Clone ID: MRT4577_20250C.1
caggccggccgggccgggaaacctagcccagagcagccgcatcgaactctacctgcctttctctcgtccctggcggcggcggcaggatggcggcttctactgcgaggacggtgaaggatgtgaacccccacgagtttgtcaaggcctactccgcccatctcaaacgctccggcaagatggagcttcctgagtgggttgacattgtgaagactgcgagggtcaaggagctccctccttatgaccctgactgggactacatcagggctggatctggaacaaggaagaactacttgagacaaaggattggtggtggtggcttccaaaaaaattatggtgggcggcaaaagaatgggtcacgcccacctcacttctggaagaacagtggtggcattttacgcaacattctcccacaactggaagagaaggggatcattggtggcgattcccaggggggaagggggattacctcccaaggaaagggtgatctggaacaagtggctggaaagggtggtggtgaaacttgaacaaactcctaattgggttctaagaaggcatggttgaatggtgagaaggctacactttatttggactttggattaagaattttgtggtaagagaacatccagggattctaactatgggtcacactggattttccctgaggacctatttatcc

SEQ ID NO: 97301 - DNA, 547 bp, Zea mays
  Clone ID: MRT4577_20251C.1
aaactgatcaccaccatcgttttattcttcatcagtaactaaacagcagagcagaatgcagcaaaatagtctcgccaattttgttccccccaactcaactaaacagcactccggtgcaaccgaacaaatgtttcaaatgttctacgaaaactgcccaaaacgtcataacttcgacagctaatggggactaccgacaacggatggtttttaacgtaaatctccctcaccaatgggtgctaaaacgtaacaacaaacagcatgtgcgtccggggattctctctctcgcgcgcgtattctttcaactcccccctctctaccgtgttaggcccgcttgttccaagacttgcctcggtaggatttctgcttcgtcctccgctgcgatacgtagtccgcctcctcctggaacgggttttccctcggtcgtactcctcgtcccactcatctaagatgtagccaccgctcttgcgtttggactgcggctcagcgacctttatatttggcacgtctacatcatcccaacgcggaacggtagcttccatcaggtccg

SEQ ID NO: 97302 - DNA, 811 bp, Zea mays
  Clone ID: MRT4577_20252C.1
gggtacctcgaggccggccgggctactcactctagtccagagtaatcgcatcgaactctacctgcctttctctcgtccctggcggcggcggcaggatggcagcttctactgcgaggacggtgaaggatgtgaacccccacgagtttgtcaaggcctactccgcccatctcaaacgctccggcaagatggagcttcctgagtgggttgatattgtgaagactgcgaggttcaaggagctccctccttatgaccctgactggtactacatcagggctgcatctgtagcaaggaagatctacttgagacaaggcattggtgttggtggcttccagaagatttatggtggccgccagaggaatggctcccgcccacctcacttctgcaagagcagtggtgccatttcacgcaacatcctgcagcagctgcaggagatgggtatcattgatgtcgatcccaagggtggacggcgcatcacctcccagcggaaggcgtgatctggacccaggtggctggaagggttgctgttgaagcttgagcagtctcatttggtttctatgatgtcatgtttgattgttgagatggctacactttatttgcactttggattaggatttttgtgttaagagaactcaaggtttaatgcatctagcattctagctatggttcacactgtattttccctgagtacctattgcagtatcaaaacctattcatatgtttgggaagtgtctgagctgatattcgtgacatgtcttttggtataggtctatctatgtgacgtgataatatcattgggatagattacgctcta

SEQ ID NO: 97303 - DNA, 904 bp, Zea mays
  unsure (1)..(904): unsure at all n locations
  Clone ID: MRT4577_20253C.1
attgggtacctcgaggccggccgggacaaatcctagcccagagcagccgcatcgaacttacctgcctttctctcgtccctggcggcggcggcaggatggcggcttctactgcgaggacggtgaaggatgtgaacccccacgagtttgtcaaggcctactccgcccatctcaaacgctccggcaagatggagcttcctgagtgggttgatattgtgaagactgcgaggttcaaggagctccctccttatgaccctgactggtactacatcagggctgcatctgtagcaaggaagatctacttgagacaaggcattggtgttggtggcttccagaagatttatggtggccgccagaggaatggctcccgcccacctcacttctgcaagagcagtggtgccatttcacgcaacatcctccagcagctgcaggagatgggcatcattgatgtcgatcccaagggtggacggcgcatcacctcccagggaaggcgtgatctggaccaggttgctggaagggttgctgttgaagcttgagcagtctcatatttggtttctatgatgtcatgtttgattgttgagatggctacactttatttgcactttggattaggatttttgtgttaagagaacttaaggcattctagctatggttcacactgtattttccctgagtacctattgcagtatcaaaacctattcgtatgtttgggaagtgtctgagctgatattcatgacatgtcttttggtataggtctatctatgtgacgtgataatatcattggatagattacgatctagatgaatttctatctcttgagtttcctaaactgtgcttgtttcgcttgcgnnnnnnnnnnntgctgtgatttaaccataggttcaacttagactggctgggctcgtca

SEQ ID NO: 97304 - DNA, 442 bp, Zea mays
  Clone ID: MRT4577_20254C.1
aggggcttttttttttttttttttttttttttgcagcaaaatagtctcgccaattttgttcccccaactcaactaaacagcactccgttacaaccgaacaaatgtttcaaatgttctacgaaaactgcccaaaacgtcataacttcaacaactaatggggactaccgacgacggatggtttttaacgtaaatctccctcaccaatgggtgctaaaacgtaacaacaaacagcatgtgcgtccggggattctctctctctcgcgcgcgcgtattctctcaactcccctctactaccgtgttaggcccgcttgctccaagacttgcctcggtaggatttctgcttcgtcctccgctgcgatacgtagtccgcctcctcctggaacgggtttggcccgccaaagtcttgctttgacctccgcaccttcttcgtcttccctcgggc

SEQ ID NO: 97305 - DNA, 878 bp, Zea mays
  unsure (1)..(878): unsure at all n locations
  Clone ID: MRT4577_20255C.1
ccggccgggnaaaaaaaaattttaaaaaaaaaaaaaaaaaaaaaaaaaaaaaaaaaaaaaaaaaaaaaaaaaaaaaaaaaaaaaacagacaaaaagataccccaatccacatacacacacattcacaatggcctcaagacccgtcacccgtgccctccgccaatccgcccgccaattggcggctgctccagcccagaagaggacctttgtctctgctctgagtgctggtgcaaagaaggctgctccccgcgctgccgttaccagccagttccagcaaactcgtggtgtcaagaccattgactttgccggtaccaaggagactgtctacgagcgtgccgactggccaaaggagaagcttttggaatacttcaagaacgacaccctcgccctcatcggctatggctcccagggccacggccagggtctcaacatgcgtgacaacggcctcaacgtcatcgtcggtgtacggaagaacggtacttcatggaaggaggccgagcaggacggctgggttcccggcaagaacctcttcgacattgacgaggccattggcaaggccaccattgtcatgaacctcctctcagatgccgctcaatccgagacctggcccgctatcaagccccggcttaccaagggaaagactctctacttctcccacggtttctctcccgtcttcaaggaccctcaccaaggtcgaggttcccaaggaccattgacgtcatccctcgttgcccccaagggctccggccgtaccgtccgcactcttttccgtgagggccgtggtatcaactcctccattgccgtctaccaagacgtcaccggcaaggccaaggagaaggctgtcgcccttcgtgttgccgtcggttccggatacatgt

SEQ ID NO: 97306 - DNA, 1131 bp, Zea mays
  Clone ID: MRT4577_20256C.1
cggccgggcccgggaataccctagaaccctagcatccgcatcgaactctacctgcctttctctcgtccctggcggcggcggcaggatggcggcttctactgcgaggacggtgaaggatgtgaacccccacgagtttgtcaaggcctactccgcccatctcaaacgctccggcaaggtaacgatggagcttcctgagtgggttgacattgtgaagactgcgaggttcaaggagctccctccttatgaccctgactggtactacatcagggctgcatctgtagcaaggaagatctacttgagacaaggcattggtgttggtggcttccagaagatttatggtggccgccagaggaatggctcacgcccacctcacttctgcaagagcagtggtgccatttcacgcaacatcctccagcagctgcaggagatgggcatcattgatgtcgatcccaagggtggacggcgcatcacctcccagggaaggcgtgatctggaccaggtggctggaagggttgctgttgaagcttgagcaatctcatatttggtttctatgatgtcatgtttgattgttgagatggctacactttatttgcactttggattaggatttttgtgttaagagaactcaaggcattctagctatggttcacactgtattttccctgagtacctattgcagtatcaaaacctattcgtatgtttgggaagtgtctgagctgatattcatgacatgtatttggtataggtctatctatgtgacgtgataatatcattggatagattacgatctagatgaatttctatctcttgagtttcctaaactgtgcttgtttcgcttgcagtcagttagtctgctgtgattgaaccataggttcaacttagactggctgggctcgtcagcaacattattattacaatacgagagaatgctcatgtctctgttcaataatatggtgcattcatttgcataaggacttggtgagttgtttgctgctgtatcagttgagcttgagcataacaaaatgtttttagctcgtaacagagagcttttattagaacgacaactatttggttaaatacaaagtcgttgcgtaaagctttgaacaaaaaaaaaaaaaaaaaaggccccta

SEQ ID NO: 97307 - DNA, 613 bp, Zea mays
  Clone ID: MRT4577_20257C.1
ttccgcgctgggatgacgtagacgtgccaaatataaaggtcgctgagccgcagtccaaacgcaagagcggtggctacatcttagatgagtgggacgaggagtacgaccgagggaagacgaagaaggtgcggagatcaaagcaagactttggcgggccaaacccgttccaggaggaggcggactacgtatcgcagcggaggacgaagcagaaatcctaccgaggcaagtcttggaacaagcgggcctaacacggtagtaaagggggagttgagagaatacgcgagagagaatccctggacgcacatgctgtttgttgttacgttttagcacccattggtgagggagatttacgtttaaaaaccatatccgtcgtcggtacggtagtccccattagttgtcgacgatatgacgttttgggcagttttcgtagaacatttgaaacatttgttctgtttagttgagttggggggaacaaaattggcgagactattttgctgcattctgctctgttgtttagttactgatgaagaataaaacgatggtggtgatcagttttatgacagcagagcagaatgcagcaaaattggcgagactattttgcctcgagccgaat

SEQ ID NO: 97308 - DNA, 4959 bp, Zea mays
  Clone ID: MRT4577_20258C.1
tggtgtcatatgcacgttgctgtgtctgcttatgttatggaactcagagaaaaaggtgaattcgaagtcaagaagtttgtgaggtatcctgttgtgaacatgtggttagggtccagacatctaaagccagggaagaaagcgaaccgcaagagaagtaaaatgataagacgtgttgtagcctgcaaggacgcggcaaatttatcttgtttgagtgagcagctgacgtcaacatcgtccactgcatgctctgaagccgtagaatgtacctccagccgtcagaaacggtcacatgctagtgcaaggtccaaagatgacacccagtcctccggaaacaagcacaaggtcgacggagcccgtgtcggtgctggcacaggtgcaccttcttgcagcgccgacgttccaaagtctgatccgagcccttccacggatgctaagttggtagcgacccagcctgccagtattcgcgcaacggacctgatggaaggctccgttttcgcgtcaggatgatgtagccgtgccaaccgggtatagggtttttagcgccgcctcccacctccagaattcccactcttccgcgccatcgcgtcgcgaacggcggccagaaaaaagaaaaagaaaaaaaaaaacagctcgccgcaccaatctcccctaccatatcgatcgaccctgcaaggtttaatccaacagaattccaccggaaatttggtgaagtgctaatcgcttgcggcttgcctgcccggtctcgtggctttgtgctgctcccgctgtggtgaggaaccctaggatggcgggggtttcgatggcggcggcgcctgagggggtgctgcaccgccggattgagtttcatcttgcacggagaccgcatggctctgtggcggtgggcggcggcgggttccggatggagacgctgaacccggacgccgctggtaaggtggggcccggggaggcggtcgggagcagcgagggggatgcgaggaggccggagaagggagacagtggcgggatcgatccggagctcagcgtcgcaaggatctacctcgggagaattggtgctggattggaaaatcttgggaatacctgctatctcaactcagttctgcaatgcttgacgtacacggagccgttcgctgcctatttgcagagcgggaagcacacgtcctcatgtcgcacatccggattttgtgcattatgtgctcttcagatacatgtcaagactgctctagaatcaactggaaaaacagtgacaccatttcgtattgtcaagaacttgcgctgcatttctcgcactttccgaaattcaagacaagaagatgcacacgagttaatggttaatttgcttgaatccatgcataaatgctgtttaccttctggggtatcgactgagtctcaaagtgcttatgacaaaagcttagttcacaaaatattttggtggccgccttagaagtcaggtcaaatgcacacgttgcttacattgctccaataaatttgatcctttcttggatctcagtcttgagattgccaaggccacgactttggtgcgggcacttgaaaattttaccgaggatgagctactagacgagggtcaaaaggaatacgagtgtgaacgctgcaggcagaaagttgtagcaaagaaacgacttacaattgataaagcccccaatgtcttgacaattcatctgaagcgcttcagccctttcaatcctcgtgagaagattgacaaaaaagtggacttccaatcaattcttgatttgaaaccatttgttagtgactctaaaggaacagattttaaatacagcctttatggtgtcctagtccatacaggttggagcactcaatcaggccattactattgctacgttcgtacatccagcgggatgtggcacaatcttgatgataaagaggtgcgccaagttcgtgaagcagacgtattgaagcagaaggcttatatgttattttatgtacgtaacagtattgggaagtcggtggtgtgcaaagataataatgctgctaatttgctcaagaagaaaacctctgaaaaaatctcaagtttgaatggtattgcacaaaccaatgtaagagcacaaaatttgaatggtgtgtctccatttggtgataagacgcacggcacaatcattggctactctacaatttccagcaagactaaaacaatccactgttcaaagaatgaggtcaaagctgaagatgctccagcctctcaaaacaatgctctaccttccacacaagcccccatagctcgaaatgatgttggtatcttgccaactaaaccaatgcagtttgctgtaaaaaatgaggagaaaacctcatcccaccaacctgcgccatttacaaatacttgtggtgaacaaacagttgttgggaggcccttgcaggaaatggaacctaaggctggtgcaggggaaaatacttctgttgtctctgctgttgctaatgatgccgctacattgtccaaggcagacaaactaacttctcagcctcaaacagctccatcttccaagccaactgccaatgtaaaggacacagctactgagtttgctacactgtctttatcaaagaaggattctgttgtttcaaatggtgctgtgcttagcattggatgtctcacatccggtgagaaagcaatgaacttatcagaatctgtggatcaagctaatgaaatcacaaaggcacttcctacgagtcagaacaatactgcaccagtaattgctcaagcagattgtggagtagagatcagctctggtgtcatcatgcacgttgctgtgtctgcttcatgcaatggaactacagagaaaaaggtgaattcgaagtcaaagaagtttgtgaggtatcctgttgtgaacatgtggttagggtccagacatctaaagccagggaagaaagcgaaccgcaagagaagtaaaatgataagacgtgttgtagcctgcaaggacgcggcaaatttatcttgtttgagtgagcagctgacgtcaacatcgtccactgcatgctctgaaaccgtagaatgtacctccagccatcagaaacggtcacatgctagtgcaaggtccaaagatgacgcccagtcctcgcaaaacaagcagaaggtcgacggagctcgtgtcggtgctggcacaagtgcaccttcttgcagtgccggcgttccaaagtctgatccgaacccttccacagatgctaaggttgtagcgacccagcctgccagtattcgcgcaacggacctgatggaagctaccgttccgcgctgggatgacgtagacgtgccaaatataaaggtcgctgagccgcagtccaaacgcaagagcggtggctacatcttagatgagtgggacgaggagtacgaccgagggaagacgaagaaggtgcggaggtcaaagcaagactttggcgggccaaacccgttccaggaggaggcggactacgtatcgcagcggaggacgaagcagaaatcctaccgaggcaagtcttggaacaagcgggcctaacacggtagagaggggggagttgagagaatacgagagagagagagagagagagagaatccccggacgcacatgctgtttgttgttacgttttagcacccattggtgagggagatttacgtttaaaaaccatatccgtcgtcggtacggtagtccccattagttgtcgacgatgtgacgttttgggcagttttcgtagaacatttgaaacatttgttcggttgtaacggagtgctgtttagttgagttggggggaacaaaattggcgagactattttgctgcattctgctctgctgtttttagttactgatgaagaataaaacgatggtggtgatcagttttatgaaaaaaaaaaaaaaaaaagcaaaaaaggcaaaaaaaaaaaaaaaaaaaaaaaaaaaaaaaaaaaaaaaaagcgggcctaacccggtaaaaaggggggagtttaaaaaatacgcgcccgaaaaaaaaaatccccgcccgcccatgctgtttgttgttacgttttagccccccttggtgagggagattttcgttaaaaaccacccgttgtcggtagtcccccttcccactcgacctgcccacgttttgggcagttttgttcgagctatctttaccgttgttcggttgtaacggcgtgctgtttataatggttggggggaccaaatccggccgcaagattttgtggctacagcttagatgtttaggacgaggagtacgaccaaaggatgacgaagaagggtttttaaaaaaaaaaaaaaaaaaaaaaaaaaaaaaaaaaaaaaaaaaaaaaaaaaaacaaatcaaaaagaacggcagacaagaccagcgccacaggcacgcgttgcagccatagcagctaactcccttgcatcgcagacgctcccatgctagggtccgatcccatgcccacgccccgtacgctgggtccgaccccacccgccacgcagccccgtcgcggaccgggcccggatgcacccttccctccccggcctgcgctgccggtgccgaatccaaaggccagggcgccgagccgaagtccagagccacaagccgtgaactacattctctcgccggaccgggctcggcacaacccatcccgagtgagtacgacgcagacctacacctcatccactgtgtcgactgcagaccatggatgtacccacagcccaggtgacttcgtccccttcgaggtctgggactaatgctgtcgagctccagtgcgaaggctagaaacagcgggagccagcgtgtggggcgcatcccgttaggagcaagacgttaagggccaggcctcgaaggcaagggcacgacacgaaccatcataggcgcgtgatgatccctccgcagcctcgcctgcatggacccgccttgagtgagcttgtttgagtgagcagctgacgtcaacatcgtccactgcatgctctgaaaccgtagaatgtacctccagccatcagaaacggg

SEQ ID NO: 97309 - DNA, 400 bp, Zea mays
  Clone ID: MRT4577_20259C.1
gggccaaaacaaatcattggcaaacctgcccattacttttgggcttgtttcaggggctcaggggggggacaaactggctttattctatatattaaatcatggggggggaaaacacattttcccaggactggcccatgggggcaacttatttacatccccccccagggggggaagcttcgcaatccaatagggggctgcttaaaaataggcctaaataatttcatttcccccttggagagatttttcacagttcacagtacaaaagggtgacaggcaatgccccggaaatcattacaccggggcgtcatggaacccccatttagtttcctttggggaccccccgtggggggagttcctaacataacggtcattgtcccccgggcgttgttttgctggggaa

SEQ ID NO: 97310 - DNA, 420 bp, Zea mays
  Clone ID: MRT4577_2025C.1
gaccgacccgtccacggacgagtgggaaaaaaaaaaaaaaaaaaaaaaaaaaaaaaaaaaaaaaaaaaaaaaaaaaaaaaaaaaaaaaaaaaaaaaaaaaaaaaaaaaaaaaaaaaaaaaaaaaaaaaaaaaaaaaaagggaaaaaaaaaaaaaagttaaaaaaagggggggcccctcaaggggttttaatttttcttcccctttcttgcaattttttatttcttttaaattttccccaaatttcatttcaggggccttctttttaaaacttcttgccgggaaaacccttgggtttccccaatttaacccctttgcataaattccccttttccccattgggtttattttcaaaaaggccccccctttttgcccttcccaaaattttccccccttaattgggattttggaccccccttttt

SEQ ID NO: 97311 - DNA, 567 bp, Zea mays
  Clone ID: MRT4577_20260C.1
cgggaaaaaaaaaaacaaaaaaaaaaaaaaaaaagaaaaattttataaaaaaaaaaaaaaaaaaaaagaaaaaaaaaaaaaaaaaaaggaaaaaaaaaaaaaaaataaaaaaaaaaaaaaaaaaaaaaaaaaaacccaccttctaataatcagccaagggaaaagagggcaaaaaaccagaaccaaagggatcccattctcgggttttgggaggggcccatcaaccgagctccggaaaaaaaatatcaagcttggcaacagcaggaaagggaacaaaggccaaaccccccggggcggggaaggccggaaagccgttgcccatcgaggagggggagggggccccccccaagcccatgaaggggcgtataaaaatcctttacaccgggctttgccaaaccgacgtttacttttgggaggccaaggggcaaacccgggtgttcccgaggattttagaacacaaagcggaaggcatcgggaaaagctttgaaaagggcgtgaccaacctcgcccaaggcaaccacttcctcccggttttaaccggcaaggcaaagaagggcccccactgaa

SEQ ID NO: 97312 - DNA, 191 bp, Zea mays
  unsure (1)..(191): unsure at all n locations
  Clone ID: MRT4577_20261C.1
gtaattaacaaacancccacaaaagtatatcggggcagactgggaaaaacaggggggcaaacagatttgattacgtaccactaaatcgtcctgtttcaggcagggggtcattatataaaacttttatttcttttattttgtagtaatatctagcttgaaccattgtatacctgcaggacgaatggctagtc

SEQ ID NO: 97313 - DNA, 291 bp, Zea mays
  Clone ID: MRT4577_20262C.1
ctaccagcgccaccgtaccaccaaccgcagctgtttgtacggaggtggctgccactttgcctccggtttcctcactgccactggccgttaggcaacctgtctgtgttagctatccatccacactacctacctgacatttttttacctggggggtccctgcgccagcctcggcacactgaagctccattcaagtccccgcccgtagcaatgcaaccaggagggactttgcccagaccaggctccgtccacggatggctacgacaccacttatatttgggcgggtcatgcctc

SEQ ID NO: 97314 - DNA, 709 bp, Zea mays
  unsure (1)..(709): unsure at all n locations
  Clone ID: MRT4577_20263C.1
gacgcctgcaggttccggtccggaattcccgggtcgacccacgcgtccgcaggggtcgaggaagccgagaggccggagcttaggtccgggagggatggagcgctgagcggttaacgtctaccaggcttcctgcctccgcacctgtcgccgccgccgcctcctgagacacctcggcttctcccttgcttgccaaagaggtaacaaacatgactgagttctggctcatatctgctcctggggagaaaacctgtcagcaaacatgggagaaactacatgcagcgaccaccaagaacaataatcttgccgtctcttccaagttcaacattcctgacctaaaggttggcacgttggatgtcttggttggcttgtcggatgaactggctaaactggatgcatttgtagaaggtgtggcaagaaagggctcagacatggctgatgtgctggaggacagcaaagataaagttcaggagaacttgctggccagcggagttgacttggttacttacataacaaggttccagtgggatatggctaaatatccaatcaagcagtctctgaaaaatatttctgaaataattgccaagggagtgactcagatcgataatgacctanagtctcgggcgtctgcatacaataacctgaaagggaatcttcagaatttagagcgaaagacgccgggaagtttgctaacgcgaagcctggcggaaat

SEQ ID NO: 97315 - DNA, 255 bp, Zea mays
  Clone ID: MRT4577_20264C.1
atgcaggcggcatgcaaccgcgccaagtgggcgcacctctccgacttccagcgcgcccagcatggaagcccaggcccacgcgtcatgcaaccagcgcgccggatgctgcgtgcgagcaactgcaccgccacccgcgccactgccacgcctcctcgactgcggaaccagtaccgcgactcgaggcaaccctacgcacgacccagcaatgccagcctggcgcgacgggcaatgcggccaaaaatgggccggcagtaa

SEQ ID NO: 97316 - DNA, 401 bp, Zea mays
  unsure (1)..(401): unsure at all n locations
  Clone ID: MRT4577_20265C.1
gagggccgctnnnttttttttttttttaggggggggccccacgctaacagtgcgcgagcccgcagcgacccatggccagcgcggcgcggtcaggccgcacgaagcaggtgcgggccccgcccagcgccaggctctgaccgaccgtctgcctcggcacgcgatggagggccgctccggggccgcccccggggggtcggggcaggcacccccgacagcgccccgcccgcccagcgtctcgcccgcaggaaccggccgcccgatggcacgctcggcacacccaggcccggccggctagcctgcctcggcaaccgccgccaggtgctcaggggcctccgggaactcgacctcgggctcaccgtcgccgacgtacgtcggccggcgggcgcgccggtcgcccttgc

SEQ ID NO: 97317 - DNA, 318 bp, Zea mays
  Clone ID: MRT4577_20266C.1
ggctgccgtacctggacgacggacccgtttccgacgacacgcctggttccacggacatgggcgccgcggcgggcgacctgaaggcgcgtgagatccgcatgctcggccgcatctctgacatagagctcgcgttgcagaaccaccagatcgggtcgctatgcatctccagcgacttctcatagaaaggcgaagtactcgcggagactaccgagaggaatatggacgtcgtcatgaccgcgctctgcctgccggactataacgagcgccaacagcccgccgagtactatgacccgtaccatcaggagctgcagccgcctg

SEQ ID NO: 97318 - DNA, 179 bp, Zea mays
  unsure (1)..(179): unsure at all n locations
  Clone ID: MRT4577_20267C.1
ggcggacgacagaagccccaccaacggcgggccccacgaggccaggcccgccgagcagggccggagcaccaccggcgacggcagacgggcggaccgagagaagcagacacacgggcgccaggacacgcacgcgcagggcaacgaacccggcacgggngaggcaccaaggcccgcaccaa

SEQ ID NO: 97319 - DNA, 1055 bp, Zea mays
  Clone ID: MRT4577_20268C.1
cagtccgggtctaccagaagcttcgtggccgaatgcgaggccctgcggagggtccgtcaccgctgcctcataaagatcgtcacctgctgctcgagcatcgaccaccgaggtgaagaattcaaggcgctggttttcgagttcatgcccaacggcagcctggacgactggctgcatccggcatctggagcacacccgctgaacaagacgctcagcctggctcagagactggacatcgctgtggacgtcttggatgctctggaataccttcacaaccagtgtcagccaccgatcatccattgcgatctcaagccgagcaacatcctgcttgcggaagacatgagcgctcgggttggagatttcggcatatcgaagatcctttccgacgacactagtaaagttctgctaaactcaatcagcttcactggactaaggggctcgatcggttatgttcctccagagtatggcgagggtcggtctgtctcggctcttggggacgtctacagcctcgggatactgctgctcgagatgttcaccgggaggaggcctaccgacgacgtgttccaaggctcgttggacctccatcgcttcgccgaggctgccctcccagacagagcctcggagatagccgacccgtccatctggcagcacgacgaagcgaccgcaaaagatcctgcagacgctgccgcgttgaggagccggagcgaggagtgcttggcttcagcgatccggctcggcgtctcctgctccaagcagcagccgagagagcgggtggcgatgcgggatgccgctgtggagatgcgtgccattagagacgcgtacctcagggttgccagctagctggatgaatgggggtgtgggcacacaagcatcttgctctgatcgatttccggtgttcaaaatcagaagcagcaaagctggatgcccagctctgaagtaaatcttttcgtacggtttagaaaattcattcattcatagttatgagaaatgtaaaatcgacacatttgtatttgttgttatgtcctctgtcctaaattatatatggttctagttttttt

SEQ ID NO: 97320 - DNA, 157 bp, Zea mays
  Clone ID: MRT4577_20269C.1
acttctttcacgaaacaatttatattatcgatggccagggttctacatggtggatctgggttctgccgagtgagcttaaccaaagccaccctcatcttgcgtagaaggaggactatatgcaaatcaagatctttaacatatccctcttaaatttctt

SEQ ID NO: 97321 - DNA, 185 bp, Zea mays
  Clone ID: MRT4577_2026C.1
ggcttatcctccgcctgcggttagggttcgggttcataaggttctgcagagggggatttctcgggtgagcgcatcgatatggcagcttccaatgcctagtaccggtacttgccctgccgcctcgcgtgggtcacggactagcactgccttcacaacgccttgactacctacagggaggtcctcga

SEQ ID NO: 97322 - DNA, 346 bp, Zea mays
  Clone ID: MRT4577_20270C.1
gggtaaaaatttttggaatggccgtacaccaaaaggtgaaaaaaaccaattgacctcccctccctggtataacacctggttgggcccaagtacattctaatcaaagcaggtccggacgtgccctgtactgcacgaggaatggttagatggatctaaactgcgctggcagggcaaacacccaaaaggaaaccccccccgggaaaaaaccccggtatgtacaggcaaaacgatggtttgccttccgtcccggggggatatttccgaaccgccacggcggcaaaataaaaaaaaaccccgggggcctggcaaagaagaagggcatcccggaccggggactcaatttcca

SEQ ID NO: 97323 - DNA, 158 bp, Zea mays
  Clone ID: MRT4577_20271C.1
ctaagttctggaattaggtaccagcagcactttattatcatcacatcactgatcatcccggatagggtaattcttattagctggaacccattaataacatcttccagatcacttataatgccaaccccatataacaactcacatctccagattctaat

SEQ ID NO: 97324 - DNA, 1039 bp, Zea mays
  Clone ID: MRT4577_20272C.1
cgggaagcgtgggaagagcggcctcgtggctctcaacttggatttctcatttcttgagatgaatccgttcaccatggtcaatggggagccatatcctctggacatgagaggagaactagatgacacagcagctttcaagaacttcaagaagtggggaggtatagaatttcctctaccttttggaagagtactcagccctacagaaagtttcatccatgaactagatgagaagacaagtgcctctctgaagttcacggttttgaacccgaaaggtcgcatctggaccatggtcgctggtggtggtgctagtgtcatttatgctgatacagttggagacttgggatatgcatcagagcttggaaactatgcagagtatagtggtgctcctaatgaggaggaggttctgaattattctagagttgttcttgattgtgcaactgctgatcctgatggccgcaagagagcccttctcattggaggtggcatagctaacttcactgatgttgctactacattcaatggcatcatccgagccttaagggagaaggaatccaagttgaaggcttcaaggatgcacatttatgtccgccgaggtggtccaaactaccaatctggactggctaaaatgcgtaagcttggtgcagaactcggcgttccaattgaggtgtatgggccagaagcgactatgactggaatctgcaaacaagcaattgaatgcatcatggctgcagcgtaatcagagcgtagctccgggtagtttgggatctgcaaacacgcaattgaatgtgtcatggactcagcataaatgagagatggatagtagttgcattatatagttcacacacggtgtttctgtttttgtttcagatatgttgtagcgtgtcgtttgaacgaaaccttcacagatcattactgcaaagaaattactgtgtgttaaaataaattcaaagtctagttttgtgccaaaaaaaaaaaaaaaaaaaaaaaaaaaaaaaaaaaaaaaaaaaaaaaaaaaaaaaaaaaaaaaaaaaaaaaaaaa

SEQ ID NO: 97325 - DNA, 1704 bp, Zea mays
  Clone ID: MRT4577_20273C.1
ccggccgggagctgacggcaaacacaagcacggaatctctctctacataaacaaaaaccagtcctttgttcttcttcccccggcacgcccagcgccagtcaccaacctaatccactccctccctccgtcgccatggcgcgcaagaagatccgggagtacgactccaagcgcctcctcagggagcacctcaagcgcctcgccggcatcgacctcaccatcctctccgcccagatcacgcaatcaacggacttcgcggagcttgtgagccagcagccatggctgtcaaccatgaagctagtggtgaagcccgatatgctgttcgggaagcgtgggaagagcggcctcgtggctctcaacttggatttcgatcaagtcaaggagtttgtcaaggagcggctgggggttgaggttgagatgggtggctgcaaggctccaatcacgaccttcatcgtcgagccatttgtgccacatgatcaagagtactacctttcgattgtctcagagaggttgggcagcaccatcagcttctcagagtgtggagggattgagatcgaggagaactgggacaaggttaagactattttccttcctactgagaagccaatgacgtctgattcatgtgctcctttgattgcaacccttccattggaggcacgcggaaaaattggtgacttcattaaaggagtgtttgccgtcttcctagacttggatttctcatttcttgagatgaatccgttcaccatggtcaatggggagccatatcctctggacatgagaggagaactagatgacacagcagctttcaagaacttcaagaagtggggaggtatagaatttcctctaccttttggaagagtactcagccctacagaaagtttcatccatgaactagatgagaagacaagtgcctctctgaagttcacggttttgaacccgaaaggtcgcatctggaccatggtcgctggtggtggtgctagtgtcatttatgctgatacagttggagacttgggatatgcatcagagcttggaaactatgcagagtatagtggtgctcctaatgaggaggaggttctgaattattctagagttgttcttgattgtgcaactgctgatcctgatggccgcaagagagcccttctcattggaggtggcatagctaacttcactgatgttgctaccacattcaatggcatcatccgagccttaagggagaaggaatccaagttgaaggcttcaagaatgcacatttatgtccgccgaggtggtccaaattaccaatctggactggctaaaatgcgtaagcttggtgcagaactcggcgttccaattgaggtgtatgggccagaagcgactatgactggaatctgcaaacaagcaattgaatgcatcatggctgcagcgtaatcagagcgtagctccgggtagtttgggatctgcaaacacgcaattgaatgtgtcatggactcagcataaatgagagatggatagtagttgcattatatagttcacacacggtgtttctgtttttgtttcagatatgttgtagcgtgtcgtttgaacgaaaccttcacagatcattactgcaaagaaattgctgtgtgttaaaataaattcaaagtctagttttgtgccttttggaatgcatgttgaaaaaaaaaaaaaaaaaaaaaaaaaaaaaaaaaacccacaccccggcggtttgag

SEQ ID NO: 97326 - DNA, 295 bp, Zea mays
  Clone ID: MRT4577_20274C.1
ggatgtcctttgtttaagtcgtttccagtaaatatattatgaaattgcaggttggtgatgctttcagggagggtaaccagaaagaagtcgattatcttatacatgaagtgtcacattttgggggaagagataatggatggacattacatgttgaagattttgttggccagctttaatacagagctacacgattctaataaaaagtggatgttgtgacttgtggtcataattattaaacataaaacatgagaaggttttgtctcttgttttattagggtggctacgtagttataag

SEQ ID NO: 97327 - DNA, 394 bp, Zea mays
  Clone ID: MRT4577_20275C.1
tttgtttttttttttttttttttttttttttttttttttttttttttttttacagggcctgccaggttttatttatagggtttggggaacttgaactagaaaaagctgcaaaaaggggtttggagagcttggcagggccatggaaaagggctaataaaagcaggtcccttgcccaaacccttagggggcccttttgggggataggggccacctgaggcaggagggggtaggggccaattccaggctggcagcatcagggctccaacttaaagctgaggctggaaaggtagccctcgccctaacctgaccctgcaggtttaaggccctggggtcatttcctcgccccatgaaaacagggaacttgggtctctggtcccaaagcccaaaaaggaag

SEQ ID NO: 97328 - DNA, 2271 bp, Zea mays
  Clone ID: MRT4577_20276C.1
tgcaccctcggtacgtactcccctctcgctcgctgctaaacacgttccagcttgtttgctcagagaaacagcgcgcgcgcacacacacacacatcatcatcatcgattcatcgtacacaggatcagagagcttaattagttctagctctgctgcatgccccttcgacaacgtccgacgatgggcggcggcggcggcggtgtagctaagatgccggcaggccagctctggttattactgctaggcgtgttgttgttagcatttggagtcccagcccaggcctccaggaatactcactacgacttcgttataactgagacgaaggtcacccgactatgccatgagaagaccatcctggccgtgaacgggcagttcccggggccgaccatctacgcgcgcaaggacgacgtggtcatcgtcaacgtgtacaaccagggctacaagaacatcaccctccactggcacggcgtggaccagccgcggaacccgtggtccgatggcccggagtacatcacgcagtgccccatccagcccggcgccaacttcacctacaagatcatcttcaccgaggaggaaggcacgctgtggtggcacgcgcacagcgaattcgacctcgaggccggccggggcgccatcgtcatccacccaaaacgcggcaccgtctacccctaccccaagccgcacaaggagatgcccatcatcctcggcgagtggtggaacgcggacgtggagcagatcctcctcgagtcccagcggaccggcggcgacgtcaacatttcggacgccaacaccatcaacggccagcccggcgacttcgccccgtgctctaaggaggacaccttcaagatgtccgtggagcacggcaagacgtacctgctccgggtcatcaacgcggggctcaccaacgagatgttcttcgccgtcgccgggcaccgcctcacggtggtcggcaccgacggccgctacctcaggccgttcaccgtcgactacatcctcatctcccccggacagaccatgaacatgctcctcgaggccaactgcgccaccgacggctcagccaacagccgctactacatggctgcgaggccgttcttcaccaacacggcagtcaatgtcgacgacaaaaacaccacggccattctggagtacacggacgcgccaccctccgcggggccaccggactcccccgacctgccggccatggacgacatcgccgcggcgacggcgtacacggcgcagctccggtccctggtcaccaaggagcatccgatcgacgtgccgatggaggtggacgagcacatgctcgtgacgatctccgtcaacacgatcccctgcgagcccaacaagacgtgcgccggccccggaaacaaccgcctcgccgcgagcctgaacaacgtcagcttcatgaacccgaccatcgacatcctcgacgcctactacgactccatcagcggcgtgtacgagccggacttccccaacaagccgcccttcttcttcaacttcaccgctcccaacccgccacaggacctctggttcacgaagcggggcaccaaggtgaaggtggtggagtacggcaccgtcctggaggtggtgttccaggacacggccatcctcggcgccgagagccaccccatgcacctgcacggcttcagcttctacgtggtgggccgaggcttcggtaacttcgacaaggacaaggacccggccacgtacaacctggtcgacccgccgtaccagaacaccgtctctgtgcccacgggcggctgggctgcgatgcgtttccgcgcggcaaatcctggtgtgtggtttatgcattgccacttcgatcgtcacacggtgtggggcatggacactgtgttcatcgtgaaaaatggcaagaccccaaacgctcaaatgatgccacgtcctcctaacatgcccaagtgctaaggaaacgaagccatgcatgactgccagagtgtatgtatgcaagagcaagacaatccagcaagataactaatctcagataattgatttatttatttattcgtggtacagattttaagtagactgtttcttctggtcagttgagacgatgtaattagtgttgtttgtattcttttctccctctcttttcacttggacggaagagaaaaataaattcgttgtatttattatttgtgtggatttactcctagttcaatcttcaagtgtaattaaacaatgtatgtcacggagctacattatgcacacatcccgtgaaaattcaatataaacatgtgcttcttatgtgc

SEQ ID NO: 97329 - DNA, 702 bp, Zea mays
  Clone ID: MRT4577_20277C.1
cggggattcctctccataccgtgaccgagtactgcagtactgctgtctaggctcccagttcctctccgtctctctcctgctgtcccaggcgcggcgacggctcccgccaggctctgctgtcccaggcgcggcggcggctcccgccaggccctgctgtcccaggcgcggcgacggctcccaggcgcgaagacggctccacgcccggccgtgctgcctaggcgcggcggcgactcccgcctgccctgctgctgtggagcagcgacggctcctccctgctgccaaagaacggcaacggctccactggctgccctacccgaatggatcgatccgagattccagtagggatcgatttgcacaatgcttgtaaagtagagattgatgtcacttcatttcaaacggtagaggatggatgatgtgtgtaccgtaagggtagggtcttgaattggtgggttgactctgaggagtattccatcattgatatggagaaagatgtcgtcgaacactatagctggacaaccaatcaagaagcgttgttttggtacaatggatcaaacggtcaattacgtcgtcttgctactgacgaagagctcttgaccttgttacgatcatcaaagggtgggaagtttatcatgggttgccagtaaataagcatttgggcgcctaaaatgatgtgggtggagctcccagaagccaatgggcagg

SEQ ID NO: 97330 - DNA, 157 bp, Zea mays
  Clone ID: MRT4577_20278C.1
cacacacgtccatgctgttgctgccactgaacatgctcccctaccatatcacggggtcgggctgtagtggcatcttttaaaatcaaactattgctcgatgtctatcatgagattaaactaccaaaaaatcgtctcataccgcctgacccctcattca

SEQ ID NO: 97331 - DNA, 383 bp, Zea mays
  Clone ID: MRT4577_20279C.1
ttctgatgacctgaaccgggtgcgccgatacaacgccgagtgggcgctgaccgagcagcttgacgtgatcagcggacacttagactacatctaaggactagtacctgcccaagcgcacggcccacatcgaacacgtggtcgagcgcttgctgaacgcgctggccagcgcgccctcggcctataaagcgctgggcggcacggaccgcggcaaggacaacatgatctggatgcttcacgacaatgaacccgcctgcaagaagcaactaaagaacgagtttgaacatgccatgaacaccgacctgggggggcgcacctagtataccgtgaccgtggcgcgcagtctcggcatcccggcctttgacggggtgaagtacgccagcgcg

SEQ ID NO: 97332 - DNA, 3576 bp, Zea mays
  Clone ID: MRT4577_2027C.1
atggatcctaagggcaaggggatggtggtcaacaataaggagaaggagtctttcgtcaatgatccaaaagatgacaagcctaccgactcgggctcaagccacaaaagaaaagacaggaagaagaagaaaacaaggcgcatcaaggagatcgtctactacgacgacagcgacgagtcctcttcttcccaaaaggacgacgacaactacgagaaaaagaaaacggtcaattcaaacttttcttttgattattctcgtattccgcaaaatacaaatgctcatttactctccattccacttggtaaacctcctcactttgatggagaggactacggattttggagtcacaaaatgcgtagtcacttgttctctctccatccaagcatatgggagatagtagagagtggaatgcaatttgatagtagtgatagtcccatgtttatcaatgagaaaattcacaaaaatgcacaagctactactgttcttctagcatcattgtgcagggatgaataccataaggtgagcggcttggataacgccaagcagatttgggacaccctcaagatctcacatgaggggaacgacgtcaccatgctcaccaagatggagttggtggagggcgaacttgggagattcgcaatgatcaggggcgaggagccaacccaaacgtacaaccggctcaagaccctcgtcaacaaaataaggagctatggaagcacgcgatggacggaccacgacgtcgtccgcctaatgctaaggtcgtttactgttcttgatccacatcttgtgaacaatattcatgagaatcctaggtacaccaagatgacgcccgaggagatccttggaaagttcgtaagcgggcggatgatgatcaaggaggcaagatacgttgacgatgcgttgaatggcccaatccaagagcctcaaaccattgctctcaaagcaacgagaagcaaggaggcgatacctagcaaggtggcacaaattgaggcggttgggcttaatgatgaagaaatagccctcatcatcaagcgattcaagacggcactaagtggtcgcaaggagcatccaaacaagaccaagacgaaagggaagcgctcatgcttcaaatgtggtaagattggtcattttatcgctaactgtcccgataatgatagtgaccaggaaaaagggaacaagagggaaaagaagaaggcttacaagaaggctaagggtgaggcacaccttggaaaggagtgggactcggattgttcgtcgtccgactccgacaacgaaggactcgccgccaccgccttcaacaagtcgtccctcttccccaacgagcatcacacctgcctcatggcaagggaaaagaaggtaagcactcataatactagtacttacgcttcatcaagtgatgaagaatctagtgatgatgaaatagactactcatgtttattcaaaggcctagatagaactaaggttgataagattaatgaattaattgatgcattgaatgataagaataggttattagaaaagcaagaggatcttttgtatgaagaacatgataagtatgtagaggcacaaaaatcccttgctttagaaattaaaaggaatgaaatgctttcttgtgagttgtctacatgccatgactctatttctagcctaaagagcataaatgatgatttgaatgctaagttagaaatagctaataaatcaacatcttgtgtagaacacgttgcaatttgcaataggtgtaaagattttaaagttgatgcttgtagtgaacacctagtttcaatttctaaattgaatgatgaagtggctagtcttaatgcccaacttaagactagcaaaaatgattttgataaactaaaatttgcaagggatgcctacacggtcggtagacacccctcaattaagaatgggcttggcttcaagagggaagccaagaacttgacaagtcataaggctcccatctccatcaaggagaaagggaaggcccctatggcaaatagtgtgcaaaagaaccatgctttcttataccatgataggagatattctaggaatgttcatcatgatagaagttgcaatgatattgtttcacatgcttatgattcaaatgcaatgtttgcttcaagttcttctatgatgtatgatagaagtttggctaggaaaaatgtcattcatcatgtgcctaggagaaatactcatatgcctaggaaaacaagtaatgaaccttctacaatttatcatgctttaaatgcttcctttgctatttgtagaaaggataagaagatagttgctagaaaattaggggcaaaatgcaagggagataaaactttcatttgggtccctaaggccatttgtactaaccttgtaggacccaacaaaagttgggtttatgcatccgggggctcaagctggattatcgacagcggatgcacaaaccacatgacaggggagaagaggatgttctcatcctacgtcaagaacaaggatccccaagattcaatcatattcggtgatgggaaccaaggcaaggtgaaagggttaggaaaaattgctatttcatccgagcactctatttctaatgtgttcttagttgagtcgcttggatataacttgttatctgataaatctgaaacccaagggaccctcaagcgcttcctaaggagagcccaaaacgagtttgagctcaaagtgaagaagataaggagcgacaatgggtccgagttcaagaaccttcaagtggaggagtaccttgaggaggaagggatcaagcacgagttctccgctccctacacaccacagcaaaatggtgtggtagagaggaagaacaggatgctcatagacatggcgaggacgatgcttggagagttcaagacccccgagcggttttggtcggaagccgtgaacacggcttgccacgccatcaaccgggtctatcttcaccgcctcctcaagaagacttcgtatgagcttctaaccggtaacaaacccaatgtttcgtatttccgagtttttgggagtaaatgctacattctagtgaagaagggtaggaattccaaatttgctcccaaagcggtagaagggtttttattaggttatgactcaaatacaaaggcgtatagagtcttcaacaaatcatcgggtttggttgaagtctctagcgacgttgtatttgatgagactaatggctctccaagagagcaagttgttgatcttgatgatgtagatgaagaagacgttccaactgccgcaatacgcaccatggtgattggagacgtgcgaccgcaggaactcaaggagcaagatcaaccttcttcctcaacaatggtgcatcccccaactcaagacgatgaacaggttcatcaagaagaggcgtgtgatcaagggggagcacaagatgatcatgtaatggaggaagaagctcaaccggcacctacaactcaagttcgagcaacgattcaaaggaatcatcccgtcgaccaaattttgggtgacattagcaagggagtaactactcgctctagattagttaatttttgtgagcattactcctttgtctctttgagagcacctagaggggggtga

SEQ ID NO: 97333 - DNA, 461 bp, Zea mays
  unsure (1)..(461): unsure at all n locations
  Clone ID: MRT4577_20280C.1
cgcgtncgcgacctgtttgatcttggcgatctgcgcgatgaactctacttcaaggcatttgtgtttccggggccatccaccactggaagctacatcgtggttcttattcatgagccacgttcacggctttcgtttgcacgaccgggagatgacaagtggacctcggttggacaaggtatcggatataaagactgcacatatgtggatggtcttttgtatacagtggattggactggagaaattgatgcttttgattttaccgcatcccctgttaaaatgacagtaattatggacagtctgaagtatcctccatgtgaaaacctgtacattattcaggctccatggggtgatctgctgcatgtttggaggactattgacgttccacccaatgctccatcgtgggaccctgaaaagtgcctggcagaaaccgtaaaaatacaagtgcataaagtggacttgga

SEQ ID NO: 97334 - DNA, 452 bp, Zea mays
  unsure (1)..(452): unsure at all n locations
  Clone ID: MRT4577_20281C.1
ggcccggctgggtacatgacaagtctgcaagacatgatgccttccccttatagttcggattagccattaatgtactccgttaaacaagctgctttactctacccggactgatagactgcaaactgtgatgaggcgagccattgacataactcacatcacctgtgctaggctgaacattggctatgcactcctttaacctcgatgcacagacaacaatgctaaccatgccaaccaagctctgaggcgcgctaaggtaaagttccctgttccgctaaatatcattagtgagtagatagtgtggcttcaccaagttcaggcgagctgactaccttaagtacctgcccggacacgcgcttgcacagactaattccatcacactngcaaagcgctactaatcaatacgacctcagaacgccactaaccgtaaaaatggcgcatagctggtcgctgtg

SEQ ID NO: 97335 - DNA, 577 bp, Zea mays
  Clone ID: MRT4577_20282C.1
tcgagcggccgcccgggcaggtacaagcttttttttttttttttttttttttttttttttttttttttttttattttaaattttattttttttttttttattttttaaaaaaattatacaaaaattttattttttaattgttactaataataaatgaaaaagagggcaccactaatgattttttgaaagcaaaacgcttgaggggtagaaaaagtaaaatgggtaaaagggagcaatagttacactcaaaaaagggggccaacgacaggcgctggggttgggtgaaaaaagaacaactgatgacacgtgataaatggatgaaggctaacaccagttacttgtgtgaatgatcataagagttcattgtcctaataaacaaaaaagttaaatgacatttgcagaaaacaggctaacggcaaaattgaatacaatgtcgggcgcaacttggggatactaattgggatacaagcttgctgtaataaatggcaatgctgttacatgtgcgaaaaagatatcagctggaaatataaaacaaaaaaccatccgtgactaaaaagtgaaaaaactgacatgaata

SEQ ID NO: 97336 - DNA, 126 bp, Zea mays
  Clone ID: MRT4577_20283C.1
cgggaaatgacgattcatcgaagcggtgaggttgcgcccatgtaacattcatgtgttcctcatcggggtcctgatgctagattcgcacgataatggctcatatagctgaccgcatgtaagaggcct

SEQ ID NO: 97337 - DNA, 331 bp, Zea mays
  Clone ID: MRT4577_20285C.1
gaccaagaaaaacgcctggactttacacaacccagaaagggggccatcatcccagggcacctggacggttggatccacaaatatatgcccgccggccttttggaaatgatactgtatgctatgggtgtccatccggggggttctcatccatcttgagtctaaagggatcccctttgttgcggttaaaaatgaattttttaatctgctgggacctgttcagctcctggagagggaccgccgtttgccttgcccttaaaaaaacaaaaggccccaccgcaaagcttgaagctcagtttcaatgttcttaacaaactaccctttgaagagaaaa

SEQ ID NO: 97338 - DNA, 467 bp, Zea mays
  Clone ID: MRT4577_20286C.1
gggggcctgggccctttggtttacgggacacccgggtttccaaggatccattaagttacaggggaaaaccagggggggccaggcccagcaaccagttttacttaaaaaccgaaatttggtttactggcaattccaaaaacagaatttggggagttaaacaccagatggggaaaaaaaaaggggccaactggctcaagaggaaaaaaaaacaagggataaaagtagggcgagattggcgacaatgttgggtccggggggggttaactcagccacccgataattttcaaaggagtcacctaaaaaggcgctctttttccttttctcctcttcaaacttagccttaagggaagaggacaaagcaacacccgctttgggaatgggcgggccaattccagtttggggggaaaatttgttgccaaaaacaacgattgggaaaacaatgacaaaaacacgtttaaacaaattgc

SEQ ID NO: 97339 - DNA, 439 bp, Zea mays
  Clone ID: MRT4577_20287C.1
gctgattatggttgtgtgccgagcgcgacgacttctgaaggtgcgatccttgagcgcggggcacgagagcggatcgcaacaccctgaacgagcatgaaacatagcacattaaggcacgaaatcataacaccatcgagaccgtggcaggtggaggagccgaggccctcgatcaacacgccgtcgtatggccagacagctgggccggcgaacgatccgcatgcaaacaagcacgtgcgcgcccgttggcgtaccacgcgcagcgtggcaacatatcgggtacggtggcggctacgggggggcccctgtagtaggcgtcgcagcgccgcctgacctcgccagcagcgccggtcttgacgccgaacaagctgagcttttccatggcgcggtcgaagtcgtcgaacacggcggtggcgacggatgcacagagccccaccagggg

SEQ ID NO: 97340 - DNA, 3229 bp, Zea mays
  Clone ID: MRT4577_20288C.1
ggggtctgttcctgaaatttctcaccgcactctaggtggtgcctttgcagtcacgactaatttgatgtggacaactgtttcggtgaactgtttagaaggagaaagtgctattgtttgtgagcatggcactgcagtgactggtgaacacagcattttagtgcatggaaatgggcaccccaagatgagagctgtcttttgggttgatcataggagcaaacaccaggttaaagaacctcagttccttgatataaacatcactcatgtaatgccttacgatatccaggatatggagtgccatagcttgaatgtatcagctaaggtatctggtgttcgtcttgggggtggaatttcttacactgagtctttactgcatcgatttggtatcctgggtcctgatggcggtccaggggaaggtctcttgaggggtttgaaggatttatcttcaggcccacttgcggcctcgaggccggccgggaaccgattgaaactatcccaacgagaacatcgttccccttccagcacctccattcccagccacgagacgacgaaaccctagcctcccctccccctctctcaccaggccaccacctcgccggaacccggcgcctcgacagagcacgggatcatcggccgccgtcggccgcggctgcggaggagcggtgtaagatgttgaacggcggcggcggcggccagaagaagcggaacacgaagatcgagccctaccggcaccgcgtcgagaccgaccccaagttcttcgacaagtcgtggcggaagctccatgacgccatccgcgagatctacaaccacaacgccagcggtctctccttcgaggagctctacaggactgcttataacatggtattgaacaagtttgctcctcagctctatgagaaactcacagaaaacatgaaagggcatcttgaagagatgcgcacatgtatagaggctgctcaaggtggtttgttcctggaagagttgcagcgaaaatggaatgaccataacaaggcattgacaatgattagagatatcctgatgtatatggacaggacatatattcccactaataaaaagacacctgtcttcgaacatggattagagctttggagggatactatagttcggtctcctatgattcaggggaggttgtttgacacgcttctcgagctcatacatagagaaaggactggcgacgtgataaatagaggcttgatgaggactacaactaaaatgttgatggatctagggttgtctgtttaccaggatgattttgaaaggccatttcttgaggtctctgctagtttctatagtggtgagtcacaacaatttattgaatgctgtacttgtggtgagtatctgaagcaggctgagaggcgcctccatgaagaatcagagcgtgtgtcacagtacttggatgctaaaaccaatgagaaaattactgctgttgtggtgaaagagatgctagcaaatcacatgcagaggttgattcttatggagaactcagggcttgtgaatatgcttgtcgaggacaggtatgaagacctgaccaggatgtacactttgtttaatcatgttcctgatggtctcgcaacaattagatctgtgatggtgtctcatattaaggatactggcaaaagtttggtaacagatccagagagactaaaggacccagttgattttgttcagcggcttcttaacatgaaggacaagtatgacaatatcatcaatgtgtcatttagcaatgacaagagtttcctgaatgctctcaattcctcatttgagaactttataaacttaaacaacagatcacctgagttcatatcactgtttgttgatgacaaactgcggaagggggtgaaagaggccaatgaggaggatcttgaaactgtcctggacaaagtgatgatgctgtttaggtatttgcaagaaaaagatctatttgagaaatattacaagcaacacttggcaaagcgtcttctttctgggaaggctgcttctgatgattctgagagaagcatgcttgtgaagctgaagacagaatgtggctaccagtttacttcaaagttggagggcatgttcactgatttgaagacctctcaggatactacacaagggttttatgcatctacttcctcggagctgccggcagatgccccccacaatgtctgtccagatactcacaactgggtcatggccaacgcaaacctgcaatacctgcaatctcccccctgaaattgtttctgtctcagagaagtttcggtcttattaccttggcacacataatggcaggaggctaacatggcaaacaaacatggggacggctgacatcaaagtaacatttggaaatggaagcaagcatgaactgaacgtatcaacataccagatgtgtgttctcatgctgtttaactcagcagatgtcttgacttaccgtgaaattgagcagtctacagcaataccagccgctgacctgaagcgatgcctccagtcactagctcttgtgaagggtaagcaagtcctgcggaaagagccgatgagcagggacattgccgatgatgacagcttctgcgtgaacgacaagttcaccagcaagctcttcaaggtgaagatcggcaccgtggtggcgcagaaggagaccgaccccgagaagctagagacgcggcagcgggtggaggaggacaggaagccgcagatcgaggcggccattgtgcggatcatgaagtcgaggagggtcctcgaccacaacagcatcatgacggaggtgacaaagcagctgcagccgcgtttcatgccgaatcccgtggtgatcaagaagcggatcgagtcgctcatcgaacgcgacttcctggagcgggacaagacagacaggaagatgtatcgctatctggcctaagagaaccacctgtccttgaattcgatttcatcatatctacccatgttgtataaacagaccctgatccatgtaacttgtccagagaaggaaatgggtctttctgcatcccgtgacacttttaagttgagacttttttttctggatcaacccagttagttgctaacttagcttctataacatcttgcgctgggttgcatgctaatgctgtagattggctgcgacgtagtgctctcttttggttgctgcttcagaaacgcgatctgattgcagccaaggtagatgaaaggtccaaaattgatgatcacaattcaaagtttgatctcggggtgccagatgatcttg

SEQ ID NO: 97341 - DNA, 1428 bp, Zea mays
  Clone ID: MRT4577_20289C.1
atggcgtccgataccgagggcatcgccgccctcttctcaatgtacaacgacgacgaggaagatgaggacgccgacgagcccaaccctccgtccccagcgccgctcaccaccgtcacctcctcgtcgccgctgtcccctcaagccgggggcgaggaccctaacccttccctggcgcctccgtcgcctccccgtcccgaggagtcggccagtctcaaaaccctagtgagtccccacccttccccggcgcgggcgctgctaccgccacttccctcgcggcgctcttcgtcgcccttcgcagcgtcgcccccctctccgctacggggaccatcctccgcgccgccagccgacctgccgcgcccgccccggcgcggggcgcttgcaatcgtggactatgcgcacgacgagatggctatgtcgcccgagcaggaggatggggagatcatgagccacacatacagattcgtttcagatgctcaggctgcagaggggaatcttgaagaacgaactctctctggcacagttcatatcatgacaccaaatactccagcagaattgtctcagcatgctgatgcacctgagcagaaccaattagggacagacatggcagtggatataactagagcagaaattgaagacgcccaggtggaggaaactactgatatttcaactaatggtgaaaatgatgatccattgagtcgtttccttcctccacccgtgactacaaaatgctctgcagcattaaagcaaaaaattaacaaattccttgcatacaaaagggccggaaagagctttaatgctgaagtgcgcaacaggaaggactatagaaatcctgactttttgcagcatgctgtgcgataccaagaaattgatcagatagggacctgtttcagtaaagatgtttttgatccttatgggtacgataaaggtgactactatgatgagatagaagctgaaatgaagcgtgaacttgagagaaaggaacaggagaagaaaaggaatccaaaagttgaatttattactggaggagtacaaactccacatagtgcatcaataccgaagatcccaggtttggcgggtgtctgtacactaccggtacctacagaaggtgtacagaaagagactaggccaaacaagaaatcaaaatgggataaggttgatgatgatgttaagaatcatgtagttcctagtggacacgacaacttatcagcaactgcttctgtggcactcctgacttcagctaatgttggtgctggatatgctgcttttgcgtatcagaaacttaacgttttaggccaagaaaaagagaacagtgagcgttctgcacttctgccccccgttacggtggacaattactcctgtcctaaaaagaatgcaccaaaattgaatgcaaaacatcgccagcagcagtcgctcatcatatccgcgtga

SEQ ID NO: 97342 - DNA, 2226 bp, Zea mays
  Clone ID: MRT4577_2028C.1
gtttatgcatccggtggctcaagctggattatcgacagcggatgcacaaaccacatgatgggggcgaagaagatgtccacctcctacgtcaagaacaaggattccctggattcgatcatctttggagatgggaaccaaggcaaggtcaaaggattgggaaagatagccattacatccgagcattctatctccaatgtgttcttagttgaatcgctcgggtacaacttattgtctgataaatcagaaaccaaagggaccctaaagcactttctaaggagggctcaaaacgaatttgagctcaaggtgaaaaagataaggagcgacaacgggtccgagttcaagaacttacaagttgaggagtgtcttgaggaggaaggtgtcaagcatgagttccccgctccctacacaccacagcaaaacggtgtggtagagaggaagaacaggacgattatcgacatggcgaggacaatgcttggagagttcaagatgcccgagcagttttggtcggaagctgttaacacagattgccacgccataaaccggctctatctgcatcgtctcctcaagaagacctcctacaaactccttaccggtaacaaacccaatgtctcttacttttgtgtatttgggagcaaatgctacattttggtgaagaaaggtagacattccaaatttgcttccaaagctgtagaagggtttttaccaggggtagaagaggccttgcaagatccggattgggtgttggccatgcaggaagagctcaacaacttcaagagaaatgaagtttggagcatggtgccacgtccaaagcaaaatgtagtgggaaccaagtgggtgttccgcagcaaacaagacgagcatggggtggtgacaagaaacaaggctcgacttgtggcaaaaggttatgcccaagtcgcaggtttggatttcgaggagacttttgctcatgtggctaggctagtgtctattagaatattattagcctatgccgctcaccactctttcaggttgtttcaaatggatgtgaagagcgctttcctcaacgggccaataaaggaggaggtgtacgtggaacaaccccctggctttgaggatgacaggtaccccgaccatgtgtttaagctctctaaggcgctctatggacttaagcaagccccaagagcatggtatgaatgccttagagatttcttaattgctaatgctttcaaggttgggaaagccgatcctactcttttcactaagacttgtgatggtgatctttttgtgtgccaaatttatgtcgatgacataatatttggttctactaaccaaaagtcttgtgaggagtttagcagggtgatgactcaaaagtttgagatgtcgatgatgggcgagttgaactacttccttgggttccaagtgaaccaactcaaggacgacactttcatctcccaaacgaagtacactcaagatcttctcaagcggtttgggatgaaggacgccaagcctgcgaagacatcgatgggaaccgatgggcatgtcgacctcaacaaaggaggtaagtccgttgatcaaaaggcataccggtctatgatagggtcattactttatttatgtgctagtagaccggatattatgcttagcgtatgcatgtgtgctagatatcaatccgacccaagggaatgtcaccttgtggccgttaagcgaattcttagatatttagtttttacgccttgcttcggaatctggtatccaaaggggtctacctttgacttaattggatattcagactccgattatgctagatgcaaggttgataggaagagtacatcagggacgtgccaattcctaggaaggtccctggtgtcttggagctcaaagaaacaaacctccattgccctatccatcgctgaggctgagtatgttgccgcaggacagtgttgcgcgcaactactttggatgaggcaaaccctccgggactttggctacaatctgagcaactcactcctatgtgacaatgagagtgcaatccgcatggcggataatcctgttgaacacagccacactaagcacatagacatccgaaatcactttctgagagatcaccagcaaaagggagatatcgaggttttccatattagcaccgaaaaccagctagccgatatctttaccaagctgttagatgagaaaaccttttgtaggttgcgtagtgagctaaatgtcttagattcgcgtaacttggattga

SEQ ID NO: 97343 - DNA, 265 bp, Zea mays
  Clone ID: MRT4577_20290C.1
ccgggcgcccacgcgccgcccgcgacgccagcgcagggcgcggaaggccaagcggcgaccagagaggaggcctaacattcgaaggcaagaacgagaaaagggttacgataagccccacgaagcacgccaagagtaacggccgcaagcaagcggcaaagcagggacgaggagacctaaagcaaagagggaggcgactgcaaacagccaggagaagcaggccggacaggcacgagcagaagaaaacgagcagtgggacgcggcggga

SEQ ID NO: 97344 - DNA, 467 bp, Zea mays
  Clone ID: MRT4577_20291C.1
aacttataataaatcctgtcgggggtaacagcccccatcttcccccaggccatacccgaaaaaaaaagccgggggggggaaccaagcccaacacaccccaaacccaccccgggggacccccggggaattcgggcccgggaccaaaaaacgaaccaaccggccctagggggagccccggaaaacccggcccgaaccctggggggagcccatccctcccaaaaagggggatccaaaaacaaggccaaacaaaagacaaaccggaggcaccaggggaaaaaccggggccgccaaaagagcaaccaaactaacacccggagcctaaagctgaaaacccgggggcccccaaggaaacccccccccccaactaattgaatgaaccccccacccccctttaaaaggggaaaaccttatggccccccaggataaaaaaaccgcccaacccccgggagaggagacatttgattacc

SEQ ID NO: 97345 - DNA, 2101 bp, Zea mays
  Clone ID: MRT4577_20292C.1
agtaaaagacccactacccatggttatgtaaattaaataaaaattacaatatatgtcatccttcttttctcacctcaaataaacaaataagggtattgttgtctttgtgaataatctacatttgtataatctaaactaccaaacaactacatgtagattataatatatctagattataatctggattatataatttagattataatctagattatataatctataagctgaaacaaacaggtccttacttgcattcaattttggtgcattctttttaggacaggagtaattgtccaccgtaacggggggcagaagtgcagaacgctcacggttctctttttcttggtctaaaatgttaagtttctggtacctgtataatacaagactaccaagttgcccagaggggcttttctgaaaccatttccctaggattggttttaattgtttccttcttttctctatccacattacaaaactatgtcactgaaaaaaaataaatgatacgctgactgctcagaatgaaacaaaaggtggtgctacgatcttctgtctgacttatgatcgtttttcttttcttcggcctcttttctcttttgttgcgcaaaaccagcgtatccagcaccaacattagctgaagtcaagagtgccgcagtagttgctgataagttgtcgtgtccactaggaaccacatggttcttaacatcaccatcaaccttatcccattttgatttcttgtttggtctagtctctttctgtacaccttctgtaggtaccggtagtgtacagacaccagccaaacctgggatcttcggtattgatgcattgattggaggttgtactccagtaataaattcaacttttggattccttttcttctcctgttcctttctctcaagttcacgcttcatttcagcttctatctcatcatagtagtcgcctttagtcgtacccataaggatcaaaaacatctttactgaaacaggtccctatctgatcaatttcttggtatcgcacagcatgctgcaaaaagtcaggatttctatagtccttcctgttgcgcacttcagcattaaagctctttccagcccttctgtatgcaaggaatttgttaattttttgctgtaatgctgcagagcattttgtagtcacgggtggaggaaggaaacgatttgatggatcatcactttcaccattagttgaaatatcagtagttccttccacctgggcacctttaatttctgttctagttacgtccactgccatgtctgtccctacttggttctgctcgggtgcatcaggatgctgagacaattctgctagagtatttggggtcataacatgaactgtgccggagtaagttcgttcttcaagattcccctctgcagcctgagcatctgagccaaatccgtatgtgttgctcgtgatctccccatcctcctgctcgggcgacatagccgtctcgtcgtgcgcatagtccacgattgcaagcgccccgcgccgcggagggcgcggcaggtctgccggcggcgcgaagaacggtccccgtagcggggagggggacgacactgcaaagggtgatgaagagcgccgcgagggaagtggcggaagcagcccccgcgccggggaagggtggggactcgctagggttttgagactggccaattcctcgggacgggaaggtgacggaggcgccacagaagggttggggtcctcggccccggcttgaggggacagcggcgaggaggaggtgacggcggcgggaagcgctggggaaggagggctgggctcgtcggcatcctcctcttcctcgtcgtcgttgtacatcgagaagagggcggcgatgccctcggtatcggacgccatgccagtgacggagactgagtaggtagggttggatttggggacgagcaaggcgaggcccgacacggcgaggaggaagacggaggatttcgaggtcggggggctcggccgctcggggcagcagtttggcgagtctgcgaacgaattagcctgtacagtatccgattcgactagcagaataagcagatgatgatggcacaggggcggagcagcaccccggccggcctcgaggtacccaatg

SEQ ID NO: 97346 - DNA, 351 bp, Zea mays
  Clone ID: MRT4577_20293C.1
ggggggaccccggaaaagcgtgttatatttgacgcaacgactttacatttcttccctttttttccacccagggctggggggtatggattatggattggctccacacaacagggataggaacccattttatgaattgggccaatcttgaaaggacaggcaaggttacagggacaaattcacactattcaacacgggcaatacttaattctttttccaccaatcagatcggtacaacatttagctggggggggagtgagcaaaaccagggaaggcctggtgggaacacaaggggtcatttgggcctgccttatggcaaatagaacacggggacttccatggagcggggtcttt

SEQ ID NO: 97347 - DNA, 357 bp, Zea mays
  Clone ID: MRT4577_20294C.1
ccggccgggaccccccttcccttcctccgatccccccgcctcccccaaaatccgacgcgtaatcgccgccatggccgccgccggcaagctcctcctcctggccgccgccatcctggcggcttccttcgtcgccgacgcgcgcccgtgcggccacgcgcagacgctcctcgagtccttctcctccgtgctaaggccgaacccggaccaaagcaaaccgacgccgatcacacaccacagtggataccgtatctttgtgtacggtgcatcagtctgtaataaaatcatcatcacagggagatgcgatgagttgagttgaaggtagtagattaaaacattaagttaagatgaaaggaaatt

SEQ ID NO: 97348 - DNA, 278 bp, Zea mays
  Clone ID: MRT4577_20296C.1
cggacgcgtgggcttactggttctgttgctatggttgacggatgtatataggatatgtgccttttgacgcgtgtaagcacaaacgtttagacagaccgagagcagcagccagtgaacctgttatggttttgcagttgttcagtacggcagaatgttgttaaaccgtagctcagagatgtattaccagtggcgctaagctgtactgttacggtgtataatgcggatacaaataaacaatctagcgggtcattaaagcctgaactcagataacatgttct

SEQ ID NO: 97349 - DNA, 173 bp, Zea mays
  Clone ID: MRT4577_20298C.1
acgtcgacgcacgcctgagtaagttcggtttcggctcgagatctatatccagagtcaaaggagtacggaggagacacatacggcaatggtgtcatcagtggccactgaccatcaagaactgacaggaaccgtaacgtgtgaggaaactaccaggatctgggtgcacagcaagg

SEQ ID NO: 97350 - DNA, 344 bp, Zea mays
  unsure (1)..(344): unsure at all n locations
  Clone ID: MRT4577_20299C.1
cttcccccagccacgctccaccgcgccatagccgcaggaaaatatcaaatcggaggcgcgatgcaccacagaaaaaaattccctagggtttccaagcaaaagccctcctgaattctccaattccgcgccttcccccgcttcttgggcctcggatttagggtttatgcatggcttccgaccctcccggcgacggcgccggcggtgaagagccgacgccgggccctgcccccgccgtggaggtgcttgctgctcccgccgttccgctcaggccgcgctgggccacggagatcaaggtctacacccgtaagcacccccgcaaaacccctaaaccttctncagaacca

SEQ ID NO: 97351 - DNA, 763 bp, Zea mays
  unsure (1)..(763): unsure at all n locations
  Clone ID: MRT4577_2029C.1
gttggcccccggtttcggcttctgagggggggcgcattgtgcccgcggttcgcatagggggcaattattcccccgataacgatttcacaccgggagcacctgggcccatgtttaggccccgcgcgcacgtgccccatcttttgatttttttttttttttttttttttttttttttttttttttttttttttttcaaactataagttggagtatatatattatcagactgaaaagagttaagtgtacactacatatgtatatggaatctatatctatgtgtaatgtgtgtccattgcagcagtaccatgtacttcagcggttcagccagctatgcttgtttgtatttgtccactaatataaatccatcaatctcctaataaccgtaacatatcattattagtcgacacgtaatgtccctacggtcggccacgtgtcgggccggccaggcgcggcaacggcgacggccttgtccgcgcgctgctgctgctgctcttgtacccgcggctgctgggagacacgcgcttggactcgccccacttgtggaagtcgtcgcgttccgagccgtcggcgtcgcactcggggaagacggtgccgttgtagcggtacatgtcgtggcacaccgtgtagaggaggtaccggcggcggaagcggcgcatggcggcgcgcttggcgggggtcatgacggcgcagtccgccgtcatcgtggccacctggcactcggcggccgcccnnnnnnnnnnnnnnnnnnnnnnnnnnnnnnnnn

SEQ ID NO: 97352 - DNA, 1396 bp, Zea mays
  Clone ID: MRT4577_202C.1
cgccgactgcgagaccgtcgtcttcggcacccagcacgtgaacgcgcagcacaaccagcggacgttccacttcgcggacgagacggcgcagaacaacgtgtgggagatgttcgacggggagaatgtgcccaagtacaagcaggccaagatcaggctgcgcaaggccggcgacctctacaacctcaccaaggacaagaccgactacgtctggtacacctccagcttcaagttggaggcggacgacatgccgatccgcagcgacatcaagacagtgctcgaggtcaacagccatgggcatgccagcgtggcgtttgtcaacaacaaattcgtaggatgtgggcacgggaccaagatgaacaaggcgttcacgctcgagaagcccatggacctgaagaagggcgtgaaccacgtcgccgtcttggcatcgtcgatgggaatgacggacagtggcgcttacatggagcaccgtctggccggcgtggacagggtgcagatcacgggcctgaacgcgggcacgctggacctgacgaataacggctggggccacatcgtcggcctcgtcggcgagaagaagcagatccacaccgacaagggcatgggcagcgtcacctggaagccggccgtgaacgacaggccgctcacctggtacaagaggcacttcgacatgccgtcgggagaggacccggtcgtgctggacatgagcacgatgggcaagggcatgatgttcgtcaacggccagggcatcggccgctactggatctcctacaagcacgccctcggccggccatcgcagcagctccggtccttcctgcggcagaaggacaacatgctggtgctgttcgaggaggagttcgggcggccggacgcgatcatgatcctgacggtgaagcgcgacaacatctgcaccttcatctcggagcggaacccggcgcacatcatgtcgtgggagcgcaaggacagccagatcacggcgaaggcgaacgccgacgacctcagggcccgggcggcgctggcgtgcccgcccaagaagctcatccagcaggtggtgttcgcgagctacggaaaccccgcgggcatctgcggcaactacaccgtcggcagctgccacacgccacgcgccaaggaggtggtggagaaggcgtgcctcggcaagcgcgtctgcacgctgcccgtggccgccgacgtctacggcggcgacgccaactgctccggcaccaccgccacgctcgccgtgcaggccaagtgctccaagaggtcgcccagcgccgcgcagtaattcagtcgctcgtcgggacatactattcgtggctgggcggggaacacattgtcggtactgtcattgtatggctgggcggggagcatctaacaatatatttatagattgttcattttggtg

SEQ ID NO: 97353 - DNA, 399 bp, Zea mays
  Clone ID: MRT4577_20300C.1
gattattttgttggtgttagcgagccccacgctctccgctggagacatgtggccagtgagttgtctggccgtcaccatcgctcctggcgccaggccagtcacgccgtgggatcccgagaagacggttgaggctgatccgggctactgcttatctctacatgaggcacctgtccttgtgcacctagctcgagcccacgacggcatacgactacagctacttcgccggctgtaagaggagctatcccttaaagcataccttcgaacaggtatgtgctaccaacgggacctttgctggttgcgccggaaaatgtcgccatctctcaagtatggagagattgtgccgcacaatactgtgtaaggagatatactgctctaatacactggctctatgtggcttga

SEQ ID NO: 97354 - DNA, 2553 bp, Zea mays
  unsure (1)..(2553): unsure at all n locations
  Clone ID: MRT4577_20301C.1
ggtcgacccacgtttttcccacgcgtccgcttgtccacgaagaaggtgctgggtttgcacctctggaagtgggagctcctcgtgttcgtgctcatctgcggccgtctcgtctccggatgggtcatcaggattgccgtcttcggtgtcgaacgcaacttcttgctgaggaagcgcgtgctctactttgtgtatggagtgcgcagcgccgtgcagaacgcgctctggctcggcctggtgctcgcctcttggcacttcttgtttgacgagaatgtccagcaggagacgaactctccagtactgccctatgtgacgaaggtactattctgctttcttgttgccacgctcatccgccttgtcaagacattgctgctgaaggtactggcctcctccttccatgtctcgacgtactttgatcggattcaagaggcattgttcaatcaatacgtcatccagacactctctgggccgccactagtagaagaaaaccatgtgcttgaggaggttcatgagctccaacgtgcaggtgcaactataccaaaggagctgcgtgatgcagtaccaaccaagactgtgtctgggcagaggaacattcagttatcaggggtcatgcctgagggacaaggtagcaagcagctgtcgaaagagaaaagggacggtatctctattgatgcacttaacaagctcaaccagcgaaacgtctcagcttggaacatgaagaggctgatgaggattgttcaatttgggacattaacgactatggatgagcagatacaacaggcaagaggtaagggagatgaatcagcaacacagatacgaagtgaatatgaggcaaagatagctgccaagaagatctttagcaatgtagcaaagccaggttccaagtacatatacttgtcggacttgatgagattcatgaggcaggaagaggctgttaaagcaatggatctttttgaaggagcacaggagcacagcagggtcagcaagaggtctctcaagaactgggtggtgaatgcatttagagagcgcaaagctcttgcccttacactcaatgatacaaaaactgcagtaaacaagctgaaccagatggtcaatgtcgttgtggggataattgtgtttgttctctggcttcttattctgggaatagcaacaacacatttctttgtcttcctaagttcacagcttctcctggcagttttcgtatttgggaacacattgaagacagtttttgaggcaattgtcttcttgttcgtgatgcatccctttgatgttggtgaccgttgcgaaattgaaggtgttcaggcggtggttgaggaaatgaatatcatgacgacggtgtttctccgatatgataacctgaagatatattatccaaacagtgtacttgcaacaaaaccaattatgaatttttacagaagtcctgatatgggagaagcaatcgatttctctattcatgtcgcaactcctgtcgagaaactggccctgatgaaggaacgaatactgcgctacattgacaacaagaaggaacactggtacccgggtgcgatggttgtactccgggacgtcgatgacaccaacaaactgaaagtgtcaatatggctgcggcacacgctcaacttccaggacatgggtatgcggttcgtcaggcgagagctagtgctccaggagatgatcaaagtcctgaaggacctcgagattgagtatcggatgctgccacttgatgtgaatgttcggaatgctcctccaattcagtccacaaggatgcctacaacatggagttattcgtgaatcagtgacagggccggaccatttggccgtgacgttgcagatgcggacttgctatggatttggtggtcttaagctgcaagatactggtggtagcacaagcggattaagctgcaggtgcttggtagcaaatattagaggtagagaatagtagcatattagctagcatgtagagagctgttagctgtgcctgcagtcgtcacttgtgcaacttgtaattactgtattctcttgcgtgatgataattttctgtacatttgatggggaaatgacggtttggaaagagaagcaattgaagaaaatggcatggtaatgtgtatgcattgtttggttgttgaggaaatgaatctcatgacaacggtgtttctccgatctgataacctgaagatatattatccgaacagtgtactcgcaacaaaaccaattatgaatttctacagaagtcctgatatgggagaagcaattgacttctccattcatgttgcaactcctgccgagaaactggccctgatgaaggaacggatactgcgctacattgacaacaagaaggaacattggtacccgggcgcgatggttgtactccgggacgtcgatgataccaacaaactgaaagtgtcaatatggctgcgacacacactcaacttccaggacatgggcacgcgtttcgtgaggcgagagctagtgctccaggagatgatcaaatnctgaaggactcgagttgagtatcggatgcttccacttgatgtgaacgttcgcatgcgctccaatcca

SEQ ID NO: 97355 - DNA, 365 bp, Zea mays
  Clone ID: MRT4577_20302C.1
tcctatcatcatgctcataattctcctggagctgtgttgctagtgtctttggggttaacagaccccttgtgccaccgcaggcaaggaagggaccctggctgccctccatcagccagcaacacaagtggaagcccacgggctctctggtctaggcccagcccagaatctgcccacgaatactgtggtaatacaagaaccatcagctgatgtggataactcgtcaaagaagacagagattgtgcctgataccctgactattgaagaaacctatgctaacatgaaacttgaaaggacgatacatgtgggacttgaatatagtcttatcgatacctgcgctgatgttgacacaatggacactcactact

SEQ ID NO: 97356 - DNA, 825 bp, Zea mays
  Clone ID: MRT4577_20303C.1
caacgcccccttccgcctcggcggtggcgggggcggcagccccaaggatcgccgccccgccgccgacgacaaggaggacgaggacgagggtcgcggcggcgccggggcactcacagggacgctgatcgcaggagcattactggttggtttcgtaggggggtttggggcggccggttacgtgtacaaggaccagatcaacaccttcctcacgcagttctcggggttccttgacggctatggtccagccggatatgctctgttcgtacttgtatatgcagggttggaggttctcgcaattcccgcaatacctttaaccatgtcagctggtctattatttggtaatgtgactggtacaattattgtttcagtcggtggaacgctagctgcagcggtggccttccttattgctagatactttgccagagagagaattcttaaattggttgaaggaaataagaagtttctggcaattgataaggcaataggtgaaaatgggtttaagttggttgggaatgcttccaggttcatgggcttacgtcagtgccggtgcattcgggcgagctttaatccaagatgagtcggaaattggtttgggaggaaacgaacagctatggacactgggcgttggattattgtttacagccattgctgccgcttatgtaacgaggctcgcaaaggacgctgtaaaggagatcgacgactagaatggtaggattctctaggagaaagggccatctggatagtgtactagcctagcacattgtacatcactggcacctttggtgcgataaaatcttatagaaagccagagcaattttatgaggt

SEQ ID NO: 97357 - DNA, 1323 bp, Zea mays
  Clone ID: MRT4577_20304C.1
cggaattctcgggtcgacccacccgtgcatggccacgcgccttcccctgctccctcttatcgccttcgcgctctaaaatggcctcacactccgccacacagtaaacaaaacgacgggcccactccccgacggctgacgccctcccacggccccttccatgaggcagctgcacctctcgccgcagctctccccctccccggtcctctcctctcacttctcgccgccgccggcggaggcctcgtcctggcggcggcggctgcaccggggacgggccttccaaccgccgctctcctcgctgcgggatcccaacaaggccacgctccgcaaggcctcgtccaacgtccccttccgcctcggcggtggcgggagcggcagccccaaggaccgccgccccgccgacgacgacaaggcggaggaggaggccgagggcgagggcggcgcaggggcactcacggggacgctggtcgcaggagcgctactggttggtttcgtaggggggtttggggcggccggatacgtgtacaaggaccagatcaacactttcctcacgcagttctcagggttcattgacggctatggtccagccggatatgctctgttcgtacttgtatatgcaggattggaggttctcgctattcccgcaatacctttaaccatgtcagctggtctattatttggtagtgtgaccggtacaattattgtttcaatcagtggaacactagctgcagcggtggccttccttattgctagatacttcgccagagagagaattcttaaattggttgaaggaaataagaagtttctggcaattgataaagcaataggtgaaaatggattcaaggttgtcactttgcttcgtttgagtcccctgttacctttctcccttgggaactatctatatggcctgacttcagtgaagttcttgccatatgtcttgggcagttggttgggaatgcttccaggttcatgggcttacgtcagcgctggtgcattcgggcgagctataattcaagaggagtcggaaattggttggggaggaaatggacagctatggacattgggtgttgggttattgtttacggccatggctgccgcttatgtaacaaggctcgcaaaggatgctgtaaaggagatcgatgactagaatagtaggattctctagtagaaagggccctctggagtctgatagtatactagcacatcgtacatcactggcacctttggtgcaatcaaatctaatagaaattcagagcaattttctgagtgaatttgatctcttgatgtggtgccgattctcattgatcacaaaattcctatcccctt

SEQ ID NO: 97358 - DNA, 318 bp, Zea mays
  Clone ID: MRT4577_20305C.1
cccacgcgtacgctttttctagttctcgatctagaactatacgccccacggagaaattccagggcacacgggatcaggaaactaaatacctcatgaagacactgacaagcttgctaggtatccaaaagaggcaccatatctagatgtatagcccaagcgttatcccatatatcaaccggtgaaacccactactactagactggtacacacactctcaaaacatggaaccaatgacaaaatgccagctgtcaaagccaacggatccaccgtaacattagaaactacatcagaacacgctgaagtagcaagagacacgct

SEQ ID NO: 97359 - DNA, 730 bp, Zea mays
  Clone ID: MRT4577_20306C.1
attcaggtgagactagtaaagatagactaaacacggcggccgggccgcgctaccatgcttgccgccggcggcctccgccgtcatcaatcttgctcatgctcggcaggcagatccacatgtacgtgcctcgctcttctcttctcttttcttctttttttttgctcgtcgttgcttttgagactgtaggtgattgcagcgtcgtctttttctcttccatatcctctcttgcattggtttccttttctgggagattttttcttttatcacctagaacttaggaaacttcatcactagctattttacacgctttgctactacctaccttttatttcgccggccttcatcagtttgccaaagctatgcaaattggtgtgtacgtcttgggtgcatgacatgccagcgctactctatgccgtctatatatgtgccccggtggtgcacggtgctgcttattctgtgcttggcatcgggctatagatgaaaatatgtggactactgatggatgtcccgtataggatccatatagatagacagatagtagttcattcaggaaaccaaagagggatgatgaagaaggggaagcgtagagatctcgccttggcatgctatgctggcacaagatgcagatctgcttgttcgtcaacggtaggtgcggaagcgctgctgcgtcttccttttttttttctttttttttttttgagaaaaaataagtgcggaagtgacgaggcta

SEQ ID NO: 97360 - DNA, 704 bp, Zea mays
  Clone ID: MRT4577_20307C.1
cccacgcgtccgcggacgcgtgggccgcaatacctttaaccatgtcagctggtctattatttggtaatgtgactggtacaattattgtttcagtcggtggaacgctagctgcagcggtggccttccttattgctagatactttgccagagagagaattcttaaattggttgaaggaaataagaagtttctggcaattgataaggcaataggtgaaaatgggtttaaggttgttactttgctacgcttgagtcccctgttacctttctcccttgggaactatctatatggccttacttcagtgaagttcttgccgtatgtcttgggcagttggttgggaatgcttccaggttcatgggcttacgtcagtgccggtgcattcgggcgagctttaatccaagatgagtcggaaattggtttgggaggaaacgaacagctatggacactgggcgttggattattgtttacagccattgctgccgcttatgtaacgaggctcgcaaaggacgctgtaaaggagatcgacgactagaatggtaggattctctaggagaaagggccatctggatagtgtactagcctagcacattgtacatcactggcacctttggtgcgataaaatcttatagaaagccagagcaattttatgaggtaatgtgatctctaaaacccacgcgtccgcggacgcgtgggcggacgcgtgggt

SEQ ID NO: 97361 - DNA, 307 bp, Zea mays
  Clone ID: MRT4577_20308C.1
gtacaagctttttttttttttttttttttttttttattttattttttttttttttttttttttttttttaaaacccatccctaaaattttttatgaaccaacccctttcccaaaaggaatattaaatctaaacaaagggggttttttttaaaaaaagggtaaaaaagcatccctaagtggtgcaaaccttttccttttgctaggacccctgctaaaaagcttaaaaacttgtgggcaattttgttggaaacccaataaaccccctaatacaacccttcaccagaggtagaaaaagggctttggataa

SEQ ID NO: 97362 - DNA, 456 bp, Zea mays
  Clone ID: MRT4577_20309C.1
gccggccgggccgggaacctacaattgtcacttccattttctcaataccttaagcaaggaccaatgtctcaagcccagccccctcgttcccaagcccagtggaaacacgttaaatttcaggataaccaagctaatgccatgaaggaaccaggaaccggtgggtatggctatgggacgaaaaatgacaagaataaggatgtggatacaatagcttcggacttcatcaagctgaagcacaaggcttgggcactccagaagagcacaaccatgtaccaaccttctacctaaagccttggatatttgcggatgcggagtgaagttaccatggcatccttgctaagaataagaaagtaatgtggttatgaggagatgtgtaattttgtggcgatattatttgcaacaatgatgtatatatgggcatgtttggtcgaaaaaaaaaaaaaaaaaagcggccta

SEQ ID NO: 97363 - DNA, 1881 bp, Zea mays
  Clone ID: MRT4577_2030C.1
atggatcctaaggggaagggaatcgtgatcaacaataaggagaaggagtccttcgtcaacgagccaaaggatgacaagtccaacgactcgggctcgggtcataaacgaaaagatgggaagaagaagaagacaaggcgcatcaaggagattgtctactacgacagcgacgaatcttcctcttcccaaaaggacgacgaccacaacgactacgagcaaaggaaaccggttaattctaacttttcctttgactactctcgtattccgcaaagttcaaattcacatttgctttccattccactcggcaagcccccacactttgatggggaggactacggattttggagccacaaaatgcgtagtcacctattctctctccatcctagtatatgggagattgtagatagtggaatgcactttaatagttcggatagtcctatattcattaatgagcaaatccataagaatgcacaagctactactgttctcttagcatctttgtgcagggaagaatacaataaggtgagcggcttggacaatgccaagcagatatgggacaccctcaagatctctcacgagggcaacgacgtcaccatgctcaccaagatggagttggtggagggcgaacttgggagattcgctatgataaggggggaggagccaacccaaacatacaaccggctcaaaacccttgtcaacaagataagaagctatggaagcacgcgatggacggaccacgacgtcgtccgcctaatgctaaggtcctttaccattcttgatcctcatttggtgaataatattcgtgagaatcccaggtacaccaaaatgtcgcccgaagaagttcttgggaagttcgtaagcgggcgaatgatgatcaaggaggcaagatacgtggacgacgcgttgaacggtcctatccatgagcctcaacccattgctctcaaggcaacaaggagcaaggaggcgctaccaagcaaggtggcgcaagttgaggcagccgggctaaataatgaggagatggccctcatcattaagcgcttcaagacggcgcttaaaggtcgcaagggacaaccaagcaagaccaagacaaaggagaagcgctcatgcttcaaatgtggtaagatcggtcatttcattgctaactgtcccgataatgaaagtgaccaggaaaaaggggacaagagggaaaagaagaagcattacaagaaggccaagggcgaggcgcatctaggcaaagagtgggactcggactgctcctcctccgactccgacaatgaaggactcgccgccaccgccttcaacaaatcaaccctcttccccaacgagcgtcacacatgccttatggcaagggagaagaaggtatgtactcgcaactctacctatgcttcttcaagtgaggacgaatctagtgatgaggatgaagtagattattcatgtttgttcaagggcttagatagatctaagatagacaaaattaatgaattaattgatgccttgaatgaaaataatatacttttagaaaagcaagaggatttgttatatgaagaacatgataagtttgtagaggctcaaaaatccctcgcattagaaattaagaggaatgaaatgcttgcttgtgaagtgtcaacatgccatgattctatttctaacttaaagagcataaacgatgatttaaatgctaaactagtagaagcaaataaatccaactcttgtgttgaatatgttgaaatttgcactaggtgtaaggatattgatattaatgcttgtagcgaacacttagtttctatttcaaaattgaatgatgaattagctagtcttaatgctcaacttaagactagcaagagtaattttgataaactaaaatttgctagggatgcctacacg

SEQ ID NO: 97364 - DNA, 586 bp, Zea mays
  Clone ID: MRT4577_20310C.1
gtggcggcctgtgcggggcccggcccgggccggggatgccaacctacaattgtcacttccattttctcaataccttaagcaaggaccaatgtctcaagcccagccccctcgttcccaagcccagtggaaacacgttaaatttcaggataaccaagctaatgccatgaaggaaccaggaaccggtgggtatggctatgggacgaaaaatgacaagaataaggatgtggatacaatagcttcggacttcatcaagctgaagcacaaggcttgggcactccagaagagcacaaccatgtaccaaccttctacctaaaggtgtcaatagttcaagaagttgatactatatacttatgcttgtctctgtatagtctataagtcctaattcaaataacaggtgctgcttgcagccttggatatttgcggatgcggagtgaagttaccatggcatcgttgctaagaataagaaagtaatgtggttatgaggaaaaaaaaaaaaaaaaaagagcccaagaaaaaaaaaaaaaaaaaaaaaaaaaaaaaaaaaaaaaaaaaaaaaaatttaaaaaaaaaaaaaaaaaggccccta

SEQ ID NO: 97365 - DNA, 482 bp, Zea mays
  unsure (1)..(482): unsure at all n locations
  Clone ID: MRT4577_20311C.1
cttaacggcgcctttttttttttttttttttttttttcaaactaactttcatgatgtatattctgggtgtcgcacacacaacacaccggccattttaaaccaacactgccgactatgacacgaacagaatctttgcaacctcattgggaggggcccagacaccaggccatggcagcttaaacgacccatgacttactgaccaccaggaacggacacaggggaggggctctcctttggtgttgnatctgtgggtgcggccatcctccactgtttgccggcgaaatcaaacctgtggccggggggatgccctccttgcctgatttgccttacattgcatgggtccgactctaacctccaggttatggtttttccatcaggtctttacaaaaactgcataccactctgagcggagaaaggtgaaggtgctctccttctggatgttgatccgcgagatgcggccatcctccactgcttgcccgcaa

SEQ ID NO: 97366 - DNA, 606 bp, Zea mays
  Clone ID: MRT4577_20312C.1
cattgggccggccgggcccggcataccaacctacaattgtcacttccattttctcaataccttaagcaaggaccaatgtctcaagcccagccccctcgttcccaagcccagtggaaacacgttaaatttcaggataaccaagctaatgccatgaaggaaccaggaaccggtgggtatggctatgggacgaaaaatgacaagaataaggatgtggatacaatagcttcggacttcatcaagctgaagcacaaggcttgggcactccagaagagcacaaccatgtaccaaccttctacctaaaggtgtcaatagttcaagaagttgatactatatacttatgcttgtctctgtatagtctataagtcctaattcaaataacaggtgctgcttgcagccttggatatttgcggatgcggagtgaagttaccatggcatcgttgctaagaataagaaagtaatgtggttatgaggagatgtgtaattttgtggcgatattatttgtaaaaaaaaaaaaaaaaaaaaaaaaaaaaaaaaaaaaaaaaaaaaaaaaaaaaaaaaaggcccctaaaactccaacttttgaaaccaataaaaaaaaaagcggcc

SEQ ID NO: 97367 - DNA, 397 bp, Zea mays
  unsure (1)..(397): unsure at all n locations
  Clone ID: MRT4577_20313C.1
ctttatttttttttttttttttttttttttttttttttttttttttttttcttttttttttttgggtttttttttttttcttttttttttttttttttttttttttttttttttttntttttttttttcttttttttctctcctttctctctttttttttccttcctcattaacatttcnctttcnttgtatcaaatnnccgctcgcctccctttcttctccacnncattaattatatntcgaagtaaatccatatattcccataaatggctacaggaggactcgccnttgcgagttgccatgcttggtggggttgagggatccgaatttttctttggtgcgtgctctcagcgagaccctctgtgaacttgagtgaacctccacaccgcaggttgtg

SEQ ID NO: 97368 - DNA, 458 bp, Zea mays
  Clone ID: MRT4577_20314C.1
gccggccgcggccggaacctacaattgtcacttccattttctcaataccttaagcaaggaccaatgtctcaagcccagccccctcgttcccaagcccagtggaaacacgttaaatttcaggataaccaagctaatgccatgaaggaaccaggaaccggtgggtatggctatgggacgaaaaatgacaagaataaggatgtggatacaatagcttcggacttcatcaagctgaagcacaaggcttgggcactccagaagagcacaaccatgtaccaaccttctacctaaaggtgctgcttgcagccttggatatttgcggatgcggagtgaagttaccatggcatccttgctaagaataagaaagtaatgtggttatgaggagatgtgtaattttgtggcgatattatttgcaacaatgatgtatatatgggcaaaaaaaaaaaaaaaaaaggccccta

SEQ ID NO: 97369 - DNA, 667 bp, Zea mays
  Clone ID: MRT4577_20315C.1
ctcgaggccggggcggccctcgcggccggccgggataccaacctacaattgtcacttccattttctcaataccttaagcaaggaccaatgtctcaagcccagccccctcgttcccaagcccagtggaaacacgttaaatttcaggataaccaagctaatgccatgaaggaaccaggaaccggtgggtatggctatgggacgaaaaatgacaagaataaggatgtggatacaatagcttcggacttcatcaagctgaagcacaaggcttgggcactccagaagagcacaaccatgtaccaaccttctacctaaaggtgtcaatagttcaagaagttgatactatatacttatgcttgtctctgtatagtctataagtcctaattcaaataacaggtgctgcttgcagccttggatatttgcggatgcggagtgaagttaccatggcatccttgctaagaataagaaagtaatgtggttatgaggagatgtgtaattttgtggcgatattatttgcaacaatgatgtatatatgggcaaaaaaaaaaaaaaaaaaaaaaaaaaaaaaaaaaaaaaaaaaaaaaaaaaaaaaaaccccggaaaaaaaaaaaaaaaaatcacgctaatcgataccgccaacctcaagggggggcccggaacccaatccgcc

SEQ ID NO: 97370 - DNA, 1166 bp, Zea mays
  Clone ID: MRT4577_20316C.1
gccggccgggctgcgttaggtgacctatagaaagccggccgggccgggataccaacctacaattgtcacttccattttctcaataccttaagcaaggaccaatgtctcaagcccagccccctcgttcccaagcccagtggaaacacgttaaatttcaggataaccaagctaatgccatgaaggaaccaggaaccggtgggtatggctatgggacgaaaaatgacaagaataaggatgtggatacaatagctacggacttcatcaagctgaagcacaaggcttgggcactccagaagagcacaaccatgtaccaaccttctacctaaaggtgtcaatagttcaagaagttgatactatatacttatgcttgtctctgtatagtctataagtcctaattcaaataacaggtgctgcttgcagccttggatatttgcggagtgaagttaccatggcatcattgctaagaataagaaagtaatgtggttatgaggagatgtgtaattttgtggcgatattatttgcaacaatgatgtatatagggcatgtttggttcaaagaaaaaaaaaaaaaaaaaagcgtaagaaaagtcgatcgagttgaagaactaacctttaggcagaaaaaaggtcccagcagaggcttgattttaaagtatgagagctctctaacactacaaccttcacatatggattgtgccatgtcgtacaatgcttgaatgttgcttgatatttcacagcattttataccatggccacaaatgcattgaactaaattgttcacgtgagttgtatttggggaaggtcctagcaggtgcttgacccgaaagcatgagtggattgtaccatgtcgtacaatgcttcaatggtgcttacatttcactgcatttcgtaaactatgtatgatgtctggatgtctttagacatccatacttttaagaaaggatacaatctgaatgtcaagattgtacaatctagtagcagcttctagttgaattacatatgcttggttttaggccatttgatttgggtttcaatgatcagttctgttactttgtgactatcagaattataaattgagtgactgcaatttaagtttcaatggttacaagtaaaaaaaaaaaaaaaaaaaaaaaaaaaaaaaaagtactctgcgttgttaccactgct

SEQ ID NO: 97371 - DNA, 136 bp, Zea mays
  Clone ID: MRT4577_20317C.1
aggtcagtcagcaacatagatagtagaatgcattagccatcatagataagccatggcgaccttgatcatctccctgctcatgttacttgcgctagctacatgtgtggctaaggcgacaattttccctgaatgctca

SEQ ID NO: 97372 - DNA, 486 bp, Zea mays
  Clone ID: MRT4577_20318C.1
aaccaaagaagacgacccataccatacccaaactggcatgcgtgagaatagattgacagaaagaacaggaaccaaccaacacaagacacaacaagctgcagcagggggaggcatggggcaccgcgccactgacaccgggccccaccaccattaccacccggcgcacactttttttagcccacgttacttgcagcccggaccggacacgttcacgcgacagtcactggttgctacgtaccgggcttcgttcgacacacaaacccccacagcgggggacgcccgtaaccgtagcgtactgaacaaaaaaatcccgtgttatactgccatttacccccgcgagggaataccccgccacgcgcgcacgccgattccctgggccctggcccccccccttttgtgcgcacggcctcacttggtggcctttttgggctcctaaagaacaaaaaccttctcccccttggggggcggttcctggggaccaaaaag

SEQ ID NO: 97373 - DNA, 232 bp, Zea mays
  Clone ID: MRT4577_20319C.1
atggaaatcaatcagttgagaaagctggacgcgacctttgggacaaacaccatgcttgaactgatcatggtcaagatatttggctggaccaagaagtccctgaggaagccgaacgaacctctgttaaatcaattatattaagcgggacagaggatgcgaaatctgatctctctttgcacattggtgcagagcttgagatccaatggagagaatctcctattgggtgaaccgg

SEQ ID NO: 97374 - DNA, 370 bp, Zea mays
  Clone ID: MRT4577_2031C.1
ggccacaaaaaaaattttggttcccctcaaaagttgggatttgaataaaccaaaccgccaaaagggcatgaccggtttttgaacgaacctttttttttttttggttcacacgtaacacacacatacatgggcgacgggggagggacatgctaccatgcacatgcaagggtccgtgtccccacggggggattttatttaggggtccatagcaggagacaaggggccattgatcattacgcggggatgggtggatttcatcatgacccccatcgtttatccggccggggggaacggggaatgggtggtcaatcaatcaggggggcgtcgtcgggcggggtctaggttttagttcaccctggaacaaccgggg

SEQ ID NO: 97375 - DNA, 273 bp, Zea mays
  Clone ID: MRT4577_20320C.1
atactgatgatggctaatcctacataggcgccgacgcacgtggaccgcgtgcattttcggcaaagatgcatatttttgcgtggactctgacagagaataccataattttggaggtggattgctgaacacaccatagacaatgtggaaggcgaggtacacgacacggggggcttcatttcataccagaaacggatgatcttacacggcacgtaaatctaggacaggtgcaccctctgcgactacaacaatcagtaggagtccacactccatctg

SEQ ID NO: 97376 - DNA, 297 bp, Zea mays
  Clone ID: MRT4577_20321C.1
ggaggcccaagaatctggcgatgaggaagatgataatgagtgggaggagggttaatgcttgaaagataacaggcgacccctgctccctcagaaattttgaactggtatcccaccagaggtcgaaaatatttcactggcctgattatgtcgcacgcatgatcaagagaaacttgtccaaatgaaaagccagctcctatatttttttttttagttgaaaatgtacaaaatatacttaaacatttgagcagagggtgaacatttttcccctgttattttgaagagctgttgtagtcttgt

SEQ ID NO: 97377 - DNA, 298 bp, Zea mays
  Clone ID: MRT4577_20322C.1
tatattttaatattaagattttaaaagaaaagtatggaggtttatttaaacaatttgaaaaaggaaaagagaaaaatttttgtaccaccagatggaggctgacctgaggcgtttattcagagtagtttagaagattgtaaaagggagcaattgtggagtttcaaaggttctagcttgagggtcagccttgttaggtgtacttttaaacgaaggttacctaaacagaatctaaatggctttttaaaattgtaaagttgtagataatagtttgaaaatgagatgtagtttaaaaagattg

SEQ ID NO: 97378 - DNA, 331 bp, Zea mays
  Clone ID: MRT4577_20323C.1
cattgggtacctcgaggccggccgggattactctacgctccaccccggagtgcatagtcatgctttctctcaagggcctgacctgatgctcagggaaggtgtctagtgtcactcatacggcggagaactgtggcgtccgcgttgggcgtgttaacagatcggtggttgtcttcacgacacctcctgatcctatccattgtcttcacgctgggatagaacatgagggcgtatgtccgtcctcacggttcagttgattttccctcaagaggcggacagatcacctcgtgacggaatcatggatctctctgcgctctgggaggtatatacatct

SEQ ID NO: 97379 - DNA, 3037 bp, Zea mays
  unsure (1)..(3037): unsure at all n locations
  Clone ID: MRT4577_20324C.1
aattcggcacgagggcggagaggagagggcacgaggcagatccaaaatactacacctccatgtaagctgtatccacactacaacacatcacctcacctcccttcctctccctccctccctccctccctctctctctctcctccaagatctgtcgatcacacacaccacaccatacacgcgcagctttttgctgctgcttgctcgtctacttgcccggttgcccctgcttcttcttccatcgcaatgccatcccctcgccaattcttgcagctgctgttacccaccttgctcgccacttgctgcgtcgatggagccaacggcccccacgctcccgccaccgcgaggaggcagctccaccagcccttcttcgtcccggatcagcccgggcagccgtcggcgccgccgccgttctttcccgcgattccggtgacgcccccgcctcctgtgccgacggggcaggaccagccgacgtaccccgctctggtgttccccagcaacggctccagcggtgccacgcctccggccggcaactcgcacgggtccaagaaggcctccccgtcgtccggagaggaagaattctactcaccgcggggctcatcaataaagacctcgagctcgcgcaggactctggcgacggcagtgcaggcggcccttgaggcgcgagaccgctctaggactccgtcccctggttcggtcctgagcacgccgtcgtacccatcttcgccgggggcgacgctgtcgcccgcgcccgcctcgccgcctgccttttccagcccaggcgagtccggccgccgctccgtcaagtcaagatcggaaagcgcgcgcgtcgtcgtcctcccgccggttcctccgaccccgcccccgcctcctcccttcgcaccgacactgccgccaccggcacctcctcgccggaaaccgccgtgcgcaacgccgccatgctctccgctaaacgacgtaccagctctctgatccaccacccccacccgcgcaagaaacccgttcgcccagccaccgtccctaccgacgagcacacacccgccacgaccacctccggctgcaggggccgccgccaccacctcctccgccaccgccgccgccggtgggctactgggagagccgtgtccgcaagcccgacacgtccaaagaaacccgttcgccggcactgtcgccgccaagcttcaggagcgtccctgcgcccaccgacgcgttcccaagccggctgcccgagagctccgagcaaggcgacaagtccgaggacacgacgccacggccgaagctgaagccgctgcactgggacaaggtccgggccagctccgaccgcgtcatggtgtgggatcagctcaagtccagctcattccaggtgaacgaggagatgatcgagacgctgttcatttgcaatccagccaatgcgccggccaaggaggcgactaggaggcccgtgctgccgacgcccaaggccgagaacaaggtgctagatccgaagaaggcgcagaacattgccatcttgctgcgcgcgctgaatgttaccaaggaagaggtcagcgacgcgctctgtgaaggtaacacggagaactttggagcggatttactggagaccttgctgaagatggctcccaccaaggaagaggagattaaactgagagaattcaaagaggagtcttctccagttaagcttaacccagctgagaagttcctcaaggcagtgctcgatgtgccttttgccttcaagagagtggatgcgatgctttacatagcgaacttcgatgcagaggtcaattacctcaagaagtcgttcgagacccttgaggctgcttgtgatgagctgagaagcagcaggctatttcttaagctactggaagcggttctgaagaccggcaacaggatgaatgttggcacaaaccgtggggacgcacacgcgttcaagctcgacactctgctcaaactggtggatgtcaaaggcaccgatgggcacacgacccttctgcacttcgtggtacaggagatgatccggacggagggcgcccgtgtgtccggcagcacccagacaaccccaagaacccaggcgaaccctctgcgagaagagctcgagtgcaagaagctaggcctccaggtagtggccggcctcgccagcgagctgagcagcgtgaagaaggcagccggcatggactcggacgtgctcagcagctacgtcaccaaactcgccggaggaatagagaaggtcaccgaggtggtgctgcggctgaagaacgaagggacggagtcaagggacggcgcgtggcggttccacgacaggatgcagaggttcctgaagaaggcggacgacgagataatcaggatccagtgccaggagagcgtggcgctgtcgctcgtgaaggagatcaccgagtacttccacggcgactccgccaaggaggaggcccacccgttcaggatcttcatggtcgtcagggacttcctcgcggtcctcgaccaggtctgcagggaagtgggcagggtcaacgagcgtaccatcgccagctccgcgcgccacttccccgtgccggttaacccaacgacgccgcagctgttcccgcggcttcatgctttgagagctgggttctccgacgacgacgacgagagttcagccgcttcagtgtcgtcgccgtgatcgctggtagtctgccaatttttttttttaatttttcccgcggaccgtcagtagaacaccgccacgcccagggggcgcgggggcagagggattcagatggtagcgggctgctgcccctttttttttccacacacttttgtacctgtagattatagaatgtacaatgtttttgcaaatattttatctctgtatgtaagaagggataaggtctagatcagaagagggaataatcagttaatctatgtaggcagcttttatgtcttgagtagttcagtctgtacatgacatgaagcagttaaccacttgtagatttatccatctcacacaatgatagacgagtgaagctaacgattccggaaaagaaaaaaaaananctcgagggggggcccg

SEQ ID NO: 97380 - DNA, 1678 bp, Zea mays
  Clone ID: MRT4577_20325C.1
ggggattaacaaagcatatcatgaggacttctttgacaactcgacacagcaggcagacacactttggctttagctaggccctgactccatggccagcgcttcaggtgctgatgcacttctgaatggtgtggagatattcaagctcagcaaggattccgacctttcttatgtgcttggtcatattgacacgggcaaccagatggattcttcaaaaggggggaagattaaaggcctatgggaagaacttggtattggctcagcatcttttgttgcggttacaagcgttgttctgttctcatggtgttacataagaaagaaacgaaaagctgtcaacaaggaggcccctcccggctggcatccgttggttctccacgaggctatgaaaagcaccacagacgcccgtgcagccagtaaatcgtcgtcggctcggaacgcctctcccattggtcataggatgggaagaaggttcggcattgcggagatcagggcagccacgaagaacttcgatgagtccttagtcattggaactggagggtttggaaaggtctacaaaggtgagattgacgagggcgctacagtggccatcaagcgcgctaacacattgtgtggccagggcctgaaagaattcgagacggagatcgagatgctttccaagcttcggcaccggcaccttgtggcgatgatcggctactgcgaagagcagaaggagatgattctggtctacgaatacatggcgaaggggacactgagaagccatctgtacgggagcagccttcctcctctgacatggaagcaacggatcgacgcgtgcattggcgcggcccgcggcctccactacctccacacaggagcggaccgaggcataatccaccgggacgtgaagaccaccaacattctgctggacgacagtttcgtcgccaagatagccgacttcgggctgtcaagaaccggaccaacgctggaccaaacccatgtcagcaccgcggtgaggggaagcttcggatacctagaccccgagtacttccggaggcagcagctgacgcagaagtccgacgtgtactcgttcggagtggtgctcttcgaagttgcctgcgcgaggccagtgatagaccccacgttgcccaaggaccagatcaacctggcggagtgggcgatgaggtggcagcggcagcgctcgctggaggcgatcctcgaccctcgcctggacggcgacttctcgcccgagtccctgaagaagttcggcgagatcgcggagaaatgcctcgccgacgacggcaggagcaggccgtccatgggcgaggtcctgtggcacctcgagtacgtgctgcagctccacgaagcttacaggcggaatgtggtggagtccgaatcgttcgggagcggcgagctggggttcgctgatatatcatcatccttcttcagccttccccacgtcatcagggagggggaggaggaacaccaccaccgctcgaagaagccgtcaagtatcagagaggaactagacacacattaccaaccccctcctccctcccaacagaaaaaagacacagaagtgtcaagagtttccttgacaactgtgtgatgcaatctgcatggccaccgttcatgcaccgctgcctgtgtgacctgtataaatggcactgatataattatagtgatgtctttgaggttttgatgt

SEQ ID NO: 97381 - DNA, 274 bp, Zea mays
  unsure (1)..(274): unsure at all n locations
  Clone ID: MRT4577_20326C.1
gacgagacgctcccagagatgttnggtgtcgacacatccccggaaccaccagggggggagcgcccctacgatggcacagcaggcctggatcgctatgctggcctacctggacaagcgaaaatccgatggatctcacaggctaaggtcaaactccgggagacatgagccgggacctccggctcccgacccggcctgatgccccgacccggaggtagatacgctggtacatgtatcgccccacctggcatcgctctgaacatagctgacttaataa

SEQ ID NO: 97382 - DNA, 216 bp, Zea mays
  unsure (1)..(216): unsure at all n locations
  Clone ID: MRT4577_20327C.1
ctcagtatcaagtcgtaatcatatatgcaaaagcagcatctgtanatacctatacatgtgatgtcatcgcgtgagtcaactgcctagtaaggtctgtatgtagctgtctggtagctgtgtggcatcaatggagagacagtgaatgaaggagaaccctgtcagctcttaggattagtcagtatgcagtaagctgcatacagtctgtgatataacaga

SEQ ID NO: 97383 - DNA, 334 bp, Zea mays
  unsure (1)..(334): unsure at all n locations
  Clone ID: MRT4577_20328C.1
nntctcgaagccgcgggcagcggctgaaacggaacaagagcggtgtccctctccgttgactccccgacggccgaactaggccgcggggacctgggcgggagcggcggaccctctcaggaccgcaccgtctcgcgccgccacgtgtccctccgccttctcggtgtcggcgacgggatcgcattcgagggcgtgggcaggaaccccgtcgtcgtccgctcccctgacggcggaggcggaggcggaagtggaaccagcagggtgttccgccgcggggagaagggcgagctccgcgccggggacgcgctgtcgctgtcgctcaaggctcctgcgttct

SEQ ID NO: 97384 - DNA, 3665 bp, Zea mays
  Clone ID: MRT4577_20329C.1
aattcggcacgaggtggtttccctcctctttctgcctgcgcttctgtctctcttctgcccttctccaagaaaccggataatccatccatccatccgcgatccgccccgcccacccaaggaaggaaccgatcccgactcgccgcgggctcgaccccccgcgccgacggcgacgcgtggcaggcacagcaagcgcgccgcttcgccgacgtccacgccgcctgctctggctgtgggcggaatgcgtcagctgtagaggacggccacggcacctttcagccttttcctcgtctgctcctcctctcgcccgggctcggtcggtcggtaacgactcctgctgtgctgtgctcgtgcagtcgtgctccagcctccggcagcgcctgctccgcaaacagttgcctctcctgtgtgtgctcacccaagggtcaaggggccagtccatccgcccgtccaggaaggaaatcgttcatccccagaagacaaagcgatccacttggataccggataagccctgtcctggcggcgtcgcatcccctctcgattcccgcgacaggtcgcagtgaatgacgccagaaatcagcggcccttgaggcgaagacttccccccgccttcgctgctctccaccgatccgacgaaggcagcgctcgggcactgctgctggttccccttcgcccaattcggtctgacgcaggatctcagtttctgcggcggcggagtagtagggggcagacggtgattttctgattctctcaccttggctctgtggactaaatgtgacctgcaagagctaaaagtggcagcgattgacttccagatgagtccatttgtgctggccgtggtgagcgttgcattcctcaacttgctgttcctgcaagctcatggaagcggtttgcttctgagctgtggctcgaacagcactgtcgatgctgatgggcggagatggaccggcgacataacccctgaggggaattttaccttgagcagccctgggcttgcggcgtcactggtcgggaagagcagttctgatgagatattcggaccgctttacagctctgcccgtttcttcaacgcggcaacttggtataccattagtgtgctgccaggaagttactgtgtcaggttgcatttcttcccttcgaccttcgggaatttgagcgcaaacaactccgtgtttgatgtcacggcaaatgatttcaagcttgtttcaaaattcaatgcgtcagaggagattgcttggagagcctctgtgagcaattcggtcaccagtgcagttgtcaaggagtactttcttgtagtcggtgctcgtggcctgagcattgagtttgatccaagacctgggtcgtttgcctttgtgaatgcgattgaggtcatgctgaccccagataatttgttcaatgatacagtgagcaaagttggcagtgcaggcacgcagcttcctcttggtttgagcggcagaggtgttgagacaatgtaccggctgaacattggaggccctgcacttaaatcgcccagtgatcagtatctccacaggccatggtacactgacgaagcgttcatgttttctacaaatgctgctcagactgtgtctaatgcttcaagcatagtgtatgtatcaagcaatgattcgtcaattgcgccgattgatgtttacgagaccgcaagaatcatgggcaacaacatggttgtggacaagcggtttaacgtgtcgtggcggttctatgtccacccaaactttgattacttagtccgccttcatttctgtgagcttgtctatgacaagcccagccagaggatcttcaagatctacatcaataacaagactgctgctgagagctacgatgtgtatgctagggctggggggattaacaaagcatatcatgaggacttctttgacaactcgacgcagcaggcagacacactttggcttcagctaggccctgactccatggccagcgcttcaggtgctgatgcacttctgaatggtgtggagatattcaagctcagcaaggattccgacctttcttatgtgcttggtcatattgacacgggcaaccagatggattcttcaaaaggggggaagattaaaggcctatgggaagaacttggtattggctcagcatcttttgttgcggttacaagcgttgttctgttctcatggtgttacataagaaagaaacgaaaagctgtcaacaaggaggcccctcccggctggcatccgttggttctccacgaggctatgaaaagcaccacagacgcccgtgcagccagtaaatcgtcatcggctcggaatgcctctcccattggtcataggatgggaagaaggttcggcattgcggagatcagggctgccacgaagaacttcgatgagtccttagtcattggaactggagggtttggaaaggtctacaaaggtgagattgacgagggcgctacagtggccatcaagcgcgctaacacattgtgtggccagggcctgaaagaattcgagacggagatcgagatgctttccaagcttcggcaccggcaccttgtggcgatgatcggctactgcgaagagcagaaggagatgattctggtctacgaatacatggcgaaggggacactgagaagccatctgtacgggagcagccttcctcctctgacatggaagcaacggatcgacgcgtgcattggcgcggcccgcggcctccactacctccacacaggagcggaccgaggcataatccaccgggacgtgaagaccaccaacattctgctggacgacagtttcgtcgccaagatagccgacttcgggctgtcaagaaccggaccaacgctggaccaaacccatgtcagcaccgcggtgaggggaagcttcggatacctagaccccgagtacttccggaggcagcagctgacgcagaagtccgacgtgtactcgttcggagtggtgctcttcgaagttgcctgcgcgaggccagtgatagaccccacgttgcccaaggaccagatcaacctggcggagtgggcgatgaggtggcagcggcagcgctcgctggaggcgatcctcgaccctcgcctggacggcgacttctcgcccgagtccctgaagaagttcggcgagatcgcggagaaatgcctcgccgacgacggcaggagcaggccgtccatgggcgaggtcctgtggcacctcgagtacgtgctgcagctccacgaagcttacaggcggaatgtggtggagtccgaatcgttcgggagcggcgagctggggttcgctgatatatcatcatccttcttcagccttccccacgtcatcagggagggggaggaggaacaccaccaccgctcgaagaagccgtcaagtatcagagaggaactagacacacgtgagaacttctgacttcagcaaaacaaaaacaaaaaaaaatcttgctttgtagccatgatcatgatgtaaagttgtgttacatcattctctttagttttttttttttttttgcttcttattccattggggcgttctcttgcttgacaagagtagcataatagaattttttttcttctccttgtgtgtgtagattaccaaccccctcatccctcccaacagaaagaagacacagaagtgtcaagagtttcccttgacaactgtgtgatgcaaaaaaaaaaaaaaaaaaacatgcggaagggc

SEQ ID NO: 97385 - DNA, 508 bp, Zea mays
  unsure (1)..(508): unsure at all n locations
  Clone ID: MRT4577_2032C.1
cctgccgggtctcactgctaggcctaatgggacagaccgggccatgtccgtcgtgcatcacggagcatgtgtgtaggaagagttgctcctgtcacactcgggtactgctcgagtgacgtcgattacaagctgccgtagccatcggcggaaagcagaacgcctgaaggaagaagcgaaagaatgatcttggtcgccagccagccaacaccaagtcgtgaatcactacgacactgatgaggggacgcgttctgctagagaatgtgaaatggacgtctctacgccttgatactggtaactactcatggagaagtgaagttgttacccgaaagacccttttactaagggaggtctacaatggatcaaacattgagatggggaggacacaaacgcttgctaagagtgtcattgtgcaaaatgatgttgctctataaaaacaaaggggcataagtaagtatggtgttgaatttgataaaaattaataaaaactnngtttttanaatntttttta

SEQ ID NO: 97386 - DNA, 286 bp, Zea mays
  Clone ID: MRT4577_20330C.1
cagacgcgtgggctgtctcgtggggaagagtagcggcagcacgccgtacgacctgcggagggagttcgagccgtcgacgtaggactaccagcaacagcaacgcgcgagccctcagcagcagtctcatcatcaccactggggaagtagcggccgcggctgtcaccagcagcagcaccccccgtccgcgcacgggcacgggcatggccacggtcaccgagctccgcactcgcacaggctgcagcaccacgcggcgcctgggccacgggcgctgtccgtctttccttat

SEQ ID NO: 97387 - DNA, 635 bp, Zea mays
  Clone ID: MRT4577_20331C.1
aactcctctcactttcctttctctctcgtttctggcacctaccgtagagcatgcccgaggcctgtccgccggagcgcgcgccctcggcctagcctgtcgcgcccgccggagctccctcccccggccccggccgccgcgctcgcttgagcgcgcgcccccaaccccgcccgccgcgcccgccggagctcccgcccctagcctcgcccaccgcgctcgcacccctaccgccgccgctgccgttttgcccgggtggaggggcgcccgccggaggaggggtgtcgggatggcgtccacgttcacgtcgcccttcgatgagctgcacgcgcgcgagatttctgtacatggaccctccaaggtgagccagccaccgtcgcctacctcggggacatcgcccgaacgaccaacctcttttccccaaaaattgaatagcagttggtggggattatcggatgctactgcatgattagccgccaaggatttcgttggtcgcgattttgaggtttctatggaggaaatccactgcccgttatcatgtattgtttgtaatttgatatctgatgggctcaggagtaagatatgggttccagtaaacggtttgtcttattatgaccacctcctgtggtaggctcattgct

SEQ ID NO: 97388 - DNA, 327 bp, Zea mays
  unsure (1)..(327): unsure at all n locations
  Clone ID: MRT4577_20332C.1
tntatagtttttttttttttttttttttttttatgtgtgctttttttttttttttttcggaatttgacattactgatgttacattttgaaacacaacaacccctaaaaaaacccaacttcggaaaagggccaagggtaaaaaaacgggggcaccaaaaggggcatgggggcactatttcaaagcccgaaaaaaaacaaattgaaggcactttaaggggggggcttctctaaagaccgacaaaaaaaaaacagggctcgaactgaaacccgataaaagtgtagcctcgtgatggggaaaaagggcatgttactggggggcaccaaaaa

SEQ ID NO: 97389 - DNA, 732 bp, Zea mays
  Clone ID: MRT4577_20333C.1
agcttcccggagcggaggtcgaaccatcaccaaacccgagccccgaccgcccacctcgccgtcgccgccgcaggcgatcagccgccgccgcactaatccctgccttgtccttatcataaaaccgcggcgctggagctctgatgcttcccaccccatggtcttccacatttccctcgcccgccactggcttcctccttctccttgccctcctccccgtcgcatcggggacctcagtccctaccctaggaggtttcgatcgtggagaggcggccggcgcggacgcatattcgatccttacgtttcacgactacacgccgcctccgccccccgttctgccgccgccaccggcggccccggcggcgacctgcgcgggggacctccacggcgtgggagaccttgacacccagtgcgtggtccatgagtcggtgaggctgggtggtggggtgttcatcagtggcaacggcagcctcctaatccttgatggcgtcgcggttacctgcgagcggcctgggtgcgtcgtctctgccaacctctccggcgatctcctcctcgggaacaggtcccgcgtcgtggccgggtgggtttccctcgcggcggccaacatcacactcggcgaggacgctgttattgacaccaccgcgcttggcggtgacccgccggaccagaccagtggtgtacccactgggacgtatggggatggcggtggacatgggcgccgtggcgccagctgct

SEQ ID NO: 97390 - DNA, 386 bp, Zea mays
  Clone ID: MRT4577_20334C.1
cgttgctgtcgacataatataatgtctcctcatgcataattatctatggacacactgtaaattttatattgatttttcactcagtactttctaaacgtcagcatctaattggacaacatgcagcttctatacccaaaactggcatgctatcaatgcaacctgctatttttccatattgatagatgatagacaagatatacagcttcgtttttttcgcacaatgtctaactgaagctgacttggaaaacctacagcttctatccaaaataggtatgtttgcaatgcaagccactattttccatattggtagacaagatacacaccttctattttctttgcacaaaatctgataattgaagaaaaaaacaaatctagcgacagcaacg

SEQ ID NO: 97391 - DNA, 373 bp, Zea mays
  Clone ID: MRT4577_20335C.1
tccgtccacgcgttccgaaaaaaaaaaaaaaaaaaaaaaaaaaaaaaaaaaaaaaaaaaaaaaaaataaaaaaaaaaaaaaaataaaataaaaaaaaaatgcaaaaaaaataaaaaataatttagggggcggctcgttttaatggattcaccttttcttttccctcgtttgcactgttttaaacttttttttttgggaccttaatttcatttgctgggctgcctgttttacaccgtttggatttggttaaaaccagggcgttacccattttatttggctttcaatcacttccccctttttgccttttgggtttttgccctgtagggcccgcctcaattcgccctttccaaccttttttacaccctgattggca

SEQ ID NO: 97392 - DNA, 868 bp, Zea mays
  unsure (1)..(868): unsure at all n locations
  Clone ID: MRT4577_20336C.1
ccgggnacagacaacgtccaccttttgcctccttgcgatctcgccaaagaaagcctcggcgaatcttatcaatagcttcgagagcccaaactggtaggtcaactgtcatggctaaatatataaccatccctgtgagtacagcttggacctgaatttcttcctgcttttgtcatcaaatcagccttctacccttgtagctgattggcattttatcaatgattggctgcacttgacccttagtaagccttttgatagacaattacagtctcaaataacggcatgggaattcagccacctcacaaggcatcaaattctgtagcagggccaaatcttgttcttcacatcttattgggaataaactgcttttctggacactagtacgcagtcctgatgcctacccaaataaatcgataatatccaccacaaccttgatttccatagctgtcggcccaaggaaaatcaccacatcaccagcgtataaagaaaaccggtgctgcaccatccttgaggcaagggggttgtaacagattttcttgctgaggaaatcaatagcagcccaaaaattatgtccctccaaatttgctcaaatcccaggtgttgcaagacttctagaagaaagggccatgaaactgaatcgaaggcctttgaaatatcaagtttaaggaggagacgaggctgtttttgctggttaaggaaacaggttgtttgttgcaccaacatgtaattgtcctgtataaagcggccttttatgaaggcactctgattaaaagaaaccatgccatgtaacctgctggccaaacgattggcaaagatttttgtgattagcatagcaaaactgtgcacaagacttataagtctaagatccttt

SEQ ID NO: 97393 - DNA, 477 bp, Zea mays
  Clone ID: MRT4577_20337C.1
aaaaacgggaaaaggaacctcttatttcgggggggccccctacctcatccaaaaaactttattattgaattaccaccaaaaagcaatctaaaagaagggccccccccatgatgggttggtgggaggaggctgctgggtttgccaaaacaaggtggacaaagggcaacaattggtgtaattgaaaaaggggtgcggggttagccccaaactgctggtaaaaaggcaacaactgttgctgggtcaaaaaagaaacacggcttgctgcaactagctggctaaaagggaaaaaaatttgctgctgcaaaaaaacagcggggttcaaggcggccaattggttaaaaggaaaaaattgttgttgatgaaaataggcaaaacctacccggctgaaagggaaaaattggtgccgcaaataaacagcagggttcaaggtaaataggtggttgaaaggaaaaaattgttgttgctgataatagggaa

SEQ ID NO: 97394 - DNA, 346 bp, Zea mays
  Clone ID: MRT4577_20338C.1
aaaaacgggaaaaggaacttcttatttcgggggggccccaaacctcatccaaaaaactttattattgaattaccaccaaaaagcgatctaaaagagggcccccccaatgatgtgttgttgggaggaggctgctgggtttgccaaaacaaggtggacaaagggcaacaattgttgtagttgaaaaaggggggcggggttacccccaaaccgctggtaaaaaggcaccaactggtgctggggcaaaaaagaaacacggcttgctgcaactagctggctaaaggggagaaagatttgctgccgcaaataaccagggggggccagggcggccaattggttaaaaggaaaa

SEQ ID NO: 97395 - DNA, 525 bp, Zea mays
  Clone ID: MRT4577_20339C.1
tcgagcggccgcccgggcaggtgctgttttttgcttttttttttttttttttttttttttttttttttttttttttttttttttttttttttttttttttttttttttggattaaaagcttgttactcccaattttaggaaaaggaattttcgaacacccttggggaccaatttcacattaaaatttggaaatggaactttttatttttggggggccccatacattatccaaaaaactttatttttgaattacaactaaaaatcaatctaaaagagggcccccccaatgatgtgttgttgggaggaggctgctgggtttgtcaaaacaagttggacaaagggcaacaattgttgtaattgtaaaagggttggggggttagccccaaactgcttgtaaaaagggaacaactgttgctgggtcaaaaaggaaacacaacttggtggaactagctcgctaaaagggagaaaaatttgctgctgcaaaaaacagcggggttcagtggggccaattggttaaaaggaaaa

SEQ ID NO: 97396 - DNA, 171 bp, Zea mays
  Clone ID: MRT4577_2033C.1
gtgtcgagccgagtcggctcgaggtcctcggccgtcgtgtgtgtgtgaattggcgggtccccggatgccggagcgctcgtgcggaccacgaggaggaggagagagagaggcagggagccctagccctgccctgcacgccggcgtcgccagggttagggtctccccggggcc

SEQ ID NO: 97397 - DNA, 409 bp, Zea mays
  Clone ID: MRT4577_20340C.1
aaaaacgggaaaggaacctcttatttcgggggggccccatacatcatccaaaaaactttattattgaattacaaccaaaaagcaatctaaaagagggcccccccaatgatgggttggtgggaggaggctgctgggtttgtcaaaacaaggtggacaaagggcaacaattggtgtagttgaaaaaggggtgcggggttagccccaaaccgctggtaaaaaggcaacaactggtgctgggtcaaaaaggaagcacgggttgctgcaactagctggctaaaagggagaaaaatttgctgctgcaaataagcagcggggttcagggcggccaattggttaaaaggaaaaagttgttgttgatgaaaataggcaaaaactagccggctgaatgggaataggtggtgccgcaaaa

SEQ ID NO: 97398 - DNA, 496 bp, Zea mays
  Clone ID: MRT4577_20341C.1
aaaaactgggaaaggaactttttatttctggggggccccatacctcatccaaaaaactttattattgaattaccaccaaaaagcaatctaaaagagggcccccccaatgatgtgttgttgggaggaggctgctgggtttgtcaaaacaaggtggacaaagggcaacaattgttgtaattgtaaaaggggtgcggggttagccccaaaccgctgggaaaaaggcaacaactgttgctgtgtcaaaaaagaaacacgggttgctgcaactagctggctaaaagggagaaaaatttgctgctgcaaaaaaacagcggggttcaaggcggccaattggttaaaaggaaaaaattgttgttgatgaaagtaggcagtacctacctggctgaaagggaaaaggggttgctgcaaataaacagccggggtcaatggaaatagttggttgaaaggaaaaaaatgtgttgcttatagtagggaaaaaggttgccaaaactacttg

SEQ ID NO: 97399 - DNA, 473 bp, Zea mays
  Clone ID: MRT4577_20342C.1
aaaatctggaaatggaacctcttatttctgggtggccccatacctcacccaaaaactttattattgaattaccactaaaaagcaatctaaaaggagggcccccccaatgatgtgttgttgggaggaggctgctgggtttgtcaaaacaagttggacaaagggcaacaattgttgtagttgtaaaagggttgcggggttacccccaaaccgctggtaaaaaggcaacaactgttgctgtgtcaaaaaggaaacccggcttgctgcagctagctggctaaatgggaaaaaaatttgctgctgcaaataaaccgcggggttcagggcggcccattggttaaccggaaaaaattgttgttgatgaaagtaggcaaaacctacccggctgaatgggaaaagttgttgctgcaaataaccaccagggttcaaggtaaatagttggttgaatggaaaaaaatgttgttgctgatagtagg

SEQ ID NO: 97400 - DNA, 533 bp, Zea mays
  Clone ID: MRT4577_20343C.1
aaaatctggaaaaggaacttcttatttctggggggccccatacatcatccaaaaaactttattattgaattacaaccaaaaagcaatctaaaagagggcccccccaatgatgggttgttgggaggaggctgctgggtttgtcaaaacaagttggacaaagggcaacaattgttgtagttgaaaaaggggtgcggggttagccccaaactgctggtaaaaaggcaacaactgttgctgtgtcaaaaaggaaacacggcttgctgcaactagctggctaaaagggagaaaaatttgctgctgcaaaaaaacagcggggttcaaggcggccaattggttaaaaggaaaaaattgttgttgatgaaagtaggcaatacctagctggctgaaagggaaaagttgttgctgcaaataaacagcagggttcaagggaaataggtggttgaaaggaaaaaattgttgttgctgatagtagggaaaaaggtttgccaaaactacttggttgatcacaggtagcacgagttgctgcaactgct

SEQ ID NO: 97401 - DNA, 247 bp, Zea mays
  Clone ID: MRT4577_20344C.1
ttttggggaatattaacaggtatgtgggcttatttaacagcaccctattatgactatatcgactatttccacaaaactgatgggtaaaacaacggcaggtcagacacctgcggaaacgctaattcctcaacggagcacaggacgtgctcctaggatctacaagactacaggctgacaatttatggatggcttacatgtccactgacctctgcaaagaccatggctctacatgagaccaccaacccat

SEQ ID NO: 97402 - DNA, 435 bp, Zea mays
  unsure (1)..(435): unsure at all n locations
  Clone ID: MRT4577_20345C.1
gggggggggggagaaaatatggcctcgtctagaccatgggctagggaatctggtatgggcagaccgtctggttcagatgagttttcttttttattacccaagctttggggggggggaacttttgaccaaatggttgcgtggtccagggggtctcaggcaaaggacattgctgctgtctatcgttgtgatggcagtggtcttccatanaccacctcaggctctgtttggaacaagtcttacctaatttagacaacctttcccactgtcctactaagtgcccctggcatggtcaattctcataaatgctgatccaagacagactgtacattcaaccggaccttagaatttgctgtgccatggcattaatggatgtttctgaggtcctgattaaatacccaagaattggaacctgggaattttgctggtactctgaaa

SEQ ID NO: 97403 - DNA, 317 bp, Zea mays
  Clone ID: MRT4577_20346C.1
ccggtcgcccccgtccgcccacctcggacctgcggacgcgtggtttttgttttttgtcgaaccaaagtctcactcttaattaattgaactgatatatattgggtcctgtaacaaacactgatttgttgagacacgattaatatcgtgggggtaacttgctctttttggcacagccttaaagaaaaaaaatcatctggccggacgcaattgccattccttttaacgcttgtttcaaacaccagatttttcaggccgtggtctcagagggggaccgaatctcctagcgtctcccgtgtgcgccggcttcttgcggcgtc

SEQ ID NO: 97404 - DNA, 286 bp, Zea mays
  Clone ID: MRT4577_20347C.1
acgaggtatactctggcgctcggcctctgttggagacgacaatgaaaattgtggttgagggtctgttctgacatctttctctagtgttattcatgagaattagaccagcgattttagattgttggatgcgaatggtttttgtcaactgatgcttgagcttgagtattgtgagactgtactgcacacgtacttctcacctgaggcgcaacatgctatgaaatctttacatgagaatttgctggaaaaggcctgtgaaagtgttgcagaagccatggaaaatcctgga

SEQ ID NO: 97405 - DNA, 1086 bp, Zea mays
  Clone ID: MRT4577_20348C.1
ctcgaggccggccgggctagcatctccgcagtccctctcctctcgaggtggcggcgctccctcctgttttcctcttcttcttcctgtactatatagcctcccctcgcaaatcgtcactgacgagtgatgtcattccgcttgcttgattgttccagatattcgcagttgaccgggtcctcggagcacgatgaagtttgttgctgcctacttgcttgctgtcctcgctgggaacgccagcccctccgctgaggatttgactgccattctggagtcagttggctgtgaagttgacaatgaaaggatggaactcctgctgtcccaactgagcggtaaggacatcaccgagctcattgccgcgggcagggagaagtttgcttcagtcccatgtggtggcggtggtgtcgctgttgcggcagcttcacctgctgctggcggagctgctcctacagctgaggcaaagaaagaagagaaggtggaggagaaggaagaaagcgatgatgatatgggcttcagcctcttcgactaggctgcacagtcatcacagtattgtttcgggcagtgaaaccagaggaaaaccagagtcatgtttagattttaaccttgttttatgttggaaagtactgctacttgtctttatatttggtaattcagccgtaggttgctatgctggttgggatttactcgtgaaccagagtttttctatcttatatcctgaatttgttatcccaaaaaaaaaaaaaaaaaaaaaaaaaaaaaaaaaaaaaaaaaaaaaaaaaaaaaaaaaaaaaaaaaaaaaaaaaaaaaaaaattaaaaaaaaaaaaaaaaaaaaaaaaaaaggtccctgggccgaaaccaccttaggggaaaattccaaaaaatggggggccgttattagggaacccaacctgggaccaaacttgggggaaaaaagggcaaaagttgttcccgggggaaaatggtaatccgttaaaaattccaaaaaaaaaacaacccgaaaccaaaaagggaaaacccgggggggccaaaggagggagcaacctcacttaaatggggtggcgctcattgcccgttttcaagcgggaaaa

SEQ ID NO: 97406 - DNA, 812 bp, Zea mays
  Clone ID: MRT4577_20349C.1
gcacgagagtccctctcctctggaggtggcggcgctccccccgtcttcttcttcttcttcttcctgtactatatagcctcccctcgcaaatcgtcactgacgttcattccgcttgcttgattgttccaggtattcgcagtcgaccgtgtcctcggagcacgatgaaggttgttgctgcctacctgcttgctgtcctcgctgggaatgccagcccctccgctgaggatttgactggcattctggagtcagttggctgtgaagttgacaatgaaaggatggaactgctgctgtcccaactgagcggtaaggacatcaccgagctcattgccgcgggcagagagaagtttgcttcagtcccatgtggcggcggcggtgtggctgttgcggcaggtgcacctgctgctggcggagctgctcctgcagctgaggcaaagaaagaagagaaggtggaagagaaggaagaaagcgatgatgatatgggcttcagcctcttcgactaggttgcacagtcatcacagtattgtttcgggcagtgaaatcaaagggaaaccagagtcatgtttagattttaaccttattttatgttggaaagtactgcaaagactgctaattgtctctgtatttggtaattcagctgtagattgctatgatggttgggatttactcgtgaaccagagtttttctatcttatatcctgaattggttatcccaaagttttctggctttttaaaaaaaaaaaaaaaaaaaaaaaaaaaaaaaaaaaaaaaaaaaaaaaaaaaaaaaaaaaaaaaaaaaaaaaaaaaaaaaaaaaa

SEQ ID NO: 97407 - DNA, 259 bp, Zea mays
  unsure (1)..(259): unsure at all n locations
  Clone ID: MRT4577_2034C.1
ccaagttgagtttttatatatatttttaaaacaaanaaacattnaccaattaatacattttttcaaaaatctcattaatattaaaccacctaacacttttcacatatcctaaacccatttccttttaccccccaaacttaattacccaactaaccaaacacccctaattaaacctatcctacactcactccacacaatacctatataaaaaatccttcactaaaactttgactcctttccaaccaccacatcccaccat

SEQ ID NO: 97408 - DNA, 498 bp, Zea mays
  Clone ID: MRT4577_20350C.1
tggtcgggatcacactaaactccaacatcatcttcgccaacctaacatccaaactccaacccaccaaaccacccaaccaaatccttcaccatgaccgacgccttccgcaaagacacccacaccaagctcggcgagtccctgcaaccccaatccaccaaatccacaggcacaaagatcaaagagtccctgacgggcacagccgacaaagtagcccgcgaagcgcaacccgactcatccaagacgcacacgcagtcgaccatggacaagctgggccgctccaaggacaacaacgtgcacggctccacgggcggcagcatcgtggataagacgaagaatgcattgggattgggacatcacggtaacactcacagtggcttgtaaaagaaaatgattgagtcgggggggaaagtgcagacggaggggggggggggaggggggtattattagatactttctctcctctttccatagtaatgtcctaatgcggtaatgaatatc

SEQ ID NO: 97409 - DNA, 432 bp, Zea mays
  Clone ID: MRT4577_20351C.1
gcgccagcgtcggtcttctcggcctctcgcgcggcgccctacgtcaggccagatgtggactcgatcgtcagaacgacgcagatcaccccagtcgttcacacccaagcaaatagcaccacttatacccctaaaaagtacatcagcagctacgtctattgcggtgcagagatcctcctgcgggtacgcgtgaagccgatgcgtaactccctgacgcaatctacgagtcgcgcgcgttctggagcttgcatacaaaaccgcagccgagcacatgccaccaattcgatagaagggtgactgcaagaacatgatccggcaagaacagcaagatctgatcaatcgatatgaatccaaatctgaccatctcgttcggcttgaatgcctgcaggtctacctcaccctgtgcacggagctggcctcggcggcggcggacac

SEQ ID NO: 97410 - DNA, 512 bp, Zea mays
  Clone ID: MRT4577_20352C.1
cctcgaggccggccggggttatttcagtcgccgtagcagcgccgcctccgccgccgtggggaggtagcatctaggcccattccgccgcctccatctccggccagcaatggcttcggcggtggagcggcggagggaggagcacgcgcggagatcgcgttccccagcacggggcagggagcggaggggaactcctccactaaggttgtattccccttatcgtaagaaggtttacgtctgcttatgatcaacgattcatgatattgatgtactagcagtcctccgcatgcttcttttacaactggttctatcaaccatatcctccaccaaatactgctgaaatacatgactactttctaggtttatattattgtcgacccttaatattttatcggccattgtatactacgttatctatgccgtcaattccgatatgtatatgctgtgtatcgaggactactcatacatctacttgcttccattttctcattgtacagcctcaacgtcctgtacag

SEQ ID NO: 97411 - DNA, 831 bp, Zea mays
  Clone ID: MRT4577_20353C.1
cattgggtacctcgaggccggccgggaaggaatatgccccactgaagcccagaagctacctaaacttccagccgtctcctccgcacgcgaaaaccctagcagctccgtagtccctctcctctggaggtattcgcagtcgaccgtgtcctcggagcacgatgaaggttgttgctgcctacctgcttgctgtcctcgctgggaatgccagcccctccgctgaggatttgactggcattctggagtcagttggctgtgaagttgacaatgaaaggatggaactgctgctgtcccaactgagcggtaaggacatcaccgagctcattgccgcgggcagagagaagtttgcttcagtcccatgtggcggcggcggtgtggctgttgcggcaggtgcacctgctgctggcggagctgctcctgcagctgaggcaaagaaagaagagaaggtggaagagaaggaagaaagcgatgatgatatgggcttcagcctcttcgactaggttgcacagtcatcacagtattgtttcgggcagtgaaatcaaagggaaaccagagtcatgtttagattttaaccttattttatgttggaaagtactgcaaagactgctaattgtctctgtatttggtaattcagctgtagattgctatgatggttgggatttactcgtgaaccagagtttttctatcttatatcctgaattggttatcccaaagttttctggctttttaactattttgttgtttaaaaaaaaaaaaaaaaaaaaaaaaaaaaaaaaaaaaaaaaaaaaaaaaaaaaaaaaaaaaaaaaaaaaaaaaaaaacaacaccccccccc

SEQ ID NO: 97412 - DNA, 886 bp, Zea mays
  Clone ID: MRT4577_20354C.1
caatatgccccactgaagcccagaagctacctaaacttccagccgtctcctccgcacgcgaaaaccctagcagctccgtagtccctctcctctggaggtggcggcgctcctcccgtcttcttcttcttcttcctgtactatatatatatagcttcccctcgcaaattgtcactgacgttcattcggcttgcttgattgttccaggtattcgcagtcgaccgtgtcctcggagcacgatgaaggttgttgctgcctacctgcttgctgtcctcgctgggaatgccagcccctccgctgaggatttgactggcattctggagtcagttggctgtgaagttgacaatgaaaggatggaactgctgctgtcccaactgagcggtaaggacatcaccgagctcattgccgcgggcagagagaagtttgcttcagtcccatgtggcggcggcggtgtggctgttgcggcaggtgcacctgctgctggcggagctgctcctgcagctgaggcaaagaaagaagagaaggtggaagagaaggaagaaagcgatgatgatatgggcttcagcctcttcgactaggttgcacagtcatcacagtattgtttcgggcagtgaaatcaaagggaaaccagagtcatgtttagattttaaccttattttatgttggaaagtactgcaaagactgctaattgtctctgtatttggtaattcagctgtagattgctatgatggttgggatttactcgtgaaccagagtttttctatcttatatcctgaattggttatcctaaagttttctggctttttaactattttgttgttacatgttgatattgctttgttcatccttatccacctactatggctatttgcaatcacaaaatcacttg

SEQ ID NO: 97413 - DNA, 1040 bp, Zea mays
  Clone ID: MRT4577_20355C.1
gagcatatgcgctgataacattgagaaccaaagttccccaatgaccagtttgactaggatgattctatctcctagcctcttaacatctactaccccatctttaaggcttcttgtctatcaagacgcctaactccattcttgtttgctgcagtccccgtgtaccacaacttgaagcctgtaccttccacttccttcgccttctgtcctttccacttggtctcttgaacgcataaaatatttacccgtctcctcaccgcaacgtcgactatttctcgtaacttaactgttaaggaacctacgttccaactacctacacggaccctagctggctcgactagcttccttacccttcgcacccgccgaggaagatgcaaagacccttgctcattttccactacacccgggcgccgatgtagcgcgccactaaggatgcgacgacccgatccttgctcacttatcaccggctccagatcaagagacggtgcgtcacttaaggggtgacggcccggcccttgctcatttaacaccatacccgggttctgatatggcgcgtcgctaagagggttacgccccaacgattttcaaggaagcctctttgtatctttttggatagttataaaaattctcatatgttaaaaacgctattgaagtgaatttgtaatttaaaaatatattccctgctgcaacctcgctgtcaggtagcaaaatgtgttttaaattattgtttcatttccaaatgcaggaacatatacctgtaacacagcttgtacgagagactgctgctgtcatgcaggagttcacacagtcagggtatgtaactagacttagttatttctatttgcctatttgtgcataaaataatggcatgcactgcctaatttattattattcataaaaacttaagttgatattcatatttatgggaccatctgcatgctcataatactatatgcatttattaatttttttatattctaagtatacccttggaataacactgcattgttttagctgcttataatataaaaaaaaaaaaaaaa

SEQ ID NO: 97414 - DNA, 921 bp, Zea mays
  Clone ID: MRT4577_20356C.1
aagctacctaaactcccagccgtctcctccgcatgcgaaaaccctagcagctccgcagtccctctcctctcgaggtggcggcgctccctcctgttttcctcttcttcttcctgtactatatagcctcccctcgcaaatcgtcactgacgagtgatgtcattccgcttgcttgattgttccagatattcgcagttgaccgggtcctcggagcacgatgaagtttgttgctgcctacttgcttgctgtcctcgctgggaacgccagcccctccgctgaggatttgactgccattctggagtcagttggctgtgaagttgacaatgaaaggatggaactcctgctgtcccaactgagcggtaaggacatcaccgagctcattgccgcgggcagggagaagtttgcttcagtcccatgtggtggcggtggtgtcgctgttgcggcagcttcacctgctgctggcggagctgctcctacagctgaggcaaagaaagaagagaaggtggaagagaaggaagaaagcgatgatgatatgggcttcagcctcttcgactaggctgcacagtcatcacagtattgtttcgggcagtgaaaccagaggaaaaccagagtcatgtttagattttaaccttgttttatgttggaaagtactgctacttgtctttatatttggtaattcagccgtaggttgctatgctggttgggatttactcgtgaaccagagtttttctatcttatatcctgaatttgttatcccaaagtttcctggctttttaactattttgttgttacatgttgatattgctttgttcatccttattcacctactatagctatttgcaatcacaaaatcacttgatggcggtgagcctagagttatcaagctgataaaaaaaaaaagaaaaaaaaaaaaaaaaagcggcc

SEQ ID NO: 97415 - DNA, 178 bp, Zea mays
  Clone ID: MRT4577_20357C.1
cccggcccgacgcactcgtccggccgacactacacataaatcctagagtttaaccatctcccttttcaccacaagggcgagtttgtttctccactgcggatcaaccaccaaacgcctctcaagctccaagatcagccagaaatacccacacctcaatgagaccagcaccgccacacaa

SEQ ID NO: 97416 - DNA, 1043 bp, Zea mays
  Clone ID: MRT4577_20358C.1
agccggccgggcctagcagttcggtagtccctctcctctcgaggtggcggcgctccccccgtcttcttcttcttcttcttcctgtactatatagcctcccctcgcaaatcgtcactgacgttcattccgcttgcttgattgttccaggtattagcagtcgaccggttcctcggagcacgtaagttcctaatcttcgcttcttcttgtgatagtttttcgagttgcctcatgtttaccttgagtcgtctgccgactcgccacatggtcaaggcgcatcgccgtcgatgcccgcccgattctaccttctcgcgtttgattccaccgtcagctgccatcacctgcctttgttcggccagatttctctctcgacgttgtgtggctctgaggacctgagtacgcagatgggcagacgcggcggtgacaccggatgctagggaatgggatgaagtttgttgctgcctacctgcttgctgtcctcgctgggaacgccagcccctccgctgacgatttgactgccattctggagtcagttggctgtgaagttgacaatgaaaagatggaactcctgctgtcccaactgagcggtaaggacatcaccgagctcattgccgcgggcagggagaagtttgcttcagtcccatgtggtggcggcggtgtcgctgttgcggcagctgcacctgctgctggcggagctgctcctgcagctgaggcaaagaaagaagagaaggtggaagagaaggaagaaagcgatgatgatatgggcttcagcctcttcgactaggctgcacagtcatcacagtattgttttgggcagtgaaaccagaggaaaaccagagtcatgtttagattttaagcttgttttatgttggaaagtactggaaagactgctacttgtctttatatttggtaattcagccgtagattgctatgctggttgggatttactcgtgaaccagagtttttctgtcttatatatcctgaattggttatcccaaagtttcttggctttttaacgaaaaaaaaaaaaaaaaaaaaggccccta

SEQ ID NO: 97417 - DNA, 383 bp, Zea mays
  Clone ID: MRT4577_20359C.1
gctggttgtaggtgatttgaggaagaaagccctctgggcgccaaggaggcttaggagcgccagccagggcgatggcggcggctgatgtggagtaccgatgattcgtcgggggacttgcctgggccaccattaacgagtcgggggagaatgccttggtcttctacggggagaggctcgacctagaggtcatcaaccatccggatactgtaagggtccatcctcaccggcatgggcgtctccaagtccacctctccatgctcgacgctatcgagaacatgaacgggaaggagctcgacgggcgtaacatcaccgtgaaccaggcccaatcccgtggcggcggcggcggcggcagccgcggtggctacagcggcggtcgcaggggc

SEQ ID NO: 97418 - DNA, 543 bp, Zea mays
  Clone ID: MRT4577_2035C.1
gccggccgggctgcgataccctgactggtgctgggtggaccgttgacatcgtacgacgagcttctcttgtaccggccaccgtctcacatggtactcagcgcctagcccttgctccatctccatggcatggactgctccatacaggccacgctcggcctccaccttcggcgcccaacgagcaggcgttagggccgcgcagcaccttcctctagagtgctcggctccaaccatggcgtgaggacgctcaagttcgggcctcctctggcctctgctcccatgcagtgaggacacgtgtcatctgaagaggaagctggtacctgcaatctcaagtcccagggcaagaacaggtaccacaggatgatgcgcttggaggatgctgcgatgtgttcgtgagaggtctaggtcgtctcctcccagacaactttgggttgctggaccgtagactccttataatgtaattatttatttagcatacaattcctgttatgcagcaaagatgtgagcttcgatccaaaagaaaacaaaaaaaaaggtccctaaggt

SEQ ID NO: 97419 - DNA, 183 bp, Zea mays
  unsure (1)..(183): unsure at all n locations
  Clone ID: MRT4577_20360C.1
ctaggcatgaggagaaagcgggggtggcgctgctgggtcaagcgagggaacgcaggntngcggcgacaggtcgaacaggtcggatgtgttctcagagaagtgcgaggaggcggaaggagcaagtcgcaggtacatcggaaccaccttcgcggggagcagctatggcaaatgggccggttgtcg

SEQ ID NO: 97420 - DNA, 343 bp, Zea mays
  Clone ID: MRT4577_20361C.1
aaggaaccaggatttataagggccatttaacaaccgcaaggaccccatgatgaacaaggatttacaggggcctttggttgggaaccatttaagccggggaccgatttttccgagttggttttacatacccaaaacgcttatttgggtgggttctttttttctctgcccggggaagggatcaccagaccccaacctggtttgatttgattaccacggtttttttgcttttttatttttcctactattggggatggtggtgatgataccgataccctgggcattgtttccgttaccaggagaagtggggtcgccttgggccccgtatgtagcttaaaacattcca

SEQ ID NO: 97421 - DNA, 443 bp, Zea mays
  Clone ID: MRT4577_20362C.1
aatatgaagttcggttttagtttatataaagaaaaaaaaaaaaagaggggggaccaaaaaaaaaagggggaaaggagaggcaaagggggaaacaaaggggggggggggcacacggacgaacaagagcacaaagacgggcgccaaacaggcagagggggggagcaaacggaggaacgccgggagcaaaaaagggacacacaccaaacaagaccgagggagggcagccaggacggccccgcttattattgggcaaccaccaccacaagccaaatagaaaagaagcaaatccaggggcggcgatcgaggtgaacagcaaacagcaggggacgaacttgcagttgccaccgcagctgcagccgggggcggccttgccggaccccgccgcggccttgacgaactagggcgcggccttcttggggggggccacgccggggaccacgggg

SEQ ID NO: 97422 - DNA, 1151 bp, Zea mays
  Clone ID: MRT4577_20363C.1
cgcgctgcccatccccctccccctcctccttcctcggcagctcgtggcgctccagtccacagaggagaggacacgacacgacgaggggccgggcagcaagctctgctcagtccgttccgcgggccggtcggtcggcgatggcgcggcacgcgggcacggcgctcctggacctggtggcggggcaggtggacccgggcgcgccggggttctggcgcgacttcctggttggcatgctcaagccggcggcggccacggccgtggtggccatggccgtcgggctcagcttctcgcagcgcctggggctcgagggcgagatgctctacgccatcgcgcgcgccttcctccagctctccgccatcggcttcgtcctccagttcatcttcgcccagaagaacgcgctctggatcctcctcgcctacctcttcatggtgacggtcgccgggtacacggcggggcagcgcgccgggcaggtgccgcgcgggaagcgcatcgcctgcgtctccatcctcgtcggcaccggcgtcaccatgctcctgcttgtcctcctcgacgtcttccccttcaccccgcgctacatcatccccgtcgccggcatgatggtcggcaacgccatgaccgtcaccggcgtcaccatgaagaagctccgggaggacgtcaagatccagaggaacctggtggagacggcgctggcgctgggcgcgacgccgcggcaggcgacgctgcagcaggtgaagcggtcgctggtcatcgcgctgtccccggtgatcgacagcgccaagacggtggggctcatcgcgctgccgggcgccatgacggggctcatcatgggcggcgcgtcgccgcttgaggccatccagctgcagatcgtcgtcatgaacatgctcatgggcgcctccaccgtcagcagcatcctctccacctacctctgctggccggccttcttcaccaaggccttccagctcgacgacagggtctttgcagactaagatacctgctggattgtaatgtaaccgagtcccagttgtttgaggtagaaacagagctaacagtttcggtgtctgtggctttcggtgtcactgttgatgctgagttcttggggaggctctcgggcgggtatcgcgcgttggatccccatttgaccaaacagtttg

SEQ ID NO: 97423 - DNA, 807 bp, Zea mays
  unsure (1)..(807): unsure at all n locations
  Clone ID: MRT4577_20364C.1
cgtcgctccaactccccagcgccccggccagacccgccaggtcatcgacacccagtacgacaagactaccctcgaggagctcaaccgccgctttgccaaccagtccgtggagagcgactctgactccgactacgactccgacgagggctccgacgtcccatccctcacctcccgctccaccaactcgagctcgcccagcagtgttagctctggtagcagctgctgcacatgcgagcgctttggcatcacccgctccggcgaccgtgtcaagctcgactgcggaggtgcgcgatgcggatactctgacgactcttccgactgctcgtccgaggacgagtacgtctacgaggagaagaccacccgccgccagggtatcgtcgtccgctcctagatacgtcattccttacaagtgcaaccaacccaacctggacaccctaaccaaccattgtgtcgctccgactttcgcgcgccacctttttgcgccgcgaactgttcaccaaattctttctgtgcatatttatgattacgacttttacttctttcttacttcgttcgacacccttacttcactcttttgggtatttttccacgattatattgttgcgggtattgaagccgctgggggaattttacgtaaaagtgaagagttcttctattgcgctagggctataggacatcatctactgaaccagatgttcatgatcgtgacaaggcacgcttatgtagaattatttacggattcaatcaattcgcatggggctcgtgtgtggaanattaaaaacgaaaaaaaaaaaaaaaaaagcgggc

SEQ ID NO: 97424 - DNA, 166 bp, Zea mays
  Clone ID: MRT4577_20365C.1
gagccattctattatcgcacatggccggcaccttactcatacaatacgaccacagaagatacactaccatggcccaaagcggcccatattcttctggtacaacacatgtttccactaccagggcgacagttcaatccagcagaccacacgctgccgccgtatacat

SEQ ID NO: 97425 - DNA, 877 bp, Zea mays
  unsure (1)..(877): unsure at all n locations
  Clone ID: MRT4577_20366C.1
cattgggtacctcgaggccggccgggatccatgtccatatccattccacttccacccatccccgtggcttctgtctgctgcgaccctgctccactccgtctgcatcacctgtcacggttgtcacctccaccacggctccagctccacccgcgctggtttagggccgctgctgggcgggtgacgagcgcggctgtcggattccgccgagcctcagtatgcgggcagcgggcgcggcctccgcctccgccacaccagccctggcgttccccttgtcttcccctatatatacagatcgagaaataattaatgttaccatgaactcctcaagttaaaacttatcctatatatgccatgagaccacaactgcaactcatgtgtgttgttatctttattggaacaaatggccagacgtatttcatcacggcttcacttgttacaagcatccagaatttcccaaagagcaggggcccaacagtgggcatcctcaaaggatttatgggcctaactagcgccattctgacacaagtttatacagtgatgcacactccagaccatgctgcgcttatcttcatggttgctgttggtccgtcgctggttgccattggcttgatgtttgttattaggcctgttggtggtcacaggcagatacggccatctgacaagaacagcttcatgttcatctacactgtatgcttgctcctcgcctcataccttgtcggtgctatgcttatccaagatttcctgcanacaagctatgatgtggttggttttctgactgtgattctgttcgtcctccttatttcacaatcgcatccctgtgattgtgtcgttcatgccgaaaaagctcagcatctcatggagatgctctcttatctga

SEQ ID NO: 97426 - DNA, 735 bp, Zea mays
  unsure (1)..(735): unsure at all n locations
  Clone ID: MRT4577_20367C.1
acccatccccgtggcttctgtctgctgcgaccctgctccactccgtctgcatcacctgtcacggttgtcacctccaccacggctccagctccacccgcgctggtttagggccgctgctgggcgggtgacgagcgcggctgtcggattccgccgagcctcagtatgcgggcagcgggcgcggcctccgcctccgccacaccagccctggcgttccccttgtcttcccctatatatacagatcgatgtgtgttgttatctttattggaacaaatggccagacgtatttcatcacggcttcacttgttacaagcatccagaatttcccaaagagcaggggcccaacagtgggcatcctcaaaggatttatgggcctaactagcgccattctgacacaagtttatacagtgatgcacacaccagaccatgctgcgcttatcttcatggttgctgttggtccgtcgctggttgccattggcttgatgtttgttattaggcctgttggtggtcacaggcagatacggccatctgacaagaacagcttcatgttcatctacactgtatgcttgctcctcgcctcataccttgtcggtgctatgcttatccaagatttcctgcaaccaagctatgatgtggggntggttttctgactgtgattctgttcgtcctccttatttcaccaatcgcattccctgtgattgggtcgttcatgccggaaaaagctcagcatctcatgga

SEQ ID NO: 97427 - DNA, 3489 bp, Zea mays
  Clone ID: MRT4577_20368C.1
gggtccctcgggccggccggattcccggccgggatccccgtggcttctgtctgctgcgaccctgctccactccgtctgcatcacctgtcacggttgtcacctccaccacggctccagctccacccgcgctgccaccgcctcagctcgtcagggccgctgctgggcgggtggcaagcgcggctgtcggattccgccgagcctcagtatgcgggcagcgggcgcggcctccgcctccgccgcaccagcactggcgttccccttttcttcccctatatatacagatcggcctgattttactttttttttgacatggctccatttatgcttattccctcacacccaaaattagtctccactctcgcattttgaaagaaaattgtatcaatatttctatcttcaaatagatttactacgaagatacatgacgtgattaatctagtgatgcttgtctgatatcataaatattactagtatgttttggtatagatttggccaaagttaatattgtttggcttatcgaagtgcgggatggagacttattttaggacaggacggagggagtacatcggagctgctcttgtgtcatgactgtgccacattatgccagaggggagtaaactatgcgagttttccattctgaaaacaagtgattcaacatatttcacgccacaccataaacggacacctcaaagttatgattttgctgtggatggctggcaactggtatcagcacaaaatctgattaccatcattatttgcatgtttccagctcaactgcaaatgcagtgcacatcatttgtttctgccttgtcttgcattattgtttttgccccccccccccctaacatcgctctggtttgatttcagagaaataattaatgttaccatgaactcctcaagttaaaacttatcctatatatgccatgagaccacaactgcaactcgtacgaataaaattgatatccttttacgttattctagtgttgtttttactcatccctcatattcaaatgaattgaacaaaagtacagaactttattgtttattttctcaacctaacatgcaacatttcatcgttttcgtatccagatgtgtgttgttatctttattggaacaaatggccagacgtatttcatcacggcttcacttgttacaagcatccagaatttcccaaagagcaggggcccaacagtgggcatcctcaaaggatttatgggcctaactagcgccattctgacacaagtttatacagtgatgcacactccagaccatgctgcgcttatcttcatggttgctgttggtccgtcgctggttgccattggcttgatgtttgttattaggcctgttggtggtcacaggcagatacggccatctgacaagaacagcttcatgttcatctacactgtatgcttgctcctcgcctcataccttgtcggtgctatgcttatccaagatttcctgcaaccaagctatgatgtggttgtttttctgactgtgattctgttcgtcctccttatttcaccaatcgcaatccctgtgattgtgtcgttcatgccggaaaaagctcagcatctcatggaagatgctctcttatctgaaccattgacaggagaggcaagcagttcacgacaaaaggaggatcaaccagaggtcattttaagtgaggtagaagaggagaagtctaaggaaactgattcattgccgccatctgaaaggagaaagaggattgcggaattgcaggccaagctagtggaagcagcggcaagaggtggggttagaatcaaaagaaggccacaccgaggggataacttcaccctgatgcaggcattggtgaaggctgatttttggcttatttggctatcacttttgcttgggtcgggatcagggctgacagtgattgataacctgggtcagatgagccaggctattggttataaaaatgcacatatctttgtgtcactggtgagcatatggaactttcttggtcgtgttggaggtggctacttctctgagatcattgtcagggaacgtacatacccaaggcacatagcattggcagttgctcagatcgtgatggctgctgggcatttcctctttgctatggcttggcctggaactatgtacattgcgagcttgctggttggacttggatatggagctcactgggctattgtgccagctgctgtctccgagctttttggtgtaaaacactttggtgcgatgtacaattttctcatactagcgaaccccgcaggatccctcatcttctcagagctaattgtcagcaacctctatgaacatgaagctgagaaacaagctagccaacaccagatgtcagcattgctgtctccacgattgcttcgtgataccggctttcttgcagatgatgcactcaagtgtgaagggcctgcttgcttctttttcagctctctgattatgtcggtgttctgtgctgttgccgctgggttgagcctcctcgtcgttcaaaggaccagacaagtttatcctcgcctctacagttctgtccgcacttgagattctccaattctccatggatgggaagctcaaatcctcgtattctatgtccgtttattcttgcatacatatgcacaaagataagtatgtgaataaattctcaaatcttttcctaagctggtattgtaaaaacagatattcttgaatggactgtcccttgtgacttgcgtatggattctggcacttgctgtcctgaaaaaaaacaatccctctccttttttttgaagcaattactgtatggagttcctacaatatttttctattaaatatgggtatgtacaagtgtaagtattcaaattacaaggaaatcaactataaacatgatttaattttggctgctatttggggttttactcttcatgttgttccatgtaccataatttttgcatatatgtgtcgtatacacacaaaattaaagtttgcatgtatattctctaatcatttcagaggctttactgcacgaactgctgtccccaaatagaaatttgcacgcctcatttgtcggatagacaggctgtagctgaagcctgaagcttggaccatgaattctgtaatgaaaaaagccagaagaatcccttgtgtttcggttgacattttgttttttacaaccaaacataggcggggtggactgcctcgttcccggtttataagctttcggcgctaagtattggtttgtcccccaagtgtatacccatttgtcataatggtcaaaaagttgttgtctttataaggattcaaacaggatttagtattgctcataagctatttttgacattggggtgtgaaacaaattgtgagggtattccccatcttttgcatgtattattgtaaaacccttattcctgacaaaaaaaaaaagctcagggaaagcatattcatgcaaaaaaaaaaaaaaaaaaaaaaaaaaaaaaaaaaaaaaaaaaaaaaaagaaaaaaaaaaactcgagaaaaggg

SEQ ID NO: 97428 - DNA, 569 bp, Zea mays
  unsure (1)..(569): unsure at all n locations
  Clone ID: MRT4577_20369C.1
ggtaccctacgcgggccgtgccggnaaaaaaaaaaaaaaaaaaaaaaaaataaaaaaaaaaaacacctccgccagcgctagggttttatttttccatcgctgttgctggtggttgttaccttctcctctctctcagtcgtctccctcgcagctgcagtcgccgtagcagatcttctctctaaccctaccggtcaacagctgcttgctcgggacgggaaccggagttggattgcgatggcgctgcagtacgtggaggcgcagcggcaggcgcgcccggacctcgccgactggtatgcttccctcgccgacctctaccagcagaagctatggcaccagctcaccctcaagctcgaccaattcttacagctccaggccgcacagaccggagacactatcattcagctctacaacaatttcatcactgattttgagaccaagattaatctgctcaagcttgcccattttgcgggtgatagcttctcgccagttccctgattaggttgctgcaattaccttcttagaggggtgatcacaaagctgcgtgatacaagagagtcacggattaatga

SEQ ID NO: 97429 - DNA, 128 bp, Zea mays
  Clone ID: MRT4577_2036C.1
gcagtcggcagcaaactgaatggcgcttctcgctgtggagcttcggagattccttcttcggcaaattgtctgctgctaggcggtcctgccttctatcgcgtggcgcggtcgttctgctagctcatccg

SEQ ID NO: 97430 - DNA, 225 bp, Zea mays
  Clone ID: MRT4577_20370C.1
cgcaattggagaggcgactcgagatgccggctcgcggcaggatccattccagtggataacgagaagactttgatctcacgagaccaaagacaacgaacgaagaactgatgggtgccgcaggaggagggggaggcgtcgagattagtgcttggatgttgttttccagtgcttgtgtttagtgttgagaatgatgaggagtcaggtgggggatgtaaactctgtggg

SEQ ID NO: 97431 - DNA, 325 bp, Zea mays
  unsure (1)..(325): unsure at all n locations
  Clone ID: MRT4577_20371C.1
ctcgcgggcgctggtggtcgagcgttttgttgcgttgatcgagcggcacattgcgcgcttgaggcaaataatgggcataggatgtttcctgtagaaaattggaatgcgcttagaaaactacacaacaggagatgggcgagttaaagtgtaagcctgtggtgcataatgagagagctatcttagatgaattgggtagggctcactgccaaatgaacaggagggggatttgtctggctgacatgattaatgacattaaacagtgtgcagagagaggtggtttgagtatgtganggtattaagcttatttgaaaagtaagtgggtgaa

SEQ ID NO: 97432 - DNA, 1784 bp, Zea mays
  Clone ID: MRT4577_20372C.1
cctcgaggccggccgggccggggtcgtcgggcttctcctctttcttgcactttcagccgagtccagacctgcggaatatagatctaccaatcgaccgacccggatccttcccttccgtctgacgtcgtctccctcgcagctgcagtcgtcgtagcagatcttatctcaaaccctaccgaccaacagctgcttgctcgggacgggaaccggagttggattgcgatggcgctgcagtacgtggaggcgcagcggcaggcgcgcccggacctcgccgactggtatgcttccctcgccgacctctaccagcagaagctatggcaccagctcaccctcaagctcgaccaattcctacagctccaggccgcacagaccggagacactatcattcagctctacaacaatttcatcactgattttgagaccaagattaatctgctcaagcttgcccattttgcggtgatagcttctcgccagtaccctgataaggatgctgcaattaccttcttagagggggtgatcacaaagctgcgtgatacaagagagtcacggattaatgaaccgattctctatgtgaagatgcaaattgcagctattaatcttgagaaaggaaaccaaaaagagtgcaagaattcgttggaggatgggaaaaccaccctggatagtatgactgatgtcgatcccacagttcatgctagcttttactggatatcatctcaataccacaagtcatgccaagaatttgcagagttctataagaacgctcttctctatctggcctacacaactgtggagtctctatctgagtcattcaagctagacttggcttttgatctttctctagcagccttgctgggtgataacatttataattttggagagttattagctcacccgattatcaatagtcttattggaaccaaggtggagtgggtttatcatatgttacaagcattcaacacgggcaaccttgctttctaccaagaactttgcagggttcacaatgctgctcttactgcacaaccagctttggtgcaggatgagaggaagctgcttgagaaaatcaatattctttgtctgatggagataatctttagtcggccatctgaagatagaactattccattaagtgttattgctgagcagactaagctttcaatcagtgatgtggagtatctccttatgaagagcctctcggttcatcttattgagggaataattgatgaagtggacagtacagttcatgtttcgtgggtccagcccagagtgcttggaatcccacaggttaaggctttgcgcgaccgcctggatgcctgggttggaaaggtgcatactacattgctttcagttgaggcagaaacacctgatcttgttgctgcctaatttagcacctgttacacttccgcgagaggcttggtcagcaaggtgatgagatgcattgtgacacttgtagtcattttctggataatgaacctgctgccctgagcgtttgtcagcctgcgtcctgatcggggcctgtaatttcttttttgatgtcctctggacatggatgggtacaacttcacgcagtgtcacggaaacgggaccaaatgattgaaatttttatactagtagggtgttactgtagttttcccagttgaatttaatttgtaactgagtttgtactctgctggacatggatgcaggagaatcttgctggaaaaaaaaaaaaaaaaaaaaaaaaaaaaaaaaaaaaaaaaaaaaaaaaaaaaaaaaaaaaaaaaaaaaaaaaaaaaaccccaaaaacc

SEQ ID NO: 97433 - DNA, 2164 bp, Zea mays
  Clone ID: MRT4577_20373C.1
ccggccgggccgggctacactgagaccgcagagacaggcgtcttcgtactcgcctatctccgcgacccaaagcgttcccccttctcccattcttctctcatttctcaccaccgccgccgctaccccctttcgacaacaccatgagggagtgcatctcgatccacatcggccaggccggtatccaggtcggaaacgcgtgctgggagctgtactgcctcgagcatggcattcaggctgatggtcagatgcccggtgacaagaccattggctcgggccggggccgtcgtcgggcttctcctctttcttgcactttcagtcgagtccagacctgcggaatatagatctaccagtcgaccgacccgtcctgcccttccgtctgacggcaagtatcacccccttcccctcttctcctgccacacctccgccagcgctagggttttatttttgcctcgctgttgctggtggttgttacccttcctctctctctcagccgtcaccctcggagccgcagtcgccgtagcagatcttctctctaatcctatcggtcaacagctgcttgctcgggacgggaaccggaggtggggttgcgatggcgctgcagtacgtggaggcgcagcggcagttgcgcccggacctctccgactggtacgcctccctcgccgacctctaccagcggaagctatggcaccagctcaccctcaagctcgaccaattcttacagctccaggtcgcacagaccggagacactatcattcagctctacaacaatttcattgtcgactttgagaccaagattaatctgctcaaacttgcccattttgcggtgataacttctcgccagtaccctgataaggatgctgcaattactttcttagagggggtgatcacaaagctgcgtgagacaagggagtcacggatcaatgaaccaattctctatgtgaagatgcaaattgcagctattaatcttgagaaaggaaacaaaaaagagtgcaagaatttgttggaagatgggaaaaccactctggatagtatgactgatgtcgatcccacagttcatgctagcttttactggatatcatctcaataccacaaggcatgccaagaatttgcagagttctataagaatgctcttctctatctggcctacacaactgtggagtctctatctgagtcattcaagctagacttggcttttgatctatctctagcagccttgctgggtgataacatttataactttggagagttattagctcacccgattatcaatagtcttattggaaccaaggtggagtgggtttatcatatgttacaagcattcaacacgggcaaccttgctttctaccaagaactttgcagggttcacaatgctgctcttactgcacaaccagctttggtgcaggatgagaggaagctgcttgagaaaatcaatattctttgtctgatggagataatctttagtcggccatctgaagatagaactattccattaagtgttattgctgagcagactaagctttcaatcagtgatgtggagtatctccttatgaagagcctctcggttcatcttattgagggaataattgatgaagtggacagtacagttcatgtttcgtgggtccagcccagagtgcttggaatcccacaggttaaggctttgcgcgaccgcctggatgcctgggttggaaaggtgcatactacattgctttcagttgaggcagaaacacctgatcttgttgctgcctaatttagcacctgttacacttccgcgagaggcttggtcagcaaggtgatgagatgcattgtgacacttgtagtcattttctggataatgaacctgctgccctgagcgtttgtcagcctgcgtcctgatcggggcctgtaatttcttttttgatgtcctctggacatggatgggtacaacttcacgcagtgtcacggaaacgggaccaaatgattgaaatttttatactagtagggtgttactgtagttttcccagttgaatttaatttgtaactgagtttgtactctgctggacatggatgcaggagaatcttgctggaaatttagttgtgcttgatgtttgcatgttgcattgcgataagacgtggatcatcattaatgtattcttattctcagaaaaaaaaaaaaaaaaaagcggcc

SEQ ID NO: 97434 - DNA, 405 bp, Zea mays
  Clone ID: MRT4577_20374C.1
gggggaacaatattttaattttattggacaacaattgatgcgaacaaaaaccctgctcatttttctctcgttttgtttaatagcgggggcaaccaaagcgaacaaaaggggtcccaacacctaattcaaaggttgaacgggcacttacacggggacaaaagcgaacggtaacaccatactttatattgataaaataactcggccgaagccaggatggggccacacattaattccttaaagcgccgccgcctccgacgtaatcctcaccaacacccttttgcctaccggggtaatcgccaccgttttcgtagacggcgacaccacccttgagccgaacggcgtagccttcaccggcgccataaccggcgttacggggcccgtcaccataaacgccgccgccgggac

SEQ ID NO: 97435 - DNA, 187 bp, Zea mays
  unsure (1)..(187): unsure at all n locations
  Clone ID: MRT4577_20375C.1
gcagtcgccgccagcatgcagcaccaccaccactgcctactngtggccatgctagccggacgactgctgtgacgaccactacgaccacgacgacgacctgctggctacgctcggacgaaagagtggcccataccggccgtcgctcgacgatctacttttatttgcttggctgctcgtgccacatgct

SEQ ID NO: 97436 - DNA, 657 bp, Zea mays
  unsure (1)..(657): unsure at all n locations
  Clone ID: MRT4577_20376C.1
ccggtccggnacattcccggnggtcgaccccacgcccgtccgtttttgggacacgacacaacaacagcacatccacttagcgcgtagaggtgtagcctgtttaatcggtctgccacataaccaaagaagggcagcgacacgcagcgacaatgccacgcaatgaatgagagcccggtcggaccgtgaaactagcacgcaatggcgaggtcttccaagagatggtggcggaagctctgctggccttggccctggccgggatcaccggcgaggcaaggaacatgacgaccacgacgacgagataaaaaggacaacgcggtggtgcaaccggagaccttcccgaccttcgaccgtctaccttgggcccgtccccgccgttcggctgactcccagaacgcagcatttctggcatcatcattcccaggctcagcatgccctaaatcggcagcagcctaccccggttcagcttgtccggaagaagcagcatgcccctcttcggcggtggctccccatactttagcatgttactctggatgcccggctcttccaccgccggctgctgtcctgagcacgccagcaagccctgtaagccaactagcatggtagtacgacgtagctactgttactgaagtacacttgattgttcatgcatgcgtggat

SEQ ID NO: 97437 - DNA, 170 bp, Zea mays
  unsure (1)..(170): unsure at all n locations
  Clone ID: MRT4577_20377C.1
aattcggcacgaggggcacacccgccggtgggcggtggtggccatggaggaggtgcgccgtctggtgcggggtttcgtcgacgtccttgtcctcgccgggggncgcgcctngtctggcgccgctgctacttggngcgccgtgtngatcattaaggtccttcggtggtcgc

SEQ ID NO: 97438 - DNA, 372 bp, Zea mays
  unsure (1)..(372): unsure at all n locations
  Clone ID: MRT4577_20378C.1
tcgtgttacacacacgcgttgtcggaccngtggggcagcagcaaagcgatgagcattttacgagcggacgaccgatctgctacctgctagcgaattcgatcgatcgggtacctgctgctagcgatagcagcagcagccagcagatcccgtcgtcgccggcacgatggccagcccgtcgtcgtcgtcgtcgtcagctctggtcgtcctcgcggtggttctagccgcggcggaggcgtgctccgcgacgcgccccgtccccgcgcggcagcgggcggtggcggtggaggaggagggtgagacggccggaccacctgcacgagggcacggtgctgaacccggggatggggcgctacgagatcgtgagccactaca

SEQ ID NO: 97439 - DNA, 191 bp, Zea mays
  Clone ID: MRT4577_20379C.1
catgcatccatttatttatttatggaaaaagtcaaccacgcggtttgaacaaagacggtcagagtttatacacatccagctaccagcacgtccaaaaaagggctgggtgctcataggtaaagagcatttcccggtgggctgaggaaaaccaattgcctgcgctagggcgtactaaggctttttgccgaccc

SEQ ID NO: 97440 - DNA, 303 bp, Zea mays
  Clone ID: MRT4577_2037C.1
agagggagggagggaacgcggaagaaaaaaggggggggggcgccgcccccatgttttgacctcgcccccggtcgtctccggagcgatctaaatctgagggtgtggaggtcttgattgggcggtcacaagacccgtcactgcaatggtccccaagatgttgccctgcccatggatctcgccgtgcgtgctcccgctgctctttgagctgcacccgcgcgtcgatgcttctaccccccgggaccttcatgcacaccctactcccctggagaggtgatgtcggcccaaggcaactcccctcaccct

SEQ ID NO: 97441 - DNA, 444 bp, Zea mays
  Clone ID: MRT4577_20380C.1
gagatagacttataatcgagcatattctacacttactgtgatcctgacaagaacgaatacttgcttggacaagaacataaacccaatgccgacataaagcaataaaccaccaccagctcctcctgtaactctgcctaatgggactggtgctcctggcgttcaacaaatgccaacggtgcatgtctagtatacagaactatgaaaaaattaaaggcacacctaatcctcataaaggcatgcatgatatgatcactatcgatgctttcacggatactaaaccggacccgcatgcatcgctagagcaaacaaatatgcggcttgtgattgcttagaccctgtgattaacgaccagattttcgccagaagcaccttcgttgcaaatctgatctgggcataggcggctgtgactggttatcaacatctggtcctgaataaggcatggac

SEQ ID NO: 97442 - DNA, 264 bp, Zea mays
  Clone ID: MRT4577_20381C.1
tcctcgccctctctgctctctgtctctctcatgccgtgccgagaagcggacaaagcgcggcgctgcagatttcgatccggttcccaatgcctcccatgctcgccgtggccccgtgctagctcctgtgccgtgtgcggtgcctgcacctgccgcgccagcgccacgccgcctggatccggcgagcgcgtgggcgggagcctcagatccgtgcgaaacccagccttcccgtggtggcggcctgcggtctagctccagatcgggtgg

SEQ ID NO: 97443 - DNA, 680 bp, Zea mays
  Clone ID: MRT4577_20382C.1
cctcgaggccggccgggccggggtcttccaacggacttcgctggtctcccgccgtggatctcgcgtgggagatttgaccaccgcccagccctttctccaagctctccgcgaccgggtccgtgtgcgcctctgagcatgggcgcgcgttgcccctaaatgcgggacgcacgggtcatcttccacctccgcgttggtcgggagttgttcatggtgattccaccgccttagctctgcatccctacctctacaaagtcatacggggtcgcgtttcattcctatcagctcggctccgctaaaatctccaccgccccacgaccaccattttccatcaccaagagaaccaccgccagcacacagggagataacgatggagtgatgtgcgccgccgccatggatgtgtgcttgcatcatcctctggggccctctgtcgggtcgggggggattcaccctattctggcggacgtttttatggcgtcgtcgggtggattggactccctgcatcaactaaattgctcgccgccgtgtcagctccgccgtgaagccgctgcgtgccgtggtccagctcgcccctacttcgatcgcggcacgaggtttcaagtcacctgaagttcaccctggtaattggaatctcaagtgccaggagatgatcaggtggttcaggaggacccgtctaacactga

SEQ ID NO: 97444 - DNA, 185 bp, Zea mays
  Clone ID: MRT4577_20383C.1
gcaggagcagccgccgcattacaccgaggacgaggtgctccacgaccactgctagtgacctccaagcacgagaccgctccgccggacgaggaccggaccgccaatggccgctagatctccggcctgcccgccaccatcacaacgctcgcggcgctgctcccgcccccgaagaacaaggaaatctt

SEQ ID NO: 97445 - DNA, 884 bp, Zea mays
  Clone ID: MRT4577_20384C.1
aaatacgtcagtggcgcggccaccgtgtacaagttcgcgcggcagtcgggtcggcgcaccccctactcgctccgtcagccggacatcgagtactactacaactccaccagctactgggacgagtacatgtggagcgcggcgtggatgtactacgtcgtcgccaactccttcatcgctgcgctctacgccgactacatggaggccgtcaacgtccccggctggtactgcggtccaaacttcatgaccaccaacgacctccgtgagttcgccaggtctcagatcaactacattctcggtgacaaccccaagaagatgagctacgtggttgggttcggcagcaagtacccacggcacgtgcaccaccgtggcgcgtccacgccgcacaacggcgtcaagtactcgtgcaccggcggctacaagtggcgcgacagcaagaaagcggaccccaacctgctggggggcgccatggtcggcgggcccgacaagaacgacggcttcaaggactcgcgcaacaccttcgggcagaacgagccgacgctggtaggcaacgccggcctcgtcgcggccctggtggctctcaccagcagcggcaggggagtcggcgtaaccgccgtcgacaagaacaccatgttctccgccgtgccgccaatgttccccgccgcgccgccaccaccgtcatcatggaagccatgacgaccgtgaacattcatggtcatacgattttttgtgatcgatcacgtacgcgcgcgaattctcttctgtacaataccacacgtaaattaacagtacgtgtaagcaaatatatagtacgtagcgcacggtggatcatcggccggaaaaaaaaaaaaaaaaaaggcccctaatggataatgagtggtgttagc

SEQ ID NO: 97446 - DNA, 957 bp, Zea mays
  Clone ID: MRT4577_20385C.1
gtccaaatttcatgaccaccaacgaccctccgtgagttcgccaggtctcagatcaactacattctcggtgacaaccccaagaagatgagctacgtggtgggttcggcagcaagtacccacggcacgtgcaccaccgtggcgcgtccacgccgcacaacggcgtcaagtactcgtgcaccggcggctacaagtggcgcgacagcaagaaagcggaccccaacctgctggggggcgccatggtcggcgggcccgacaagaacgacggcttcaaggactcgcgcaacaccttcgggcagaacgagccgacgctggtaggcaacgccggcctcgtcgcggccctggtggctctcaccagcagcggcaggggagtcggcgtaaccgccgtcgacaagaacaccatgttctccgccgtgccgccaatgttccccgccgcgccgccaccaccgtcatcatggaagccatgacgaccgtgaacattcatggtcatacggttttttgtgatcgatcacgtacgcgcgcgaattctcttctgtacaataccacacgttaattaacagtacgtgtaagcaaatatatagtacgtagtactgcgcacggtggatcatcggccggacatgcttcacgtgtgatggttttctatggataatgagtggtgttagctctaaaaaaaaaaaaaaaaaagaaaaaaaaaaaaaaaaaggcccccccgggcccccaaattttccccccgggccgccccccccggttttattggaacccttgccgcccgtgaccattaatggccaaacaattttttgtgttcgatcaggtacgcgcgcaaatttttttttgtccaataccccccgtaaattaacagtacgtgtaagcaaatatatagtacgtagcgcccggtggatcatcggccggacatgcttcacgtgtgatggttttctatggataatgagtggtgttagcccc

SEQ ID NO: 97447 - DNA, 493 bp, Zea mays
  unsure (1)..(493): unsure at all n locations
  Clone ID: MRT4577_20386C.1
tgatagttgccgcgctcatgatcgagcagctcgctgctggaacgatagtagatctagacgtacgtcgtctgagcacaaatgaaccaagaaagagtagtcttcctaaccaaggagatagcaaacgaagtggtgctggtccagctgtcgttgatgacaacaagggtttcggcgctgcacgcggttacttcgttcccccgaccctcccaccttgccgccgcaaggcatgctagaatgaacaggaattgaggacgatgttggctgccgtgtcgtcggtcttgttctgttcgtgtttctaaatattaatgaaatattaatgaggatgtccataacccctataccatgcatcaaagctagaaactcctacctcatcaatggtgtaattctcctagcatcaattcttgtaactccacctcacatgtatgactatgtattggagggcttatgtattggaaattagacaagagaaaagagaacaactcattttcatccnnna

SEQ ID NO: 97448 - DNA, 594 bp, Zea mays
  unsure (1)..(594): unsure at all n locations
  Clone ID: MRT4577_20387C.1
ttacacgctgtgaatnnggttttctaatggnataaaatttaaaaaaaaaaaaaaaaaaaaaaaaaaaaaaataaaccgccgtcgacaagaacaccatgttctccgccgtgccgccaatgttccccgccgcgccgccaccaccgtcatcatggaagccatgacgaccgtgaacattcatggtcatacggttttttgtgatcgatcacgtacgcgcgcgaattctcttctgtacaataccacacgttaattaacagtacgtgtaagcaaatatatagtacgtagtactgcgcacggtggatcatcggccggacatgcttcacgtgtgatggttttctatggataaaaaaaaaaaaaaaaaaaaaaaaaaaaaaaaaaaattancccgccgtcaacaaaaacaccatgttctccgccgtgccgccaatgttccccgccgtgccgccaccaccgtaataatggaagccatgacaaccgtgaacattcatggccatacggttttttgtgatcaatcacgtacgcgcgcaaattcttttctgtacaataccacacgttaataaacagtacgtgtaagcaaatatatagtacgtagtactg

SEQ ID NO: 97449 - DNA, 402 bp, Zea mays
  Clone ID: MRT4577_20388C.1
gggaaaaaaaaagcaaatttccggggggaccattcaataccccgggggggggggggggggcaaaccttcgttttaaaatcaggaggacgggttcctaaccgccccccatttttttcggggggggggacgggcctaatggctaatcccctgaaaaaaaaagggggggcccttttcctggggggggaaaaaagatccggggaccttggtggagttaaaaatggccccccccccctttttgggggccagacctactgggggcccccggggggggggggggcccaattggggtaggaacccccttagtttgggtcccccccttccattgggaattttgggccaacacatttaattgggggggggaaaaaaaacaaatgccggggagatttttcggggggggaaaaa

SEQ ID NO: 97450 - DNA, 2356 bp, Zea mays
  Clone ID: MRT4577_20389C.1
gttcctaatctgtgcctcactccccattcctgccgccccgctccacgttccagaacatctgggggggtatcccactcgcatggtcaccccatagcccccccgagaaaccaccccaccgacgctccggcagcaatggcggcggcgagggcaaaagtcaactaccccatcctaatcttcaaaactcccctgcccaggagggcccgaaggcaccatcgccgtccccgtccatgcgccgctgaccgcgcgcgccatcaaagccaattacccagccatctagctatcagccatgtattcggccaaccactggggcggctcgttcgagatcgccgatggggcggcggaggatgaccacagccgcaacatggacctggaccgcggcgcgctgtcggcgcggcagcaccacgagctggacgagacgcagcagagctggctgctaggcccgccggaggccaagaagaaggacaagtacgtggacctcggttgtgtcgtcgtcaagcgcaagctcctctggtgggccttgtggtgcgtcgtcgccgctttcgtcctcatcggcctccccatcatcatcgccaagtccatcccgcacaagaagccaggcccgccgccgccagatcagtacacagaggcgctgcacaaggcgctcctcttcttcaacgcccagaaatccggccaccttcccaagaacaatggcatcaagtggcgcgggaactctggcctgtcagacggctccgacgccaaggacgtcaagggtggcctcgtcggcggctactacgacgctggcgacaacatcaagttccacttcccgatggccttctccatgacgctgctgagctggtcggtgatcgagtacagcgccaagtacaaggccatgggggagtatgaccatgtcagggagctcatcaagtggggcaccgactatctgctactcaccttcaactcctctgcttccaccatcgacaagttatacgcccaggtgggtgctgctaagatcaacggcagccggccggacgaccattactgctggaaccggccggaggacatggcgtaccctcgcccttcactgtccgtgagctccgcccctgatctggggtggcgaggtcgccgctgcacttgcggctgcctccatcgtgttccgtgacaacgccgcctactccaagaagctcagccagggcgcggccaccgtgtacaagttcgcgcggcagtcggggcggcgcaccccctactcgctccggcagccggacatcgagtactactacaactccaccagctactgggacgagtacatgtggagcgccgggtggatgtactacgccactgggcacagcagctacatcacctttcgcaccgacccgcggctgcccaagaacgccaaggccttcttcagcatcctcgacttctccgtgttcagctgggacaacaagctcccgggcgcccagctgctgctgtcgcgcctgcgcatgttcctcaaccccggctacccgtacgaggagtcgctagccggctaccacaacgccaccagcctcaacatgtgcatgtacttcccgcgcttcgccgccttcaacttcaccaagggcgggatggcgctcttcaaccacggcagggggcagccgctgcagtacgtcgtcgccaactccttcatcgccgcgctctacgccgactacatggaggccgtcaacgtccccggctggtactgcggcccaaacttcatgaccaccaacgacctccgggagttcgccaggtctcaggtcaactacattctcgggtgacaaccccaagaagatgagctacgtggttgggttcggcagcaagtacccgcggcacgtgcaccaccgtggcgcgtccacgccgcacaacggcgtcaagtactcgtgcaccggcggctacaagtggcgcgacagcaagaaggcggaccccaacctgctggcgggcgccatggtcggcgggcctgacaagaacgacggcttcaaggactcgcgcaacaccttcgggcagaacgagccgacgctggtgggcaacgccggcctcgtcgcggccctggtggctctcaccaacagcggtaggggagccggcgtcaccaccgtcgacaagaacaccatgttctccgccgtgccgccaatgttcccggccacgccgccgccgccgtcatcatggaagccgtgaccacatacgatttttggtacaatacaacgtcagcagtgaattcttgatgccacgttaacggtggcatccatcatgcgtcacctgtagatgtatgttttcatggatacaagtggattacagttaatgaacggatggatacataccttcgctatcaaaaaaaaaaaaaaaagaccctaagagcaaggcccctagggcc

SEQ ID NO: 97451 - DNA, 676 bp, Zea mays
  Clone ID: MRT4577_2038C.1
ttccaccctgtctgggctgggtggacctggcacatcgtcggcgagcttctcttgtaccggccaccgtctcacatggtactcagcgcctagcccttgctccatctccatggcatggactgctccatacaggccacgctcggcctccaccttcggcgcccaacgagcaggcgttagggccgcgcagcaccttcctctagcgtgctcggctccagccatggcgtgtggacgctcaagttcggccctcctctggcctctgctcccatggtacgagcccctcttccatggtgccccccatcatcgcgttctcgttccctgtgagggcagggagaaatcgggcgtgtactcgtggctagcatgtgggtcgggccaccagttccgaccgaattgtgcgccggcgtgctgaggccgccgcggtaccgtgcgttgccgtggcacgcttcctgctccatcttgaagcacgccccccgtaggtcaagaacaggtaccacaggatgaggcgcttggaggatgctgcgatgtgttcgtgagaggtctgggccgtcgcctcccagtcaactttgggttgctggaccgttgtctccttataatgtaattatttattttgtatagaattcctgttatgtagtaaagatgtgacattcgatccaaaaaaaaaaaaaaaaaagcccctagggcc

SEQ ID NO: 97452 - DNA, 168 bp, Zea mays
  unsure (1)..(168): unsure at all n locations
  Clone ID: MRT4577_20390C.1
agaagacttcgtcatccanacattattctctttatgaaacggtgtgacttcacctcaacatcggtgcantgtaacagagtttctcgcacgagaaacacatccnaaagtgataagagacggcgagttcatatggccttagatgttgcacgaggtgtacattatcttcat

SEQ ID NO: 97453 - DNA, 369 bp, Zea mays
  Clone ID: MRT4577_20391C.1
tgtgaaaacgaaccaaggatggccggacggtgatgctgttgatttattgttaactcaaataccctcattactaacacaaaccaaaacatttcactggtatgtacacacgaatgcgtgggaatcagtaatgccatgctgttacactttcattatctgctataagtctgatgctcgcagaacatatttatctatactctcgcgtctgcgtgcgtgtctgtgactacagcatccttcaaaacggaagcatgaaaaatcgctcttagctcttctaaaacacgagctgagaacagaaaacacgaaaagcggtcaaatggcacacctgaaagatctacacgcttacactgctcttacgggacgtccagaatctgc

SEQ ID NO: 97454 - DNA, 377 bp, Zea mays
  Clone ID: MRT4577_20392C.1
atacacaatctatcctttttgcttgctactgattccatgtttttttccattaccccacaaaagggtgaaaccaaacaaaaaattgttcctataaaaaacgctccttctgcgagagggaaacattctccaaatttaattgtcccagtccctggaaaatggcctcagggcgatataccctcctcccccatactctgtaagtaaacttttaaaacctggtaaaggctgagaaaattttttttctcttttccactgcaagtttccccatagccccccccttatttggggggctataactgggggggtggtgccaaacactggccttaacccttaatctccattttggttttcaaaacccaacctttaaattttgggctggg

SEQ ID NO: 97455 - DNA, 289 bp, Zea mays
  Clone ID: MRT4577_20393C.1
acagacgaaggcgatcatttgttcgagggcagagccacaacctacccgtgaagacgggcaagtacagatgcacaaatttggggagaaaaaaaaaacaaaacaaaacaaaacgggtcaccagacactggtcacatttatatttatttatatataaagcccattggactgggcaaaaaaaagagagagagagcgccctggcaatggcgggagcccaccacctgaaggtgctgggcctgtggacaagccccttcgtgatccgggtccgcattgtgctcaaccttaagggcct

SEQ ID NO: 97456 - DNA, 280 bp, Zea mays
  Clone ID: MRT4577_20394C.1
cccacgcgtccgatttgttaagggcttcatgttgagaccatgaataccgactgtcggcgctgctctcatgtacggtggtgtggcctcgagcctgattaactgttattacaataaattgctggacttgttctatccaattgttatgaatcatgtattatggttgcatgggtacaatttcttcatggaatgtgaatcgaaacattccacatcaattggtgtgcgtgaactctggttcgtccttgtacacaatacaagattcatctgattaattacacttaaa

SEQ ID NO: 97457 - DNA, 509 bp, Zea mays
  Clone ID: MRT4577_20395C.1
tccgaatgactccccagggaatgtcattgcgctctggctcttcctgtcgcctgttgtcaccttctggagggtcatcaggaagcggtcgacggaggacttctccggcgtgccctacaacatgacgctgctcaactgcctcctatcggcttggtaacgaaccgctctctctctctctctccctgagagacacggccttttgatgagcactccacaccatttctgtttctgtctcttcagaaaattaaatcgcatcgcagatttatggagtggccgtaaagcagtaaaaccggcgtggtggtgtagtttgttttacttagatttcggaaatgctgcatggtttgctggcctgggtgaagcaaacgcttggctcttagcgtagcctctgcccaacccggcctgtcctgtagatagagtactacccgtggacccactcgctagacgctagcactgtgactctgtgagtctgtgacaacgactgcaatgaaggggaaaaaagcctattgcactgc

SEQ ID NO: 97458 - DNA, 2410 bp, Zea mays
  Clone ID: MRT4577_20396C.1
gtctctacggtgaggcgggagctggcgatccggagactgcgagaggaggccgaggaggaggcgaacgaggcggggacgaggaggaggagcagcagaagggatttcgccgtgttcgagaccgccaggggcgacgcgctcttcacgcaatcgtggactccggccgccgacgatcgcctcaagggcgttgttatactgttgcatggtctaaatgagcatagtggaaggtacagccatttcgcaaaactgttgaatgatcaagggcttaaagtttatgccatggactggattggacatggtggaagtgatggagttcatggatatgtttcgtcacttgatcatgctgttggtgacttgaaagaatttctggaggatgttgtattggaggaaaaccatggtttgccgtgcttcttatttgggcactccacaggtggagctattgttttgaaggccgcgctggatccttctgtagaacttcatgtagaaggtgtggtcttaacgtcgccagctattcatgttcaaccatctcatccaatcatcaaagtaagcaatagatgtttgtcttcaacgaaacaatacccacgcgtggccgcgtagtgaccaggagcgagcagccgaggaaaggagtcaagcacgagaggtccgtctccggctcctttctcccccaccgcggcagtcgcctcccctcctacaaataacccccgaccctccacgaggacgggagtaccttctgcagcaagtagtgaccaggagcgagcagccaaggaaaggagtcaagcaatggagaaggccgtcgacaggcagcgggtcctgctgcggcacctgaaccccgccgcggcggccagccccgccccgcacgccatctccgcaagcgcgtgcgcggcgggggacagcgcggcgtaccaccggaggccggccttcgccgacgacgtcgtcatcgtcgctgcttacaggacggcaatttgcaaggccaagagagggggtttcaaggatacctttgctgaggacctcttggttcctgtcttcaaggctttggtagacaagacgaagctggacccaagtgaagttggcgacattgttgttggtactgtcttagctcctggttcccagagggcaatcgaatgcagaatggctgcactgtatgctggtttccctgacactgttcctcttaagactgtaaacaggcagtgctcttctggccttcaggcagttgcagatgttgccactgctattaaagcagggctctatgacattggtattgctgctggtttggagtccatgacagtgaacaaagttagtcttgatggccaagcgaatcccaaagttgagctattttctcaagcacgtgattgtcttctcccaatgggcctcacatctgagaatgttgcacaccgttttggcataacacgactggagcaagatcaagctgctgttgagtcacatagaaaggctgctgccgcagcagctgctggtaaattcaaagaggaaattgtgccagttcatacaaagattgttgatccaaaaactggtgaggaaaagaagatcgtaatctctgcagatgatggaatccgagtggatacttctcttgcagtcctgtcaaaactcaaaccagcattttcaaaggatggcagcactactgctgggaatgcaagccaagtgagcgatggtgctggggccgtcttgctaatgagacgggatgttgctatgaagaagggtcttccagttcttggtgtctttaggacctttgccgctgttggagttgatccagctgtaatgggtattggtcctgccgttgcaatccctgcagcagtgaaagctgctggccttcagatggatgatatcgatcttttcgaaatcaacgaggcttttgcatctcagtatgtctactgctgcaagaagttggaacttgatcctgctaaagtcaatgttaatggcggtgcaatggctcttggacatcctttgggtgctacaggtgcacggtgcgtcagtactcttctcaatgagatgaagcgccgcggcaaggattgccggttcggagtgatttctatgtgcataggttctgggatgggtgctgctgctgtgttcgagcggggagacggcgttgatgagctcaccaatgctcggggaatctcgacccacaactggctttccaaggacgccatgtaaagctacacccaccaaaatttgccggaactggtagcattgtttccagatcgctgtagggagcgaattggggaataaaatgattttgtatttgtcgcccctgctggggatttagtaagatttttacgccactggtattggaacttgcttacctggaaagatgcgtgaataactcaatagtctgctggaaggatcatacgtgcacccgcttaattttaaaaaaaaaaaaaaaaaaaaaaaaaaagcggcc

SEQ ID NO: 97459 - DNA, 283 bp, Zea mays
  Clone ID: MRT4577_20397C.1
gcctgagaaaaacacggaattacgagctttttcctcatacaagtatatatactatattataaataacacatatcgacgtcgatcttcctcccaattatatatacactgatgtgtataggcacctataacactaccacctacgctctcctgcccagatagtatcgagcagacatacctcacacatggaaggcaaaaagagcgagagagcctaccctgatcgatttccctttcacagagttcaccattttttaccctgcttattctacaatcgaggcgaaacaga

SEQ ID NO: 97460 - DNA, 1601 bp, Zea mays
  Clone ID: MRT4577_20398C.1
tgttgcatggtctaaatgagcatagtggaaggtacagccatttcgcaaaactgttgaatgatcaagggcttaaagtttatgccatggactggattggacatggtggaagtgatggagttcatggatatgtttcgtcacttgatcatgctgttggtgacttgaaagaatttctggaggatgttgtattggaggaaaaccatggtttgccgtgcttcttatttgggcactccacaggtggagctattgttttgaaggccgcgctggatccttctgtagaacttcatgtagaaggtgtggtcttaacgtcgccagctattcatgttcaaccatctcatccaatcatcaaagttgttgcaccaatattctccatgttagctccaaaataccgtgtcagtgctttgcataagagaggacctcctgtttcccgcgatccagtgagctgttttctcaagcacgcgattgtcttctcccaatgggcctcacatctgagaatgttgcacaccgttttggcataacacgactggagcaagatcaagctgctgttgagtcacatagaaaggctgctgccgcagcagctgctggtaaattcaaagaggaaattgtgccagttcatacaaaggttatgtcgtttaatttacctttgtaaagtaactatgctagctattgatgatttccaacatattaaaaggtgaaattttcatatgagttatatgctaacacaatgttactctataaagattgttgatccaaaaactggtgaggaaaagaagatcgtagtctctgcagatgatggaatccgagtggatacttctcttgcagtcctgtcaaaactcaaaccagcattttcaaaggatggcagcactactgctgggaatgcaagccaagtgagtgatggtggctggggccgtcttgctaatgagacgggatgttgctatgaagaagggtcttccagttcttggtgtctttaggacctttgccgctgttggagttgatccagctgtaatgggtattggtcctgccgttgcaatccctgcagcagtgaaagctgctggccttcagatggatgatatcgatcttttcgaaatcaacgaggcttttgcatctcagtatgtctactgctgcaagaagttggaacttgatcctgctaaagtcaatgttaatggcggtgcaatggctcttggacatcctttgggtgctacaggtgcacggtgcgtcagtacttttctcaatgagatgaagcgccgcggcaaggattgccggttcggagtgatttctatgtgcataggttctgggatgggtgctgctgctgtgttcgagcggggagacggcgttgatgagctcaccaatgctcggggaatctcgacccacaactggctttccaaggacgccatgtaaagctacacccaccaaaatttgccggaactggtagcattgtttccagatcgctgtagggagcgaattggggaataaaatgattttgtatttgtcgcccctgctggggatttagtaagatttttacgccactggtattggaacttgcttaccggaaaaaaaaaaaaaaaaaaaaaaaaaaaaaaaactcgagaaaaggcgcgggtacc

SEQ ID NO: 97461 - DNA, 331 bp, Zea mays
  Clone ID: MRT4577_20399C.1
gtaaaaaaaaaaaaaaaaaaaaaaaaaaaaaaaaaaaataaaaaaaaaaaaaaaaaaaaaaaaaaaaaaaaaaaaaaaaaaaaaaaaaaaaaagtttgtacacctgccggggggggccgttcaaaaagggcaaattttgaaaaaatccatcaaactggggggcgttcaagcatccatttaaagggcccaattggccctaaagggagtcgaataaaaattaacgggccgtcttttaaaaacgtcgggactggaaaaaccctgggttacccaaactaaatcgctttgaaggaaatccacctttaaaaaattggcgtaaaaacaaaaaggccca

SEQ ID NO: 97462 - DNA, 723 bp, Zea mays
  Clone ID: MRT4577_2039C.1
ccaacagatgcatgattccttttcttttttttatcactcttctttcttttatctttaatcacaaaaaacagagagcaaaatgctggatcacatcgtattcaagctagcatatccacgtgtgtacggctgactgtctgtacctccggacgtaagcagctaaaattagaagccaagctggggaccgaccgacggcgtttcattaggcagaggcggtctgcgacgacgacgatgacacggccggcgagccagagcaggcgtccccattgcgccgcgcgccggagcagctgctcgactgcctctccggacccggtcgcggtcgcggtcgcggtgcgggcgtcaacgtcgtcgccaccggcgcgtacaccttgtcggcggctgttgtcgtcgttcccgacgcgtcgtcggctaggtgcacgtgcacctgctgcggatgcgctgcggctgccgcagcgtactccggcggtggcacccaaatgccccccaccacgacgaactgcggtgcggtcggcggcgcaaccatgctggtgccgccgctctggaccgccaccggcgcctagttcggacgccgagtgtgtagactatacttctgaaggcccgcccaaaatgtatcaaaatgaagggcgaagtgagaacagatgctactgatgattgatgacctgcaaaaaattaaaagaaatccactctttttcttttctggataccaaaaaggaaaagaaagcggcc

SEQ ID NO: 97463 - DNA, 2201 bp, Zea mays
  Clone ID: MRT4577_203C.1
cccacgcgtccgaacagaccaaagctcctagtgatgtgattcctacctgcaatgggaggaactgtggagatacatggccaggtccaatgaacaagagcatgcccctcttgtggactgagaactggacagcacagtacagagtattcggtgacccaccatcccagcgttctgctgaggacattgcatttgccgtggcgcgcttcttctccgtgggcggtaccttgacaaactactacatgtaccatggtggaacaaactttcggaaggacatctgctgcctttgtggatgccaaaatactacgacgaggcacctctcgatgaattcggcctgtgcaaggaggccaggtggggccatctgagggacctgcacctggcgctgaagctgtgcaagaaggccctgctctgggggaagacatcgacggagaagctgggcaagcagttcgaggcgagggtgttcgagatcccggagcagaaggtgtgcgtggcgttcctctccaaccacaacaccaaggacgacgtgacgctgacgttccggggccagtcctacttcgtgccgcgccactccatcagcatcctcgccgactgcaagaccgtcgtcttcggcacccagcacgtgaacgcgcagcacaaccagaggacgttccacttcgcggaccagacgacgcagaacaacgtgtggcagatgttcgacgaggagaaggtgcccaagtacaagcagtccaagatcaggctgcgcaaggccggcgatctctacaacctcaccaaggacaagaccgactacgtctggtacacctccagcttcaagttggaggcggacgacatgccgatccgccgcgacatcaagacggtgctcgaggtcaacagccacgggcacgccagcgtggcgtttgtgaacaccaaattcgtaggatgtgggcacgggaccaagatgaacaaggcgttcacgctcgagaagcccatggacctgaaaaagggcgtgaaccacgtcgccgtcttggcgtcgacgatgggaatgatggacagtggcgcttacatggagcaccgtctggccggcgtggacagggtgcagatcacgggcctgaacgcgggcacgctggacctgacgaataacggctggggccacatcgtcggcctcgtcggcgagcagaagcagatctacaccgacaagggcatgggcagcgtcacatggaagccggccgtgaacgacaggccgctcacctggtacaagaggcacttcgacatgccgtcgggagaggacccggtcgtgctggacatgagcacgatgggcaagggcatgatgttcgtcaacggccagggcatcggccgctactggatctcctacaagcacgccctcggccggccatcgcagcagctgtaccatattccccggtccttcttgcggcagaaggacaacgtgctggtgctgttcgaggaggagttcgggcggccggatgcgatcatgatcctgacggtgaagcgcgacaacatctgcactttcatctcggagaggaacccggcgcacatcaagtcgtgggagcgcaaggacagccagatcacggtgaccgccgccgacctcaagccccgggccacgctgacgtgctctcccaagaagctcatccagcaggtggtgttcgcgagctacggcaaccccatgggcatctgcggcaactacaccatcggcagctgccacacgccgcgcgccaaggagctggtggagaaggcctgcctcggcaagcgcatctgcacgctgcccgtgtccgccgacgtctacggcggcgacgtcaactgccctggcaccaccgccacgctcgccgtgcaggccaagtgctccaagaggtcgcccagagccgcgcagtaatttcggtagtcgtcggcttcggcctcggcttgttacctcccgtcatctttcattcttcattgctgatgctgctgctgtaccatgggaccatgatctgaccggagacatcgattcggatttcggacccatccatgcgtggctgggtggggaaacagattgtcggtactgtcactgtatgctttattatacacaaatatattatctataggaatagattgttaatttgatgagcaaacatatatgcagatatcaatttggtgattaataatggcaataatatatagcctagtggcctaactgacagattaaaaaaaaaaaaaaaaaagaaaaaaaaaaaaaaaaa

SEQ ID NO: 97464 - DNA, 269 bp, Zea mays
  Clone ID: MRT4577_20400C.1
ggggagggaaaacccctggaaaacgtgttatttttcctaaaaaacaacgggacaaacaccaaaaatttgggattttgaaccctccgcccaaaaaaaaaaatttcccaaaaaaaaggtccttttttaaatgaataaaggccaccccgtaccacccgttagtttttcgccgtttttaaaaaaacaccccccggggggaaacccccgctgacccgggaaatattttccccacttccactggggggccccacggggcttattggtgcctttaa

SEQ ID NO: 97465 - DNA, 350 bp, Zea mays
  Clone ID: MRT4577_20401C.1
gttattgagcttaatgggccttaaagatggctagcttaaacataagagtcaagtacacacagaccatacaatgtactactaattagccgcgcgcagcccccataagagtcaagttcgtctcccaaatcgcaacatcatcattagcaaccttaatttgcatcagtagccggacatctgcagcccctctagagaaatcacgttgttgtgcctgccacccagagatcgatcgagcaggacgaacacgctgggaaatctgcagggatgttgaatccaataattaggctacaaaacggaaatcgccatgatctgctcggctgtgccaatagccctagaaaaggccggtctggtgc

SEQ ID NO: 97466 - DNA, 814 bp, Zea mays
  Clone ID: MRT4577_20402C.1
ctgatatctgtgattgctttgctctcttgtgctttaacctgtcatttaggttgcttctggttcgttctgtttattatattgttttatgattttcccctgttctttttgaaaatcttgtttcttttgcttctttgccgccgtacattgattatactgctgtgctaaccaatggctgaaacatattgttcgtgggtacagccacaacatgcaaggagattgttatacgacttattccctttttctgaacatagcttattaatagttttgggcaaggttttcatgacttaagtattatataataaagcgaagagttgtatttgtaaactaacttgttctttatcaattagccactaccgtaggcctgttaaatggtattccatagaatctgcagctaaagttttgacaagtcttgatttgaaattcatatgattgttcacgtcatatggaatatggatgatactcttgggcaaagaccaatgagtccttgttgctcagtggttattgtttattcatttctccacatagagccaattagtgtcaatagcttgccagaggactgcaaactatcctggagagcaggtttgttactgtttaatgtcaatgtcctactggatagaacaatgtgttttcacttatagcatggtttatggattattgagctgacatgctgtttttggcctcttatcatttcaaaattttcatctacttctcctgttcctctggagcacaagggatacatatacattgctttattcgtgtcttgtttgcgagggagaaatgctctaaacagccccaagtaccaggtgtttggttg

SEQ ID NO: 97467 - DNA, 297 bp, Zea mays
  Clone ID: MRT4577_20403C.1
aattggggtggggatttttttatgggaactggggccaccagaaaaagcattggaacaaaaccgggtggaccaaatattaaaaaacaccaagtcccaaggggggctctcccaaataaccagaactcccttaacaaaggagagatcttgcaatcctttttcttccaataatcacaaaacgagaccaccccccaaggggggaaccaaccccaggctcaaaaagaacggagcccacgcctcccgggacacgtgggcgaacccccgggcgaaacgctggggccacccggaaattccggaccg

SEQ ID NO: 97468 - DNA, 709 bp, Zea mays
  Clone ID: MRT4577_20404C.1
cctcgaggccggccggggttatcttcaccgcgcttcgcccactcgctccagccgcttcaccgagccgccaccgccaccgcgaggatgccgttcaagaggttcgtggagatcgggcgcgtggccctggtgaactacgggaaggactatggccgtctcgtcgtcatcgtagatgtggtcgaccagaacagggcacttgtggatgcccctgatatggtcaggtgccaggtgaacttcaagcggctctcacttactgacatcaagattgacatcaaacgtgtccccaagaagacaaccctgatcaaggcgatggaggaagctgatgtgaagaccaagtgggagaacagctcatggggcaagaagctgattgtccagaagaggagagcatcgctcaatgactttgataggttcaaagtcatgctggcgaagattaagaggggcggtgctatcaggcaagagctcgccaagctgaagaaggcgtccacggcttaaggagtctctttccgtgaatgtcatgttagagtttttggttatgagttgggtcagcaattcgattgagcgttgtcaaagccagagttaccaatatgttccctgtgtacccatttcaaactttatcaagcacgggtgtgttcaggatatttttgccatgaatgatatggaatatctatggtgtaggttgcggcaaatgtgtaatgaggccgctaatctcgtg

SEQ ID NO: 97469 - DNA, 145 bp, Zea mays
  Clone ID: MRT4577_20405C.1
acctctcaaaaaagctggggcctgtagctttttttattgtttcaaagcttttccaccttagccggaaaacccgaaaccggccttataagccccccttttttgggccgtgcaacacaaacgattagcgcggggccgatcaagaaag

SEQ ID NO: 97470 - DNA, 882 bp, Zea mays
  Clone ID: MRT4577_20406C.1
ttgggaccctcgaggccggccgggatcttcctctgcgcttcgcccacacgctccagccgcttcaccgcgccgccaccgccaccgcgaggatgccgttcaagaggttcgtggagatcgggcgcgtggccctggtgaactacgggaaggactatggccgtctcgtcgtcatcgtagatgtggtcgaccagaacagggcacttgtggatgcccctgatatggtcaggtgccaggtgaacttcaagcggctctcacttactgacatcaagattgacatcaaacgtgtccccaagaagacaaccctgatcaaggcgatggaggaagctggtaacgatagagcttatgctgtggacctctttagcaccgccacactttattcatcttctgtattctagatgattgcccataagagaatggtgacacttatttgatctcttgctattcttttttcagatgtgaagaccaagtgggagaacagctcatggggcaagaagctgattgtccagaagaggagagcatcgctcaatgactttgataggttcaaagtcatgctggcgaagattaagaggggcggtgctatcaggcaagagctcgccaagctgaagaaggcgtccacggcttaaggagtctctttccgtgaatgtcatgttagagtttttggttatgagttggatcagcaattcgattgagcgttgtcaaagccagaattaccaatatgttccctgtaaacccatttcaaactttatcaagcacgggcgtgctcaggatacttttgccatgaatgatatggaatatctatggtagcttgtggcaaatgtgtaacgaggccgcaaatctcgtgactatcaactcaaagtttcttcctcacagaaaaaaaaaaaaaaa

SEQ ID NO: 97471 - DNA, 302 bp, Zea mays
  Clone ID: MRT4577_20407C.1
atagatccttaatgtatctgttagtcgtttcgtttgataccaaatttataggagggcggttaaatttggtagtttgctgggtattccgtcgcgagaactcaaatctctctctctctctctctctctctctgtatatattgaatattatgagtcatgtgctttcaataactaaagaaagttcaggtcagacagtgtcatccagtcgagccagaccaggtccgggcgtttataaaagaagacccggagtgctagagttcagtttttgacaccccacccctattcacgagccacagcgccaccaa

SEQ ID NO: 97472 - DNA, 123 bp, Zea mays
  unsure (1)..(123): unsure at all n locations
  Clone ID: MRT4577_20408C.1
atcgacttcgtgccggctctggctcgtctggacctgcagggcgtgcangcgaacttcggcgcgtccaccgctagttcgactgcctcatcaccaatctgctggtcgagcacgccgcgactgccg

SEQ ID NO: 97473 - DNA, 232 bp, Zea mays
  unsure (1)..(232): unsure at all n locations
  Clone ID: MRT4577_20409C.1
gccaatgccatagccagcgcccggatagactggggtatcccagtcattttggtctnaaagtacatactctagaatgtctgcgatgccgctgcatatgcatacgctatactgagtgtacgccttgcacggcaaatctacatcatattacataaaagagattgtaacttgtgatttacgaagtcttgacattttttgaaactgtctactattaaatatgtgagttggggaaatt

SEQ ID NO: 97474 - DNA, 417 bp, Zea mays
  Clone ID: MRT4577_2040C.1
ccgggtcagagcgacccgttcgagctgggatagttgtggctacactttgttacaagcttacaaaatagcatgggacactagaagctgttaatggacactttcttcgtgagcactctgatgtgcctcgatatgcgcgatgaagtgggtttaaactcattctttatacagtgatatgcgcagggagggttcagggtttatgtctacgagcacaacatagatccctcagactggaagagccagggttgtgttcatacattccttgtgtgcagcttgcaacattaccatatctgactgacatctttgtctctatcacgattcatgggagatcatcagtcattgaaaattgggaatggtgttctcggctgctccttttttttgctcaaaagtgtgttctaaagctactataagaaatgctgg

SEQ ID NO: 97475 - DNA, 783 bp, Zea mays
  Clone ID: MRT4577_20410C.1
cattgggtacctcgaggccggccgggttatacgattcccaaagaaaccttagttgcttacagataaatttatgtctgcaaatagtgtcaatattgaagtcctctcaggggcgatttattatgtggactaccttatgacggcatgattctatgtttgatagtatcttcatgctttgggtatggaaagattttgcatgtgcaacactgtagttttgttgaatccatctttcttctgaggccctatttataatgcgggaatctttctcctgtaaattatcatgtttccattgaagcacctgcaaaatttgtgcttaaatacaccctaaattggcaatatgatggttctttcatgaaaatgccgattgcaaatagaatcatactttgcatgatattgcactgtttcttatattttacttactagtggtatcaataattccctaatttaagcattacaggcaatcccctatattcagttgatagatctcgacttttgaagtattatgcgcaaacacatttttaatctatttgatgatgaaacgtttcaaagagaactgagattgtggtgttctatcaactcatatttttttgtgctcagtttagtgcactatgcttaatttaatggccctatgtattccatccagagacctggaggtgtttggagttaattgaatgcttgtagtctgagaaccttgtttctttgagggcactacattctgtcatatattcggttttatctaaggaaatcttatctgtaggacactctgacaagattccttttttgaca

SEQ ID NO: 97476 - DNA, 319 bp, Zea mays
  Clone ID: MRT4577_20411C.1
cggcccgtggcgtggccctctgaacctcgtcagctctgatctcgaagcgcctctcgtcggccgtcactgctcgactgcgtgctgcttcttcgtgctcgagctccagagggggtacccgggacggccagtagctcgactagactctctacttctaccctgccgactgccccatcatgctccagctctatgtcatcctgctctgtccggggatcgtctctattcctagaacattccccctagatcaggattgctaggctatccaaccacacaaacactctcatgtttctcaccaacccttaacacatatctgcatggacct

SEQ ID NO: 97477 - DNA, 328 bp, Zea mays
  unsure (1)..(328): unsure at all n locations
  Clone ID: MRT4577_20412C.1
gggaagcaaactcagtttgttttcatgacatgtgggacaacccaagtccaaaagctacaagcactgggaaaattttttgtccaatgcccggatagggggaaaaactgggcgggaaaggggaaaaaggttaaaaaaaagttttttggtaaaacaggggggcacacaaatggggcctttggtttaaaaccaaagttttggggttggaaggttgataaaagcccacgggcgggggcaggggccccggcaaacggtttgcaggcagcccattttacatggcagggctagatctactagaggggttntccccagggggcccaattgggggggc

SEQ ID NO: 97478 - DNA, 251 bp, Zea mays
  Clone ID: MRT4577_20413C.1
catcgtcgggcttcccgggaccgaagtgcgaaatacaagttctccagagagcgggcatccagagaggagtcctgggagagcgggcggacgagcgagggcccccggactggaggcttgagagctccaacgggaagatggcttcacggaggtcagaagagaaggaggccggcgagatctgaacccgtctcccgggtgctgtaaatagtctgataaacgttcacacagtctaaaattaccctttatatttgctg

SEQ ID NO: 97479 - DNA, 750 bp, Zea mays
  Clone ID: MRT4577_20414C.1
cccgaacgacggccggcgaaaccctagctcctagtctcccccatggcctcgcacctcgactttcgctacctcgacgagggcctcggcggcgagcgcggcaagcgcaagcgccgggaggaggaggcagatgccgccgattccatggacctcgacgccgacgcgccccggtcgtccaagctccgcgcagtggcctcccagtctgacccgtccaagccggcggccttcgggtcgcccacctacgacggcgtcatcgccgggcgcgtctcggggcggacatggaaggagccacgcacgcgccgctcctccgcgctgatggtgtcccggaagcccgtccctctggagcagcgcgcgagggacaagtccctgaagaaggcgtaccaggcgcgcgtggcggagctcaaggacgagatccggcagaacaaggtcgccaagcgcaagcagaaggaggagcgggagaagcgcaagaaggagaacgtgctgcgcacgggctcgaagctgcagaaggtcaccaaccccaagacgatccagaagatcgccaagtccaagaaccgaggtcaggctcaggggtcgtctccgacgacatcttcggcggcaagaagtccgaggccgcccgccgcatgcaggtgcccggcctggagaactgagtcgcagcttatctttgcaatatgtaacgccaatttttgtagtaatgcttttcaattgctgtgagctctgtcatgcccgatcaaaaatcaaacgcatactgttact

SEQ ID NO: 97480 - DNA, 330 bp, Zea mays
  Clone ID: MRT4577_20415C.1
gtacggtaatggttgtatattaattaatttatgggtggatcgcaaacctctttacactaacagttacaaaacaaacaagccctgattacaagactctaaaaacccgcacgaaatggaaaaaaaaacaggaccaacgcgcgcaaaatcgatcgattacatgtacattggtggaggtagaaactgactcacactctaaaggggcacaggttcataaaatacctggtacactctttttttcatattaacatttaggacacacctttccagggaccggcaagtatttgggcataaaattctttaactgctcacaattcgctcatcccccatagc

SEQ ID NO: 97481 - DNA, 1570 bp, Zea mays
  Clone ID: MRT4577_20416C.1
cggacgcgtggtgggtttccaaaagttagttctgttgatggaagctcttagtttgatggcccagatgagaagaacttttcgaatcctttcgaggtgaccaatcattggtgggccagtagatgggtttatcatcttagttctgttgatggaggctcttcgtttgatggcccagatgataatagcttagacatgagcgaaagtgatggacacactcgaaaggattcgaaaagtttttctcgtgaaatcccaatttttctttcctatgctacaccagatgagtttcttgaatcaatgataaaggcagatgctccccttaatgtgaagtacctgagaacattggtacaatgcttatccatgcttggaaaggttgcagctgcaggagctgtgatatgccaacgagtacgccctacaatccatgatgttatcacttcaaagattaaagcatgttctgaagacgcttcaaaatccagtatgggcaaagctgcaaaaacgaatgatgtgttgcattcaaatggacccactccccggtttcaaatgttcacacagaaaacaaggcgcatctgtaatggcagcccaactagttgtcagtcccatttcgccgactatggcacccactggagatgctcagcgtgcagctactcaacttcttagatcaatatttgaatgtcttgtagagatacttgagaaccatattattgttggagagcttcttgaacaaaaatcatctgaggttgataatgtaaacacacctcatattgcaaatggggatgcaagctggaatccagactctgaatctttccaagctactggtggtttcagtgttgcattctctctatcagtcgtgcagagtgagtgccagcaacttctgtgtgaaattttgcgggcaactccagaagctgctactgctgacgcagctgtccagacagctaggcttgcaaataaggatccagtgaaggaaaagagggatggatcagaaggcctttcttttgccttccgcattactgatgcagcaaccccagcgtcaaatgaaggtcaaggatggcgaagaaattccaatgtgcctcaagaagggtatggaacagcaagtgtcatacctgaccaaggaattttcctagccgcgtctgtttaccgtcctgtttttgagtttatgaataaaataggtgatgttgcctcagaagtactcacaacttagtgatggcttattggcttttgtgaataactttctgaaggagcacttcttgccagcaatatttgtttgactggttatgccttatgtgggctttggctaccaaatggttctccacctgtttccatggcggtgtttgtgtggatttagctggtttttgctatttagtaattttgtttccttttgtatttcacgtgatatattcttttgtatgtcttatcagttatcattgattgtaaatttgtagtgttccggataaaattttcattattgattattgtaaatgtgttatctgtctggatgcgatatttaataagctcatcagattcagtgtccaaaaaaaaaaaaaaaaaaaaaaaagtactctgcgttgttaccactgct

SEQ ID NO: 97482 - DNA, 641 bp, Zea mays
  Clone ID: MRT4577_20417C.1
gtgtaaatgcaccaatacgtcacaagtgtttatctatcattggaaaattaatgtactacagctccgccgaaacaatccagtctctccttggcacaacaaacatatccagcttccttgcgggcattcttgcatggaaagatcctcaagtgttgattcctgctcttcagatagcagaaataatgatggaaaagcttccagagacattttccatgttatttgtgagggaaggtgtcgttcatgctgtggagtcactcatatgttcagaatcttccaacaaaatgccttctcaggtgccacctcaggataaagataaagattctgccatgccatcacgttctagacgtcaacgccggcgtgcgggtgctgttgcagcagaaaatagttcattggatgaatcaaatagttccaaccttggtgttatgtgctcaacagcaaccgcttcagaagctccaaacaccagccttcgtttcacagttagtgaccatgcaaagtctttcaaagataaatacttcccggcggatactgattcaagtgatatcgggtttactgatgaccttcttaaactgagggcactctgtgcaaagttgaatactgtctctgagaacgtcaaaaaaaaaaaaaaagggaggccgctcgcgatc

SEQ ID NO: 97483 - DNA, 2527 bp, Zea mays
  Clone ID: MRT4577_20418C.1
ccggccgggcttcgccgactatggcacccactggagatgctcagcgtgcagctactcaacttcttagatcaaccggtgaatgtcttgtagagatacttgagaaccatattattgttggagagcttcttgaacaaaaatcaacatctgaggttgataatgtaaacacacctcatattgcaaatggggatgcaagctggaatccagactctgaatctttccaagctactggtggtttcagtgttgcattctctctatcagtcgtgcagagtgagtgccagcaacttctgtgtgaaattttgcgggcaactccagaagctgctactgctgacgcagctgtccagacagctaggcttgcaaataaggatccagtgaaggaaaagagggatggatcagaaggcctttcttttgccttccgcattactgatgcagcaaccccagcgtcaaatgaaggtcaaggatggcgaagaaattccaatgtgcctcaagaagggtatggaacagcaagtgtcatacctgaccaaggaattttcctagccgcgtctgtttaccgtcctgtttttgagtttatgaataaaatagggttgatgttgcctcagaagtactcacaacttgggagtgatggcttattggcttttgtgaataactttctgaaggagcacttcttgccagcaatatttgtagattaccgaaaatgcgttcagcaggccatatctagcccagcagcatttagaccacgtgtacatgcaacatcagcatatagttcatcggtggaacttggacgccctgtgcttcaagggcttctcgccattgatataatagccaaagaggttcttggatgggttcaattgatgccaaactatgcgactgagcttgtggagtatgtacgcacatttttagaacgtgctcatgagagatgtcgtgcatcatatatggaggctgtccttgaaaagcaaagttatattctcctttcaaggaatgacattgagagtttaatgcgcctggaaccagcaaacatttctttgcaaaattctactggtgaacatgataacaatgcaacaggtgcagaggcagtcgaagtagagattgaactaagtgatctcttattagatatgtgcccaataaaacaggaaaacttgatccatgacgaccagaaactgatattgttggcttctcttagtgactcattggaatatttagcagattcagttgaaaggcttggggaatcattcataagtccaccaaccacttcagagagcataaatcatagccatggtcgacatgcccgctcatctagtgcaattccaaaaagtctcgcgtctctggctaatgagtacagaaggttagctgttgattgtgtcagagtattgagattggaaatgcagctagaggcgatataccacatgcaggaaatgaccaaaagagaatacgtcgaagatcaagatgctgaagatcctgatgactttattatctcccttacaactcagattgcacgacgggatgaagaaatggctccttatatcacggaatcagaaaggaattacatatttggtgggatttccagtgttgctgctaatgcatcaataaaggcacttgctcaaatgaagtcaataaacttgttaggagtccagcaaatatgcaggaattcgatagctctggaacaggctcttgcagccataccttcaatagatagtgaagcagtccaacagcgattggatcgcgttcgaacgttctatgagttgttaaatttgccttttgagtctttgcttggattcatcgcagaacatgaatatttgttttctgctaaagaatacctgagtgttctaaaggtcaatgtgccgggtagagaaatacctgcggatgctgaacgacgcatctcacagattttgggtcactagatctaatcagacacaatggtgctatttttgactggttatgccttatgtgggctttggctaccaaatggttctccacctgtttccatggcggtgtttgtgtagatttagctggtttttgctatttagtaattttgtttccttttgtatttcacgtgatatattcttttgtatgtcttatcagttatcattgattgtaaatttgtagtgttccggataaaattttcattattgattattgtaaatgtgttatctgtctggatgcgatatttaataagctcatcagattcagtgtcctgtatggtgcacagacgagttgccagtcatgaacttttcagtcttgtaaaattgggaaatttattgggaatggttgaacaagtggaacgccataaaaatgtgacagtgaagtatgcactacactatgatgtttggtttacgaaatgtaaggtaaatagcaatagtaataattcacatccgagtatcagtggtaataagtttgtatagtccggtatcaatttctagtgtggtatctgattatggttggatttaaataaatatgatttaacgttaaaaaaaaaaatgtctagagtaatgtgtcggatgtattgtgttgagttgggtaaaaatgaaggggg

SEQ ID NO: 97484 - DNA, 282 bp, Zea mays
  Clone ID: MRT4577_20419C.1
ggggcgaaggagggcactttatataaggcccatcccaagatacagagggaaaaaagaaggcccggggctctaaattaactggccttagggggaaccagattttaaaaacaataataggaaagggggttaaaagggccgttagaaccaagcccagccgggggttcccttggggggaaaaggtaccccttcccctatgggggggatggaaggcattccagagacaaaatggggggaaaaaaaaaagcgacaggggggggggggctccccccaactacaaagctt

SEQ ID NO: 97485 - DNA, 353 bp, Zea mays
  Clone ID: MRT4577_2041C.1
aaaaaaatttaaaaaaaaaaaaaaaaaagaaaaagggaaaaaaaaaaaaaaaaaaaaaaaaaaaaaaggaaaaggaaaaaaaaaaaaaaagtttaaaaaaaagggggggccgttttgggggacccaggtttccgtccgcgggcttgcaacgtcatgcctttggtttggggtcccctaattggggggggggggccccctttttccaccgtcgtgccggggaaaccccgggggtcccccaccttaatcgcttggcagcacatccccttttccccggttggcgttttcccaaaggggcccgccccgatcgcctttcccaccagtgccccaccctgattggcaaaggggccccccct

SEQ ID NO: 97486 - DNA, 194 bp, Zea mays
  Clone ID: MRT4577_20420C.1
cgatgggtacctcgcggccggccgggccgggatttttcgagcagagctgggatctggctcagtgtgggtgaggggaatataggctagtgctgataaccaaacagggaaccaccagtcaagtcgccctcatccaccgggcctttgcgttgagcgttcctagttgtacctacaaggagagagatctcgcggaagtc

SEQ ID NO: 97487 - DNA, 338 bp, Zea mays
  Clone ID: MRT4577_20421C.1
cccctgctcagtttttttgactacgatagatatgggacagctttaaacagagaggagtaaaaaaccggccggcaccccccccttatagccctccttcgggttcgttccgggttgggcaactatctttggctggctctctttacacttttactacaggcaaccaatccaatttgcagggcggaaataaggacccacatacaaggggccccaaagccgggggagtaatctgtactgggcgggcggggccgactttggaaaaaacgggggaaggacaacgttaacccaggtgcttggggaaaaggatggggggttcgccaaaaggcccttaaagccacccc

SEQ ID NO: 97488 - DNA, 360 bp, Zea mays
  unsure (1)..(360): unsure at all n locations
  Clone ID: MRT4577_20422C.1
ataccaacaactatatctacttcatagcgcacacaaaccagctcgacaccatgagggaggggggcgctgccctcgctctcctggctctctctgccagcgccacctacacgcatacaaacagccggtgcgggtggcagccaccgacggcggttcatctaccgacggcggtgcatgtgtcagctacgtntgacctgccagctacggtgcatgtatcaccgacggtccacctacctgcggcggtccacctaccagcgacggtccatgtaccggcggcggttgatttgtcggcggcatccaagtaacttacttaatcagccgcgggctttgtaattattattcatagccacacacatgcacgtg

SEQ ID NO: 97489 - DNA, 431 bp, Zea mays
  Clone ID: MRT4577_20423C.1
ccccccgtccgtacccgcgcagcgcgaggggggcaaacaagcttgctactgtgatttctcgtccgagcagcgggggcagagagagagagagcatggccgaccacaaggaggagcctgtgccggagtctgagatggacaagatcaccgagaagttccacggtggagactcgtcgtcgggggggggtgactcccacgacgacaagaaggatgtcctcgttggcgtcggcggcggaagccatgaaggccaaagtctaccgtcttttcggccggaagaggcccgtgcactgcctcctgggcggcgctaagcctgccgatcttatcgtttgggaaaacatgaagatctctggcggggttctttctggtgccacggtcatctggctcctcttcgaggacaggcagtcccatcttgcccccttggtgcaccactgtct

SEQ ID NO: 97490 - DNA, 1885 bp, Zea mays
  Clone ID: MRT4577_20424C.1
ggccgggtttcttctcgcagctcttaagtgcatagcttgctttgtgccaccaccgtaccgtaccaaacagatcaaatcagagatggcaagtcgtagtagctctgcagaaggtgcaggcaggacgttgcctgtcaatctcaagttgatcaccgtgctgagcatcgatggcggcggcatcagagggatcatcccggccaccatcctcgccttcctggaagcgaagctccaggaactggacgggccagacgctcgtatcgcggactacttcgacgtcgtcgccggcacgagcaccggcggtctcctgacggcgatgctcacggccccggacacgaacgaacggccgctgttcgccgccaaggacctggcgcggttctacatccagcactcgcccaaaatcttccggcagaagaatgctatggggtccaagctcgtcggcaagctgaggatggcttgtgggcccaagtacgacggcaagtacctccatgcgcagctccgacggcttcttggtaatatgaggctggacaggacactgaccaatgttgtcatcccgaccttcgacattgcctacatgcaacccatgattttctccagctttgagttgaagcaccggccgtcgacaaatgcgcttctgtcagacatatgcatgagcacctctgccgcgcctacctacttcccgccgcactacttccagaccagggacgagaatggcaggaggaaggccttcaacctcgtggacggcggaatcgctgcgaacaaccccaccctgtgcgccatgggccaggtgtctaaggacatcatccttgcggacgacgacttcttcccggtgatgccggcggactacggcaagttcatggtcatctcgctcggctgcgggtcgaaccggaaccggaggtactgcgccaaggccgccgccaggtggggcgtcttcagctggctcttcaaggacggcagcgctcccatcatcgacatgttcaactccgccagcgccgacatggtcgacatccacctctgcgtcctcttcagggccctgcgctccagcgaaaactacctgcgcattcagtacgatcagctgacgggcagcgcaggctccatagacgactcgtccaggaagaacatggatagactggtgaggatagggaacaagctcctggacatgaacgtctcccgggtggacatggagaccggccggaacgtggaggtgcccggtgcagggaccaacgccgagaggcttgccaagttcgccaggcagctctccgacgagcgacggcgccggagccagaacgagcttattatgaattccgagcaagtgtttcaaattcaacatcaagcttggtactacggtggtgacgcttgagctgcatccggcctgctaaatgaggtttcagtactgttctagagccgtgtttcatgctttcggctatgtaccattattcctcatgccgctgttgtcaacttcgcttcagtataacctgggcaagaggtgtagacgtgtagtgttgatatctcgactcgtcaggacatatccacgggctcaaatctttcaggaaagaagcgacagtaccaggcctagcccaggtgatgccgcgtgatgaagtgaagagttcgaatgactttggacggtcagtcacagttattttcggcagcctcgtcctgcccatggaaaataaatagtaaatttcggcggtttgtatcggccgacgaaaataaagtaagtttcggcaacttatattaaaaccgtcgaaatttagattattttcagcggcccgtgctcttgcccccaaaatttaaccgtttttaccccataaaaaaaaaaaaaaaaaaaaaaaaaaaaaaaaaaaaaaaaaaaaaaaaaaaaaaaaaaaaaaaactcgaaaaggggcgccgg

SEQ ID NO: 97491 - DNA, 607 bp, Zea mays
  Clone ID: MRT4577_20425C.1
attaaaaagaagcaaatcatttgcactctataatttgtggtacagtattgcttattgtgactttggcatgcatttttgcaaacaatgctgtaagatttatactactgataattttgttttatttgtatacaatatagagtatgcacatttgggactgcatttctggaaacatactgcaataggctctctgagcaaaacacctgtaactaaaaaagtgaagataagaaaatactcttaaagctgagtatttcctaattgtatagaatcttacagcatctttgacaaacatctcccagcaaaagtgccggttagtcaggtttgttgaaaatacagtagaaaagctgattctggttatctctttaaggacaattaattgtacagacacataatgtaacattgtctcaacattcattcacagattgactgtaaattaccttaatctttgtgcagactgaaggaacactgtagtataccccaaagtgcatttgcctaggacttctcagcttctcccataggtagtttaacaggcattaaaatttgtaattgaaatgttgctttcactgaaaaagtgtcttgatgtttcagttatttttaatcgccataaaaa

SEQ ID NO: 97492 - DNA, 279 bp, Zea mays
  Clone ID: MRT4577_20426C.1
gctaatttttttattatcgtatttcaaaaaagcggcattgaccgcgcagagaattttctccccatattatcaaaaggaacaatgctggggatcaacgatgtccacggagcctacatattgtcaccattatcgccgcggggaagcaggcaaagaaaactaaagagaaagcttgccgttcttggcctccaatcctatttggaaccaggaggaaggcgagcaaagaagaatcctaaagggaaaaaaaacctccctagctagcttgggggaaaaaccatgcct

SEQ ID NO: 97493 - DNA, 420 bp, Zea mays
  Clone ID: MRT4577_20427C.1
agtgttcccactatctgcatgagtgctttcatgtcatgagagctacgcacatcattggggcgctctacatgcattataggctcacctttaatacattgcgtacctatattagaagatggatccgattgatgaccaggaacacatcgagattaatctcacggactctttgcagtatactctgcagcctttaatggacaatcttgaatcttatacttatgagacatttgacaaggatgctgacaagtacactcagccggagaactttccaagtactatgttcagcgaacaggatgcacaaaaagtcataagctgcaacgatgcggcgatgaaaaatgttccaaacgtgccctcaatgatcagcttccacatagttctgagcatattactgaaaacaatgatgatttcacacaattgtagttt

SEQ ID NO: 97494 - DNA, 374 bp, Zea mays
  Clone ID: MRT4577_20428C.1
aaaaaaacaaaaatacttcgcagtggttccaacaaactgggttaatctgatttggaatcaagagctacaacaatgaattgtttttttctcagatccattcatgtatggattttttccaaacatcggtcaatgtataggctggagagggagctggattagtcaattatgtacattaggttctcttttccattcttacaagcagcaacatgtcatgttagattaattaatttgagtgaggaatggaactgttaggtcaacttagcaagtcatcactctacatagattacttccaatcaattgaatattttttacctgttattttgtcaataagttacattatctgtttttcctttattacattttacaagatcttc

SEQ ID NO: 97495 - DNA, 559 bp, Zea mays
  Clone ID: MRT4577_20429C.1
ggccgcgggttttttttttttttttttgaacatccttgtatatatcatgccacccagttcttatctcatggctacttgaagcaatgtacgttatacagttcatttcctgccagtgttgagagggctgttggcgtcaaatacatcggtggtgatgagctcagggtatgtcaccccaccctgcttcagcgcactatccatgacttccatgatggcaatactctcagaccaaggcatcgatgcgctctccttctttccgtcacgcaagcatcgcgcacactcatcagcctcccagaacataccgtgaccccagttgttacgcttggggtccgtagggatcgggcatgtcaccacctcgacgttgccgttggcgtctgacttgatgaccttgtattcggtaggacggtatgcaggacctgtaacttgaatctcacccttggaaccttgaattcggatcgccgggccaccggtgtagtgaccgtcgacgtcggttgcgatgcgcagcgaggtggttgcaataccgacgctcctgtgcttgggaaattggcagatgatacttgtc

SEQ ID NO: 97496 - DNA, 520 bp, Zea mays
  Clone ID: MRT4577_2042C.1
tcaagcgggcgggcgggcaggtgctttttttttttttttttgttttttttgtttttttttttttttatttttttttttcatttttttttctttggttaccaagagattaaagctggttatgcccattgttaggaaaagatgttgttgatcaccctaggggaccggtgaatgttaacaagctggaataggatctccttatttcgggggggccccatacattatagaaaaaactttgttaaagcccagcacttaaaaatatacgaaaaggggggccccccaaggatgcggcatacggtagggggccttggggtttgaaaaatcacgggggacaaaggggaacacattgatgtggttcaaaaagggggggggggtaggccgaaaaccgtttggaaaaaggggaaaactgttgttgggtcaagaaggaagcacgacttgctgcaggtagctcgctaaagggcagtggaatttgcgggtgcaaataagcagggggggtcagtgggggcaattggttaaacggaaa

SEQ ID NO: 97497 - DNA, 285 bp, Zea mays
  Clone ID: MRT4577_20430C.1
ggcccctaggcaccgaactttttattccttggtaaaccagggggaggccccccaaaaagggggaaaattccgtgccttgtggggatgggtgaaatccaaaaccatctgggaggggacgtgagccaaaacaagccccaaccgtttttttaaaaaaaataaaaccttttcccagatggagcttccacttccaccacttgtttctggggcgggacgttttttttggggggtcctattttccaagagttcatcccggggaacctgacgtcccccttgccgggggtgaaa

SEQ ID NO: 97498 - DNA, 268 bp, Zea mays
  Clone ID: MRT4577_20431C.1
cattaaaattatctgtattgccgctaacaaatcatgaccggatgttagtattcaaagaaccaggcatattggttgccatgtcagatgcctgccacccggatgtgatactaccattcacagaatggctactcgaggcgccaaagccttcagggccgaatactggttaaaacactacactgtactaccgttaaccgttcgttgggtgaaaccactggaattgccctcctgagacgcaaaccgctcaccgtttcaaaggaagggctatctt

SEQ ID NO: 97499 - DNA, 829 bp, Zea mays
  Clone ID: MRT4577_20432C.1
ccggccgggacgcacctctctctccttcagctccctgcgcgccgcgtgagctcgccgtgccggagctccactgcatcgccccagctccctctgcttcccagctcggccgctcctccctgctgcacatcgcgtccggccgagctcgcctccgacctctgcttgtcctgctgctgctcgcccatggcagccgattcctctatgcgcgcgctccctgtttccccgtccaaagctctatggtgtccggctccttgcgcgccctgccgagcgccctcccggcttcctgctcgccgagctcggcttcgagttcctatctcccatgccgcggcactccactgtgcgctgctcgccgagctcgccctgcgctcggattccaccttcctgcgtgcgtgcctgtatgtgcgcgccgtgctcctactgcgcgtagctgtgtctactccttcctcgccttagtccctgcgcgcgtcgagctttcgtgtcgagctctcgcgccgtcgaatcgtctgcttgctgtctgcgccgtcgaagttccctcgccgtgtgctctgacatcggctgctgccgattccgccataaagttcgcgagcgctccttgcttggctcgtttcgccgtgggcaatttttccacgtttcaaatctgtgctacttggtcgcgtttggtcgtcgagctgttgaacccgtcatctctggcttgatccccacctcaccagcttaccccagacttcaatagaaggtcgtcgtcgttcgtgcatcccaagaaaactcaagaatcgggtgaagacgaagttagcagcgcgattttccccagcgctcgacaaattgcctggatcga

SEQ ID NO: 97500 - DNA, 1441 bp, Zea mays
  Clone ID: MRT4577_20433C.1
aattaaatgctaaccttatctcttgctttataaattatactacatctttacaagtgattaaaatattcctttatcacacaggcctactaatattctactcggtacattaattcagctaattgaccggaatagcgaaataactcgctataactgaacctggctcgataatcgcaagaactgcaaagtcgacgagagtttcgtgacttacgcaatttatcgagcaccttaataagcatcacactaatttattcatcgatcgaactattctgaataatttatcagcttaccgtttctacatctgacacgaatccgcgagatcggtagcgattttccgatccaggcaattggttgagcgcttgggaaaatcgcgctgctaacttcgtcttcacccgattcttgggttttcttgggatgcacgaacgacgacgaccttcgattgaagtctggggtaagctggtgaggtggggatcgagccggagatgacgggttcaacagctcgacgacaaatgcgagcacgcacaaacccgatggatgagaagcgagcgcacacggggcaagcagcacggatttaaaacgtggagaaattgcccacggcgaaacgagccgagcaaggagcgctcgcgaactttatggcggaatcggcagcagccgatgtcagagcacacggcgagagaacttcgacggcgcggacagcaagcaggcgattcgacggcgcgagagctcgacacgaaagctcgacgcgcgcagggactaaggcgaggaaggagtagacacagctacgcgcataggaagcagtaggagcacggcgcgcacatacaggcacgcacgcaggaaggtggaatccgagcgcagggcgagctcggcgagcagcgcgcagtagagtgccgcggcatgggagataggaactcgaagccgagctcggcgagcaggaagccgggagggcgctcggcagggcgcgcaaggagccggacaccatagagctttggacggggaaacagggagcgcgcgcatagaggaatcggctgccatgggcgagcagcagcgaggacaggccagcggcgacgaggtggtcgagaccgccggcgatgcggttgtcggagagggtgagccgcgtgaggttccgcagccgcgggaaaccctcgagcgacgtgaccccgacgccagcgatcgaaaggtgctccaggctctggtgccgctccagtatctctgccgccggcagccgcccgtgcgtgcacttgacggcgccgtcaagcgtcaggctccgcgccggcgacgagctcccctcgccgccggcgtgcagcgccgcctccaccgcccgctcccatgcctcgtccaccatctcttcttcccccttctgccagtaataaattattaattgttttttttccacggaagtgtttggatgcgaggggattgaaatacagagtatcttcccggccgg

SEQ ID NO: 97501 - DNA, 262 bp, Zea mays
  Clone ID: MRT4577_20434C.1
gcgatcgtaggagcagagagagacttcctcggcttcatcccatacagacgtcggcgtctcgacgggcgctaataagcagccgcgtccagggatggagatgaagaagatcgcctgcgccgtcctcatcgccggctcggccaccgtggcgctggccgcggaggcgccggctacgaattacaccagcgggtgcttcaccgtcagagccagcatcgtcggggccgccaggggctccttctctgcggactacagtgactgatccggc

SEQ ID NO: 97502 - DNA, 297 bp, Zea mays
  Clone ID: MRT4577_20435C.1
ctagtcgacaagcattctcttcacaacactcattttcttgatatgcaggagcattatgttgtgcaatatcattttccggacgcgtgggccagaatgaggtgttccaacgcctgccagggtcagtgtatcaaagcattgaatttgcctctaatacacttacctatgacagttgttgtaaacagggatccgctgggcattcaaatctaaaggttgaaaatacggagggtgctgggatttcagtactgctgcagaagtcaagcagtaacaaatggcctgttatagaagggcgacccttag

SEQ ID NO: 97503 - DNA, 194 bp, Zea mays
  Clone ID: MRT4577_20436C.1
tgcacacttgcaacaccaaatcgttacccatttgacgagctgaagacgcattgcctcttggcattaccatgggaggtctacatagtctacataaagcactggctgttgtatatcgatacatgccattgtcatattgatatcaaatagactattgacggatgacactccaaacaagataaaaatgatcattgtgt

SEQ ID NO: 97504 - DNA, 576 bp, Zea mays
  Clone ID: MRT4577_20437C.1
aaaaaaaaaagttaaacccttgggcaaaacacaggcccttaatttaacaaagcaactgggcacccgtttcttcccgtaaaaaactaaaaaaatttttttttagcgaccccaatgttcccccttgggggcatcgaaatttttttccttgatcaaccgggttttacgggtcctgacccaaacaacaaaccttgcgtgactaaaaaaaacccttccccttggggtcttcaattttcgggaacaaagggaacccccgtttccaggaggggtccccctgttgttaaatccacaaaaggaagcagttgcccaggaggcaaaacaagttcacatacaggagctggtcccgcccggaaacaaagcggaagttcgggatctgcacagaaggccaaatggttccccctaaccccaaagccggaaggaagccccttttaacgtcctccttaaccgggtttatgctccttccttggcccagaccaatttttgaaaaaaacaggggggggtctaggggcccaaaaaggaatccatccggggaatctttggaggggacaaatttgaacgggttaggctgaaccccccgcc

SEQ ID NO: 97505 - DNA, 444 bp, Zea mays
  Clone ID: MRT4577_20438C.1
gagctcgttttcttttcctctaggcagagaagaggcgatggcggcgatggcatctctcggcgccctggcgctgctcctgctgtccagcctctcccgctgctcagccgaggcctgcctggagccccagatcaccccttcctactacaccacttctgacgctgtcatttccactgagaccgtcttcattgtggagatctccctgacatgcaagaacagggtccagaacatggctctctatgctgacgtcggtggaaaacaattccctgtcactcgaggccaggatgtggggcgttatcaggtgtcctggagcctggaccacaagagcgcccacgcaggcacctatgaggttagattcttcgacgaggagtcctacagcctcctcaggaaggctcagaggaataacgaggacatttccatcatcccgcctctggttacagtcagcgt

SEQ ID NO: 97506 - DNA, 289 bp, Zea mays
  Clone ID: MRT4577_20439C.1
ataaggggaaggggtcaacatcccacttaacaggtgtcgaacccatttgggcttggaggttacattggtgaaggattgtcgagtgccaaaggacaaccaacgttgcgacttgggaaaacatatcacagggacataaaaagggggcccccagggggtaaaaatggggcgggcggggccttttttgaggaacctaccacgcggggaaaagggggacagcctggatgggcgggtggggggtatgagttgccgaaaacccacaggtgccacttgttcccccacggggatgctg

SEQ ID NO: 97507 - DNA, 415 bp, Zea mays
  Clone ID: MRT4577_2043C.1
caagcatataccagcgactgagcgagcgttatgcagtacacactgtacgcagctcgctgtgagcatctgcggcggctctgatggcggcctgcatgatctgctagttagctctcgcggtggcgctttacggcctgcccggcttctgacaccgcgactgctgacttcacgtcatctgctcccagaagaagatcaagaccgacaagccctaccggattgggggtggcctgaccgtcgtacttcacgccaactgcataaagggctaggtcaagtgcttgtaccacttcttcgaccaatactgcccgaacgtcgacggattcagcctaatctacaacgaggatgactgggctcccaccggacacatctacctctggggaactactgggcttctgatctgggccgttaccctttatgggat

SEQ ID NO: 97508 - DNA, 363 bp, Zea mays
  Clone ID: MRT4577_20440C.1
atccacccggcttggtaacgccacgcatgaaaggtaagggaaaccttgaccggcaagggccagctgtgtggagcaagaactcctgcaccaaaaaatatgactgcgagatatttctcaaatcgctggtgatagacatcttgaacaaaggggaggtgtcctgggtcatactgcgcaacaccacaatcttccacaagatcatgttatagtgcaacgacgatatgatgatcgacgtgatcgtcatggcgccccgggacaaccccaacaccgatggcatccacataggcgactcatcagggatgattatcatcaacaccatcattggtgtcgtcgacgactgcatcatcatcagcgccgggaggacca

SEQ ID NO: 97509 - DNA, 164 bp, Zea mays
  Clone ID: MRT4577_20441C.1
tactaattaatatatcacaagcaaacaatataaaaaaatacaaacttacatacatccttacatccaaagagctaacctataaaagagtctataccttcattccattcactttccttcattctacaaccctatgactggcaacaccctgactttacccaacttaa

SEQ ID NO: 97510 - DNA, 490 bp, Zea mays
  unsure (1)..(490): unsure at all n locations
  Clone ID: MRT4577_20442C.1
ttttntttttttttttttttttttttttttttttttttttttttttttttttttttttaacattaaaatcgggaaaggaaacttttaatttcgggggggccacatccatcatccaaaaaacctttattatggaataacatcaaataagcaatcaaaaagagggccccaccaatgatgtgttgttggcaggaggctgctgggtttgccaaagcaggttggacaaagggcaacaattgttgaacttgaaaaagggttgcggggttagccaaaaactgcgggaaaaacggcaccaactgttgttgaaacaaaaagaaaccacggtttgctgaaactagctggctaaagggtagaagtatttgctgctgcaaaaaaacagcggggttcagggcggccaattggttaaatggaaaaacttgttgttgtaaaaagaaagcattacctagctggcaaaagggaaatagttgttgctgaaaataaccagcagggttca

SEQ ID NO: 97511 - DNA, 497 bp, Zea mays
  unsure (1)..(497): unsure at all n locations
  Clone ID: MRT4577_20443C.1
aaaaggaaaaagaacaaaagagaagaacaaaaagaaaaaaaaaggagggagagcgggagaaaggcccccccggccggcccgaccccacaggacccgaaagaccccacaagncgccacgccacgccagggccccagcccaccggggggccggccacgccccaccggcgcccgcccggaagaagcagcaaagcccggcccgccgagagcccagaaaaaaggggcgccgagccccccgcgcctttttttttttttccccaaagcgaggccccgggggaggggngaggaaggnaaaggaaaggggcgccgacgaaaaaaaaaaaaaaaagacggcccgggggggcaagcccaagggggcggaaaaaaaacccccgcacagcggggaagaagccgggccgcaccacgagccgaaccaggggagggccgccacaaaggccccgaagggaccgggaagcccccccggcaaagagggagcagccccccccgggggccaaaccccc

SEQ ID NO: 97512 - DNA, 336 bp, Zea mays
  Clone ID: MRT4577_20444C.1
tggccgcgtgggggactgttgtctgtgtctctattggtgacaaatgggctaccgtcgcctcaggggttctaccccatgtgttgaggtctcaggccctgttgccgtacctagtactctctaccagcatatataatggaagctatgcccatggcagctctggacgacacactagtctgggggggggaggcatttgctaatatcccggtggatatgaaaggaaggaggccggttatgataagcgccatcgatggagtacatactggtgtaccatagacctgccaactgggaaaagacgcgacaaatacactgcagagccacgaacgaaaagactaacac

SEQ ID NO: 97513 - DNA, 1788 bp, Zea mays
  Clone ID: MRT4577_20445C.1
atgcacggcgatggcgaagtgcgacgcggcggtagtctcgaaaggaggggggcgttgcggctcaagcgcggctgtgacgggagacggacgggggtgaaggtcgcagaggtcaccgcttccgccctcgtcgcagaggtcaccgcttccgccctcgtcggcaacgcggatcgtggcatcaccgccgcgggcgtccactcgcctctgggcatgggcggcggcgaaacagggccaacaaaagaggaaaagaaaaggaaaagagttggctgtgtgcagccaacaccaactctggccaggcacacaggactgtccggtggtgcatcggacagtgtccggtgcgccaggctggtcggcgcaagagacgacgatgacgacgactcttcgtcgaaaaagaaaacggttaatcagaactactcgtttgactattctcgcatgccatacaattcaaatgcgcatttactatcaattccccttggaaaacctccacactttgatggagaagattattcattttggagccataaaatgcatagtcatctattttctctccatcctagtatctgggaaattgtagagaatgggatgcattttgatagtatagataaccctgtgattataaatgaaaaaattcacaaaaatgcccaagccactactgtgttgctagcatctctttgcagggatggatataataaggtgagcggcttggacaacgccaagcaaatctgggataccctcaaaatatcacatgaaggaaatgatgccaccatgattaccaagatggaactggtggagggcgagctgggaaggttcgtgatgatcaggggagaggagccaactcagacctacaacaggctcaagaccctagtcaacaagatccgaagctacgaaagcacaagatggacggatcatgatgtcgtccgactcatgctaaggtcatttactgtaattgacccccatcttgtgaatcttattcgtgaaaaccccaggtataccaaaatgacgcccgaggagatcctcggaaaattcatgagcgggcgcatgatggtgaaggaggctcgatacgtggacgatgcactaaacggtccactacccgtctacgagccacagcccgttgctctcaaagcaaccagcagcagggaggcgctacctagcaaggtggcacaagtggaggcttccgggctcaatgaggaagaaatggcacaagaaagatatgggaagaaggagaaaaagaagaactatcggaaggcgaaaggcgaggctcatcttggaaaggaatgggactctaattgctcctcatctgattccgacgatgagggactagctgcctcggccttcgacaagtcttcactcttccccaatgaacaccatacttgccttatggctaaggagaaaaaggtacgtattcgggacactcccaagtacacttcctctagtgatgaagaatcttctgatgatgaagtagattactctgaattgtttaaaggtttagatagagctaaggtagagaaaattaatgaattgattgatgctctaaatgaaaagggtagacttttagaaaagcaagaggacattttgtatgaagaacatgataaaattgttagtgttcaaaaatctcttgctctagaaattaaaagaaatgaaatgctattgtctgagttgtctacttgccatgaatctgtctctagtttaaagagtttaaatgatgaattaaatgctaagctagaggaagcaaatgcacctagatcatgtgtggaacatgtagttatttgcaatagatgcaaggacttctga

SEQ ID NO: 97514 - DNA, 1629 bp, Zea mays
  unsure (1)..(1629): unsure at all n locations
  Clone ID: MRT4577_20446C.1
gggtacctcgaggccggccgggccgttccttctcattctcatccccgacccccgcaccgcagcgtaaaccctagtccccggcggcgaccttgcggcctccgctgcgctcttacagcgtgcgtcggttaggttcttgggaggtgggggtgtctcggggattcgtcgtggcgtgcaccggcgtctgcccccacccgcgcctagccgcgaaggtgcgcgtttagacgaggagctgcggcggccaagaccaatcgaccatggctacccgtatccagtttgagaacaactgtgaaattggtgttttctccaagctgacaaatgcttactgtctggtagcgattggagggtcagagaacttctacagtgcctttgaggctgagcttgcagatgccatccctgtggtcaagacctctattggtggcactagaataataggccgactttgtgttggaaacaagaatggacttctattgccacatactacaaccgaccaagagcttcagcatctgaggaattgcttgcctgatcaagtggtggttcagcgcattgatgagaggttatctgcccttggcaattgcatagcctgcaatgaccatgttgcacttacgcaccctgaccttgacaaggagactgaggagttcattgcagatgtgcttggggtcgaggtgtttaggcagactattgctggaaatatccttgtggggagttactgcgccttctctaacaggggtggtttggttcatccccatacatccgttgaagaccttgacgagctctccacgctcctccaagttcctcttgtcgcaggaactgtgaacagaggaagcgaggtcattgctgcaggcatgacagtgaacgactggactgccttttgtggctcggacacgacagccaccgagctctcagtcatcgaaagcgtcttcaagctgagagaagggcagcccactgcgattgtggaggacatgaggaagtctctgatagacagttacgtgtaactggggggccagcagatgtgggtcagagtttgcctttgctaaaagatgtattgcaagctatagtcgaattatcagtagcacaacataaccctctgatatgttcgtggtttatccgtggtttctgaattgtagacttctgcgttgaagctcgtgctactgtttgttttccattgtttgttcacaccaacagctatatgcagatacatggcttctcagtgttacgccggctgttaccccggcaaattaataagcttggggaaaaaaaaaaaaaaaaaaaaaaaaaaaaaaaaaaaaaaaaaaaaaaaaaaaaaaaaaaaaaaaaaaaaaaaaaaaaaaaaaaaaaaaaaaaaaaaaaaaaaaaaaaaagggaaaaaaaaaaaaaaaaaaaaaaaataacaaaaaaaaaaaaaaaaaaaaaaaaaaaaaaaaaaaaaaaaaaaaaaaanngctttttaattttaaatttatgggccccccgcccccccccccctttgggaaaaaaaggcccctctggggggccccccaaaggggggggggggggggggggcccccccccccccccccccccgggggggggggggaacacaccccccccaaggggcccccccgcggggggggggggggggccccccccccc

SEQ ID NO: 97515 - DNA, 212 bp, Zea mays
  Clone ID: MRT4577_20447C.1
tcgcgcccgctgcctgactggcattattggcttccgggcttcgctattcatccgaccgtccgtgggttcttccttcggttcccggtacccggcccggcccggcgagaagcttcgggctagctagcaaggtagctaggcacctacccgtgctttggttcggttgggtggcgccataaccattgccgaggagcgagggagcaacccggcgggca

SEQ ID NO: 97516 - DNA, 605 bp, Zea mays
  Clone ID: MRT4577_20448C.1
ggtaccctacgggccgtccgggtggcggattgcacccgccctaaatcctaaagagaggaggggcctaagcgttttgcttgctactggattggtggatcaacacacgagagcacgcgaggatttagagtggttctggccgctggagcgtaataccctactccactgtgtgatgtattgcttgggagcttgtatgaacttgagagtgtctgcctagagttgggtcctagcttggatctatcttgtaacgtcgcatgcctccccttttatagctgaaggggggcatgcacaaaggtactgagccccgacatgtgggcccagggacatagagaatataacacttgggactataaatatttgctgccggggaaatcgcttgtgtcctatcgtccgagatctgtgtatcttcggcgtgtaggggaagcttcttgtagaagggataacatagtgcgctgcctggcacgggcgcactgtttgccagcagacccagcagtcgcgccgcctgctggatgaccttgacaccgcctgccagcggatgggacgagacacatttaatgctgagagggcacgttgcccgtcgcctgtcaacgcagtggcaggcggcgcgt

SEQ ID NO: 97517 - DNA, 266 bp, Zea mays
  Clone ID: MRT4577_20449C.1
gtaagcaagtaaacttactgacgtgtcagtgcgtgataaacttgaaggcttccgtgataaaagtagcgaacttaaaaggtttgagtgttcctacaatttcatctgtgggatcaaatgcagcagctattcactatcgacctgaagcaaacacatgttcggacatggttgctgttaaaatatatcattgtgactctggggcatagtacctggatggtacaacagacattacgagagactgtagattttggtccaccctcggcatatga

SEQ ID NO: 97518 - DNA, 130 bp, Zea mays
  Clone ID: MRT4577_2044C.1
atctgcctaagttagtcgaggaccttatccaggcatcgatgagcacagggcctcgaggtgctttcaggattgcccaagggatccaagcggtgcttggggttggtgttggattgctgaatgacctctcaga

SEQ ID NO: 97519 - DNA, 586 bp, Zea mays
  Clone ID: MRT4577_20450C.1
tcgcgtacactgccgaggcactaccacaatgttgccatgaatgggaaaaccttctgccaccagaatgttacacatgcacagaaaagaaaatatacaacaaaaaagactgaaaaaacacctgaagatacccaacttaaaaaaacttgcaacacatcccaactttaaacaaataaaaaaaaaagggccctgcccggccaggatcgtacttccaaaacatatttttgcttggaataaaaatttccacaaactgttccggtggattaaactcgataaaaggatctttgactaaaaatccaaaaaggtttttttccaacggaactaaaatccttttttttttttgtagaaaactggacccccaatacctaaaaaacgagggtttgggttaactaaaaccttcagttttttattttgtttcacctcggaggaaacccaacttttttcctcagaatctcttgattaaaattagggaccaaagtagtgggactaaatccttttttaggaaaattcttacttcctatttttaagggaccttctaaaaaacggaaatcttggttccctttcaaacaaaaaacctgactaaaatgtt

SEQ ID NO: 97520 - DNA, 486 bp, Zea mays
  Clone ID: MRT4577_20451C.1
atgggaggggaacgtgaggtggaggaccctatcaaagctcgaagcccagagctgaagggggcattcacaaaggcactgagttccgacatgtgggcccagggacatagagaatataacacttgggactataaatatttgctgccggggcaatccccttgtgtcctgtcgtccgagatcttgtgtatcttcggcgtgcaggggaagtttcttgtagaagggataacacagtgcgctgcttggcacgggcgtactgttcgccagcagacccagcaggcgcgccgcctgctggatgaccttgacgccgcctgccagcggatgggatgggacgcattaaatgctgagagggcacgtcgcccgttagcgcagtggcaggcggcgcgacctctcctcaataaatgcaggggctgcatggctttacgtcaggctcggcccgatggcttatgtcataggccacaagcagcgggtctccgcctgagcgggaagtga

SEQ ID NO: 97521 - DNA, 947 bp, Zea mays
  Clone ID: MRT4577_20452C.1
cccacctgggaaaaggggatttttttccaagccatttaatttgggtaaccccgggttttttcccttcccccgtttttaaaacccgggccctttattttttttttggggccccaaaaaaaaaattttacctttccaaccccgggtagtaaaatttggtcctttaaaaaggcccccccccttttttttttttttttttttttttttttttttttttttttttttttttttttttttttttttttttttttttttttttttttttttttttttttttttttttttttttttttttttttttttttttttttttttttttttataaaatggtgaagcgtccatgtgttggttgtagtgttccgtcactagcagcagctatttatcgatagcatgtctttgttgcagcatccactgatagagcagacaactagttactagtgtttcgacattttgtatggcatagataaactcatggacggggtcgcccagatactagggaacccgatggcgacggagttcggcccgtcgcctgttggtggggttggtgtctggagtggtggggtcggcgctgcaacggaggcagcagtcaccgattctgaatatgggagcgaacctgggtaccgtggcgacgtggagctgggatatggagatgaaatcgacgaaaaggaggaggatgggaggcagcagctgttctggggcggggtgattggagctacagatggtcaaagctaaaaacttttggcattcgacaagcctaaaatgacttatattcacgttgaagtataatgttacatgagatagtttggtctcgtgtggggcatgctttctatatgcatgtcagttcatgtatattatctctagatttgttttatgttccccctgtttttttatttttattgagacatgtgagcttcagattagtctaatgtaactaatgcaaacaacccaat

SEQ ID NO: 97522 - DNA, 278 bp, Zea mays
  Clone ID: MRT4577_20453C.1
caaaaaaaaaaaaaataaggggggccggttttaggaatttttttaaacccaaaaaaaaaaacccccaaaaaaagggggaaaaagggaaaaaaaggcccagggggccaaaaaccggcaaaagcgggaaaaaaatcccgggaaggggcccaccgccaaggggctcaatatgggaagggcaacaagggggcccttgggaacccgggacaggggcccaaagggggcagggaaaccaagggaaccctgggccccagggacctgggcccccttgggccggggga

SEQ ID NO: 97523 - DNA, 221 bp, Zea mays
  Clone ID: MRT4577_20454C.1
ttccctcttgtacaccttcagttcctcgattttctactcccataacacaaatagggcgcgtgttattcaacctgttagactccaaaaacactgatctcgactgatgaacctactacattcacctgccaaaccgcatgctcctcattgtacctactcatccatagcctcctttagatacaacccacacacatgctgcttattgcactacatgacatcaaggc

SEQ ID NO: 97524 - DNA, 267 bp, Zea mays
  unsure (1)..(267): unsure at all n locations
  Clone ID: MRT4577_20455C.1
acggcttttaatttaatgtagccgttgacttctacctatagctagttcacttgtttattggcgatgagtatcggtattgtccccattaccatgtgtgtcagcgagagcaatgttttttttttttcttttnncnanctttggggggggggggggggttttctncnngcccggctggcacctttcgggggggggggtggtgtcccccctattggcttcttgtcncngcgtctgttgttgccggtctgcctgggcgctgggcgttgcgct

SEQ ID NO: 97525 - DNA, 438 bp, Zea mays
  Clone ID: MRT4577_20456C.1
gatacgtggcagggtacaaaggacaaaatgtgacctattgaaccttacaaccgtaagcccgtaacccccgagcgccattgagggaacggctcgagaccgcaaaaaaaaattaccaagtcggcaaccaggtgacccttgggatttagcgaaagaacccaggcagccaaaaagcgaagattatatgttacacacaacacaaccgcaaaaatacacaccagctccaaaaaatttaaaaatgccgtattgggcaagcaggcatgcccccgagagcaaaagctcaaatgggacagggggcaagaagcccaagtttactcaaacgataagacgaaaggtaaggatcaatgggttaaaggggtggaaagatgccaaaccttcaaagaaagaacagacgaactgcctcattggattagaggtgtgctggagttccaaataggaaaa

SEQ ID NO: 97526 - DNA, 370 bp, Zea mays
  Clone ID: MRT4577_20457C.1
tttattatctttttccttttctaccattcaactgtgggggttaaagaaagactgcgctttttctctgtcaaataaaaaaaaccccaaaaaactttttctaccaagaccacccctttttttgaggagcgaaaacggcaggacaccgcccgggcaaatgggttccgaccaaaaaacaccccccaaaaaggcccgtccaaaaaaccgggggggcggcccccacgaaaaaaaaaaaaagtgtgcttggccccaaaaataacaaaaatggggaaaaaaaaaaaaacttgggggggaaaaaaaaaaaaacacccttcccaaggggtgggaggccctcttttaaaaaacttagaacggggggaaaatggacgggggc

SEQ ID NO: 97527 - DNA, 146 bp, Zea mays
  unsure (1)..(146): unsure at all n locations
  Clone ID: MRT4577_20458C.1
cntcctcatgcatttccagcctttcaaccctccccgacnctgcggctcccctcagcccccttgcaagtncatggcctgtncctgcccagacccctgctccactggcccttcgaccagtcctcccttctgttctctctttccccgtc

SEQ ID NO: 97528 - DNA, 262 bp, Zea mays
  Clone ID: MRT4577_20459C.1
gtaagggtaacctaatttctcccttcattcttctgggtctgagaatgaaatggaggaggagatttttctgccagaagtgtggggaagaaggtcatcacgcaagggattgatgcaagtctctttggtgtacgcatatgtcgcaagggcacccatgtgcatggctaaatgtgtttggccgcgacagattaagccctgatgccgttgtgggctggctgcagatgggctagggtactctctcccgtatgctaaacccgtctcagaa

SEQ ID NO: 97529 - DNA, 464 bp, Zea mays
  Clone ID: MRT4577_2045C.1
acacccttccggcggaagcaaggcggaagcaaaggaaagggtttttgtcaaggccgccaaacaggagcaacgggaacttttccgccaaggacaaggcggccctgaaggccaaggtccggaagtcctacaacaccccggggcaaaagcgcaaaacaaagccttcccgaaggaggaactccgccgggaacgtaaacccgttggtcccgaacttcggctgaaactccaacccgaagctgaacaagtccaaagagctgaaagccaaaaccaagaggtggtggtacaagggcccaaagggggaaaataagttcgtggaaacggattcctacatggaccttgggggtattgtctagcaaaacaaaacaaccgaaccggtcttaataaaattgacaaaagttaaaggctcccccttaaaactgtttgaagatccaaatgcaaagaaccgacattgctttttagagggaaaa

SEQ ID NO: 97530 - DNA, 260 bp, Zea mays
  Clone ID: MRT4577_20460C.1
ggggttgcttgctcccagatcaagcgcctcccgcctccagcactctaactcaggggacacgatcgtcttggccgccacatagaccgccgccgccgagctgtccccgccgacagaaggacgggctccgactggcgccgtctcccggccggacacgcaagtcgttccgcgcagcgccggctgacgagcggagaaacaggacaggacaagcggaattgaattcggagctgaagatcaacctgagcaagggcgagtagctcttc

SEQ ID NO: 97531 - DNA, 225 bp, Zea mays
  Clone ID: MRT4577_20461C.1
atatttttttttttttggcggacaaacaaggggtgaaagggggtggcctaggggtgcctacggaagacacacgaagccaacctgccggacttgaaacaggtgccacatggctttgagagttactcaaaaaccagccgtggcagggaaagggcgaggcgcttacccgaggaaagctaaagtggaactgagcagatccacatctggggtcccggcggcttggggagc

SEQ ID NO: 97532 - DNA, 217 bp, Zea mays
  Clone ID: MRT4577_20462C.1
ctcgtttttttatgcatgaaacggttggcgaatgccagattggtacgtgacaacaacaagacccattcgctcagcgggagtcccaaacgggacgcgaagagcacggcactatgtttagatggtaggattctcaatattgtcgtgtaccgatcaggtgtatcatatcctgagacagccgccagtgttcaaagaaccgcagattcatacaaggctaaca

SEQ ID NO: 97533 - DNA, 805 bp, Zea mays
  unsure (1)..(805): unsure at all n locations
  Clone ID: MRT4577_20463C.1
ggaaatagattcatggtttacctaacatgcaaggctattgagatgaggagaaggccattctctagaggtgagcaggatccttactatcatgaacaagacatgacctcacaaactgtagaagataaggctcggaaacaaaaggaacttgcaaagaagcatttcaagccccgaatgattgttcatccccactttcagaacctgacagctgaagaagccatgcagtttttatcagataaagagcatggtgagaagttaatccgaccaagctccaggggaccatcatttttgacacttaccctgaaaatttttgatggcgtttacgcacataaggagatagctgaaagtggaaaggatcataaagatatcacaagtttgcttcgcctggggaaaacactaacaattgataatgaaacttttgaagacctcgatgaggttattgaccgatatgtggacccattggtaggacacctgaagagcatgctgtcgtaccgtaaattcagaaagggtttaaaaaatgaggttgatgagatgttaagggcagagaaagcagagaaccctatgagaatagtatatagttttggcatatctcacgaacatcctggcacctttatattgtcatatattaggagtacaaacccacattacgagtacattgggttgtacccgaagggcttcaggttcaggaagagagacttcgacaacattgaccgtcttgtgtcgtatttccagaaagatattgacaaaccaccacctgatgctggaccatcaatgcngaatgttgctgcaatggtacctatgaaaaact

SEQ ID NO: 97534 - DNA, 396 bp, Zea mays
  Clone ID: MRT4577_20464C.1
ggagctaggtggctttaaactagaccaactcatggattgacatccaaatttgtcttgcggagacggaatctatgcggtttaggcgtgcacccatatcctcaaccaccctagctgggctcagctttcttctatgcactactttgatccctggtcgttactgttacttgaggtggttttgatttgtttgggtgtggtcgtgttcttttgctcctggtgcatttgcaatcttctgacctgtgaggggcgtgttgtttgtattacattcttcttaatgcaatgatgtgcatttctcccgtgtatttgagaaaaaagtataaataagatgggaaataagatacctttttttgttatctttcccaaaagtttttttttcctgagaaacggaatagctgtatt

SEQ ID NO: 97535 - DNA, 512 bp, Zea mays
  Clone ID: MRT4577_20465C.1
cagctaacaaaccagtttatattagatccagacaagactacaggagtagcacggtacttaataacataagctttacattacaagggtttaattttcgggcggtaagacaccgtcgtcgctcgttgtccaggcagggcctattcggacacaggaaacagcaaccaggagctgaactgagctcaaggggagattgttctgaggatgatgatgacagctatgtagttgtgccactgcatcgccataggtggtaggcgaggttctccatcagtccgggacctgggtacgcctactgctggactcaaaatccgtcaaaggccaaaatgtctaggcagtcgtttttgatctctttgagcttgtactcttctaacttggagacgcccttggagaatcctagctgttcgaaggccccggcacggtactttttcttctctgggtccttctccatggtgcgctggtgctcggataatgcaatggccacgaactccatcaccacgatggtgggaacattgccc

SEQ ID NO: 97536 - DNA, 368 bp, Zea mays
  Clone ID: MRT4577_20466C.1
gcgattggctaattggttgtatgttcttccgttccgcggacgaatgaattgcctaagggatcgctctgtaatcgtgactcgacgtctatataatgttgatccaaatcatacttttgataatactgctgttctgaccaaacggctgctcaactcaggaatccctgtcggtgggccgtgttaaagcatccaagctaagtttccgccccttgtaacgaactaaatattatataccgaggcctagtttgaatacactgactgtatctttacaatcgtttaccactggaaaatctcgggtgtaacccagattaagcctctttcacaatgtgccattaattccaccatgccctaggacactatagctccgtacc

SEQ ID NO: 97537 - DNA, 3319 bp, Zea mays
  Clone ID: MRT4577_20467C.1
gagaccactatccctggtcggattctgtctccatccattatagaattttatcgctagccacctgctcatatcatcatgaatcaacagtaaaagctttgagccaaccaaacaaagaataatgtatagataaacctttcttcattaacaaaatactttacaactagtggtgctggtcggtaagagctctgactgagcaaccatggcggagatagtcaccggggcgatgggcactctcttgcccaagctggccaacctgatcaaggaggagtataacctgcagaagaaggtgaggggtgagatcatgttcctggaggctgagctcaagagcatggaggctgctctcatcaaggtctccgaggcacccatcgaccacccacctgacatccaagtcaagctctggacaagggaggtgagagagctgtcctacgacctcgaggacagcatcgacagattcatggtgcgagttggcgatggcaagccacataaattcaagggaaggattgatagaagcctccacctgctgacaaggggcaggattcaacacagcatcggcatagacatcaaggagatcaggagccgcataaaggatgtgagtgaacggcgtgacaggtacaaggttgatttggttccttccaagcctgttggcagaagcatcgacaacctgcggctgtcggctctttacagaaaggcgacagaacttgttggcgccgaagagaagagcagtgaccttgtgagaaggctcatggagggcgacaaggaggcatccaagcagccagttgtactgtctattgctggctttggagggttaggcaagactactcttgctaatcttgtgtatgagaagattaaagggcaatttggctgtggggcatttgtttatgtgtctcataatcctgatgtcgtcaaggttttcaaaaacatgctctaccagcttgatggagacaaatacagggacatcaatcaaggaacatggagtgaagaacaactaatctgggaactgaggaagttccttctgcacaagaggtacttcattgtcattgatgacatatggaatacttctgtgtgggaaacaatccaatgttctttgatgcacaatgaatgtggaagtataataattatcacaactcgtaatattgatgttgcaaaacaagctggaagtgtttatcaaatggaacctctttctctcagtgactcaacaaagttattctgccaaagaatttttggcagtgaagacaaatgtcctccacataatttagctgaagtggctggtaaaatcttacagaaatgtggtggtgtaccattagctatcattaccatggcaagtatgctagccgataaaactggaaaggaaataaatacacataactattggtcacatgtgtaccaatccatgggttctggtctaaatggcagtactaatgtgaagaatatgagaaggatactatcagttagttattatgacctaccttcacatctaaagacttgcttgctatacctaagtttgtttccagaagactacagaattaaaacaagaggtctcatatggaaatggattggtgaaggttttgtccatgaagaacaggggaagaccttatatgaagtaggtgaggattacatcgaagagttaattaacagaagtatgttggaacctgtagatattggccgtgatggtaagactgtttcttgtcggatacatgatatggtccttgatcttatcagtttcttgtcaaatgaggagcattttctaacaaaagtaggtgagcaacagcccatatctcttgatctgcctaaaaagatccaccggttatccctccaaattagccaggaagaggaagtcaagcagctggctacaatgagtttctcccacgtaagatcacttactgtgtccactaaagtgttccagttgatgccaaaactttcggcctttctggtcttacgtgtattgaatttaaagaaatgtaagggagtgaggaatcaccactttaaagatatttgcaatatgtttcacctgagatatttgagtctcaatgcggaatttattactgagatgccacgggagattcagaatctacaatttttgcaagtacttgacataagtaatcttgggcacaaagtaaagatgccaaccattattcacttgcgacagctactgcgtctttgttttaggccgatgtggggcataagactgccagatggattcggaaaactaacctctctacaagaagttaaagggatcataactatcaagttaccaagcatgctgcataatctggggtgtctgaccaatctccggaccttggccatcgacttttgtgattgggatgagagctatgaggaacctttcatccaatgtctatctaaccttgtcagcctcaaatccatggaaataaaaggtaccatagtgagcagcctatgttccgaatgtgacaaattgtaccctggtcctcaacatctttgctccattgatattgagtcgactgcagtgccaagatggatgtcatcgctctgcttcttgtctagcataaacattgaactattagctctgggagcacaggattttcatgtccttgggagcataccatctctacgttgtctcagtatacatgtgaaggaaaccagagatgaaagattggtcattggcaagtgttatccattccggtgcctaactgagatgcaaatcgattatgaatccatggcggtggtgttcgcaccaggaagtatgcaaaacctcaaagaacttcatttagtgttcggggtgaaagaggtaatgcataagtatggtgattgtaactttggtttggagcacctcatgtcactggagcatgtctctgttaaaacaatgtacagtatcatgcccgaggaggtggaggccgtaaaagatgaatttcagaaatccctggacatgaatcctggcaagcccacgttgatagtagattataagtatccgataaaaaggaagattaggtctcatgcccaagcaataagagcagcaattttgttcgctaatgcaggccgcatccctgctactgaaggattataaacattctctatcgccttgctaataaactgcatattcccttctctaattggcactgcattctcaaggtcgcatgggtactagtggcaaataagctctctgaagtcatgaattttctgcagataatgtaactgcagtaaatgtctacgcgcgtgtttgtaaaaaagagctcaatatctaccttgtaaattcgccatgttcatactcatacagtagtcttaagcttgtagccgacaaaatatttccctttcttgaccgagaaggcgtgattgaatacttttc

SEQ ID NO: 97538 - DNA, 1414 bp, Zea mays
  Clone ID: MRT4577_20468C.1
gcacgagcaccacgcacgcagaaccctagaggcattcccaagttcgagcaatcgagctcgagccccagaggaacgagtcctgccggacgccgccacaccatctgaaactgacggcggcgggcggccgctgcttcctctcccttctccgtccagatccggcgactggcgtccctcctccgccatcttccctaccctcgacgtggcgatgagctgtgagccgtgagctgttccaacattccggaaataaggggcaagcgagaagatgaggctggtgggtttgacgggtggcatcgcatctgggaagagcactgtctctaacctctttagggactctggtgtccccgttgtggatgccgatgtcattgctcgggatgtagtgcagaaaggcaccagaggttggaagaagattgtaaaagcctttgggaatgatattttgctggaaagtggagaaattaacagagctctattgggacaaatcgtattttctgacccatcaaaacgtcaacttctaaaccgtcttctggcaccacatatttcttatagcattgtctgggagatagcaaaactgtggatgaaaggctgcaaggttatcatccttgacatcccgctgctgtttgagacaaagatggatagatggacgaatccaatcattgttctctgggttgatccaaaagtccagattgagaggctcatttcaagagatggatgctctgaaggacaagctcagaataggatcaatgcacagcttgcactagactggaagaaatcagaagcagacatagtgattgacaattctggttccctggatgacaccaaacagcaattccaagaagtgttgatgaaagtctcggagcccttgacatggaaggaacgcttgagatctagagatggtctgatctctgttgtcgtctttactgcagtgggcgtattacttgcccagaagaatctgctatgatcatgaaggcttagggagttaaaaatgttgatacgatgttttaaaggactggcacaactaagtaagaacccttagtaagaaccactatttttagttgtccttactggataatgggtcaagtaatgaaagtctgcatttagggattgctgggcttagccaaaatcttgttgtaccaaattgtgttgatgggctgggaattacaactatattcggactacgggctatccatgttcatgtgattttttgtaccgagtataaagcatggccatgcatgcgaatccgcactgcctaattatggaagccacttgattagaagcttgccctttagtcacagaagtgttcttttcaggcttgtcaacatttcaattttgggtacacattactctttcaatcataagtttgggggtgtttggtttcaaaaaaaaaaaaaaaaaactcgagactagttctctctcgtgc

SEQ ID NO: 97539 - DNA, 317 bp, Zea mays
  unsure (1)..(317): unsure at all n locations
  Clone ID: MRT4577_20469C.1
acaacacgggcgtggactactcggccgtggacgcatactcgcaggacacggacacgcatggtcccctgctgtctcgccttgactgacattgggtanaagatgctcatgtacaagttctgctacctcctagcgctcgtactgctctccatcctcttcatggacgtgtacgagctctacgagagcttcttctactaggtcaagatcgacacgctcacctacctgctcgtgctcttcgacagtgcccacagtctggcagaggctccacagaacgatcctcgtctactgtgcgctgctgttactctaccacgccgtcaaag

SEQ ID NO: 97540 - DNA, 131 bp, Zea mays
  Clone ID: MRT4577_2046C.1
tttctcctactacggcactaccccatccccggagcttgtccaccttcccgggttccgcgttccaacctaccccctctcgtcacttatggtgcccagccgctcgctgcgcaactactagcgcaccgtcccct

SEQ ID NO: 97541 - DNA, 756 bp, Zea mays
  unsure (1)..(756): unsure at all n locations
  Clone ID: MRT4577_20470C.1
ttccaagttcgagcaatcgagctcgagccccataggaacgagtcctgccggacgccggcacccatctgaaactgacggcggcgggcggccgctgcttcctctcccttctccgtccagatccggcgactggcgtccctcctccgccatcttccctaccctcgacgtggcgatgagctgtgagccgtgagctgttccaacattccggaactagcaggagggggaaattttgaaaagctttttcccaacattaacagggggaacatatgctaaagatcccagattcactggtggagttgctttgtgttgaatcctagatccagattcattttttagcggtggagctgcccctgagaggcctgaaatgtataccaagccatttctgaaaccaaatacctatatctaaaataaagctcaacatagttcagcatagtacaacgaaaaccagaaaagcatgtctaccatctacagaaagaatgataatcggccttgatggaagcaagaaataatgagccagcgataagatgaggctggagctgttgacgggaggcatcgcatctgggaagagcactgtctctaacctctttagggactctggtgtccccgttgaggatgccgatgtcattgctcgcgatgtagtgcagacaggcaccacacgttggaagaagatggtaatagcctttgcgaatgatattttgctggaaagtgnacatactacagagctctattgtgacgaatcgtattttctgacccatcaaa

SEQ ID NO: 97542 - DNA, 684 bp, Zea mays
  Clone ID: MRT4577_20471C.1
ccacgcgtccggatgaaaggctgcaaggttatcatccttgacatccacagttttgctatctcccagacaatgctataagaaatatgtgggagatagcaaaactgtggatgaaaggctgcaaggttatcatccttgacatcccgctgctgtttgagacaaagatggatagatggacgaatccaatcattgttctctgggttgatccaaaagtccagattgagaggctcatttcaagagatggatgctctgaaggacaagctcagaataggatcaatgcacagcttgcactagactggaagaaatcagaagcagacatagtgattgacaattctggttccctggatgacaccaaacagcaattccaagaagtgttgatgaaagtctcggagcccttgacatggaaggaacgcttgagatctagagatggtctgatctctgttgtcgtctttactgcagtgggcgtattacttgcccagaagaatctgctatgatcatgaaggcttagggagttaaaaatgttgatacgatgttttaaaggactggcacaactaagtaagaacccttagtaagaaccactattttttagttgtccttactggataatgggtcaagtaatgaaagtctgcatttagggattgctgggcttagccaaaatcttgttgtaccaaattgtgttgatgggct

SEQ ID NO: 97543 - DNA, 229 bp, Zea mays
  Clone ID: MRT4577_20472C.1
ggcagaccaggtaagcagcagcaggaaccctagcacggccgcatcggcagccatgggtatcgacctcgttgccggtggaaggaccaagaggaccaagcgcacagcgccgaagtccgacgatgttaatctcaagctcctggtcaagctctaccgtttcttggtcaggaggcccaagagcaatttcaatgcggacattctcaagaggctctacatgcgcaaaaccaatcgc

SEQ ID NO: 97544 - DNA, 452 bp, Zea mays
  Clone ID: MRT4577_20473C.1
aaaaaaaaaaaaaaaaaaaaaaattaaaaataaaaaaaaaaaaaaaaaaaaaaaaaaaaaaggaaaaaaataaaacgggttctggagtatccaaagcttccctacccttccatgcaacttcatatctctcctatacagtcccctaaatctaattctctcaccctagtttttcaacgccttgactggaaaaaccctgcctttccccaacttaatctccttccactacatccccctttcaccacttgccttattatctaacaggcccactccaatctccctttccaacaatttcgcacccttaatttcgaatgggactccccctttattggttcattaatcccctctctttttattgtttacacccaacctttaccttttcactttctacctccctatctccctctccttattccatttttccctttctttttttccactttttctcaattttc

SEQ ID NO: 97545 - DNA, 398 bp, Zea mays
  unsure (1)..(398): unsure at all n locations
  Clone ID: MRT4577_20474C.1
attgggtccttgacctgcgcacctcgctgggattgacctngttgagtcgacgaactgctctagcccttcttcgaaattctggtggttatcgttgccgacatgtacgatttgctggcatcgttggccggaagccatggatggagactgatttgctgttagttgctgctccatgtccaccatctccttggtttgctgttgttctcttcttgacgtggtcccacgacgcgagccctggctggtgcttcggccttctgtcagttgaggcctatgctgcttctgcaggtccttcttacaccctgcaacactaccgtttggtgtgctgacatggaaattggggcagcaggacagctaggtgtgttggggacgcccttaggaaatcgagtcacactagatgctga

SEQ ID NO: 97546 - DNA, 237 bp, Zea mays
  Clone ID: MRT4577_20475C.1
aattcctggaccgacgcggtgcgcccaggcgttctaaaaccgagaagagaccattcctaaggaaaacaatcctgaaaccaatccgttggtctgcatgaggaatttgaggagcatgctaagaaggcaaagaccttgcctgaaagcacgagcattgagaacaagctgatcctttacggcctctacaagcaagccacggttgaagatttgattaccaatcgtccggccttattttaccaa

SEQ ID NO: 97547 - DNA, 802 bp, Zea mays
  unsure (1)..(802): unsure at all n locations
  Clone ID: MRT4577_20476C.1
aagcttagaggagaaatgccatgtacactgcctcggctgtacacttcattacttccccttgatatctctgaatgttcagtttcaccttgatgtaagaagctctagaatgttggtttcactacacttaggtatgtttcagtgagccctgagcactgagctgaaatgtagataaccaacattgtaccttctgtagagattattggataatatttttttgtatggttattagtaagaattgggatattgattgacccattcaaaattattacaaacagtcctcaggatatctgagtgcggtctcttttttgtttgtttactaagcatagataacgaattaagatgatcaacccctctttcattttttttcaggcaataattgagcgaatgggtgaactggagaagctggaatgacgaagaccaggaagatgctgccgcgtgtgttgtattccaatttgtattattcgtttcaggtgttttacatttgctctcctggttcgttccggctgacagcgtgatgcccatgctgtcactcgaaagaatggtagtagtagctagcatgagtttggtgcccagttacattataaacgtaccttcgaaaaataataatttcccagcaattatttcaaaaaaaaaaaaaaaaaaaaaaaaaaaaaaaaaaaaaaaaaaaaaaaaaaaanaaaaaaanaaaaaaaaaaaaaaaaacccaaaaacccaaaaaaaaaaaaaaaaaaaaaaaccctcgggggtttccccccgtttaagggggaattcccaccccctgggggcccttttttgggggtcc

SEQ ID NO: 97548 - DNA, 565 bp, Zea mays
  Clone ID: MRT4577_20477C.1
tttttttttttttttttttttttttttttttttttttttttttttttttttttttttttttttttttttttttttttttttttgggaccctttcccgccggctcgcaaaatcccccctccaaaacaaaactttttggggcgggggccccccccttgaaacaaaattgacaaaggggagggatttaactgaacaaaccggtataaatcgtagggaaaaaaaaatttttaatttaccggggggggcccgccccaaacaaaaacaagtcctgggtgggattttggaaggggaattaaaaggtgatcagggcatcctttttgggattgggttttttcggaccttccggggagcgggtacctccttttttgccaaaaataatttgggggaaaacataagggggggcatcatttccccctgacgttgttttcggggaagtgggttttttgacaagggggttttttttgccaaaagaattaaaatttttttgctccgcaaaaatggggataaaaacgggaacatgttctgcatgctcggaggccctgggctggttaatctcctcgaacttag

SEQ ID NO: 97549 - DNA, 728 bp, Zea mays
  unsure (1)..(728): unsure at all n locations
  Clone ID: MRT4577_20478C.1
cattgggaccctcgaggccggccggggcaaaaaagattcccagcacttttttcccaccttctctccaacatcttcctgctcttcaattttacttcaggttgttccttccacacacaccgcaatcatgagcgaagaagtctacgagggtgccatcggcatcgatcttggcactacctactcttgcgttgccaactacgagggcaccaatgtcgagatcattgccaacgagcagggtagcttcaccactccctcgttcgtgtccttcgcctcagaggagcgtcttatcggtgaggcggccaagaaccaggctgctatgaaccccgagaacactgtcttcgatgtcaagcgtctcattggtcgccgattcgaggacgagaccgtcacaaaggacatcaagtcatggccattcaaggtcattgaccagaacggcagccctatggtcgaggtcgagtacctcggtgagaagaagcagttctctcctcaggagatctctgccatggttctcgtcaagatgaaggaggtcgctgagaccaagctcggaaagaaggttgagaaggccgtcatcactgtgcctgcttacttcaacgacaaccagcgtcaggccaccaaggatgctggtgccattgctggcnctcacgttctccgtatcatncacgagcccaccgccgctgctatcgcttacggtcttgggtgccggtaatccgacagggagaggaacgtcctcatct

SEQ ID NO: 97550 - DNA, 431 bp, Zea mays
  Clone ID: MRT4577_20479C.1
tagttctagatcgcgagcgggcgggcgggggggggtgtttaaattttttttttgggggggtttttttttttttttttttttttttttttcggaatgggccgaaaccatcgtcccatcacgcatttagaaaaacgccgctaccataccataccaccatttttaactggcccgggggggggggggtccttattttcagttcaattcggaagggggtccaaatccaaagtcaccaccggcaaaaacaaactcgggcgcgcgcacacaaaaaataatggccctttgccaacggtttggcctccggcgccaacaaaaacaccttggcaaagcgttccgtggggatggcgggaaagtacttggcccccgcgtagccctgctccgctgcgggtgcaaccaccctgttgaacttgtcggcccaatgcgcgggggggggc

SEQ ID NO: 97551 - DNA, 1610 bp, Zea mays
  Clone ID: MRT4577_2047C.1
ctcgcgcccaaaccagagaacaggacccgtgtctcgctttctttctcgcaggattctcacgcccggtccctcagtccggtccgtgtctcgcggctccgtgccgggcaattcaagctgctccccttggacgatccgtcttccgccgtcactctgctgatggcttctgcacttcaccgcctcaaccgctcgcataaatcctctcttcattgacggtccagagattttcgagaggagaaccagaaggttgctgtaatttcacaagtatcttcgcccggtgaacttgaccttgtacaaccggacaacgccgaagccgagaacattgtcatagactttcgaggtggctggcaggttataccggcagaaaatatagttgctacattccaaggatgtaaaggaaatgtattggctgtatcaacgaacacaactgaggcgcaagtttttcttgaggtaattatccaaagacttcaacatatgacaccatctccgtgcatacaatgctggtatcattttgtaggccttggagcaagggcttgatggagttgtacttaaagtagatgacatggatgatatcattaagctcaaggattattttgatcgaaggaacgaggcaaagagtcaattaccattgacaaaggctactgtaacaaaggtcgaggttgttggtatgggtgatcgcgtttgtgtggatctttgcagtatcatgcgacctggtgaaggccttctggttggatcctatgcgagaggaatgtttcttgtgcattctgaatgcttggagactaattacattgcaagcaggcctttcagagtcaatgcagggcctgtacatgcatatgtcaccgttcctggtggcaagacaagctacctctcagagttggggtcaggaaaggaagtcatcgtgatcaatcagagtgggctatggcgtactgcaattgtcggtcgtgtgaagatcgaatcaaggcctctgatccttgtagaagcgaaggatcactctggagacgagacgtatagcatttttctacaaaacgcagaaacagtagcacttattacccctaacacaggatcaagtggaaggaccgccattcctgtgacttcgctgaaagtcggtgatgaagttctggtgaggaaacagggcgccgcccgtcacactgggatagagattcaggagtttattgttgagagatgaaaatggaaacgctgaatgcaccagtttcacgtcgttttgaacaaaaaaatgatgtatgattgcaacattcatctgttctgttggttaagattgtgagattccattgcagcatacaattgtgagaccattgcaacgtacaataatagacattgatgccaaaaaacacatgtactatgtggaaggacaagtgttccagagactacttcgtccgtcctcttatcgtttatggtgaggaaagattcacccgcccgtcacactgggatagagattcaggagtttattgttgagagatgaaaatggaaacgctgaatgcaccagtttcacgtcgttttgaacaaaaaaatgatgtatgattgcaacattcatctgttctgttggttaagattgtgagattccattgcagcgtaatatcgtttgggcccctttt

SEQ ID NO: 97552 - DNA, 2483 bp, Zea mays
  Clone ID: MRT4577_20480C.1
ctcgaggccggccggggcggcttcctggcctgcacctagcatctctccgcttcctccccatccccgccgcctctgacgttgacctcggcggccgccaccggcgaggtcgcacctcgccggtcaccacccccgctgctcgatcttatatccctactccgaggatccctgtagcctcctccggccgcgcacccgcggaaccctagatctccgataccccgcgctccttcccgccgacggccacccgatcggaatgggccgccatcttcagtaaggtccaaggacccaggggtacccccctcagccttcgcgcgtgcgcggagcgccgccgcgatggccatccgcatcaccgtatcctattcgggctacctggcgcagaacctggccgcgtccttcggcctgcgctgcaccgccgccgcggctgcgggcgctggcgccgcgcccggtccagggtgccgcttcctccaggacgcgctatcccgccctttctgcctcttcgcctcctcccgccacgtcgacccccaccatgacgccgaggatcagaaccacccgaagcccgggcccaaggctctgtcccctgccgttgcagcaagaggagatggctactcactgttgctgccgcgagcgtgttccgcgaaggcgccgccgccgggtggatgaccccccagcgtcgctgtcgcgtggggctgctgtcggtgttcgcgtctgggatgggatcgactggcggcattgctggtgcatcctcccttgttgcgtcgccgtcaatatcaaccgggctcaaccctgcgtcgctcctcccgttcctgcaggcgagcaagtggctcccctgtagcgacatagtcgctgctgcaacgacgtcgcgcagctcaggacgcccagcaggtgcaacggcctgcacctacaccgcgtacagctgcaccatcgcctcgtcctgcaccacgcgcagccgctccatcgccccgtcctgcaccatgcgcagccgttccatcgccccgtccagtaccagtgccgtcacctgctgttgctgctccttccaaggtcggcatacaagcattggttggtagtgctagcatcgcctcaggttcagctgggattggaagaggggtcattgcctctggtgcagctggaatggtgaagaagagtggtgctagtcttcctgttggtgcaggggtgggaaggaagaccggttggctctcaaggtgggtgagctcatgctcagatgatgcgaagaccgtctttgccgctgtgaccgtgccactgctctataaatcatccctagctgagccgaggtccatcccatccaggtcaatgttcccaacatttgatgttggtgatcggatccttgctgagaagatttcgtacattttccgggagccagaaattctggacattgtgatctttcgtgcacctccagtccttcaggcattgggctacagcgcaggtgatgtgtttatcaagagagttgtggctaagggcggggatatcgttgaagtaagcttttatcccaatggtacgtgatggtaacttgattgttaatggagtagttcaggaggaagaatttgtgttggaaccagccgactacgaaatggatccgctgactgtgcctgaaggctatgtctttgttctgggggataacagaaacaacagctttgattcacataactggggtccacttccatttaagaacatccttgggagatctgtgctccgatactggccaccatcgaggataacagatacaatatatgagcatgacatggtgcagcacacagctgttgcatcctgataatacattgtggcaataccacgtggtgcacgccaatttctcctttccctgcatagctttattgacaattgatatgcttagccgtggggttctttatttatttgttgtagccttgcctcaaatgtcgattgggcagcttggctgacagattagtttttttttccctccctacgggcagatgcttgtttaaagacagcaattcttgtactccgtagctaagaatgaatgccatataaatgttgcagtagatgaacgagcatcaaggagtgtaggatgaggatggcagttcttttgttttatgagatgagatggtgctctaaacttacgtaaaggaaatacgaagcatagaagagtgcccaagttgtgttatttatttttttcattccttgatcttggatcaaagattcaaggcaaagtcagcctggtgcaaaggttttggttgaatccttgtatcctgccagataaggttttttgatggtgcaattttggattagcatttgccctagtatttagtgttttttagttctgtattcatttatgattaatacaactttgcgagcatagttctgtttggcctgctttgttcaatcgcagtgcgggttcaatactacgttgcctgatgttattgtctgttattttcaaaaaaaaaaaaaaaaaaaaaaataaagggcgcggcctgctctggagtgctacgcagccg

SEQ ID NO: 97553 - DNA, 247 bp, Zea mays
  Clone ID: MRT4577_20481C.1
ggcgtgcccaacctgctgactccaacttcccggtacagccgcctggcgccgttttgtgccaacgccaccacctctggccgcgttaccatttcctgggtgtggatgcccctgcatccacaccctgcccacctaaacggctcctcttccgggaacttcgtcttctattcgatggtcctcgctaccgggccgcagaactttcagcgggtcaaggaagtagatgtgtacccactgccgcttggccattctt

SEQ ID NO: 97554 - DNA, 278 bp, Zea mays
  unsure (1)..(278): unsure at all n locations
  Clone ID: MRT4577_20482C.1
ccgaccgtgaagatagaagctcctgaagccagcagtcttttctttagaaaggccaaagcgagacggagacggacacgactaggattctgttgatgctacgcacaaggccgactacgctgagagaatctgccnctacagcaaccaaaacagctaaccaaaagtgacagcattgaatngtcaatgccagagtggcgtccacacacttcgaccaattgcagaaggcgtggacatcactaacgattacaatcctatacctgagagcaaagaaagacatgacc

SEQ ID NO: 97555 - DNA, 271 bp, Zea mays
  Clone ID: MRT4577_20483C.1
cactatagaagagctatgatgcacgctgaccttagacgtgaactcggaatgaggctcgtgactgtgaatcggttcaacggaaccaaaggctgtcatattcatcactcgcgacaacgggagcgatgacctattcatccatgaagcctacatcaaggacgacggcttccgtagtcttaacgacggtgatgacgttgaatacaccgtcaggagcggctgctactgtctgagctcgggctcctcgatgtcacttgttcccggctagtggtgaagc

SEQ ID NO: 97556 - DNA, 153 bp, Zea mays
  Clone ID: MRT4577_20484C.1
ccgccttccttagcctggattctttaaagtccaccccacccgtccgtggaaatgaaattccttttggttcatctacctcagcctccgcgaagccaaaaaagggttgttgcaagtgtgcttgggcttccacaatcaaaactccgttgcaagaat

SEQ ID NO: 97557 - DNA, 790 bp, Zea mays
  unsure (1)..(790): unsure at all n locations
  Clone ID: MRT4577_20485C.1
tgtttaattcacntacaaaatactaaatctgctgctgttctcatccatgagcatctttgtcaaagtttcaatcttatgtgaaatgctaactttgttcaccgcaagctgttttnttttttggaacacgcantgagagctagtatcttatattaaagagaaggcagaaatggttcaatagtgacctttacaattaagccactcttacgccaccagtcgatcagaggggttgtaagttgtagcactgaaaaacaaagatttcccaaggattctaggataatgacccgataaagaagtggctgcttggtagttacaaaccctcttctcatctcacagtggatcttttttttaaaaaaaaaacagacttgtgggtcatttgttgcttttcagtctgcagtcacttcacttgtccatgttttttcagtagtcatattaggaactcctaggcctttcattatgtggtcatgctaataaactcttttgtttctaactgctttctgatgaatctctttcagccacctgaaggcgcggattttccaaggctcaaattacggcctggcaattggcacgccctcctcataggccttcagcgcaacacacagaatcagcgaaatctgctggttctggaatgttaactagttcccacaaactttagcgctgtcgtgatgtgtatgatgtggttccaatatgtaagatttttttttacagttattctctttattttcttgttttgtgtttgattacacgatatcacaccctgaactctactgtaattaaaaaccattttcttggt

SEQ ID NO: 97558 - DNA, 821 bp, Zea mays
  unsure (1)..(821): unsure at all n locations
  Clone ID: MRT4577_20486C.1
gttcccgaaccgaacactgtatctcagcccccctaccgtcccgccggtatgcacgacacgggcctctccgcccgcactgccggtgcttcctcgtcgtcaccggccaccaacgccggcgacgacgtcgacgagtccaagacccggaaggcgcagcctgccttcgtcgccgcggcctacgcccggctccactccccttactatgcggccgcctccgcagcccttctcctcctcgccctcgccgccgctgccttcctcgccggccgagctttcccccggaccgactgcccgccgctgcgcctcgacgcgcgcttcctctccctccctgacgccgccgcggcctccgacttcggatccctcggcgtcccctcgtgcagatccaaaactgggaagacagtggagtggacttcgaaagatttacttaatggactggaagaatttgtgccaatctatcagacacgccctatgaagaataacatgcatggaatgagatttgaccacagttttgggctttggtttatggctcgatggcttaagccagacctgatgattgagagaggcgcattcaaggggcactcaacttgggttttgcgtcaggccatgccaaacactaggattatatctctcacacccagacaccctgagaaatatcttaagaagggacctgcgtatgttgatggaaactgcacttatttggctgggaaggattttattgactttggaagtgtcgattgggaanaactgttgatgaagcatggcatttctgatcccagaaggtgcttggtttctttgatgacaccaaagtgagctgaaagaggtaagca

SEQ ID NO: 97559 - DNA, 351 bp, Zea mays
  Clone ID: MRT4577_20487C.1
agccttccgattgaaaccacctaccaccattcaaagccgttttgtgaaccaacaatcgccgtcaggctgttgggcctttttatgctttttggtcgctctgcaagtgctgctacggtcaccattgctccgaaatgctcgcaagctcctatagcttctctatttccgccggacctatcaccagcggtgtcttccgtatgtgaaaacccacttctacaacccttcaggatccaacaggcaattacagctggcgtgttacttttatcacccttgttcctacaacaatcatcagccctgttacatcacttaccttcggagcatttattggcacaaaagactacggctcatcaccta

SEQ ID NO: 97560 - DNA, 425 bp, Zea mays
  Clone ID: MRT4577_20488C.1
ggggaaacggcttttaataaaaataattcagggcgacctacccgttgatatttaaaaagtccagaactggccgggtggacatttaaaaccccaagaacccactttgcgaaaacaggaacccaaaagggggcaagctacattcatgtgtgtccaggggggaggatacatctaaaaactgcctcccccgcccggattacagcttttacttttgaaccattcctaaggggttccattaacaggtccaacacttttttgacaaaccaaactcaggtccacccctttttattccttgttcacaaaaaaaaaagagagccccccccccattgttcagtaataaaagaaaccttggcaccaatcacctctaataacaaaaccatcccgcttggcctccttgtattttggctgggggttaaaggatggctgct

SEQ ID NO: 97561 - DNA, 262 bp, Zea mays
  unsure (1)..(262): unsure at all n locations
  Clone ID: MRT4577_20489C.1
gggggaagacttaagatcttactggtgtcattaataacatctttacctaccctacgattatgtatctaaccatctcgaagttgatcctgatagaatgacgaagatgtccaaagaggataaattatattagtctttttttggttgctctttgcaacaattaanatctattatttagttcacttcaccccgtgtttgatgtgatttcaattctatgcataaagttntacatactantggtaatacataaagtaaagagaccgat

SEQ ID NO: 97562 - DNA, 4893 bp, Zea mays
  Clone ID: MRT4577_2048C.1
atggatcctaagggcaaggggattgtgatcaatgataaggaaaaggagtctttcgtcaacgagcccaaagatgacaagcctaccgactcaggctcgggccacaaacgtagagatgggaagaagaagaagacaatgcgcatcaatgagatcgtctactacgacgacagcgatgggtcctcttcttcccaaaaggacaacgacgacaacgactacgacaaaagaaagacgattcataaaaatgcacaagctactactgtgttgttagcctctttgtgcagggacgagtatcataaggtgagcggcttggacaatgccaagcagatctgggacaccctcaagatctctcatgaggggaacgacgtcaccttgctcaccaagatggagttagtagagggcgaactcgggagatttgcaataataaggggcgaggagccaacccaaacatacaaccggctcaagaccctcatcaacaaaataaggagctacagaagcacacaatggacggaccacgacgtcgttcgcctaatgctaaggtcatttactgtacttgatccacatctggtgaacaatattcgtgaaaatcctaggtacaccaagatgtcacccgaagaagttcttgggaagttcgtgaacgggcgaatgatgatcaaggaggcaagatacgtggacgacgcattgaatggtccaatcaatgagcctcaaccctttgctctcaaggcaacaagaagcaaggaggcgctacctagcaaggtggcacaagttgaggcggcagggctaaatgatgaagaaatggctctcatcatcaagcgcttcaagacgacgctaaagggtcacaaggggcagctaagcaagaccaagacaaaggggaagcgctcatgcttcaagtgtggtaagattggtcattttatcgctaactgcctcgataatgatagtgaccaggaacaagggaacaagagggagaagaagaaggcatacaaaaaggctaagggcgaggcacaccttggaaaggagtgggactcggattgttcgtcatccgactccgacaatgaaggactcgccgccaccaccttcaacaagtcatccctcttccccaacgagcatcacacatgcctcatggcgaaggagaagaaggtatgtactcgaaacaatgccacttatgattcttctagtgatgaagaaatagattactctagtctgttcaagggattggatagaactaaaatagataagattaatgaattgattgatgccttgaatgaaaaggataaacttttacagaaacaagaggaccttttatatgaagagcatgacaaatttgtagaggcacaaaaatctcatgctttagaagttaagagaaatgaaatgctttcttgtgaactatcttcttgccatgagacaatttctagcttaaggagcataaatgatgatttaaatgctaagttagttatagctagtaaatctaactcttgtgtagaacatgttatgatttgcaataggtgtaaagattttgacattgatgcttgtagtgaacacctagtttcaatttccaaattgaatgatgaattagctagtcttaatgcccaacttaagactagcaagaatgaatttgacaagctaaaatttgcaagggatgcctacacgattggtagacacccctcaattaaggatggacttggcttcaagagggaagccaaggacttaacaagctataaggctcccatctccgccaaggagaaagggaaggctcctatggctagtagtgcaaaaaggaaccatgcttttatgtaccatgatagaagacagtcttataggagttgtaatgctaatgatgcttttgtctctcatgccatgtttgcttctagttcttcctataggcatgatagagatatgtctaggagaaatgctgttcatatgcctaggagaaatgttgttaatattcctaggaaagtcaatgaaccttctacaatatatcatgttttaaatgcttcctttgctatctatagaaaggataggaagatagttgctagaaaattaggggcaaaatgcaagggagacaagacttgcatttgggtccctaaggatatttgtactaaccttgtaggacccaacaagagttgggtttatgcatccgggggttcaagctggattatcgacagcggatgcacaaaccatatgacgggggagaagaagatgttcacctcctacgtcaaaaacaaggattcccaagacttaataatattcggtgatgggaatcaaggcaaggtaaaagggttagatgtgtctgtctttagaagaagtgatggttcattagcttttaagggtgtattagacggcaaactttatttagtcgattttgcaaaagaggaggccggtctagatgcatgcttaattgctaagactagcatgggctggctgtggcatcgccgcttagcacatgtggggatgaagaaccttcacaagcttctaaagggagaacacgtgataggtctaaccaatgttactttcgaaaaagatagaccttgtgcagcttgtcaagcaggtaaacaagtgggaggagcgcatcatagcaagaatgtgatgaccacatcaagacctctggagccgctacatatggacctcttcggacccgtcgcctatctaagcataggaggaagtaagtatggactagttattgttgatgacttttcccgcttcacttgggtattctttttgcaggataaaactgaaacccaagggaccctcaagcgcttcctaaggagagctcaaaacgagtttgagctcaatgtgaagaagataaggagcgacaatgggtccgagttcaagaaccttcaagtggaggaatatcttgaggaggaagggatcaagcacaagttctccgctccctgcacaccacagcaaaatggtgtggtagaaaggaagaacaggacacttatagacatggcgaggacgatgcttggagagttcaagacccccgagtgcttttggtcggaagccgtgaacacggcttgccacgccatcaaccgggtctaccttcatcgcctcctcaagaagacttcgtatgagctactaaccggtaacaaacccaatgtttcgtattttcgagtttttgggagtaaatgctacattctagtgaagaagggtagaaattccaaatttgctcccaaagccgtagaagggtttttgttaggttatgactcaaatacaaaggcgtatagagtcttcaacaaatcatcgggtttggttgaagtctctagcgacgttgtatttgatgaaactaatggctctccaagagagcaagttgttgattttgatgatgtagatgaagaagacgttccaacggccgcaatacgcaccatggcgattggagatgtgcggccacaggaacaaggtgaacgagatcaaccttcttcctcaacaatggtgcatcccccaactcaagatgatgaacaggaggtgtgtgatcaagggggagcacaagatgatcatgtaatcgaggaagaagcgcaaccagcacctccaacccaagttcgagcaatgattcaaagggatcatcccatcgaccagatcttgggtgacattagcaagggagtaattactcgatctcgattagttaatttttgtgagcattactcctttgtctcttctattgagcctttcagggtagaagaggccttgctagatccggactgggtgttggccatgcaggaggagctcaacaacttcaaaagaaatgaagtatggacactggtgcctcgtcccaagcaaaatgttgtgggaaccaattgggtgttccgcaacaaacaagacaagcacggggtggtgacaaggaacaaggcacgacttgtggcaaaaggttatgcccaagtcgcaggtttggactttgaggagacttttgctcctgtggctaggctagagtccattcgtattttgctagcatatgccgctcaccattctttcaggttgttccaaatggatgtgaagagcgctttcctcaacgggccaatcaaggaggaggtgtacgtggagcaaccccctggctttgaggatgaacggtaccccgaccacgtgtgtaagctctctaaggctctctatggacttaagcaagccccaagagcatggtatgaatgccttagagactttctaattgctaatgctttcaaggtcgggaaagccgatccaactcttttcactaagacatgtgatggtgatctttttgtatgccaaatttatgtcgatgacataatatttggttctactaaccaaaagtcttgtgaagagtttagcagggtaatgactcaaaagttcgagatgtcgatgatgggcgagttaagctacttccttgggttccaagtgaggcaactcaaggatgggaccttcatctcccaaacgaagtacacacaagacttgatcaagcggtttgggatgaaggacgccaagcccgcaaagactccaatgggaaccgacggacacaccgacctcaacaaaggaggtaagtccgttgatcaaaaggcatataggtctatgatagggtctttactttacttatatgctagtagaccggatattatgcttagcgtatgcatgtgtgctagatttcaatccgatcctaaggagtgtcacttagtggctgtgaagcgaattcttagatatttagtcgctacgccttgcttcgggatctggtatccaaaggggtctacctttgacttgattggatattcagactccgactatgctggatgtaaggtcgataggaagagtacatcggggacgtgccaattcttaggaaggtccctggtgtcatggagttctaagaaacaaatttcgttgctctatccaccgctgaggccgagtacgttgccgcaggatagtgttgcgtgcaactactttggatga

SEQ ID NO: 97563 - DNA, 412 bp, Zea mays
  Clone ID: MRT4577_20490C.1
ggggttgtgggtttttttttttttttttttttttgttttttttttttttttttttttttttttttttttttttttttttttttttttttttttttaacccccgaccagggatttggcccgggtttcttttttttttccccaacaattttttttgggggggggcgcctttctttggggatccgttcccatcccccctcgggtgcgggcccccctgtgggccgccaacgttgcccgggcgggttccaggaaccggctcattttgttcggtgggggccaccacgaccccctggtcatgatttattcgcctccagttccctgcaacacggggacacaggtttttacgttacaaccgggctttttctggcgcggggggcctgaagcttgggatcccggggacccccctggcgggcac

SEQ ID NO: 97564 - DNA, 685 bp, Zea mays
  Clone ID: MRT4577_20491C.1
cattgggaccctcgaggccggccgagacttctgcccccatttcgctccattacaccggtccacggagagcagagccgcgccaggacaacacgaaagcaggacgaggagatcgactactcgaccagacctcgtccgagtcgccgatggcggctcgcgtcctcgacgggcctcacccttaggcctcgacctctgcctcatcggcgtaccagtgcccacgcggaagacctccgaggagaggaacgcgctctactggctgcggcatacgatagatcgggacccgcaacgtcgtgctgcatagtggggatcccacgctcgccaccccctgcaccaggatccacatctccacgcagaacaatgtgaacgcgactcccgactgtactgggacaactccgacggaaccgactccaacctgccagagctcggtcgacttgccagactcaagaacatggagctgtacaagagctagctgtgacggagagatcccaccggaataggacaaccgcctaaacctgatcacctggggaatgtatgacagcaggttcaaggaaggaatccgctagacactctccgaggtcgaatcactgcagatcatgcgcttgaacaacaagaagtgtacacgatccatctccaagggagtgtgacaagctcttccaacctgagaggcatcaatatgactaacagagat

SEQ ID NO: 97565 - DNA, 760 bp, Zea mays
  Clone ID: MRT4577_20492C.1
ccggccggggtaaaatgctctaatttttagggctcacatggggatgcattttggcgtacactgacagaaagcaaaggaagtggcaaataaggaatataagttaaactggatgatggataaggaaccaaaaagaaatcagtggcaaatagagcactgagttatgtacatatggcggataagatattctctttttatggtgatggaagaatagttctcagataccacctagcgtagcatattaattccagtggttttgatgatattttatcagaatctatagcatgcttacaaaaagatgccttcaattatgagcattgtttattcaatcatttagaactgttttctatatgccgaaaaatctagcaggatagacaggcttttctgatgggaaacaaccctttagcaaaggatctaacattgaaggagctatacagtatacaaagcaggttggctcaggagaaagctagagaaacaacataccgacaaagattccaaataccagagcttcaaggcctcatccaggagcagaatcccccaatcgatctctgtggtcttcacatcagcgaggccatgcacgtcctgaactacgagctcaacaaccgaagaaagatcgtgagatccactggtcgccgactccaggctatgatcatatcaagcgcccgcaccccagcacggctgactgctgccgtcgagcagtacctcatggaacacggccttcagtacacgcaggcacaaccaggcctcttccgcgatctgctct

SEQ ID NO: 97566 - DNA, 744 bp, Zea mays
  unsure (1)..(744): unsure at all n locations
  Clone ID: MRT4577_20493C.1
aattcggcacgaggccacacccgccacttttcccttaccgccccaaacgggctagcgtgacgaggtcaccggccataaatccccaatctccgcgctttccttccgccccacactcgtccactcaccccctctttgctctgcctcgccgcgccgcagagcagagcatggcgcccccacgccctctcctcgccgccgtcttcctcgccgcggcggttctgctcctcctttctccggcagaggcggggacggtgggcgtgaactacggccgcgtggcgaacaacctgcccaacccagcggcggttgtgcagctgctcaagcagcagggcgtcctacgcgctgctgtgggtgcgccggaacgtggcggcgtaccacccggccacgcagatccagggcnatcgccgtgggcaacgaggtggttcgcgtcggccaagaacgtgacggcgcagctggtcccggccatggccaacgtgcacgccgcgctggccaggctgggcctcgacggggccgtcaaggtgtcgtcgcccatcgcgctcacggcgctcgcgtcgtcctacccgtcctcggcgggcgcgttccgggaggacctcgcgcaggccgtcatgaagcccatgctcgacttcctggcgcagaccggggtcgtacctcatggtgaacgcgtacccgttcttcgcttactncggcatgcgggagacatctccctcgctacgccctgttccgcccacggccgcgtgctcgacgcgggac

SEQ ID NO: 97567 - DNA, 997 bp, Zea mays
  Clone ID: MRT4577_20494C.1
tgggtacctcgaggccggccggggcgggcggggccccacactcgtccactcccccagtcacccccgcgcccgtctttgctctgcctctccgcgccgcagagcagagcagagcatggcgcccccacgccctctcctcgccgccgtcttcctcgccgcggcggttccgctcctcctttctccggcagaggcggggacggtgggcgtgaactacggccgcgtggcgaacaacctgccgaacccagcggcggttgtgcagctgctgaagcagcagggcgtggcgcaggtgaagctgtacgacgccgaccccaccgtgctgcgcgccctcgcaaacaccggcatcaaggtggtggtggcgctgcccaacgagcaggtcgcggcggcggcgtcgcgcgcgtcctacgcgctgctgtgggtgcgccggaacgtggcggcgtaccacccggccacgcagatccagggcatcgccgtgggcaacgaggtgttcgcgtcggccaagaacgtgacggcgcagctggtcccggccatggccaacgtgcacgccgcgctggccaggctcggcctcgacggggccgtcaaggtgtcgtcgcccatcgcgctcacggcgctcgcgtcgtcctacccgtcctcggcgggcgcgttccgggaggacctcgcgcaggccgtcatgaagcccatgctcgacttcctggcgcagacccggtcgtacctcatggtgaccgcgtacccgttcttcgcttactccggcaatgcgagggacatctccctcgactacgcggccccagaatctatgcccaccctttcaaactttcttaaccgctgcagctgcagctttgactccagccgcagcgacgccgtagaacgaacatcgctgtactaggcggtagctgtacgccttccctctttgcagctttggctaatggtgggtgtgtgtgtggatatgtttgaaaagataatgaccagcactacttctactaaaaaaaaaaaaaaaaaagggcgg

SEQ ID NO: 97568 - DNA, 777 bp, Zea mays
  Clone ID: MRT4577_20495C.1
gaaacatgctgcctgacaacgcatgaaagtcaacaatgtgctgagcttaagtttctccagcctcttcgtcggcgccattcctccagactcaagtgaatcactgcaccaaagctactcccagatgccccaagaagtcgacaaggccaaaacctcacgggttttttttggaactccccgccgtagcagccaattcgctccaaccttgtccaaatcaatcttaccccacgcgtccgcccacgcgtccgctcgtccactcccccagtcacccccgcgcccgtctttgctctgcctctccgcgccgcagagcagagcagagcatggcgcccccacgccctctcctcgccgccgtcttcctcgccgcggcggttccgctcctcctttctccggcagaggcggggacggtgggcgtgaactacggccgcgtggcgaacaacctgccgaacccagcggcggttgtgcagctgctgaagcagcagggcgtggcgcaggtgaagctgtacgacgccgaccccaccgtgctgcgcgccctcgcaaacaccggcatcaaggtggtggtggcgctgcccaacgagcaggtcgcggcggcggcgtcgcgcgcgtcctacgcgctgctgtgggtgcgccggaacgtggcggcgtaccacccggccacgcagatccagggcatcgccgtgggcaacgaggtgttcgcgtcggccaagaacgtggcggcgcagctggtcccgggcatggccaacgtgcacgccgggctggcccggctgggccttggcggggccg

SEQ ID NO: 97569 - DNA, 2270 bp, Zea mays
  Clone ID: MRT4577_20496C.1
tacaacggcaacctggcccgccgcgtgctctccggcaacgccggcacctcgcgccggccgggatacccgccaccttcgcgttacggggaaacgggctagcgtgacgaggtcaccggccataaatccccaatctccgcgctttccttccgccccacactcgtccactcaccccctctttgctctgcctcgccgcgccgcagagcagagcatggcgcccccacgccctctcctcgccgccgtcttcctcgccgcggcggttctgctcctcctttctccggcagaggcggggacggtgggcgtgaactacggccgcgtggcgaacaacctgcccaacccagcggcggttgtgcagctgctcaagcagcagggcgtcgcgcaggtgaagctgtacgacgccgaccccaccgtgctgcgcgccctcgcgaacaccggcatcaaggtggtggtggcgctgcccaacgagcaggtcgcggcggcggcgtcgcgcgcgtcctacgcgctgctgtgggtgcgccggaacgtggcggcgtaccacccggccacgcagatccagggcatcgccgtgggcaacgaggtgttcgcgtcggccaagaacgtgacggcgcagctggtcccggccatggccaacgtgcacgccgcgctggccaggctgggcctcgacggggccgtcaaggtgtcgtcgcccatcgcgctcacggcgctcgcgtcgtcctacccgtcctcggcgggcgcgttccgggaggacctcgcgcaggccgtcatgaagcccatgctcgacttcctggcgcagaccgggtcgtacctcatggtgaacgcgtacccgttcttcgcttactccggcaatgcgggagacatctccctcgactacgccctgttccgccccaacgccggcgtgctcgacgccgggaacggcctcaagtactacagcctcctcgacgcgcagctggacgccgtgttcgccgcggtcagcaggctcggggagggctacaacggcgtgcgcgtcgtggtctccgagacggggtggccgtccaagggcgacgccaacgaggcgggcgcttcggcggccaacgccgcggcgtacaacggcaacctggcccgccgcgtgctctccggcaacgccggcaccccgcgccgccccgacgccgacatcgacgtgtacctcttcgcgctcttcaacgagaaccagaagcccgggccgacctccgagcgcaactacggcgtcttctaccccaaccagcagaaggtgtacgacgtcgagttcgtcctcggcggcggcggcgccagccagggcaacggcggcctcgggtggcaggagaacggcggcggggcgagcagcaccagcaccaacccgccgagcggggtgaaggtgacgaccggggaggcgtggtgcgtggcgaacgcgatggccggggagcatcggctccaggcggcgctggactacgcgtgcggccccggcggcgcggactgcaaggccatccagcccggcgcggcgtgcttcgagcccaacaccatggtcgcgcacgcatcctacgccttcaacgactactaccagcgcaagggccggtccatcggaacctgcgacttcgccggcgccgcctacgtcgtcaaccaggcaccgaagatgggcaagtgcgacctcccatcgacggtctgaactgaagcagcagcggcgaggaccgtaacgccagcggccatctcgaggaacaaaagaatcgatggcaggcaggaggcagcacagcagctcagctcatcagtcgccctagagactggactggactctgggggacgccggaatctttgcccaccctttcagactttctttaccgctgcagctttgactccagccccgcagcgacgccgtagaacgaacatcgctgtactaggctgtagctgtacgccttcctttttgcagctttggctaatggtgggtgtgtgtgtggatatgtttgtttagtcatgaccagcactactacttctactactagcatgctactattaaaatctgatgaccagtacgtatagattaattaatttaaatggtttagccttttgcgcccatgtgacccactacggtttgtctcgactcgagtgagcattttgactcttgttccgtcatcggctcaaatgtgcgtgccggaggcggaaatggtgcttagcgtggacgacaatgcacactactggcagcagcacccgcactcgagtagtgctactagtcaaacgtctgccctttggcgagcaattaaaaccttggaaatggaggatttgtgcat

SEQ ID NO: 97570 - DNA, 127 bp, Zea mays
  unsure (1)..(127): unsure at all n locations
  Clone ID: MRT4577_20497C.1
ctcgagccggtgaccgtcagcgccccaggcctgaagcctccatgttcgggcccttcactggctacgagcaccaccaggtacgcatacccctcctcttncgttccttctgtacgagcaccctaaccct

SEQ ID NO: 97571 - DNA, 481 bp, Zea mays
  Clone ID: MRT4577_20498C.1
gatctcaagtctctctctcttagtgaataaattagggttcgttgattctctgttcttaagctcagtaatcgaggagaagaagaaaagggaagatcgggaattgggaaactgagaagtcaaaaaggcaaatgcgagtggaggagattgagttttagaattccaatgtcttgggctgctcctgatgatatcttcttctccacttctcttgctgcttacctagacaagaaacttcttgtgttgcttcgtgatggtaggaaactgatgggtctacttcggtcctttgatcaatttggacgtggaaaaagaagagcttccagctcatatggttcaggttccagaagcagagataaaaagggctcagaaagcagagaaggaagaaatgcttttaaagggcacaatgcggaaaagaatggagttccttgatctcgattagggcattttcctatgtgttgcagcattgtagaaactagaagatctcaag

SEQ ID NO: 97572 - DNA, 380 bp, Zea mays
  Clone ID: MRT4577_20499C.1
gcacgaactaagcagcgcgagcgaggagcatactatctttccctacctcgaatcctacggtcgggccatcttcggccatggcgaccgttattcataagatcaaggacatctaggacgagatggcatggacacataataatttagccactgctcaccatctaagtcttattaaggctaaagtttgcataattgcccccaatttggtttctttacctttttacccttgttgcccgcacattttagtcatatttgttctccccatactaaagaagaaaataatcttttttctttttcttattaagataaacaaatcatttttgaactgattactcttttattaatatattcgtttgtacaaagttattttttataaattcttt

SEQ ID NO: 97573 - DNA, 259 bp, Zea mays
  Clone ID: MRT4577_2049C.1
cttattcgagcgtgcacgctatttcgcgggggaggcttttgggctgggctcgttaccactccagacgggggcaagatcaagatggggatcaacgcatggcgatggcatggccggctcgagacatgcttggcgagcgatagtcaggacaggacgtccgtatgcataaagtgttggctcgcggggcggtagtaaatgtcctacatttccaagttaggtccttgtgctctgttacatgatttcacatgcatgatatcttgtt

SEQ ID NO: 97574 - DNA, 481 bp, Zea mays
  Clone ID: MRT4577_204C.1
cgcgcgttgcgcctgctatggtactcgtgctccgtctgctcgtgctccaccaccgccggaacagcgctccccaccagtgggcacggggcgccgtcctccttcctactctgcaagacgctgctgagacaggccgaggcggcccggtcgtgattcgccgagcgcgccgcggcggaccccgacaggccgaactgcatgcccggcgacacccctgcgccgtggctagacggcagccttcccggcgacttccgttttgatcactgtggcctcggatctgacccgcagagcctgcattggaacgtgcacgcggagctggtgcactgccggaggacgatgctcggcgcgcagggcatctgcatcacggagatactgaccaagatcggcgtgctcaacacgcccttctggtacaccgtcgatgagcagctgtacttcaccgacaccaccaccctcttcatcatcgcgctcattctcatcggctgggccg

SEQ ID NO: 97575 - DNA, 277 bp, Zea mays
  Clone ID: MRT4577_20500C.1
tgcgggtgaggctctcgaacaggggcggcgccgctgctggccagcatagtggcgtggacaccggtgctgtggacgattccagtgagcctaggaacgcgcagaagcggaggcctgatgccagcagcgtggcctccgtcctagacaagtaccgaagagaatttgccgtcgtcgtcccgtttgctattaaccatgatcgcgagcagcatgactatggttcaactactaacgaagacggagacaaatcggttgaattcgaggattttctccaagtgaatgc

SEQ ID NO: 97576 - DNA, 168 bp, Zea mays
  Clone ID: MRT4577_20501C.1
ggaagttgtcaaaagaggggtggctcaccctgataaaattgctgtcggtggtcattcatatggtgcatgcatgacagctaatctgctggctcaggctcctcatctgttctgctgtagaatcgctcgctctggagcttacaaaaggactctaacttcattcggcattca

SEQ ID NO: 97577 - DNA, 252 bp, Zea mays
  Clone ID: MRT4577_20502C.1
gatttttggtccttaatgggaagcagctgtggcaccttgtcaacgactgccggagaagaacatcttgaattacacccggctatcatcaggtcctataagctgacttggctcaagagattctgcgatccgagtcgtctggtaatcgcgctcagctaggggacaactcgtgtcgattgcctgcccaacactcagtgatgacactacactctaggtgccttgaggactcttgtcctctattgaacagcgggcaaa

SEQ ID NO: 97578 - DNA, 1149 bp, Zea mays
  unsure (1)..(1149): unsure at all n locations
  Clone ID: MRT4577_20503C.1
ccggccagggcggaacttgggtagggcgagtgggcgaccgccacagctcgacggcagggtcgccactgctggccatcaccgacgaacaccaccaccggccgcggacgaagggacagccaagccctatcccaccgacgtcttccaccgtggacacgcccccccccccccccccccccggtttccctttcctgccctctgccggcccacgcgtccgtgcagcggcgtgaagtagagatccagggggacttggatcgttttatccgttcctaggtccttcttcctattcccagcgcacaaggctatcttatccgagctgctgggggttgagtgcgaggtcccgttgacggtggagatggacaagttgcggcaattcgggcggaaggcatggttcatcgtgcgtgtgctgtctggttacgaggagaagaggatccggtcctacaggctgcagctgcagaagcgcatcgagatggcacaagctagaaaggaagagctgcagaaactgccagaaaaggttatcttgtcggaggttcgtctagcagtacagaagatgcaagctgtaaatcagcagcttgacgaagctgaccctgctatcgatgagtattttaaaccgattgacaagaacgccaaaatcatagcagatatgcagttagagaaagaggaaaaaccaaccaaggagatgacaaaacttatgcaggaacagatgaaaatgcgaagagaaatcatgatgacaagagctgaggctgcaagcgtcgagtccagtgatactaaagcgggtggaaaagtggctaacatccctccgaaataagacactggaaaagtgggagttattgtgcgtatgtgctatatgctaggaaataagtgcgtacttacaattagacaatcgctaattgtgtggttagcgaaggctattgtgctgcttctttccatttcatgttttatccacataagctttgctttgtgcgataatgtgctctgtccattaacatgttacatttactacagcaagtatgttgaggtgctgtgtcagtttattttttctggggacttgtcgaatcccgcaattcgaggtgtccagcgtttcagatttgctgctggatgataaattgttgattttgccttactcntttcttctgaggtcagttttttcta

SEQ ID NO: 97579 - DNA, 699 bp, Zea mays
  Clone ID: MRT4577_20504C.1
ccggccgggaccacctctacctgcctgcgccaaaacctagccgccgcggcgccgcccgccgacctgccgtgccgactgctgagtgccgaccgacgtgcgcccgctggccgctcgacgttgttggcctccctcgacgccgctggccggtggccgctcgacggagtcgacgcctcacagcctccctcgacgcgacgccgctggccactcgacggagtcggcgcctcagtcacagcgtcgggaaaccagtgccaatgtggcggcgtcgtaggccgcggaagccatctcgggcgtcgagtacgtgacgaggcagatcctgctgggtttgcgcagctcgcggccggatctccgataccacttgatgaacgtatggagagaagagaggggcatcctcacttctagtattcgtagcaagagagagacagagagagagacagtgattaatggcctgcgtcctaaatttaagctagggcctggcagtaattcaattttttttttgtaatctagcaaatcttgatacggaccattgctagtacctccttgcattgcgttgataaaggtgtagcattgtagaccttgagggtcatggtattattactcctggatttctagttgttacttgacaactgaatatgctttgttacttttcttgtcaaacaactgaatatgaaatggctgtcaaacaagatgttttgttgattt

SEQ ID NO: 97580 - DNA, 233 bp, Zea mays
  Clone ID: MRT4577_20505C.1
ctacttcatgtagcctaacgcttttagatgatttgtacatagagaagcagccgagaagatagtggcaacaagaatagccttctgtataggtggtttccagttaaatttgctggaaatctttattcatgtcaggtttcgtttccataagcaaatagtgccccggactcagcttgtcccgtcgagcacgtgtctgaatgtagcctgagcttctgattcagattcgttagtaattt

SEQ ID NO: 97581 - DNA, 474 bp, Zea mays
  unsure (1)..(474): unsure at all n locations
  Clone ID: MRT4577_20506C.1
accggtaccagccttcccgggtagttctagaacgcgagcggggtgggttactaggttgtaaatttgatgtcggaggctggggtacacatgggcattctgtaccagcggtggaaggcgccggcgacgatgacgaaccagtgtgtgttattattanttagaagacaacgttgtatttctgtagctgaattgttgagttgcggatatcattgtgctgctaaggttaatgtgacgataaagttaatgtcaaaaaaaaaaaaaaaaaaaaaaaaaaaaaaaaaaaaaaaaaaaaaaaaaaaaaaaaaaaaaaaaaaaaaaaaaaaaaaataaaaaaaaaaaaaaaaaaaaaaaaaaataaaaataaaaaaaaaaataacaaaataaaaaaggggggggttcttttaagtgaccaaattttaaacaccttggtttacaggaaaattttttttttttgggtaaccaaaaaattaagtaaag

SEQ ID NO: 97582 - DNA, 435 bp, Zea mays
  unsure (1)..(435): unsure at all n locations
  Clone ID: MRT4577_20507C.1
ccacgccgctccgaaaaaaaaaaaaaaaaaaaaaaaaaaaaaaaaaaaaaaaaaaaaaaaaaaaagagaaaaaacgaaataaaagaaacggagcttacagtactgggggcatccgactttcctaccctcttctttggcggccaccttaaattcatttttactgggcccgttgttttacatcgtctgggcctggggaaacccctggcgggggcccggcttaaaccgccttagcaacccatccccttttccccagctggcgtcctcctttagaggcccggcccgatcgcccttcgccccagtcgggcggcctttctggccaatgggccccgccctgtggcggagcgtctggcccggggggtggggcgtttacccgcggggtgtccgctccccttgccagngaccccccgcccgttcctttcgctttttccccttctt

SEQ ID NO: 97583 - DNA, 293 bp, Zea mays
  Clone ID: MRT4577_20508C.1
atagattcattttcgattgctagaataacatgtgttaagtactatgtatcttcgtggtggacatcccctgccattgatgaatcatgtgctgctagcaagcctaataagaacagactctgatgattgcctacctcggctctatgtaacttgtctatatctatatgcagacccttgcaagtctacctcagaattctgaatgatgctgaaccaataaacaatagcgcaatggaatcattccgagatgtgcttgagaaagagctctctgtccttaacttgcgcagtgattatgatga

SEQ ID NO: 97584 - DNA, 526 bp, Zea mays
  Clone ID: MRT4577_20509C.1
cacaacaagaccttcatcattcatccatcggccaggccaaatcacacacatattccaggtgatggtgagttcccctaaaccaacatcagcagccctacctacctaccaaacaccctaagcacacagccacaaaactagtagacttaccatactatacgctttggtgggggaacagccattggcatcataagcaaccatcatcatgcccatcgtagtcttatcattgtcattgggggcctggacctcctactcttatgacaggtctgcgcacttcacaaaacacttaccgccataggcctcttcatatatctcctaatctaacgaacccttaccggaccattgcagttcaaagtctgtcgagtgctattgggctctaacccgcccaggatgctaaaccagatactgagttaccagctccttcttctgatagcatttaccgccgacctattgctgatattctgattactcgacctccacccttgtccattgtatcccgtctgcgtaggacgcatcgtaccctcttccc

SEQ ID NO: 97585 - DNA, 1926 bp, Zea mays
  Clone ID: MRT4577_2050C.1
atggatcctaaggggaaaggaattgtgatcaacgacaaggagaaggagtccttcgtcaacgagccaagggatgacaagtccaacaactcgggctcgggacacaagcgaaaagatgggaagaagaagaagacaagacgcatcaaggagatcgtctactacgacagcgatgagtcctcttcttcccaaaaggacgacgacaacgactacaggaagacggttaattcgaacttctcatttgattattctcgtattccacatagttcgaattcgcatttactttccattcctcttggtaaacctccacattttgatggggaagactacggattttggagtcacaaaatgcgtagtcatttattctctctccatccaagcatatgggagattgtagagaatggaatgaaatttgatagctcggatagccctatgtttatcaatgaacaaattcataaaaatgcacaagctactactgttctcttagcatctttgtgcagggaagagtacaataaggtgagcggcttggacaatgccaagcagatatgggacaccctcaagatctctcacgaggggaacgacatcaccatgctcaccaagatggagttggtggagggcgagcttggacgattcgccatgataaggggagaagagccaactcaaacttacaaccggctcaagacccttgtcaacaagataaggagctatggaagcacgcggtggacggaccacgacgtcgtccgcctaatgctaaggtccttcactgttcttgatcctcatttggtgaataatattcgtgagaatcccaggtacaccaaaatgtcgcccgaagaaattcttggaaaatttgtaagcgggcggatgatgatcaaggaggcaaggtacgtcgatgacgcgttgaacggtccaatccacgagcctcaacccattgctctcaaggcatcaaggagcaaggaggcactaccaagcaaggtggcgcaaattgaggcggccgggcttaatgatgaagaaatggctctcatcattaagcgcttcaagacggtgctaaagggtcgcaatggacagccgagcaagactaagaccaaggggaagcgatcatgcttcaaatgcggtaagctaggtcattttattgctaactgtcctgataatgaaagtgaccaggaaaaggggaacaaaagggagaagaagaagcactacaagaaggcaaagggcgaggcacatctaggcaaggagtgggactcggattgctcctcttccgactccgacaatgaaggactcgccgccaccgccttcaacaaatcaaccctcttccccaacgagcgccacacatgccttatggcaagggagaagaaggtatgtactcgcaattctacctatgcttcttcaagtgaggacgaatctagtgatgaggatgaagtagattattcatgtttgttcaagggcttagatagatctaagatagacaaaattaatgaattaattgatgccttgaatgaaaagaatatacttttagaaaagcaagaggatttgttgtatgaagagcatgataaatttgttgaggcacaaaaatcctatgctttagaagttaaaagaaatgaaatgctttcttttgaactatctacttgtcatgaaaccatttctactttgaaaggtgtcaacaatgatttaaatgctaaattagaagtagcaaataaatccaattcttgtgtagaacatgttgaaatttgtactaggtgtaaagattttgacattaatgcttgtagtgaacacctagtttcaatttccaagcttaatgatgaactggctagtcttaatgctcaacttaagactagcaagaatgatttcgataagctaaaatttgcaagggatgcctacacaattggtagacacccctcaattaaggagtggacttggcttcaagagagaagctaa

SEQ ID NO: 97586 - DNA, 536 bp, Zea mays
  Clone ID: MRT4577_20510C.1
gttataacataaaaagtaaaaaaattgcctcgccaatatccacagtataacgccatggcatgcctacatcaccacagaggtacatggcatcctcctcacgatggacatacaccatctgtacatcactccaaagtcttcagaacccgcgtcacatggacttacaacaaagcactctgaaaaaaacgcccaaggcttacctaccggctcatgcacaacaaagagcttgaaccgtgcgacatgccacttgcacaccagtcggaaactactttgagcccttccacgattaggagccggggaggatcccgacatagatagcaatgatcctgaatggagacgacctgtccatggtgctgccagggagactggctttaaaacgagccacgatttgatcaagattcacattaccacgcagatactcggatgcagcatcatggaccgttaagtatacgcaggattttgcaggcctcgtcactatagacagggcgaagacctctctgcacacgcaccaagacaccaggcggctgcattttgggatc

SEQ ID NO: 97587 - DNA, 1739 bp, Zea mays
  Clone ID: MRT4577_20511C.1
atcgccgcccgccaaagaaacctcctgcgcgtcgcccggacccgccgacccgcctgcccgcctggtgctcgacctaatgccgcggcgccccccggcatccaatctttatatgaaggctagtttttatatgaaggagcaccgtacatcaatccaagccgagttccacctcgagtgtattggcacctcgttcaagtacaaagcaaaaaactcatcacaaagatgagtttcagatccatcgaacaattacttaggaggaacagcaaaaccaaaatttctcgcaatatcgttgaccgcaaccatgaccagaaggaagagcagttagtacaatccttgagggagttacttcttgcaagcaaacagctcccagataagtttgatgactactatgtccttctacgctttcttaaaatgagaggcttcaacatcttaaaagcaaaagagatgttcttaaatatgttaaaatggcgtgaagattgttccgttgatgccattgcgaacgattttaaatttgaggagtatgatgctgtgaaaagatgctatcctcatggatttcatggagttgacagatttggtaggcctctctatattgaacgagttggctcagtggatctcagtaagctcatgcaagtgactactattgatcgatatgtaaaatatcatatatcagaacaagagaaaactatatctttgagatatcctgtttgctcacttgtggctaaaaagcacatagcatcgacaacagccatatttgatgtgaaaggactggggttgaataacttttcaaaatctgcaagagagatgtttgcagaaatccaaaagatcgatagcaattactatccagagacattaaatcaactttatataattaatgctggaactggatttagagcactgtggaaggtattgaaaacattcatggaggcaagaacattagcaaagattcaggttctggggaccaattaccttaacacagtattagaagctgttgacccaagcaatttaccagaatttttaggcggaacttgcacttgtccaacaggaggatgcttactccaagataaaggaccctggactgacccagaaatgattcgtgcttctaaggaagcattcggtaaaggtcagaagtctttcaatgaattggctgccacaattgcctgtgaaagctttacaggttgtcaggagccttccgcaaaacaagtagattccacttctcgtaagagaagaactcttggcatgttgttcaaagatgatcaggttggatttgatacaggtgaaaatattctacggaaacaagtcgatgaacagatcttggagaagatccgagaacttgaacactgcgctgctaagagtggggagaccctgcagatattaatatgcaagcaacaagaactcactggccacatcgaacagctgaggaaaatccttcagtgagaatgtgatggcgtgggttcagatatgaaagccgacatataaaactcgaaggtagtgctggccaaaggtgaagaaaatcaaaagggacaagaagcgaagccatcgatgtaatgtaataaagaaatatgcaccctagttttctgtgatgaatctttaacccctatgagctgctaaaacactcacttgtgaatgtcaatatgtcatagtattattgtacgccatgattatactcgcaacgctgtctacggctacgtactcagaagttctgtaccaatgttaaataaatggtacacatgtaatttaccgtc

SEQ ID NO: 97588 - DNA, 2048 bp, Zea mays
  Clone ID: MRT4577_20512C.1
taattcggcacgatcgggccgggcggcaccttccccctggccttaaccagcaattcccatatcgcccctcccccaaaacgggagctcagcggcggcggccgcaacccctcccctgaaccctacccccttctacccggccaccaccccacaacatggccctctcccgccgcctcctcccgctcttcctccgccgcggcgcccccatccccgcccgcgctctctccacggctgtcgcacctgcggcggtggcctcggaggaggacgaggcggccgtcaccgtcaagggcgtgcgcatctcgggccgcccgctctacatggacatgcaggcgacgacccccgtcgacccgcgtgtcctcgacgccatgctccccttctacctctctcgctacgggaaccctcactcccgtacccacctctacggctgggagtccgacgccgccgtagaggacgctcgcgcccgcgtcgcctccctcgtcggcgccgacccgcgcgagatcttcttcacctcgggcgccaccgagtgcaacaacatcgccgtcaagggcgtcatgcgcttctaccgcgagcgccgccgccacgtcatcacgacgcagaccgagcacaagtgcgtgctggactcctgcaggtatctgcaacaggagggattcgagatcacctatctcccagtgcgcaaggacgggctcgtcgacctcgcgcagctcgaggacgccatccgcccggacaccgggctggtgtctatcatggccgtcaacaacgagatcggcgtcgtccagccgctcgaggagattgggcgcatctgcaaggagaaaggcgtgccgttccacactgatgctgcgcaggcgctggggaagatcccgattgatgtgaacaggatggggattgggctcatgtccttgtccggccacaagatttatggccccaagggcgtgggggccctctaccttcgtcgccgccctcgcatcagggtggaaccacagatgaatggtggtgggcaggagcgtggcatccgcagtgggactgttcctacacctcttgttgttggatttggggctgcctgtgagattgccgctcaagagatggattatgaccacaggcgtgtcagtgctctgcagcagaggctgcttgatggcatacgtgcgcaggtcgatgatgttgtcatcaatggaagtatggagcaccgttacccaggcaatctaaatttgtcatttgcttatgtggaaggggagagcttactgatgggtctgaaggaggtggctgtgtcaagtggtagtgcctgcactagtgccagcttggagccctcatatgtgctgcgggcacttggggtggaggaggatatggcacacacttctattcgtttcggcatgggtcgctttaccactgacgaagaggtggacagagcaattgagcttactgtgcatcaggtgaagaagctccgtgacatgagcccactctatgagatggccaaggctggcattgacctcaagagcatcgagtggtcacaacattgaggcagttttcatgacaaacggtcactcgaaagcgtacacggatcgcatacataggcttatggtgctgctggtgagtacgttcatgtggtgctcctacctctgataggattatcacacttttttagctctcacatggggcccgagtgtattcacgagtgctttcttagttgagtatcttgacttcaaaataaggatacttcaaatacttggtaatgtatcgtctgaaatacagtttgaagtagtattgaagcggtgacaatgatgataacctattttagtgctgacaaaaatgttgttataatctccagttgttacaattcctgcatgtgtatttattctatgcttgatctgaaaaatacttgggcccaaaaaaataaagaaatgaggggccccatgttatccatccacttcttgctcgcgtagttgcggacttgctttaccaaggactttagtcggttgtactggttcttctctctttcatggcgaaatgctcgagcttaccttctaggagctctatcttggtgattttgtcaccctcat

SEQ ID NO: 97589 - DNA, 387 bp, Zea mays
  Clone ID: MRT4577_20513C.1
aaataaaaaaaacaaacttacattcacggtttctacacccaacaaaaaccaaacagacatacgcaaactttcaaacatcaacactggcacatactcacacaacaaacacaaaacactaaccgggcgcccacaccaaacgacccaggctaacccactcctgaacacaactccatagaccctcaacaccatccccaaaacaacaccgcgaccttgcctccacacccacacccctgggaaatccccacctttccccacattaaatgcccaatgacacaccccctctcccccctcttatatacttgcgaatagaccgactccactctccatatccaatactcacgcacccgtactagctaattttacgacccatgtagcccccccttaatc

SEQ ID NO: 97590 - DNA, 413 bp, Zea mays
  Clone ID: MRT4577_20514C.1
ggctaagatcaagtgtagtatctgttcttatcagtttaatatctgatatgtggaccatgtgttcacttcgatattaaatttattttttgtgggggagggctcactacagtagcttgctactgggtcctcacgtgtcgcttgggcgttgcactatagctcaagcctggcgcacccaaccaagtcaaaattaaattttgctactgagttcctcaagtgtcggttgggccttgcactacagcccaaggcgcacccgaactaaattaattttttctcttgttttgctgatgggccttgaaatggtctctgaaataatttatacttatgaatgctaaagtccgagcaagtcatttatttgaaaatctgtgcgatcaggtatagaaaatattatgcggtgattcatttaggtgacatgt

SEQ ID NO: 97591 - DNA, 1664 bp, Zea mays
  Clone ID: MRT4577_20515C.1
aatattttttttaatttttttttaacacagcctcaactaaaaaactatcaaggccaatactgccttggaatgaaaaaggacacgagttcatccgtccttttacagactgctgacactgacacaataatcaccaggcgaacctcgcttccatttctactgttacactcagcgttacagtttttcccctttctctttttgccgggggtcagggtcaccttaataaatagtctaccagctacatgcacaactaactgattcacataagcacctctcagattggccaatcagaatccgcgccaaactaatcctacacacctacccagggggtgagtctccactctccagcaactgtactgagcatgtcaagggtagctacgaggtcatcaccttgtcattgccattgccattgccttctgttccaggttgcggtatcagtgtgacatccgtttcatattctaacaggaggtccatgaactcgttgagcagccgctgcactttccggttcgacgccatcgaaggaagtatatcttctttaagaagtttgtgcttcttcattccaagaacatcagggtcccacgctagatttttgggatcagtaggtgatgccgaaccaaccatgcccatcggaggacctaggaagctctcacaaacttcacgtaaacgagattcatctgcttctcttgctaaaaatcgtacataagataggaggcattgacggtactcctgtgcagacttcaaagccaaagaagaggcaagttggttctccagatgggcacgtgtctgcaacccatcatctgtaaccctgctccaaataggctttctcgccatgaacttgcctatgtcaatctgcaacttgcctagctccccaccttgtgggaaactaaacgagctagcaaaatttgatgctggaaaacaatcatcagcaatccttaaccagcacttcaggctcatgtcataaagaaaagcatgacggctggcaaggacaactaagggtgatccacatcttgagaatgtggcagatataacctttactgtaccagcatcttttgcagatgactcatctggagatgcaaccaaagcagctaaggagtcctgcaaaatgcaggtcctatcataaaggttccatatgtacattagacctctccttgtgacaagaagcaatttccaggagtcgtcacaatcaataaaaacagctgcagatcccatcatcattgctggcattgctcgcactccacatcttgtgtaaacctgcaggaaaccatcttcgcaaccaacagcccagaaatttgcattgcctgccaagacagtaacctttccagagacacgatccgaccaaagagtttttgtaccttttatacactttatctcagtttcttttgttgaaagcgcaccaacaccaatcatatctccagcaccgcgttccacaggcttcgcttcaaggcagacaggcaaagcatcctcattgccattcttatttattacatgaatagaaagcgcagagcagggggtcaaagagcttggggccacagatctggtgtgttctatactcagccttccatcattgccagcaccggctgaagctttttgaataacaagactctcagttatgtttgcccttgctgtgacactagtgcgatccttaactccacagttattagagttgc

SEQ ID NO: 97592 - DNA, 639 bp, Zea mays
  Clone ID: MRT4577_20516C.1
taggggcctttttttttttttttttattttttttttttttttttttttttttttttttttttttttttttttttttttttttttttttttttcccccccaaaaaaaaactgtttccaaaacccctggggcaaaaaacaaccctggcccccaaattggggaagacccccaaaggcgagggtggtgggggctacctcccccggaaaaccaacggggacaacccccggacccatagtgggaaggctgccagggcccccaagtcccaaggggcccccgtggagaaaaatctttttgcccggaaaacccccccccttgggggaaaaagggacccccccccccccccggggggggctggggggttccccccccacccatgaaactgtttcccggacccggggggaaaaaaaactgcccttcccaaggccaggtcttttccccaagttgactttgatgccttccggaaaagggcctttgtacccagaagggtggcccaggttgaccaaaaaaaccgggaggcctggcggttgttcccaacaaggagcaaaagcgcgtatttgacgcggggcgtttataccaacggaaaaacctcctttgcccataagccgatgccatagaaaagcgctgaataaatcaggatttgg

SEQ ID NO: 97593 - DNA, 309 bp, Zea mays
  Clone ID: MRT4577_20517C.1
ccgatccgtgggcgggagcgtgaggccgacgcatggtggcattttacgcggcgccgatgctcatctcacatcgatctagaagactcctgctcctcgacgtccgatacgatggccggcttctccgacctccacaccgccgacggcctcaagtccctcgaggctcagctcgctggcaaaacctatgtatctggtgactccattactaaggatgagattacggtcttcgccgcggtgccgtcgaagcctggcgctgaatttcgtaatgccgctcgatggtacgagaccgtctctacggctgtaagctcaaga

SEQ ID NO: 97594 - DNA, 159 bp, Zea mays
  Clone ID: MRT4577_20518C.1
aggccacaggagtcccctactggctgcagaggacgagtcaggaagcatgccgtagatctggggcatggcagccaggttccagagcagcaggcatgtgcattatgggtgccaggtggccagtgagggcccgaggaccacgcataggagtcccccgggggc

SEQ ID NO: 97595 - DNA, 249 bp, Zea mays
  Clone ID: MRT4577_20519C.1
aagctcggaattcggctcgaggcaaattccaaccccttttttccccccccaaccaccgagaacccaggggggggttattaaaaaccagggggcttttcaaccacgaacgcgaccaacctacgaccacaactgacgccagaccaaacaaccgcagaagccacgcaccatgcacggctcattgcgcacgcaccacaaaaatgacgccgagcagcaaagatgacatcacactcaatacccacccgcagactg

SEQ ID NO: 97596 - DNA, 1419 bp, Zea mays
  Clone ID: MRT4577_2051C.1
cattgggtacctcgaggccggccgggaatagcttagcacgctcccacgcgtccctcggctcgcgccccaaacccagagaacaggtaccccgtgtctcgctttctttctcgcaggattctctcgcccggtccctcagtccggtccgtgtctcgcggctccgtgccgggcaattcaagctgctccccttcgacgatccgtcttccgccgtcactctgccgatggcttctgcacttcagcgcctgtatgtatctactgaatatgagcttggactttgattctcgtgccgtgatgcagtggtcgcgccagcgccgtcgcgctcgcgccgcgcctccgtcaggatgcgcgcctctgctgccgccgccggcggagccgaagaagaccgtctgggtgtggaccgagagccggcaggtgatgacggcggccgtggagagggggtggagcactttcctcttcggatccaaagacctcggcaaggactggtcatcaaccgctcgcataaatgctctcttcattgacggtccagggattttcgatgaggagaaccagaaggttgctgtaatttcacaagtatcttcgcccggtgaacttgaccttgtacaaccggacgacgccgaagccgagaacattgtcatagactttcgaggtggctggcaggttataccggcagaaaatatagttgctgcattccaaggatgtaaaggaaatgtattggctgtatcaacgaacacaactgaggcgcaagtttttcttgaggccttggagcaagggcttgatggagttgtacttaaagcagatgacatggatgatatcattaagctcaacagatcgtttgtcagaggattgattcttgttcattctgaatgcatgaaaactaagcacattgcaagcaggcctttcagagtcaatgcgggacctgtacatgcatatgtcaccgttcctggcggcaagacaagctacctctcagagttggggtcaggaaaggaagtcatcgtgatcaatcagagtgggctatggcgtactgcaattgtcggtcgtgtgaagatcgaatcaaggcctctgatccttgtagaagcgaaggataactctggagacgagacatatagcatttttctacaaaacgcagaaacagttgcacttattacccctaacacaggatcaagtggaaggaccgctattcctgtgacttcgctgaaagtcggtgatgaagttctggtgaggaaacagggcgccgcccgtcacactgggatagagattcaggagtttattgttgagagatgaaaatggaaacgctgaatgcaccagttttacgtcgttttgaacaaaaaaaatgatggtatgattttgaacaaaaaaatgatggtatgattgcaacattcatctgttctgctgttggcgaaaaaaaaaaaaaaaaaagcggcc

SEQ ID NO: 97597 - DNA, 663 bp, Zea mays
  Clone ID: MRT4577_20520C.1
ccggccgggatccttccgagtaacttaaggatcttttcagatttcggtttcgcatcggcaccacctaggatcacatacacgaaagatgagggtcacacagacatggggggctttgctctcgactgcactcattgctagtgccgctcctattgccgagaattgtacagctgaagccgactacgatgtgattatcatcggatctggacctgctggaatcattgttgcggaccgcatgagcgaggctggcaagaagactctccttctcgagcagggtggaccgtcttactacattaccggtggccgcgagcgtccaggctggctgaacggcaatgagctcagtcgtgtcgatgttcctggactttacaagtccatcttttcagtcactggtaacttgacatgcgcgtcagatgtagtcaacgccttccagggttgcacagtcggcggcaacaccgccataaacgctggtctatttttccaacccccggcgtctgactgggatctgtactttcctactggttggaaaaactctgatatgcagaccgcgattgctaaggttcatgctaagcagccttctactgacaacccgtcagcggatggcaaacgctatctgcagagtggtttcgaggctgccaaggagtggcttgtcgaaggcgctggctatgc

SEQ ID NO: 97598 - DNA, 335 bp, Zea mays
  Clone ID: MRT4577_20521C.1
gggggggggggagattttttttttgtttttttaaaaaaaaagggctttttttatcctacccctcctcagctaatgtcccgggcccatttaagcgtgctggatgcccgactttttccggacaagaaaaaccgcccgtccttcatggaaagaacaaaaacccacgacctccatgggaagaacaacttttgattccttttacaccctaataaccggggccaaaaccccccgccggctggatcaaaagattttgatggccccttttttccatataattttgaaaaccttggaccacttgacaaacacagccttttgagatgctagcatgggatggccca

SEQ ID NO: 97599 - DNA, 202 bp, Zea mays
  Clone ID: MRT4577_20522C.1
ggccgcccgtgggggggggggggggggtaagttaccaaagaatttgacagtgtgccctttgcgtctgatcaaggtgctgtttgtgtggacgcagtgcggccgtgtggcgcagctggggtgccggggaaagcttgtggttgttttcttgttaccctcccacttttttggggggggggtcgcgtgcttctgtccgcgctgggcc

SEQ ID NO: 97600 - DNA, 730 bp, Zea mays
  Clone ID: MRT4577_20523C.1
ttgggtacctcgaggccggccgggccgccgtcattcttatctcttcctcccatcatcatctccctccctttccctgatattctctctcgcggtgctctcccgagctcaggtcggccgagcgctcagccgtccctcctctctctaccctctgcgcgcttcatctccctggccagagcttccctgcgtgcgcgcctgctctcatgccgcgccccctcagctcgttcctctctcgctcgccccagcacctggccgagcttcctggcctccgcgccctggcccctctgctcagtgctctctagcccatggcgcgcagccgcgtcttcaagcccggcctccagcctcctcccctgtgcgccgacccagctccctctcccatggcgactccctccgcgcatccctggccccagcatggagctcacccagtctgtgcgccatgcttctctacttgccctccccagccatggaacttccagctgcgagctctgctcggccgctcctcctgttccctggctatggtggtgtttgtgcccgtggcgacgtcgtgcgcgtcgcggcagccgtcttagccacgaagcagttcgcgccatagaatttgcccggccacggcctcatcgaactgcgaagctccctcgccgtgcgctctggcatcggctaccgccgattccgccatagagttcacgagcgctccttgctctattcatttcgctgtgggcaatttctccacgcttca

SEQ ID NO: 97601 - DNA, 194 bp, Zea mays
  Clone ID: MRT4577_20524C.1
atctttctcacgcatctcagagctctatgctctagctagcttgctaggtgtctgacatgtttccgcttctcactgctgacatgaaacacgctgcagacatgctggcctgacgagccacctagcaggacccaacaatgagagtttctcatggcaccatctgccgtcttcttctccacagagcagcaagcgaaggt

SEQ ID NO: 97602 - DNA, 101 bp, Zea mays
  Clone ID: MRT4577_20525C.1
tctacgcgtccggggagctctggggcgtgcgcaggggcgattgtagcgacctacgcggtgaataccgtcatcaggaccagagcatcctcccagacgctccc

SEQ ID NO: 97603 - DNA, 270 bp, Zea mays
  Clone ID: MRT4577_20526C.1
agcagtggtaacaacgcagagtacgcgggcatcaaagacaccggcggtaaatgctgaacagccaaaaactagcaacaaatcaaggaagaagaagtccaggcattagatgagaattttatgttacattaccgtacaaaagaatattttcgtttatcttctggatgacttgcaattttggactggattgcattcaattgcagatttgctttgcttccaaaaaaaaaaaaaaaaaaaaaaaaaaaaaagtactctgcgttgttaccactgctt

SEQ ID NO: 97604 - DNA, 241 bp, Zea mays
  Clone ID: MRT4577_20527C.1
attcccgtgctctacccacttcttcctagttcccttctactcccactcctcattttattcaactccaacatcttcttcacagaactctataaaaagttcaccgcccattcaaaatcaccatcctcacataaaacaccaacataatatacaataacctcaatcacaaactacacaacctaattaaataacacatacactcacaacaattcatccaacaaatcaaatatacacaaacatccac

SEQ ID NO: 97605 - DNA, 568 bp, Zea mays
  Clone ID: MRT4577_20528C.1
ctttgtattagcgcgctcatgttgcgtgttcacaatggcaacgggcaatcagaggaaacgtcgcttgtcagtatttgcttggctttagcctcagcccgacacaacgaatggacgtacgtcttgtgataataattttctggccatttgatcggttaacgacgctgcagtctgcagctgtgtgagtataattatcctttttttataaaaaaattccaacttggttatcaactctatatattgtggattcagctaattagcttgtatccatgcatgcctttatatattgcacatgcatctgctagtgcctgtggtgtgtgaggaactcacgctctcctgatgtcagtctgattttatactttgatctgatgaatatacttgatcatggatattttgtggttactaattgtagactagcctcctaatttcgtactaggtagctagcagcaagtagcagctgcaaaaggatactacagtgccagtttcttggcagtatatatatatatatgaaagatgaaccctagcctagcctagcctggtgtactcgggtctcggggtgcggtgtggctgc

SEQ ID NO: 97606 - DNA, 290 bp, Zea mays
  Clone ID: MRT4577_20529C.1
ctcttttttttttttttttttataaagttccaagcttcgcgcacaagacacgagaacacacccgagggcttagctttactacatagactcaggtgctgcagggtgaatccctgctgcgcatgaacgtgattttgggtgatcagagcatatcatattcagccacatcgaccatggtcattatggtacaccaggtcctagatgttcagatgacacatgtaggcttggtgatggcacctgaactgtatggaaggatctttggccaggtgctgaaggctcccttggtaaggatc

SEQ ID NO: 97607 - DNA, 2649 bp, Zea mays
  Clone ID: MRT4577_2052C.1
atgggctacaattgtttgtttacaaatgttgatgtatctgtctttagaaggagtgatggttcattagcgtttaagggtgtactagatggcaaactctacttagttgatttttcgaaagaggaggctgatctagatgcatgcttaatcgctaagactagtatgggctggctgtggcatcgccgtctagcacatgttgggatgaagaacctccacaaacttctaaagggagagcatgtgttaggactaaccaatgtatgtttcgaaaaagatagaccttgtgcagattgtcaagcagggaaacaggtgggaagcactcatcacaacaagaatgtgatgactacatcaagaccactggagcttctccacatggacctcttcggacccgtcgcctaccttagcatcgggggaagtaagtatggtttagtaattgttgatgatttttcccgcttcacttgggtattctttttgcaggataaaaccgaaacccaagggacccttaagcgcttcctaaggcgggctcaaaatgaatttgagctcaaggtgaaaacgataagaagcgacaacggggccaagttcaagaatctgcaagtggaggagtaccttgaggaggaaggcatcaagcacgagttctccgctccctacacaccacagcaaaatggtgtggtagagaggaagaacaggacgcttatcgacatggcgagtacgatgcttggagagttcaagacgcctgagcggttttggtcggaagctgtgaacacagcttgccacgccataaaccggctctaccttcatcgcctcctcaagaagacctcgtatgaacttcttactggtaacaaacccaacgtatcatactttcgtgtatttgggagcaaatgttacattctagtgaagaaaggtagaaattttaaatttgctcccaaagctgtagaagggtttttactaggttatgactcaaatacaaaggtgtatagagtcttcaacaaatcatcgggtttggttgaagtctttagcgacgttgtatttgatgagactaatggctctccaagagagcaagttgatcttgatgatatagatgaaggtgatgttccgacggtcgcaatatgcaccatggcgattggagacgtgcgaccacaggaacaacaagagcaagatcaaccttcttcctcaacaatggaggcgctcaacaacttcaagcgaaatgaagtttggagcctggtgccacgtccaaagcaaaacgttgtgggaaccaagtgggtgttccgcaacaagcaagacgagcacggggtggtgacaagaaacaaggctcgacttgtggcaaaaggttatgcccaagtcgcaggtttggattttgaggagacttttgctcctgtggctaggctagagtttattcgcattttgttagcctatgccgctcaccattcttttaggttgtttcaaatggacgtgaagagcgctttcctcaatgggccaataaaggaggaggtgtacgtggaacaaccccctggctttgaggatgacaggtatcccgaccatgtttttaagctgtctaaggcgctctatggacttaagcaagccccaagagcatggtatgaatgccttagagatttcttaattgctaatgcgttcaaggttgggaaagccgaccccactcttttcactaagacttgtgacggtgacctttttgtatgccaaatttatgtcgatgacataatatttagttctactaatcaaaagtcttatgaggagtttagcagggtgatgacacagaaatttgagatgtcaatgatgggcgagttgaactacttccttaggttccaagtgaaacaactcaaggacggtaccttcatctcccaaacgaagtacactcaagatcttctcaagaggtttgggatgaaggacgccaagcccgcgaagacgccaatgggaaccgatgggcatgtcgacctcaacaaaggaggtaagtccgttgatcaaaaggcataccggtctatgataggatccttgctttatttatgtgctagtagaccagatattatgcgaagcgtatgcatgtgtgctagatttcaatccgatccaagggagtgtcaccttgtggtcgttaagcaaattcttagatatttagttgctacaccttgcttcgggatctggtatccaaaggggtctacctttgacttgattggatattcagactccgattatgctggatgcaaggttgataggaagagtacatcagggacgtgccaattcctaggaagatccctggtgtcttggagttctaagaaacaaaccttcgttgccctatccaccgctgaggccgagtacgttgccgcaggacagtgttacgcgcaactactttggatgaggcaaaccctccgggactttggctacaatctgagcaaagtcccactcctatgtgacaatgagagtgcaatccgcatggcggaaaatcctgttgaacacagccgcactaagcacatagacatccgacatcactttttgagagactaccagcaaaagggagatatcgaagtgttctatattagcaccgagaaccagctagccgatatctttacaaagcctttagatgagaagaccttttgcaggctgcgtagtgagctaaatgtcttagattcgcgtaacttggattga

SEQ ID NO: 97608 - DNA, 317 bp, Zea mays
  unsure (1)..(317): unsure at all n locations
  Clone ID: MRT4577_20530C.1
caaaccttcatttagaaaaaccacagcaaaccagagatctaccaatccaacgcagagaagcaaccgcatcgctatataatggccgctccggcctcctcgtccaccgccgcacccgcgtnatcgccaccgcacaagcctccaaacaacgccggcagcaccatgctagagccaagcaccgtcgcctaccccgacgccggggccgggttcaggtagtcgagtgtgaagagagaggggcgacaacgccgcggcgttcggctgttgcgacctgctcccgccgagcagaggggcccatcggcgcgtgcggatacttccggggc

SEQ ID NO: 97609 - DNA, 382 bp, Zea mays
  Clone ID: MRT4577_20531C.1
cctgggtcaatccttgtttcaacatctaccatctcactgatttctgcccattcttatgggacgagatgggcttcccttctgatgcgctcggtcctaatgattatttcaaccagtctgatgtgcaggctgcactacacgctcccccgactgattactccgtctgcggcgaagcaaatatcttccccaatggcgacggctctgcccccagcgctctgggccccttgcctggtgttattgaagctaccaacaacgtgctcatcgggcatggttggtatgattatctgctgttcatgaatggatccctcgcaacgattcagaacatgacctggaacggcgcgaagggtttccagtccccgccaacagaagaactgtttgtgccata

SEQ ID NO: 97610 - DNA, 482 bp, Zea mays
  unsure (1)..(482): unsure at all n locations
  Clone ID: MRT4577_20532C.1
gccagcgttcgtggacgcctggggtcgcgtgccggggagaacgccgagaattactgtcgggggtgcctgggctgtgacgcgttccccggcccattgatgcacgcaacgtgattccgcacggtcgaggggattcgcgggtaaggtcccagctcgtagtggggttctgcaactcctgcatggttatcgcctacgactcttgctctncgacagcgtccgtcatcctgcatcgctcttgcgaggcgagctgcactttgtgaccatgttatttggaacttgtgatcactctgcacccgtacctgcccgtgtgggtcatagacatgctggtgttgctcatgtgcgcggtggtgttccggaacacgtcttgtctcgggctctggcgcctcgtgctcggtgccttaaccatcaagctaatcaatccatacttatctgtctgggacgtgtgcacctacgcctagatcaggatcttttagatccctttgcta

SEQ ID NO: 97611 - DNA, 446 bp, Zea mays
  Clone ID: MRT4577_20533C.1
ggggagagcaaaactaggccagttcgttccttttggggagagcacaaaaatatttgcattcgttcatgggccaaatcacgacagaaacgaggagggtacaacacaatgtcctggcccgccggggcccgggagctagcttaaaaccctggggcgaacttgggggcgtaaacccaggcgttgttggcgacggggtcctcgaggggggcgaacaggttctcgaggggccccttgccggggacaatggcctggaccaaaaaacccaacatggaaaacatggggagggggccgttcttgatctccttgaccttgagctcggcgaaggggacggggtcctcggcgaggcccaacgggtcaaattactggcccccggggtaaaggttgttgccctcccccaccccctcaaggcccttgatgcggaaaccctccacgaggcccatgaggatgac

SEQ ID NO: 97612 - DNA, 268 bp, Zea mays
  Clone ID: MRT4577_20534C.1
gggttgggttttttttaaaaacaaggtcttaaattgtccattaattattggcatacaaagttcattcacacatttttttcttgttcctgggactaccctttaaaataaataaattgaacattttttcccttgcccaccctttacttttctcaacaacatatcaccgaatttttttttaaaccttttttatttaaataaatttttcccccccaaccctttaattccaactttttcttcaaaaccattttatttttcaaaaaaaaaacat

SEQ ID NO: 97613 - DNA, 163 bp, Zea mays
  Clone ID: MRT4577_20535C.1
tacacgcatacgcacacacaacgggcctcaaaacccaactgtgaggactagcagccatatatgttgggcgacacccatctgccataatgaccgaaaacacgctccatgactccttataacaccacgacgagtgtcgaggagcagaccgccggcgagtactgct

SEQ ID NO: 97614 - DNA, 270 bp, Zea mays
  Clone ID: MRT4577_20536C.1
tttctcgcgtgcgttccgctcgagagaccctgatctggtttgctaccagcagcaggcctcccgctgcaaggcacacgactcggaaaagggtatagcatggcccggtgagcagcactggtagggcttggactctctagagagtttgctcggggatgaccggaagagtgtgcgcaaggtatttgatggcagtcggacgatgatgcaagcggccagatacgacgacagggactgccttcaccagagctaccccgatctgaagaagtcccttgg

SEQ ID NO: 97615 - DNA, 173 bp, Zea mays
  Clone ID: MRT4577_20537C.1
acggaatctgtcatgaagtcccgcgacgtctccgagcttcatatcggggtcaagcacaagccagaatcctgtcctgtgcatgcacacactggagacaaaaaactggtttactatggaaacacactgcctgatggatcaggaactgatcctcgctattactgatgcgacccggc

SEQ ID NO: 97616 - DNA, 489 bp, Zea mays
  Clone ID: MRT4577_20538C.1
tggacttgttatggatttaaaccgactcaatctcacttaatccacatggattgagagcgaaccgaacaaaccgtaatatgtgtgttcttggggtggaattttggatggtaatgtacaaggacgagtggattaatttacagtgatgtcggaggaccgacaagggttgcagtagctccacgcgaaacgcgactgttgagttcgtccatcgaacagctacacaccgttattcatgctacacgtagctcgcgttcagaatttcagatcaaaagagaacaaaacggagctcaagttcagagtggacagagctggcaaaaacctaaggaaagaagtcgtcgtcgccgggcagccgactctctcctcaacacaaggacgggacgacgccgtccgacgacgccgacgccgaccccgcgggcgagaagcacgccgcttcctcgtgctccagcgcgtcgtcgtcctccgagcaccgcttggcgaagcggcccttgacgc

SEQ ID NO: 97617 - DNA, 455 bp, Zea mays
  Clone ID: MRT4577_20539C.1
cattcaatttttttgaatacttttttttttttttacaaaacagaacacccaccaaccattacaaacggagtagactcataattacggagcagggaggaagttattgttatcctgtgacaacagccttttccccccgatttaaatacacacaaacactatttggaaaaaaaatctgttacaacactccaaatgcacactgcatataaaacatattactaagcttaacaataaattgggaaactgttgaatctgatacatggcaggtttttaatgtaaagaccaacaagggaactgaccaaatcaaccgggggctacttgcacgcaagcctcacggaagtatggatctgcgaggtttcggccatttgcgccgttcccgaaatttccacaggccacccttttgataactggtggcatcaagggtaaacccacatggcagattgtgataaaatccagat

SEQ ID NO: 97618 - DNA, 1431 bp, Zea mays
  Clone ID: MRT4577_2053C.1
ccgggtaaaaaaaaaaaaaaaaaaaggctcttccgatgattcagccatacaatggcatcctcctcttccttggcctccgccaaagccctagcacgctcccacgcgtccctcctcgcgccccaaacccagagaacagtggtcgcgccagcgccgtcgcgctcgcgccgcacctccgtcaggatgcgcgcctctgctgccgcgccggcggagccgaagaagaccgtctgggtgtggaccgagagccggcaggtgatgacggcggccgtggagagggggtggagcactttcctcttcggatccaaagacctcggcaaggatcaaccgctcgcataaatgctctcttcattgacggtccagggattttcgatgaggagaaccagaaggttgctgtaatttcacaagtatcttcgcccggtgaacttgaccttgtacaaccggacgacgccgaagccgagaacattgtcatagactttcgaggtggctggcaggttataccggcagaaaatatagttgctacattccaaggatgtaaaggaaatgtattggctgtatcaacgaacacaactgaggcgcaagtttttcttgaggccttggagcaagggcttgatggagttgtacttaaagtagatgacatggatgatatcattaagctcaaggattattttgatcgaaggaacgaggcaaagagtcaattaccattgacaaaggctactgtaacaaaggtcgaggttgttggtatgggtgatcgtgtttgtgtggatctttgcagtatcatgcgacctggcgaaggccttctggttggatcgtatgccagaggaatgtttcttgttcattctgaatgcttggagactaattacattgcaagcaggcctttcagagtcaatgcagggcctgtacatgcatatgtcaccgttcctggtggcaagacaagctacctctcagagttggggtcaggaaaggaagtcatcgtgatcaatcagagtgggctatggcgtactgcaattgtcggtcgtgtgaagatcgaatcaaggcctctgatccttgtagaagcgaaggataactctggagacgagacgtatagctttttctacaaaacgcagaaacagttgcacttattacccctaacacaggatcaagtggaaggaccgctattcctgtgacttcgctgaaagtcggtgacgaagttctggtgaggaaacagggcgccgcccgtcacactgggatagagattcaggagtttattgttgagagatgaaaatggaaacgctgaatgcaccacttttacgtcgttttgaacaaaaaaaatgatgtatgattttgaacaaaaaatgatgtatgattgcaacattcatctgttctgctattggtcaagattgtgagattcccattgcagcaaaaaaaaaaaaaaagggcggccgccaccgcggtgga

SEQ ID NO: 97619 - DNA, 1045 bp, Zea mays
  Clone ID: MRT4577_20540C.1
gggttccagaactgcgcctaaggtttcttgcacgcgcaaatgaagcggcagccaccacatcctcgaggcggcggcggcgcggcggtcggcgagagcggaagcggcggagggttccataagggggaggggaaagggaaagggaggtggggcggcgggtgccggcggcggaacgagcagcggctgggtgtcggcggcggcggcggggccctctccctcgctgctttcgccagcgccaagtcccggactaccggctacaacccggccgtcatcaagaagcaaaaggagttctacaagaatgctaaactaatcagcaaatacaaaaggacaaagaagcaacaaagtcagtcaaacgaccatccgcagattccaatccatgaggatggtggcgacaatgcccaatatgtaccgaaaccgcgctaccaaggcaagaagcgcaccgcgcatagtttgaaggaagagtacgagaagaaacgcgcagaggatgagaaggctaagaaagagcaggatgcagcagttcaggcgaagagggaacaccgggagaagtccgaggcaaagcggagggaactgagggagaagatgttcaagaagacgagatctggccagcctgtgatgagataccggatcgagcatctcttggagacggcactgagcaaataacacgatgccaccgtcatcttggcagattttgtagttccgctgtccaatcgatttgttggttttaactgactttgtcacctttttagtttgcaaaaatggacaatctaagtgacaaagccagttaaaaccaacaaattggttgggctgcggaactacaaaatttgttggtcaatataccaaggcgatggtggccccacctagagctaggccagaaaagcctcatccaccggcagcccttaagccgtagtagtagggttctattctgttgtcggcagcccttaagaagagactgttcaccagtggagacacttccacttaaccaataaattacctgtgaaatcaatcattatgtcgagcaaaaaaagagaaaaaaaaagagtagaagaag

SEQ ID NO: 97620 - DNA, 132 bp, Zea mays
  unsure (1)..(132): unsure at all n locations
  Clone ID: MRT4577_20541C.1
ataaggaagattttattaatgctaacaacattatantcgaaacgatacatgctccttgaaacctctttcagcctctacagataaacgncaccgcaaccttttanaagaatacacgcgcacactgagatacac

SEQ ID NO: 97621 - DNA, 421 bp, Zea mays
  unsure (1)..(421): unsure at all n locations
  Clone ID: MRT4577_20542C.1
aatttggtaacttcaactccgntaacaactatttatgaattctttnccgganaacacccattatgcgaagtgttggatctaacaaattcattgacacaaatcgctcatgggagaaaattcagttattttggccctggcggattaacagggcgaactgctaattttcggatacgagatatacatcctatgcactatgggcgtatttgtcccattgacacgtctgaaggaatcaatgctgtacttattgcatctttatcaactcatgccaaaatttgtgattgtgggtccgtagaaagttcattttatgaactctttgagaaatcaaaaaaagcacggatacggatgctttttttatcaccaagtcaccgatgaatattatatgatagcggcaggaaaccctttggctctcaatcggagcatt

SEQ ID NO: 97622 - DNA, 259 bp, Zea mays
  unsure (1)..(259): unsure at all n locations
  Clone ID: MRT4577_20543C.1
ngaagcagtggtaacaacgcagagtactttttttttttttttttttttttttttttatttttttttttttttttttttttttttttttttttttttttnaaacaaaactgcancctttccacaagcaanaaaaagctaatctcacgccccatattaaccagcggatctgccccaggggggggggggaatggaaacttttgtgcaaaacctgtccggactcaggatgaaccgggcgccctccacttttattttcggcata

SEQ ID NO: 97623 - DNA, 219 bp, Zea mays
  Clone ID: MRT4577_20544C.1
ttcttggatccctcgactcagtcgtagccatctgagtgcctgtgtgtcatgacgtggcatctattgcagcactccgctgacagatcactaagacctctggtggaatcctcagattgcatcctcagcctattacatgccggacttgataaatacagctgcaacactactcctcagctaccctctcacgaagaatgagatagagctgacacatcggctcct

SEQ ID NO: 97624 - DNA, 387 bp, Zea mays
  Clone ID: MRT4577_20545C.1
attgttttgaaccacccactccagaggataacagagaagcagaacagggtctcgataaccgacaggatgtgggcaaggcttctgtcgtcgaccaaccagccgagcttcctctgcaacaaagtcatcgaagaggcaaagaaggagcaggaaagagcggcgcagcttttagatggctcgccttcccatcggaaggttgacgacgaggttgcagcttccaacttgggtcgtaccaagtgaggtgaacctttttttcctgtccaaagtttcagtagctatggcgaccggtgttgctgctgctcagtggtctgtgctccctgtccatttttttttctaaaaaaagaacacgttatccctttctagtttaaacagagtgttgaataatatcgt

SEQ ID NO: 97625 - DNA, 648 bp, Zea mays
  unsure (1)..(648): unsure at all n locations
  Clone ID: MRT4577_20546C.1
caaatttcagaggtgatcctccgggacctggccagcggtgatttggtctcaccaccaccacacactaacacttgtccaagaggagccaaataaaataaaaaaggtgaggtatcaaaagcagcgtccactgggcagtggatggattgatggatagaaaactaaaggttgctttgctttggcctgtgaggtgaggttagcaagcacacggtgagctgatgacaacacttgtcctgccgtgggtctcagtggaggtcagttcatgcaccccctatctattgttgacatacgtgttgggccattaacggttcatggatcatgatggtgttcagcttttggccgcagttttgatgtgtcgatgctggggaacagtaaactactactgtatgtctgtgtgcgtgtgtttgggatgctgaattttacttggtttgttttgtaggtacggtatcttggtgatcgacctcgaccctgacaccaagcattttcttaagcttgcctgaggtttgtgataagctaggtggtgtatcgtccttttccctgttctgtcattacggcttgtttttgctcctagctcagctggtgtcactgaggtatatataattagatttattatgaaacatgttttnaatagtatatttatttggtgtcaca

SEQ ID NO: 97626 - DNA, 411 bp, Zea mays
  Clone ID: MRT4577_20547C.1
cggtactgacccagctcgtacccacgcctcctgccactcttgctcgcacagcgtgcgccactcgtccgctcccatgcgttgggttcgactgcacaccttctggggtggagttcggagatgttagctcatacgttcccgcaagctcaactttcatgaagggcagttgtcgtgaacgctacattctactcggcttgcccgatgaatgaccttgtcactgacggcacgttcgctctcgttgagaagctggactgcttcaacagctgggttcctgcctacgactactacgactggtcactacgcttcaagtggtcgagaccgtctaagctgatcccgagaagcttcactacgcttgaatggaccattcctgtagactccccctcttgcgtttataggtttaagcattttggtgcc

SEQ ID NO: 97627 - DNA, 543 bp, Zea mays
  unsure (1)..(543): unsure at all n locations
  Clone ID: MRT4577_20548C.1
ggtggggggtgggggggttttaaaaaaattttttgtggggtttttttttttttttttttttttttttttttttttttttttttttttttccccacatggggtttttttccttattggattatttttccttgtccaggtctaaacccaacaccgggggtgaggggggtaactttaaaaccaacctanattccaaccctaacggggacaattacaacttacaacaccaccaacaaaacctttaaaccccaggatgggctggggtaaaaacccaacatcaacagaacattttactttaaagggaagctagagctgaacccgaacaaaacccccaaatcaggggtcaaacacaggggaagctatttcccaccggcccctattaaaagctaaatttttgggtttattaaacacaacagcttttttttttttaaacgaaaaactttaacctaaaacccccactagttagcaaccaacctttcctaagggggaaaccataatcccaaaaaacctgggccaaaaccataggggggcctttgccccatccta

SEQ ID NO: 97628 - DNA, 537 bp, Zea mays
  Clone ID: MRT4577_20549C.1
ttagtagacatcccatcctcctccggtgagccagcagcagtgccaccgcctccatctccgcccagggtgtccacctgggagttcctggacccgtttggaacttatgagagctactacgagcaaccaactgctacagcagctccatactctcctggcaggagtttgaaggatgtgcgcgaggaggaggggattccagacttggaggacgaagacatggaggtagtcaaggaagcttatggtgatgagaagcacccaatgaagggttacatggggaacgggaaggcgacaaaggaagatggtaggagcagtacgagagatgaactgccccgcaagtccaagtcatctgaggccagcagtagtgggagcagcttggagcatgacgtgcatgtagtggaaaaaagtgttgtcggagagcaagttcaacactcagagccacagcagcatgttgccggtctaccacccacaggatcggacaagatatacatcgatgacactgaggtggtggtggaaatcaggactaatttgagcggtgcctac

SEQ ID NO: 97629 - DNA, 5322 bp, Zea mays
  Clone ID: MRT4577_2054C.1
atggtgatcaacgacaatgagaagtccatcttcaacgagccgagggacgacaaagccaatgactccggctcaagtcaaaagaagaaggatggaaagaagaagaggcgcatcaagaagatcgtctactacgacagcgacgaatcttcctcttctcaaaaggacgacgaatacgaggagaaaaagaaaacggttaactcgaacttttctttcgattattctcgtattccgcaaaattccaatactcatttgctttccattccacttggtaaacctccacactttgatggagaggactacggattttggagtcacaaaatgtgtagccacttgttctctcttcatccaagtatatgggagatagtagaaaatggaatgcagtttgatagttcggataactctatgtttatcaatgaacaaatccataaaaatgcacaagctactactgttcttttagcatcattgtgcagggatgaatatcataaggtgagtggcttggataacgccaagcagatttgggacaccctcaagatctcgcatgaggggaacgacgtcactatgctcaccaagatggagttggtggaaggcaaactaggaaggttcgcaatgatcaggggggaggagccaacccaaacgtacaacaggctcaagaccctggtcaacaaaaaaaggagctacggaagcacgagatggacggaccacgatgtcgtccggcttatgctaaggtccttcactatccttgatcctcatcttgttaactctattcgtgagaatcctaggtacaccaagatgacacccgaggaaatacttggaaagtttgtaagcgggcgaatgatgatcaaggaggcaagatatattgatgaggtgttgaatggcccaatccacgagcctcaaaccgtttctctcaaagcaacaagtagcagggaggcgctacctagcaaggtggcgcaagtcgaggcggtcgggctaaatgaggatgaaatggccctcatcatcaagcgcttcaagacggcgctcaaaggtcgcaaggagcatcccaacaagagcaagacaaagggaaagcgctcctgcttcaagtgtggtaagattggtcactttattgctaactgtcccgataatgatagtgaccaagaacaaggaaagagtgggaagtgggaaaagaagaaggcctacaaaaatgcgaagggcgaggcacaccttggaatagagtgggactcagattgctcctcgtccgactccgacaacgaaggactcgccgcctcggccttcaacaagtcggctcttttccccaacgagcatcacacctgcctcatggcaaaggaaaagaaggtaagtactagaagtactattatgtatgcttcttcaagtgatgatgagtctagtgatgatgaagtagactatgctagcttattcaaaggcttagataaaactaaaattgataagatcaatgaattaattgatgctttgaatgagaaaaatagattgttagagaagcaagaggatcttttatatgaagagcatgataaatttgttagtgcacaaaattctcttgctttagaagttaaaagaaatgaaatgctttcatgtgaattatctacatgccatgaatctatttcgagcttaaagagtattaataatgatttaaatactaagttagaaatagctaataaatcaatctcttgtgtagaccatgttgtgatttgcaataggtgtaaggattttaatgttgatgcttgtagtgaacacctaatttccatttccaaattaaatgatgaagtggctattcttaatgcccaacttaagactagcaagaatgaatttgacaaactaaaatttgcaagggatgcctacactattggtagacacccctctattaaggatgggcttggctttcgaagggaagctaagaacttaacaagtcataaggctcccattttcaacaaggaaaaagggaaggctcctatgactagtaatagtcaaaagaaccatgctttcatgtaccatgataggaaattttctagaaatgttcatcatgataggagttgtaatgtgtatgactcaaatgccatgattgcttcaagttcttcatttgtgcatggtagagatatgcctaggaagaatgttactcatcatatgcctaggacaaatgttgttaatcatatgcctaggaaagtgtataatagacttaccactgtctttcatgcttgcaatactaagtttgttctttcatgtagaaatgaaaaagtaattgctaaaaatgtgggggccaaatgcaagggagacaagacttgcatttgggtccctaaggctattgtaactaaccttgtaggacccaacaagagttgggtttatgcatccgggggctcaagctggattatcgacagcggatgcacaaaccacatgacgggggagaagaagatgttcacctcctacgtcaagaacaaagattcccaagattcaatcatattcggtgacgggaatcaaggcaaggttaaaggactaggaaagattgctatttcatccgagcactccatatctaatgtgtttttagttgagtcgctcgggtataacttgttgtccgttagtcaattatgcaatatgggatacaattgcttattcacgaatgtagatgtgtctgtctttagaaggagtgatggttcattagcttttaagggtgtactagacgacaaactctatttagttgattttgcaaaggaggaggccggtctagatgcatgcttaattgctaagactagcatgggctggctgtggcatcgccgtctagcacatgtggggatgaagaaccttcacaaacttttaaagggagaacatgtgttaggtctaaaaaatgataaatctgaaacccaagggactctcaagcgcttcctaaggagagctcaaaatgaatttgagctcaaggtgaagaagataaggagcgacaacgggtccgagttcaagaaccttcaagtggaggagtaccttgaggaggaaggaatcaagcacgagttctccgctccctacacaccacaacaaaacggtgtggtagagaggaagaacaggacgctcatagacatggcgaggacaatgcttggagagttcaagacgcccgagcggttttggtcggaagccgtgaacacggcttgccacgccataaaccgggtctaccttcatcgcctcctcaagaagacttcgtatgagcttctaaccggtaacaaacccaacgtttcatactttcgtgtatttgggagtaaatgctacattctagtaaagaaaggtaggaattctaaatttgctcccaaggctgtagaagggtttttgttaggttatgactcaaatacaaaggcgtatagagtcttcaacaaatcatcgggtttggttgaagtctctagcgacgttgtatttgatgagactaatggctctccaagagagcaagttgatcctaatgatgtagatgaatatgatgttccaacggacgtaattcacaccatggcgattggagatgtgcgaccacaggaacaccaagagcaagatcaaccttcttcctcaacaatggttcaccccccaattcaagacgatgaacaggttcatcaagaagaggcgtgtgatcaagggggagcacaagatgatcatgttatagaggaagaagcacctcaagcccctccaacccaagttcgagcgacaattcaaaggaagcatcccgtcgaccaaatattgggtgatataagcaagggagtaactactcgctctagattagttaatttttgtgagcattactcttttgtctcttctattgagcctttcagggtagaagaggccttgctagatccggactgggtgttggccatgcaggaagagctcaacaacttcaagcgaagtgaagtttggacactggtgcctcgtcccaagcaaaacgttgtgggaaccaagtgggtgttccgcaacaaacaagacgagcacggggtggtgacaagaaacaaggcacgacttgtggcaaaaggttatgcccaagtcgcaggtttggactttgaggagatttttgctcctgtagctaggctagagtccattcgcattttgttagcctatgccgctcaccattctttcaggttgttccaaatggatgtgaagagcgctttcctcaacgggccaatcaaggaggaggtgtacgtagagcaaccccctggctttgaggatgaacggtaccccgaccacgtgtgtaagctctctaaggcgctctatggacttaagcaagccccaagagcatggtatgaatgtcttagagactttctaattgtaaatgctttcaaggttgggaaagccgatccaactttattcactaagacttgtgatggtgacttatttgtatgccaaatttatgtcgatgacataatatttggttctactaaccaaaagtcttgtgaagagtttagcagggtgatgactcaaaagtttgagatgtcgatgatgggcgagttgaactacttccttgggttccaagtgaagcaactcaaggacggcaccttcatctcccaaacgaagtacacgcaagacttgatcaagcggtttgggatgaaggacgccaagcccgcaaagactcccatgggaaccgacggacatgttgacctcaacaaaggaggtaagtccgttgataaaaaggcatgccggtctatgataggttccttgctttacttatgtgctagtagaccggatattatgctaagcgtatgcatgtgtgctagatttcaatccaacccaagggagtgtcaccttgtggccattaagcgaatccttcgatatttagttgctacgccttgcttcgagatctggtatccaaaggggtcaacctttgacttaattggatactcagactccgattatgctggatgcaaggttgaaaggaagagtacatcagggacgtgccaattcttaggaaggtccctggtgtcttggagttctaagaaacaaacttctgttgccctatccaccgctgaggccgaatatgttgccgcaggacagtgttgcgcgcaactactttggatgaggcaaaccctcagggactttggctacaatctgagcaaagtcccactcctatgtgataatgagagtgcaatccgcatggcggataatcctgttgaacacagccgcactaagcacatagacatccgacatcactttttgagagaccaccagcaaaagggagatatcgaagtgttttatgtaagcaccgagaaccagctagtcgatatctttaccaagcctctagatgagtcaaccttttgcaggctgcgtagtgagctaaatgtcttagattcgcggaacttggattga

SEQ ID NO: 97630 - DNA, 553 bp, Zea mays
  unsure (1)..(553): unsure at all n locations
  Clone ID: MRT4577_20550C.1
aattcggcacgaggagggaattgtagaggatctataggtgaggaaatcccttgctattcctcccatggatctctccaattctcttgtcaccaaatcagcccttaagagccgtttagagatggtttggtgacaagggaattgtagaggatctataggtgaggaaatcccttgctattcctccccatggatctcttcttttatcttgtcaccaaatcagcccttaagagccgtttggatctattgattctgcccgaattagaatttacttaataaagtagtcaatttggcttagaatttaacatgccaccatttttcaaagctcagatataaatctatcttaaattcatggggacagtttggaaaataattttatgtatcaacggaatatatttctaccttgaaacttgtgagacactatttgcttcactcttctatagggntaaatatgtgccgcgtctgtgtatgaatctgtttggcatgcgatcatattacgcccgggtgtggtgattggggtttggnttgcgtgctgttgctgggggttggtgggtgtgtg

SEQ ID NO: 97631 - DNA, 734 bp, Zea mays
  Clone ID: MRT4577_20551C.1
gtccttccctccgcctccgcctccgcccccgcccccgcccacgcccactcctcgctgccccactcctgtcacctcttcccgcgccgacgcagccgccatggaccccgtcgccacatgggggctaaccccgctcgcgggcgccgacccggagatctacgacctcctggagcgcgtcctggggcgtcaacgtgcagccctactcgggctcccccgccaacttcgccgcctacaccgcgctgctcaacccgcacgaccggatcatggggctcgaccttccctccggcggacacctcactcacgggtactacacggccggcggtaagaagatctccgccgcctcgatctactttgagagcctgccgtacaaggtgagcgccgcaacggggtacatcgactacgagaagctcgaggagaaggcacttgacttccgccccaagctcatcatctgcggtggcagtgcgtacccgagggactgggattacgccaggctcagggctgtcgccgacaaggtcggggccctgctgctctgcgacatggcgcacatcagcgggctcgtcgccgcgcaggaagctgcaaatccttttgaatattgtgatgtggttaccacaaccacgcacaagtcccttagagggccaagggctggcatgatcttctacaggaaaggccctaagccccccaagaagggccagcctgagggtgctgtttatgattacgaagacaagatcaactttgca

SEQ ID NO: 97632 - DNA, 731 bp, Zea mays
  Clone ID: MRT4577_20552C.1
ccggccgggctccgcctccgcccccgcccccgcccccgcccactcctcgctgccaccactcctgtcacctcttcccgcgccgacgcagccgccatggaccccgtcgccacatgggggctaaccccgctcgcgggcgccgacccggagatctacgacctcctggagcgcgagaagcggcgccagcgtcgcggcatcgagctcatcgcctccgagaacttcacctccttcgccgtcatggaagcgctcggctccgcgctcactaacaagtactccgagggcatgcccggcgcccgctactacggcggcaacgacgtcatcgacgagatcgagaacctctgccggtcacgcgcgctcgctgccttccgccttgacgccgcgtcctggggcgtcaacgtgcagccctactcgggctcccccgccaacttcgccgcctacaccgcgctgctcaacccgcacgaccggatcatggggctcgaccttctctccggcggacacctcactcacgggtactacacggccggcggtaagaagatctccgccacctcgatctactctgagagcctgccgtacaaggtgagcgccgcacgggggtacatcgactacgagaagctcgaggagaaggcactttgatttcgccccaagctcatcatctgcgggtggcagggcgtacccgagggactgggaatacccccggcttagggctgtcgcccgacaggtccggggcccctggt

SEQ ID NO: 97633 - DNA, 286 bp, Zea mays
  Clone ID: MRT4577_20553C.1
agaaaccacagaagattatggaggggaattctttacaccaaccggagattgaatcgatgcaactagagcaaaatgatgagacgactgaagaagagaggaaacatttcaaccaagagagaaaaattatcactttgccaaccagtgaacaaacaacaattgcagaacccgcttctactgcgcgatatgatgcgtatgctgaaatatgtgagctgaaaaagaaggtcgtgtcattagaggaacataacaaagaacaagcggcagaaatagctactcttcgtcaagatgt

SEQ ID NO: 97634 - DNA, 446 bp, Zea mays
  Clone ID: MRT4577_20554C.1
ttcacgcttacgctgatgaggagctgagagttcctgagtacctgtaattcaaggaacagcttgttctataaggccccaataccatctttgttcttgatctggactctgagccatgtaatgcctgcttccaccgtccttatgtgttaaagttcattggctacggcgggtagttcctgagcaggcacctgtcatcatagctattacatgacaaggagagcttgtaccggttgctcaacttcctttggtcctacatctacaaggggatgacacgtgctgtttaactacagaagtcgctgtctcagtgctctgtaaggtgcgctgaggaacgctgacgagcacctgtgcaccctacaagctgatacccgatactgtgaatgtcaccagaggttccagtaacttggtatggagaagggttggagtgattgctctaagcgtgcacaggggac

SEQ ID NO: 97635 - DNA, 2136 bp, Zea mays
  Clone ID: MRT4577_20555C.1
aaacccctccgaccacccaatctccgccccccgcattctgtcgaacacctcgtcttcgctcgcaccgaccccaccgcaccgcaccgcaccgcacctcacctccaccaacaacaccaccagtccaccaccacccacctcccacatgtgcacacgcgccctcctcccgtccaccaccgctatatatcccggcgccccttcctccctcccccgtccttccctccgcctccgcccccgcccactcctcgctgccaccactcctgtcacctcttcccgcgccgacgcagccgccatggaccccgtcgccacatgggggctaaccccgctcgcgggcgccgacccggagatctacgacctcctggagcgcgagaagcggcgccagcgtcgcggcatcgagctcatcgcctccgagaacttcacctccttcgccgtcatggaagcgctcggctccgcgctcactaacaagtactccgagggcatgcccggcgcccgctactacggcggcaacgacgtcatcgacgagatcgagaacctctgccggtcacgcgcgctcgctgccttccgccttgacgccgcgtcctggggcgtcaacgtgcagccctactcgggctcccccgccaacttcgccgcctacaccgcgctgctcaacccgcacgaccggatcatggggctcgaccttccctccggcggacacctcactcacgggtactacacggccggcggtaagaagatctccgccacctcgatctactttgagagcctgccgtacaaggtgagcgccgcaacggggtacatcgactacgagaagctcgaggagaaggcacttgacttccgccccaagctcatcatctgcggtggcagtgcgtacccgagggactgggattacgccaagctcagggccgtcgccgacaaggtcggggccctgctgctctgcgacatggcgcacatcagcgggctcgtcgccgcgcaggaagctgcaaatccttttgaatattgtgatgtggttaccacaaccacgcacaagtccctcagagggccaagggctggcatgatcttctacaggaaaggccctaagccccccaagaagggccagcctgagggtgctgtttatgattacgaagacaagatcaactttgcagtgttcccatctctccaaggtggccctcacaaccaccagattgctgcacttgctgttgctctacagcaaactatgtcgcctggcttcaaggcctatgcaaagcaagtgaaggccaatgctgttgcaattggaaactatctcatgagcaagggctacaagatggtgactgatggaactgagaaccaccttgttctctgggatctccgcccccttggcttgactggaaacaaggtcgaaaagctatgtgatctttgccacatcacattgaacaagaatgctgtcttcggtgacagcagtgcattgtctccgggtggtgtccgcattggcgcgccagcaatgacctcgaggggtctactggagaaggatttcgagcagattggggagttcctccaccaggcagtgaccatctgcctgaacatccagaaggagtacggcaagctcctcaaggacttcaacaagggcctggtgaacaacaaggacatcgagaacctcaaggtccaggtggagaagtttgccgactccttcgacatgcctgggttcacgcttgagagcatgaaatacaaggagtagatatgcctctcccatgcgcggcaaggtcctcctgtaccgatgtctttccttgtggtggcgcagggtgccatggcactgcattgccgccacacttacgatgatgatgatgggttatggattttgtctacaatgtcagcaggataggctcacaattgccccctgccctccggtttggtcgcctctcaggttttcatttggtagttgttcgcagggaaccatatgagaattgcaatgtcaatcaggtgtttgccaataataattgggtggtttctgctcttgctctggtcattaccatgcattttttattctgttggtgagttggtcgatttattatctcctgcagtcctgctggcactgccggtggtcgtttgattatcatgtatgaatcttcctggagactgttgctcgattaacatatcgcctgctcctgc

SEQ ID NO: 97636 - DNA, 775 bp, Zea mays
  unsure (1)..(775): unsure at all n locations
  Clone ID: MRT4577_20556C.1
aaagcgcgcggccgggacgcgggagaaagcaacgggcagcctgtactgccggctgctgcagctaccctttcagtcccaattccagcccccggccaggcgctcgcaaagtgcgggagccgccctcttcgctcgtgggctctctctctctctctccgcgttctcgctccaggtcgtgtacgatccgccagtacgtacgggccccggcggcgctcgtgcgcgggcgacaacatgtcctcggcggcgggcggtggatacggggccggcggcgcggagcatcagcacctgttgctggggcaggccgcgggcgcggggcagctctaccacgtgccgcagcacagccgccgcgagaagctgcggttcccgcccgacgacgcggccgactcgcccccgcccactgcctggccggcgcccccacccttctactcctacgcttcctcgtcgacatcgtcctactactcgccgcatagccccacgctggcgcacgcgcagctagtagcacacgcgctacctgcgggcgccggggtccagatcccgagccagaacttcgcgctctcgctctcttcggcgccctcgaaccctccgcccgcgccgcggaggcagctcgccgcgggggtagccacggggccgtacggcccgttcacgggctacgcgngcgtcctcgggcggtccaggttcctgggccccgcgcagaagctgctcgaagagatctgtaacgtcggcggacggcccccgcacctggacctctcntcgacgagggtatgntcggcatggagca

SEQ ID NO: 97637 - DNA, 2209 bp, Zea mays
  unsure (1)..(2209): unsure at all n locations
  Clone ID: MRT4577_20557C.1
ctcgcgcccacaccaaccccctccgaccgcaccaatctccgcccccgcattctgtcgaacacctcgtcttcgctcgcaccgaccccaccgcaccgcacctccaccaacaacaccaccagtccaccaccacccacctcccacatgtgcacacgcgcccacctcccgtccaccaccgctatatatcccggcgccccttcctccctcccccgtccttccctccgcctccgcctccgcccccgcccccgcccacgcccactcctcgctgccaccactcctgtcacctcttcccgcgccgacgcagccgccatggaccccgtcgccacatgggggctaaccccgctcgcgggcgccgacccggagatctacgacctcctggagcgcgagaagcggcgccagcgtcgcggcatcgagctcatcgcctccgagaacttcacctccttcgccgtcatggaggcgctcggctccgcgctcactaacaagtactccgagggcatgcccggcgcccgctactacggcggcaacgacgtcatcgacgagatcgagaacctctgccggtcacgcgcgctcgctgccttccaccttgacgccgcgtcctggggcgtcaacgtgcagccctactcgggctcccccgccaacttcggccgcctacaccgcgctgctcaacccgcacgaccggatcatggggctcgaccttccctccggcggacacctcactcacgggtactacacggccggcggtaagaagatctccgccacctcgatctactttgagagcctgccgtacaaggtgagcgccgcaacggggtacatcgactacgagaagctcgaggagaaggcacttgacttccgccccaagctcatcatctgcggtggcagtgcgtacccgagggactgggattacgccaagctcagggccgtcgccgacaaggtcggggccctgctgctctgcgacatggcgcacatcagcgggctcgtcgccgcgcaggaagctgcaaatccttttgaatattgtgatgtggttaccacaaccacgcacaagtccctcagagggccaagggctggcatgatcttctacaggaaaggccctaagccccccaagaagggccagcctgagggtgctgtttatgattacgaagacaagatcaactttgcagtgttcccatctctccaaggtggccctcacaaccaccagattgctgcacttgctgttgctctacagcaaactatgtcgcctggcttcaaggcctatgcaaagcaagtgaaggccaatgctgttgcaattggaaactatctcatgagcaagggctacaagatggtgactgatggaactgagaaccaccttgttctctgggatctccgcccccttggcttgactggaaacaaggtcgaaaagctatgtgatctttgccacatcacattgaacaagaatgctgtcttcggtgacagcagtgcattgtctccgggtggtgtccgcattggcgcgccagcaatgacctcgaggggtctactggagaaggatttcgagcagattggggagttcctccaccaggcagtgaccatctgcctgaacatccagaaggagtacggcaagctcctcaaggacttcaacaagggcctggtgaacaacaaggacatcgagaacctcaaggtccaggtggagaagtttgccgactccttcgacatgcctgggttcacgcttgagagcatgaaatacaaggagtagatatgcctctttcatgcgcggcaaggtcctcctgtaccgatgtctttccttgtggtggcgcagggtgccatggcactgcattgccgccacacttacgatgatgatgatgggttatggattttgtctacaatgtcagcaggataggctcacaattgccccctgccctccggtttggtcgcctctcaggttttcatttggtagttgttcgcagggaaccatatgagaattgcaatgtcaatcaggtgtttgccaataataattgggtggtttctgctcttgctctgatcaaaaaaaaaaaaaaaaaaacaaaaaaaaaaaaaaaaaaaaaaaaaaaaaaaaaaaaaaaaaaaaaaaaaaaaaaaaaaaaaaaaaaaaaaaaaaaaaaaaaaaaaaaaananaaaaaaaaanaggggggcgccccttttaaaagaaccaaattttacttacccgttgcttgcaaaggaaaaactttttttttggggccc

SEQ ID NO: 97638 - DNA, 2396 bp, Zea mays
  Clone ID: MRT4577_20558C.1
ccggccgggaatgatctttgcggccaggacggaacctttgcagaaagaaaggcgcccggaggtaggggtagaggtagagcccgagagcccaacacctccaccagcagcaaagcaccaccaccagagccgagcgcacaaaagcgcgcggccgagacgcgggacaaagcaacgggcagcctgtactgcccgcttctagctgcagctaccctccagtcccagttccagccccggccaggcgctcgcaaagtgcggagccgccctctcttcgagtcttcgctcgtggtctctctctccaggtcgtgcagtacgatccatatcccggagctcttgcgcgagcgacatgtcctcggcggcgggcggtggatacggggctgcgggcggcgccgagcaccagcacctgttgctggggcaggcctcggggcagctctaccacgtgccgcagcacagccgccgcgagaagctgcggttcccgcccgacccggccgactcgcccccgcccactgcctggccggcgcctccacccttctactcctacgcgtcctcgtcgacgtcgtcctactcgccgcatagcccaacgctggcgcacacgcagctagtggcgcacgcgctacctgccggcgccggggcccaaatcccgagccagaactttgcgctctcgctctcttcggcgtcctcgaaccctccgcccgcgccgcggaggcagctcgccgcgggggtagccgctgggccgtacggcccgttcacgggctacgcggccgtcctcgggcggtccaggttcctgggccccgcgcagaagctactcgaggagatctgcgacgtgggcggacggcccccgcacctggaccggcgctccgacgacgagggtatgctcgacatggacgcggcggggggcgtggaccacgagatggacggcggtgactcctgcgctaccgctgaggcgggcgccggtctcgggcgccgagcagcagtggaggaagacaaggctcatctccctcatggatgacgtctgcaggcgatacaagcagtactaccagcagctgcaatccgtgatctcctcgttcgagactgttgcagggctgagcaacgcggcccccttcgctttcatggctcttcggacgatgtcgaagcacttcaagtgtctgaaggggatggtgatgagccagctacggaacacgagcaaggtcatcgccaaccatgggattattgccaaggacgatatggcgaacttcgcgctcatgggtggtggagcaggcctcctgaggggaaacagcgtgaacgcgttcagccagcctcacaacatttggaggcctcaaagagggcttcctgagcgtgcagtgtctgttcttcgctcatggctgtttgagcacttcttgcatccgtatccaactgatagtgacaagcagatgctggctaaacagacagggttaacaaggaaccaggtgtccaattggttcatcaacgcaagggtgcgtctctggaagccgatggtggaagagatccacaacctggagatgcggcagctgcacaagaccacatcggtggaccagaatcaactcggcatgcagcagcagaaccaccactcgtcggacggcagcgggaggccttcctccgacccttcgaactcccagcggggccaaagcagcggcatgacaagaaacctcagctctcgggcaccacgccacatccaggacgacgagctctcccagatgccccacgacatggcaggacaggtgagctttgcgtacagtgggctcccccccgcgcaccacggtctcgcgctgtcacaccaccaccacccccagcaagcgcaagctgaggcggttggtgttggcggcgtggccgccagcagcggcggcggcgtttccctcacgcttggccttcaccagaacaacaacaacaacaacagggcctatatcgccgagcccctcccggccgcgctcccgctcagcctcccgcaccggttcgggctggaggacgtgagcgacgcctacgtgatggggccgttcggcggccaggaccgccatttcagcaaggggatcggtggtgggcacaacttgctccatgactttgtcggttgatcaaattcgtccctggaagtgtttgtcggcatgtattgtattgttaggggtagtagggcagtggaagagagacgaccgtttggtccatctgcatccaagaacgctgtcgatatttgccaactcgaggtctatagagtggttgacgacataccgttgaagatgtgttccagttgtatgttgtagagttgaacgaaccctatctgttctaatcccagctggtgtggcgttaacacatgtaccgctgttccttcgacatggcaactgaaggtgaaggttgaaaactgtgtggttattaaaaaaaaaaaaaaaaaagcggcc

SEQ ID NO: 97639 - DNA, 638 bp, Zea mays
  Clone ID: MRT4577_20559C.1
ccggccgggattggaactcaccatgaggtttaccactctcatccaatcgctgctcgccttgtcggcgtcgacatgggcaaaaaactcaacctattacaaccccgttctccctggctggcactccgacccatcatgtacccccgtcaatggaacattcttctgcgtaacatcaacattcatctcctttcccggtctgcccatctacgcatcaaaagacctggtcaactataaactcatcagccatgtctggaaccgcgagtcccagcttccgggctacagctatgccaccgactcccagcagcaaggcatgtatgctgctactatccgccaccaccagggcacattctacgtcatctgcgagtgcctgggcacaaccggcaaccgtaccaatggtgtcttgttcaagactaccgacccattcaatgaagctagctggagtaacccagtcctcttccgcgctccaaaaatcgaccctgatatcttctgggacgacgacggcaaggtctacgtagctactcaagaaatccgcatccaagagatcaacatcgacaccggcgccatgggacccgtcatcaacctctggacggcaccggcggcgtttggcccgaggccctcacatctacaagaaggacggatgg

SEQ ID NO: 97640 - DNA, 387 bp, Zea mays
  unsure (1)..(387): unsure at all n locations
  Clone ID: MRT4577_2055C.1
gccggaaatcccggggcggcccaagccgtccggtggttgttttgtgtttgcaaaaacaagctttatttttcttttatgggaataaccgttaacgcggcctcaaaccaatatgaggtgggatgaataatgttttttggctgaggaattggctcgcaaaattaatgaatccatttcaactctcaaaaaaaaaaaaaaaaaaaaaaaaaaaaaaaaaaaaaaaaaaaaaaaaaaaaaaaaatttaaaaataaaaataaaaaatatttattaatagtttaattttactaattaaattattttttattttttatattttntaaataaaaattatattttaaaaaaagggggaaaaaggggggctcttttttataattcaaatttttttttcc

SEQ ID NO: 97641 - DNA, 239 bp, Zea mays
  Clone ID: MRT4577_20560C.1
gggtattggtgctacacggcttcaccccggcgctgacattctgagttcgcctcaagcgctcaccttctcagcgttctctgagctactgccctgtggatccccgcatctatcataaggccacatataccttagtgtttagaaataaataataattatataaagcgagaatttgaacccatatcctctactccagaaattttccatcagaccatagttaaaaataaacaataattatattt

SEQ ID NO: 97642 - DNA, 492 bp, Zea mays
  Clone ID: MRT4577_20561C.1
acttccacacctaggcctctgatacttctccttccgtccacactccccttgctttgaccgccacttgccaattacataccggcgttccctctcctctgctgagagctcgaaaagatggcaggcaaggttgatggttcggcaatcgtactcgatctcgacatgtcgcactattgtggtacctgctggtatcaaaacctggtacgagatcatcgacaacgatcacctcatccgccccacaccctcacatttctcccacaccgactgcgagcgcctcatgggatatgcgtctctgaagcgtcttgccttgaaccccatcagcaccgtcttggatgccaactgtattcttggaaagaggatgagtgcaccctctgaaatgagagaatttaagctgtgctctttgaatggcatgcgtgtgcccggagagaattcaatgatagttctgcagcaccctgcagaggcctaacattccgcacccgaacaaatctcctcgat

SEQ ID NO: 97643 - DNA, 353 bp, Zea mays
  unsure (1)..(353): unsure at all n locations
  Clone ID: MRT4577_20562C.1
caccttacggaaagcactcggccttcactccacgacgcactctacacttggcggatagcaacgcctttggtgagatccacctcncccagcatccccttcccattgcaccccataaccataactacggatccaacatccttgcgctcaccttctactcacactgcagcttcttctttcactcctgcttcaagcatggggagaactcatgcaagatcatctactctaagcatagcgacctactacctaagatctccactagctattcccattcgacgtactaccaccactaatagcagaatcaaatctaagagacatctaaactgaccaactacgccctagaaaaagccgtcaac

SEQ ID NO: 97644 - DNA, 430 bp, Zea mays
  Clone ID: MRT4577_20563C.1
gtttattcgataactatattatttaatcaaagtttattgtttccgaagcagtgtttggttcactaactaccatattatgtgtgaccaagtgtgccctaatgaatccgacactaccaaatgggagagagagaagggtcatctgcggctgcataacacataactgggcactcattagactatgcgaatgacaggtgctccaaagacagtgctattaggggatcagattgcatttgtatccatagaatcatcccagaggttagcattttcagtgtgcatggagaaggcagcaaccacagccatgcgaaatagggcctcggatttgcatgtatgactctgttccttcacttgaactgcagctagcagatccttagccttggctacctgggactgacagtgagtcatgatggacaaaatgatttcgatacataag

SEQ ID NO: 97645 - DNA, 312 bp, Zea mays
  Clone ID: MRT4577_20564C.1
aataagaagtccggttttggtatttatatatatatatagtctaaaatcatatcatctaggaccaattaatatatggttacagctgaggcaatgggatcaaccaacatgcatgttgccacacgtacatgaacacaaagactgacgcccaacatgcagagtgtgtttttgcacactgaggaactgtggttttttctatatgtcacacaccacacaatacctatgtatggcacacagcttcgcctcgcttattatttgtgaaccacgaccacaggtagattcataataatcatttccttggtcttcaatcgatgt

SEQ ID NO: 97646 - DNA, 313 bp, Zea mays
  Clone ID: MRT4577_20565C.1
ctcgactccaccaatccccttccgattcctccactcctctcgccccccgaggcacactcccccaaaccctagctctccccctcccgcgtcgtcgcccccccgcgccgagctccagcgccgaattcgcgcagcaggatgggctccgactccaaggagctgctcgggatcgagcccctcgagctccgcttccccttcgagttcatgaagcagatctcgtgctccatggagctcaccaacaagacggacgactacctcgccttcaaggtcaaggcgaccagccccaagaagtactgcgtgcggcccaacagcggca

SEQ ID NO: 97647 - DNA, 154 bp, Zea mays
  Clone ID: MRT4577_20566C.1
ggcacgaggaattatggcccttcgccatcggcagccgaccagcaggagctccacaggcggcgacgaaggcgccaagaagtctgggccggaagcggtcgggctcagccaggaagaagccaagagggcgacctgtgcgacaagcccgacgccgaca

SEQ ID NO: 97648 - DNA, 304 bp, Zea mays
  Clone ID: MRT4577_20567C.1
cgcgcccctgccacgctgggccccccaatcaaaccccacccaaccgagtccgcgcccctgccacgctgggccccccaatcaaaccccacccaaccgagtcctgagcctcgtgggccctctcgccagcttcatcgcctccctcgccataaccacccatgccgcacctcacccagcaactgtcaccacatatcatggggggaccggcgcataaaccccacgcggtcaccccctgctcacccctcatttcactacacgtccccttcccacctggctcgactccaccattgcctgccctctctatcgt

SEQ ID NO: 97649 - DNA, 473 bp, Zea mays
  Clone ID: MRT4577_20568C.1
tgcaaagtgtgaaatcctgtgctgggcttcggatggactgatgccaaaatgtgcagtatgatgtgctaagggttattttcaacaagtgccattctgtcatatcggataagcccacagtgggtacgatactgaccgctgagggtgcagaaatcgaagcagaacctggtggcaagatgggtggcctatattctcatgagagtgaaggccttgagacacaggcagagatattgcccaacctagctgggtcacagttttcttgtgtgatgtacaatggcgccctagagaatgcatgccttgagcttggagcccgtctgattgccatggacagctctagcagaaatgctgtgcatatgcttgactcgtgtacgcttacttacgacaggacacgctatggcttcataccacatagcttactgcgattatatctggcgcattagactttgaaggataggtgtagagactatgtggacttc

SEQ ID NO: 97650 - DNA, 195 bp, Zea mays
  Clone ID: MRT4577_20569C.1
aaaaacaaaaattgaatttgttttcttttattcccaaaaaacaaaaaaaacccccacaactaacaattacatatatcttcctcacccaaaaaatcatcattcactgcactacccacaaaacagcacatggaatattccatccttcatacatcagcaccacaattgatgcaaacaaaaggaaccatcttttgcaag

SEQ ID NO: 97651 - DNA, 730 bp, Zea mays
  Clone ID: MRT4577_2056C.1
cctcgaggccggccgggacatgggttcatcctcttccttgggctccgccaaagtcctagcacgctcccacgcgtccctcctcgcgccccaaacccagagaacaggtacccggtgtctcgctttctttctcgcaggattctctcgcccggtccctcagtccggtccgtgtctcgcggctccgtgcgaccgtgccgggcaattcaagctgctccccttcgacgatccgtcttccgccgtcactctgccgatggcttctgcacttcagcgcctgtatgtatctactgaatatgagcttggactttgattctcgtgccgtgatgcagtggtcgcgccagcgccgtcgcgctcgcgccgcgcctccgtcaggatgcgcgcctctgctgccgcgccggcggagccgaagaagaccgtctgggtgtggaccgagagccggcaggtgatgacggcggccgtggagagggggtggagcactttcctcttcggatccaaagacctcggcaaggactggtcatgtcagagctcacaacagtgcttcccttcattcgctgttccagcatctagatagatgtcgagatagcctggatccctggttcaaactgttgcgatttacaaatcccaaaagcaaactcagactctgctgatttcatgactcattggtgttctcatttgatttttcagcaaccgctcgcataaatgctctcttcattgacggtccagggattttcgatga

SEQ ID NO: 97652 - DNA, 257 bp, Zea mays
  unsure (1)..(257): unsure at all n locations
  Clone ID: MRT4577_20570C.1
gattatacagtgctgaggaggntatactngggncnatntgggagngctctgctttgcngctatnaaatgaaagatgctcttactaaagtgctccagacttcacacaatcttccttctgagattgctatctaaaaatgacaaatgtattatanatgtnaataggaanttctcatatatataatnatatgctgagaatncccttcctcaaagctcgggccgcanctagtgantcgcaccnggaataatccgaccgtcct

SEQ ID NO: 97653 - DNA, 1138 bp, Zea mays
  Clone ID: MRT4577_20571C.1
gcgccggccgggccggggctgcgcttcacagaagaagtgctttaccctcacccgccccacgcgcggtagttcgttcgacacagtcacagtcacagaccagtcgtttctcccttctctcccccgggcccggagaggagaggatggccggccggagcagcctctccatggtcgcgtcgcaccggctgttcacgccggtcaaccctgtgggcggcgccgaccacggcgtggagctcgacgaggccgacgtcatctggggcggcgtcggcggcggcggcggctacccggcgtcgtcctcgccgtcgtcgtcgccgttcctgtcctccgcggtcgacccgtacgcgcggtcgccgccggtggccgcgccgtccaagcagaagccgcgtggggtggtggccggcgctccggggccggcgtcggtgcccgtcaacatcccggactggtccaagatcctgggcgccgagtacgccgggagcgggtgggcggcgcacgacgaccgcgcggacgacgacgcggcgggctgcggcggcgccgggggccggcgctgggtgccgccccacgaggtgctgcaggggcgggagcgcgcggcggcgtccttctccgtgcgcgagggcgccggccgcacgctcaagggccgcgacctccgccgcgtccgcaacgccatctgggagaagaccggcttccaggactgaccgaccgctactgtcagcgccagcgccagcgccagccttgcgcttgcgcggccggcaatgcccgcctaccgtggcctggcctcgtttgatgatcccgttctcgccttgaggaggaggaagtgaggagcttttgcttgattagtggccttttaatccatttggattaggtcgatggttcttttttttctctctctctttttattatgttttggttcttgtcgctctagtcgtgatcgatgaggggagagtagagattaaaagcctctgtttttggcatttttcccccggagaggctcggtcgatgtacttccccccactaagattaattcatcttgattcctagtcagaaaacggccggaaaaccctggaagccgattttttcccaaagggcagttgcggacccgggggaggtcccggggctctgcgttgtttcccctgcttaaggggga

SEQ ID NO: 97654 - DNA, 186 bp, Zea mays
  Clone ID: MRT4577_20572C.1
ctacccgttttctgccctccgcctccgtccggcccgcctatcctccccggcggcctctccgcgctttcgacggggagagggacaacggagtgtaggagatgagggagcccgattcttggctgacggctgcaggaacaacgcaagaatatgaatggatgagggagacactgcgcaagaggctcaacc

SEQ ID NO: 97655 - DNA, 475 bp, Zea mays
  Clone ID: MRT4577_20573C.1
cccacgcgtccgagcctgctgagccctatcctttaccccactttcgtgtctccaacattcctatcctcttcgcggccgggcgtgccaccgccgccgccaccgccgcggcttaccttcctatcgcgagccaagatgaatgttgtaaagctcaagaagatggcaggtgctgagcgcaccggtgggaagggtagcgtgcgcacgaagaagaaggcatcccacaagactacaaccacagatgacaaacggcttcaaagcacctcgaaaagaataggagtgaacagcattcctggtgttgaagaggtcaacatctttcaggatgatgtggttattcaaaatgaaaatgctaatgtgcaagcgacagttggtgctaatacatgggtgggtagtggaactccgcggacaaagaatctgcacgagctgcttacgtggattgtcaaccagcttggtcctgacaacctggacaatctgcggaggc

SEQ ID NO: 97656 - DNA, 264 bp, Zea mays
  Clone ID: MRT4577_20574C.1
atagagaagactgcaagctagagatgggcatggctttgtgcttcaggacctgggcatcctttccagaagcatcgcagtgtattattagctaactggaatttgaggagtaagaaatatttcatgtaaagcccttagcaaatagaagatagttcattattgaaactattgcttgtagtcctctagaatggctgcctggcatcacttctcccattctagcaacctccaggcctctcaccagagagactaaagagcctctggaggttc

SEQ ID NO: 97657 - DNA, 867 bp, Zea mays
  Clone ID: MRT4577_20575C.1
attcggctcgagtatatttatcgggcgtatcacctttttcaataccatgaaagataaggggttcacgattgagaaagatatctatgacccattcctcttgtatcttatggacacggggatgtttgaggaatttgaggtgttcagtgcattctttaaggaggcgaatccgaagtccttctctagaatagcttattatgagatgttgctttgtattagagttcaagatgaagaaaaaatccaggaactttgtcactctgttgaagactacgatgagaaagttcactatgacctagcagagagttacatgctggcctttgctgaaagcggcagaaaggaagatctggttgccttgttggatttggttgatctatccaaagtttcaggttcaaagtacataactaatattttcaaatcattgggcaagctagaactagagaattatgtggagaaacttcttgagaggatgatgtcaaaaggatgtgctgatcacgacatttcatccttgattttggagtataccgcaaatataccgaatataatgacatgctagtggcatttcataaatggcatgagaagtttgaggtagcaccctctattgatgcatatgacaagatcgtctctatctgttgcgattcatcaaagatcgggttagctcttgatgtagttgaccgcatgtgtaaatccagttctgatgtgccaattgaatcatttcacccaatcatacatgcttgtgaacaaagaagtgaacttcacatggcccgccccatatatgattgtgatccgccaccacattttggaattttaaagcaaaacattcagaagcatataagtttatttgtaaaattgaaggattttgaaggggcttac

SEQ ID NO: 97658 - DNA, 141 bp, Zea mays
  Clone ID: MRT4577_20576C.1
ttggtaccttaacggcgtcgcgactaaacggatttcaagtgttccctgatgagcggctgaacagcttccatttaagtctcagataaacttttatggggtatgctcctttttgaacgttccattgtggaattaaataggtct

SEQ ID NO: 97659 - DNA, 796 bp, Zea mays
  Clone ID: MRT4577_20577C.1
ggtaccctcgggttcggccgggaacagcgcgaagaagcggaaactcgggcccaccaccccaacactctccggtcgctcctcgtgcttcccttcctcctcctcaatctcagccctcgacagagacccccgctgttgcccgtcctgctcctgggttgcctcccgtgccccagacggacgcagcacctttcaacgacttcagccgatacgccgaagcccagaagccatacgacccatttacccaacatcccgcccagactcaggctcaagcccaagagcccttctctcatcaagcccctacccaagctgcagcaacgactggcagcgaatattcccccttctatgctgccgatcagcagcgccttccctacaattactacggatatccatcacaggacaccactggccagcgcgcgtctggtttcgcaacctccggcgctgagggacaggctcaagctacccagactcctagccgctatggtcataccgaagctcctggaagtggtcagaacactcctcagcctaccttgcccggcgccacccaatcgcagcaaccgtctggccagcacattcctggaggacagggtgctcatgctgctaactacggctacggctatccttactactcgaaccctcattatgctcagacatacatgaacatgaaccagcagcaccaatatggtcgcaaccgtcctatgtatgatgatgctcgccgttacgaagatcactacatgcctcatagcaatcagtatgcgtacagcaatcagtacgctccatacggcggcaagggcgctatgta

SEQ ID NO: 97660 - DNA, 263 bp, Zea mays
  Clone ID: MRT4577_20578C.1
agaacgggcgacagagacctagctcgatcaatagctccccatggcgaccgtcaacctgtcgagggtgggggtcgctgtggacgggatccaggagagcatgttcgctctgcatttggcgctctacaacctccttctgcgccccgactgcaaactcttcgtgctgcacgtccagccgctgtccaacattgccacgtgactcaacccggcgcccatacgcttaagcggccctagcggtttggaagtgcccgcattcacgctggcca

SEQ ID NO: 97661 - DNA, 319 bp, Zea mays
  Clone ID: MRT4577_20579C.1
ggaaaaaaaataaggttcctttccaaaaagggattagaggggccgctttgggaattttctaaatatgaaccccgcctcaccgaagggtttgcggaacccttggggccatctggatggggaggggggccaaatctaatgggaccaaacaaaaccgttacagttacttgcctccacaaacgctacaggtgaaatcccaggggcttgggggggggggcccccactcatagttggaggtgactttaagattttgggggcccccggatttggtttgaacttgcaaacgcgcacgggtgcatttggggcttacacaagagcccct

SEQ ID NO: 97662 - DNA, 3540 bp, Zea mays
  Clone ID: MRT4577_2057C.1
atggatcctaagggcaaggggattgtgatcaaagcgacaaggagcaaggaggcactacctagcaaggtggcgcaagttgagacagccgggcttaatgaagaagaaatggcccttatcatcaagcggttcaagacggcgctaaagggtcgtaaggagcaccccaacaagaacaagacgaaggggaagcgctcctgcttcaaatgtggtaagattggtcattttatcgctaattgtcccgacaatgatagtgaccaggaaaagaagagtggaaagtgggaaaataagaagaattacaagaaggcgaagggcgaggcacatcttggaaaggagtgggattcagattgctcctcatccgactccgacaacgaaggactcgccgccaccgccttcaacaagtcatccctcttccccaacgagcatcacacttgcctcatggcaagggaaaagaagggcctagatagaaccaaggttgataaaattaatgaattaattgatgccttgaatgataagaataggttattagaaaagcaagaggatcttttgtatgaagaacatgataagtttgtagaggcacaaaaatcccttgctttagaaattaaaaggaatgaaatgctttcttgtgaactatctacttgtcatgaaaccatttctactttaaaaggtgctaatgatgatttaaatgctaaactagaagtagcaattaaatctaactcttgtgtagaacatgttatgatttgcaatagggatgcctacatgattggtagacacccctcaattaaggatggtcttggcttcaagagggaagttaagaacttaacaagccataaggcttccatctccgccaaggagaaagggaaggcccctatgggtagtagtgctcaaaagaaccatgccttcatgtatcatgataggagacattctagaaatggttatagaagttatgatacttttgattctcatgccatgattgcttctagttcttctattatgcatgatagaaatttagctaggagaaatgttgttcatgtgcctaggaaaacaaatagtgaaccttctacaatttatcatgctttaaatgcttcctttgctatttatagaaatgataggaagatagttgctagaaaattaggggcaaaatgcaagggagataaaacttgcatttgggtccctaaggatattgtcactaaccttgtaggacccaacaagagttgggtttatgcatccgggggctcaagctggattatcgacagcggatgcacaaaccacatgacgggggaaaagaggatgttctcttcctacgttaagaacagggattcccaagattcaatcatattcggtgatgggaatcaaggcaaggttaaaggcttaggcaagattgcaatctcaaatgagcactctatttctaatgtattcttagtagagtcacttggatataatttgttatccataagtcaattatgtaatatgggatataattgtctattcacaaatatagatgtgtctgtctttagaagaagtgatggttcattagcttttaagggtgtattagacgacaaactctatttagttgattttgcaaaagaggaggataaatctgaaacccaagggaccctcaagcgcttcctaaggagagctcaaaacgagtttgagctcaaggtgaagaagataaggagcgacaatgggtccgaattcaagaaccttcaagtggaggagtatcttgaggaggaaggaatcaagcacgagttctccgctccctacacaccacagctaaatggtgtggtagagaggaagaacaggacacttatagacatggcgaggacggtgcttggagagttcaagacccccgagcgcttttggtcggaagccgtgaacacggcttgccacgccatcaaccgggtctaccttcatcgcctcctcaagaagacttcgtatgagcttctaactggtaacaaacccaatgtatcttactttcgtgtatttgggagcaagtgttatattctagtgaagaagggtagaaattctaagtttgctcccaaagctgtagaagggtttttgttaggttatgactcaaatacaaaggcgtatagggtcttcaacaaatcatcgggtttggttgaagtctctagcgacgttgtatttgatgagactaatggctctccaagagagcaagttgttgatcttgatgatgtagatgaagaagatgttccaacggccgcaatacgcaccatggcgattggagatcctttcagggtagaagaggccttgctagatccggactgggtgttggccatgcaagaggagctcaacaacttcaagagaaatgaagtttgcacactggtgcctcgtcccaagcaaaatgttgtgggaaccaagtgggtgttccgcaacaaacaagacgagcacggagtggtgacaaggaacaaggcacgacttgtggcaaaaggttatgcccaagtcgcaggtttggactttgaggagacttttgctcctatggctaggctagagtccattcgtattctactagcatatgccgctcaccattctttcaggtcgtttcaaatggatgtgaagagcgctttcctcaacgggccaatcaaagaggaggtgtacgtggagcaaccccctggcttcgaggatgaacggtaccccgaccacgtctgtaagctctctaaggcgctctatggacttaagcaagccccaagagcatggtatgaatgccttagagactttttaattgctaatgctttcaaggttgggaaagccgatccaactctttttaccaagacatgtgatggtgatctttttgtgtgccaaatttatgtcgatgacataatatttggttctactaaccaaaagtcttgtgaagagtttagcagggtgatgactcaaaagtttgatatgtcgatgatgggcgagttaagctattttcttgggttccaagtgaagcaactcaaggacggcaccttcatctcccaaacgaagtacacgcaagacttgatcaagcggtttgggatgaaggacgccaagcccgcaaagactccaatgggaactgacagacacaccgacctcaacaaaggagactccgactatgctggatgtaaggtcgataggaaaagtacatcagggacgtgccaattcttaggaaggtccctggtgtcgtggagttctaagaaacaaacctccgttgccctatccaccgctgaggccgagtacgttgccgcaggacagtgttgcgcacaactactttggatgaggcaaaccctcagggactttggctacaatctgagcaaagtcccactcctatgtgataatgagagtgctatccgcatagcggataatcctgttgaacacagccgcacaaagcacatagacatccggcatcactttttgagagaccaccagcaaaagggggatatcgaagtgtttcatgttagcaccgagaaccagctagccgatatctttaccaagcctctagatgagaagaccttttgcaggctgcgtagtgagctaaatgtcttagattcgcggaacttggactga

SEQ ID NO: 97663 - DNA, 189 bp, Zea mays
  unsure (1)..(189): unsure at all n locations
  Clone ID: MRT4577_20580C.1
ccggaacnaaagagccgggccgacccacgcgaccggaggaaggacgggagcacccagcagaggcacgagaccaaacgcgacagggggggggacaacacacgaaagaaccgcagccaggcaagccagaccaagcagccccaggaaaagcaaggggaaagaaaaagaagaagaagcccaagccggagaacc

SEQ ID NO: 97664 - DNA, 749 bp, Zea mays
  Clone ID: MRT4577_20581C.1
ccggccggggaaacgcaatgccatggccgccccattcgagcaagcctacaaggagcactatgcactgaaggaggaggcttccaagttcacttccgaagacgctccccaaggaatccgagagggaggtgaagttaaggcgatccactaccgagaggaggaggccatctacgtcaaagccagccacgaccgagttaccgtcatcttcagcactgtcttccgtgaagagaccgaccgtgtatttggaaaggtgtttattcaggagtttgtcgatgctcggaggagagccattcagaacgctccccaagtgctgtttagaaacgatgctccccttgaattgcagggtgtcccaggaatccagaacactggatctggagatattggctacgtgactttcgttctcttcccccgacatctgactccccagcgcatgaccgatgttatttctcatattcagactttccgtgattacttccattaccatattaaggcctcaaaagcttatatccactctcgtatgcgaaagcgaactgccgacttcctccaagtgctgcgccgtgccaggcccgagaacgaggagaaggagagaaagactgccagcggcagaactttcaaggtacaaggaaactagattttggtgcaacaggacagtttctgcgcacctaactttatacaatgaccgatttggttcaacactgttggaccgttagaatagggcggttaggcgcggccagatgatagttgagcgaatg

SEQ ID NO: 97665 - DNA, 203 bp, Zea mays
  unsure (1)..(203): unsure at all n locations
  Clone ID: MRT4577_20582C.1
gccagagccccctggcagcctccgcaatgtacatcaccttcatcatgatcaagcctgacggcgcccaaaggcccctcactgctgagatcatcagccgncctgacaagatacccttctacctccaggccttgaaccctgggaacccgaacacctcccctactaagaatcaccaccccaatatcncctcctatccctccttccat

SEQ ID NO: 97666 - DNA, 333 bp, Zea mays
  unsure (1)..(333): unsure at all n locations
  Clone ID: MRT4577_20583C.1
acgcgtccgctgcaactgggcgcaacagccgatacactagctgaccgacctgctcggacacgcacacgacgcatcaccaccgaggatggcagcttcataatcatgacgagcacgacactaccctgtaactacgactcaaggcccagcatgctcgcctcaaaacaatgggtcccactcgctaaccaggccaacctactatgccaagaaccacgactgtccctagcggagaatctnagtagaccgtagacgcactactaatgacaacaactactaccactgcacaaccacatcactatgtactcgatgccatgcgctctctacttttccacgcta

SEQ ID NO: 97667 - DNA, 353 bp, Zea mays
  unsure (1)..(353): unsure at all n locations
  Clone ID: MRT4577_20584C.1
ccttaaaaaaaggggaccacattggcccgggaggttataaaaaagctaaagttttattttatattacaaacactttagatttttttagaaacaagttctgctctgctaacaaaatcgatcatcctacacaagggggtcctgtcaacgtacgtacacagtttggttttaccttgcgcaggtgaaaataaatgcataaatccgactcctgcaggccagggagcacaaaaaaccccacaaacagcccgggggttcccgccggaagcaccgccgaaaaaacggcctttagggcaacaagggccacgaattcttngggcacaacaaccaccgggggaacgggggcaaaaaggaggggc

SEQ ID NO: 97668 - DNA, 429 bp, Zea mays
  Clone ID: MRT4577_20585C.1
cccacgcgccggccgtgagggtgcacacacacagcacagacccacacacgcgggcgcgctagctagtgagagtcggagatgtcgtcgccgcggccacacttcctcgtgctcaccttccctttccagggccacatcgccccggctctccgcctcgccaggcagctgctcgcggcggcgcccgacgcgctcgtgaccttctccaccaccgaggtcgcgcacaggcgcatgttcccggcaaagcccaacgacggcgccaaggactccgacgaagacggccgcctcgagttcctcccgttctccgacggcacggaacggaggccgggtacgtccggagcgccgacctgggctcgttcaacgcctacatgacgtctttccacgccgcgggggcgcgcagcgccgcggagatcgtggacgcgctcgcggcgcggg

SEQ ID NO: 97669 - DNA, 456 bp, Zea mays
  Clone ID: MRT4577_20586C.1
attcggctcgaggggagcttgcttgctagcggttttaaacgggtgggacggcatgatcgacccgggagacgaatgcaatcgcttgaagacaaccgtatgtgcaaaaaaaataaccccatggtcccctgcggtgctccacttgtacgagccctcaggcctcaccggaggcagtgtctaaacctacaaacatagtcaacttctgtgattctttgagatcacctctcgactgcaagagcacatccggtacgctcgacctaaggtgttacagagacacctcgtcaaccagcgtgggatcagacgatgtttgcatcaagcagtacttcacgtgggggggccatactctaacgtcatcgccgaccatgtccccgcggctggcatgggacaagcacaacgagtctggggaaagactggcgtctcacaagcaagccagtgtcgacttccatatctgcacaaaaa

SEQ ID NO: 97670 - DNA, 747 bp, Zea mays
  unsure (1)..(747): unsure at all n locations
  Clone ID: MRT4577_20587C.1
aaaaaaaatctccttctcatctgtggggaataatcttctcagtcatcacaccgcggtagggctggacaagtatgacggggcaggcgccaagtctcctgttccggttcaccgacacggaggtcgccaagatggaggaggtcctccgtgacctcaacgccatgcccaagcatcatgtcatccagggcctcaccgacaatttgaacgcctccccggaccgctccggcgacggcaaggtccctgtccagtacaatcaggtgaggaattggttccagaaccggatgtccgtgcagtccaggaagatgatggtccccccagtggccgaggaacaccacccagtggccggatcttactcagggaatagttcttcggatggtggccatgtccagtttgaggcaaagtcagcaagaaatggcgcatggtacgatgttgctgcctttatgtcccacaggttcattgaaacgagggacccggaagtactagttcgatttacttggcttggacccgaggaggatgaatgggttgatgtttgtaaatgtgtgagagtgcgttctcttcaatgtgttgatgtgctgcctgnggatctcattatgtgttttaaggaaggtaaagagcaggcccgctattttgatgcacatgttcttcaagntcaaaggcgcaggcatgaccgtaagggggtgccgctgcaggnttcttggttggtatgatcatgatcactctggaagagtttgttccactgagcaatgtatg

SEQ ID NO: 97671 - DNA, 447 bp, Zea mays
  Clone ID: MRT4577_20588C.1
aatcggttttttttttttttttttgtttcgtagaatcgcagttatctatttagagacataagtattaataatattctatatacactgaatcaatccaaacttggacgcgcatcttttcagtgactgaggcagcaaacatgttgttggctaatgcaaaatgtacgaatacgcaacatcatatacacatgtagcggctgtgaaaatggcaacacgcaaaaaaaaaaaaacgggtcaattcgagaaggcgcgaagagaaaagtaaaagaggaaaaaaaatggcattgagtggccaagaaatcaaaggcatacgtccaatcgtatacgaacaaggcgaacagtacggcgaggcagagcaggcgcagcctttttcttaatcaccacggcgccctgcctgccgtcgtgcccgtgcgagccctcgtggtaagcccgcggcggactgccgggcgc

SEQ ID NO: 97672 - DNA, 776 bp, Zea mays
  Clone ID: MRT4577_20589C.1
gtgtttggttgtttgtttaaacatctaggccagactacgctcgtgcaaaataaccatctcatccaggcccatgacaaacggtcaaaatagtggtttgctcgaggccggccggaggcacgctcaggccccttccctgtgtcctggcgtggagctcgcgcagccgcctcgcctcgcctggagctcgcgcagccgcctcgcctggatctcgcgctagggttggagccagggtcctcacagccgcctctatcctcgcctggagctcgcgctagggttcctctcgcagccgccgctgttgaggtcagactctgccttctcctctcaccctcaagctctccctctcccgtctcctctccccgctccgaacactgggccggtcgatcgtccgccgcaccccccttgcggtcacggttctcttcttctctgtctctcgcgcacagatctcactctccgacgctagatgcacttgctcctggtactaccgggtaacgaggtttggcattgtggtcggaggcggccatgccggatgcgaggccgcccttgcttcgtctcgcctcggcgcgcgcaccctgcttttacgctcaacattgaccggattgcgtggcaggtctgcgctgagctagctttgccccgatggtagatattctagtcaggctcattactgaaattacttgaacattgactcctgatgctagataataaaaatcatgtccccttatatgaagaattgatccatcaaaccctgcagggtagaaatttaccaatgggaactcctacct

SEQ ID NO: 97673 - DNA, 542 bp, Zea mays
  Clone ID: MRT4577_2058C.1
ctttgcatgatcatgcacagactactagaaaactatttatctgatgactataaaacctgtcagtatatgatgctaacgactgcagactacttatgttattcaaacctgacatcaatgatcatgtcaaagctgcgtacaaacactcatcaccactcacatcttggcatggttacaataccacttgggtgatcacgaatacatgtacagacaacatcctttacaaaaacttctgataaagaatatgatactgtatatgccaactactatatctgtacacctattgtaactaatgatctacatgagtacaaagagtgtaaactgagcttactgatgcccctttaggaatacacagtcaaatatttaaaatgtattgctattggtacagcagtactatgaaatcctgtaaaagcaacgtatacatcattactaggatatagcttaatgaacaaccttaaactaagggcattattgagacgcctgaagatctgtctacctcagatatgagaactagattgaccttaaactatgtacttttactaaac

SEQ ID NO: 97674 - DNA, 248 bp, Zea mays
  Clone ID: MRT4577_20590C.1
cccacgcattcgctgacacgtggtctctttataaacaggaacgtgctcattctggagttctttcacacagtgggggaagaaaaaatagcaagaaggagataaatgttccagaagattgggctgcatttacaggtaagttacaaccttttttcaaagaagaagtttttgtccctgtattcaatggaactttttcctgtactgctaaacagttcttaattatttttttaaatgaatattcaaattactta

SEQ ID NO: 97675 - DNA, 374 bp, Zea mays
  Clone ID: MRT4577_20591C.1
accacgcgtccgcccacgcgtccggacgtacgtacgtacgtagatcgatccatcgatcgctaactagctgacgaccatggcgtctctctcctctgccgccatcacggccccttcgttcacggtcgctcccggtcgcgcattggtcagcatgaggtccttcaccgtgcttgcctctcgccgcaaggctcagtgctcaccgccgccgtggccgttgccgccagcgtcctgcttgcaggttgcggcgccatggcccaagaggtgctgctgggcgcatgcgacggcaggctcgtcttcgagcctagccagttcatcgtcaatgccggcgacaccagcactctcaagattgacgccggcttcacgcgcaatgtcgtgtt

SEQ ID NO: 97676 - DNA, 379 bp, Zea mays
  unsure (1)..(379): unsure at all n locations
  Clone ID: MRT4577_20592C.1
aaaaaggtagtagggggtaatataaggtgggggccttcggccggctgcgggatgggaaaaangtcgtgggggccggtgaggggggtagattagttatttgtggtgctttgttggtttcctttatatgtgtgggggggggggggaggttttgtttttatttngaagtggagtgaattgactgagatttctgtaagttggtttgctagtgtgctaataggggattgttggagaggaatngtaaagaggtcgttttattcgagttaaggaagttatggaacacaaggagggtgggtgctaggtctttgagggaccgatgctgtgtattaataattgtggattgtttgggagatggggtactatgaacatgtgctgtaagtgc

SEQ ID NO: 97677 - DNA, 629 bp, Zea mays
  Clone ID: MRT4577_20593C.1
attgcgatgttcagtctccccatgctatctctaatagaagccttccatcctcactcgctcgatggcccgtaccacctacacgaccagtgactccaccgtatggcaaagcgcccagcaatcaaatgcgcgactaaggcggcctgcaagtttgctcgtgggaccggcggagttaataagcctaccgctttcgtcccggataccgtcgagctccgagagatcctgcagtaccataggagcacggagctgctgatccgaggttgacgctccggcgcctggtgcgatgacatacgcacatgatttccataccgacctacacttctacatgtgcgctgtgtacgcgctgctggaagcggttgaagactaccttgcacagtatcttcgaacgatctcacctctgcgccataccactgtcaagcgcgatcaccatcatgcccattgacatccaggttgcccgccgaatccactgatgagagagcctaatcatgcgtatattctgacatcagagcgctatcagaagatgaagagatgttgctgtgctatggagaacgtgtgactgacaaatcttcgagtatttggtatgctcactgctgtaacttattatcatgatgcatatgtgatggcaatgagct

SEQ ID NO: 97678 - DNA, 595 bp, Zea mays
  unsure (1)..(595): unsure at all n locations
  Clone ID: MRT4577_20594C.1
tgcacgcgctacgctaagtcttggaatcctctagaagcggcncgaccctcttgttgttttgtttgttgttttatttatttattttattttattttttttttatttttttttttttttttcttttttttttttttttttttttttttttttttttttttttttttttaatttttttttttttaagccctaaagcattaaaacggggcccggggggggggaggggatatggggagaacattgcccccacaggtttttgggccccccagccggccaatggtttaggaaacccccccccaaaaaaaaaagttttaaacccggggggggggacccagggatgcccccaccgaggggaaagccctgggggttggaaaaaaaaaccccaaaaaattggccaaaaaggggcttaaaccccccgttttgagctatggccaaaagggcatttttggaaaaaagggacccggggccacgggtttggccacaaaaaggggggaaaaaggggaaaagggctcgaaattgaccccccaaccggggggggtcccaaaaaactttcttcaggggggtcaaacaaaactaggaaagggggcctttgcaaaaa

SEQ ID NO: 97679 - DNA, 398 bp, Zea mays
  Clone ID: MRT4577_20595C.1
ccgacgcgtggggccgactacaccaccagtttatagcagacccgccgtcttcgttatcaggacgcatgtaaccctgcagctagatataaccagacacactcagacagagagatacatagagaagaggaagaagatatcagatgaggaagaccatccatgtgctattggagaagctgtagactaaactggctgtgactgttatatactattaaatagtgctgatcacattatagattcaaacggacaacatatggaccacctctacatgatagcacttgttaaaagagacactacgaacgtacgttaatccaagatggacattagtgaaattatatggcacagaattcatgacctcttaccagctaatgatgattcatcatctagtgcagtgaatggaa

SEQ ID NO: 97680 - DNA, 370 bp, Zea mays
  unsure (1)..(370): unsure at all n locations
  Clone ID: MRT4577_20596C.1
ntcttttttttattttttttttttatttagtagcaaatggcttggaacggttcgcaaaagggagggttccatcttataaatccattctctcgtgttttacagaaacaccaccttcggttcaataaaccttaacagagcttcagacagacattattgctggggacgcacaagcacagacccccacggtccatgatgggaaacaacactgtgcatttcatgccgctaggcgccgatcaatgtccagactcagggccggtcgaggacttattgtgaggggttatgagctttgcgaacaggagcatttttgccgctttccggggggtgaaccaggggcagacccaatatttgtagacccacggaccaccttggg

SEQ ID NO: 97681 - DNA, 527 bp, Zea mays
  unsure (1)..(527): unsure at all n locations
  Clone ID: MRT4577_20597C.1
cgcctctgggggttctcgatggccgcgggggcggccaacaaggccgaggagaagtgcgagcagtcctacgggttcctcccctgcaccaccaccgtgctcggcaacctcttcctcgtgctgacgtacggctacctcatgtacaaggcggccttgggggtggttccggtggaggtctcggcggtggtgaaagcggaggaggcgggcttggtggtggtgccggaggaggcggaggtcttggtggcggacgaggagctggtgggggagcaggtgctggtggcgactctggcggaggctccggtgcaagaggtggcgctggaggcggctatggcagaggtgccggtgcaagaggcggctatagcggaggagctggcggtggataccgtggaggtgcaagaggaggcgcctgaggctgctacnccagaagagctggtggtggtgccactggtggctaccgcggatgcgctggtggaggctaccgtggtggtgcaggtgctggctctggcggacgcggtggatatggtgctgat

SEQ ID NO: 97682 - DNA, 245 bp, Zea mays
  Clone ID: MRT4577_20598C.1
aaaaaaaaagaatttttaagaaaaaggaagaaaaaaagacaaagatcgaataaaagcaaaacgaataaatcattgatgacatcaattcaaaggcaggatgcatataatgggagagacaaataaacgtgggtgcccgcacaataaaattcgtaacagcattcgggcactgacttgccccgcggtctggtataatactggaacactggcgccgttgaccggggaatcataaaccgcgcctttttggg

SEQ ID NO: 97683 - DNA, 295 bp, Zea mays
  Clone ID: MRT4577_20599C.1
aagcttggacctctagagctgcgcgcttttttatccttttatgagatgtgagcatttattaatttgattcatactgagaacaaagaagaagccacgaatcaccatacatgttccatataaaaaacggatatattgtctaatctaaaatatggtaaacaatagtaaagatttgtcctcattaaaggatggcaaaaaaccagacacaggggggggccttttttttttcagagggccccggacatagaaggcgacggcctgctggggacggacacccttgaacttcataccagggggc

SEQ ID NO: 97684 - DNA, 2820 bp, Zea mays
  Clone ID: MRT4577_2059C.1
atgaggcagtcaggactggttgtgacagagggcgcctgtgacgaaggtacacctgctaccgaagccgagcaggcagatattgaagagggtgatgctggtgaagaagagatagattataacaccactatgccatccaaacccagccatttggattttgggaagtcgactgtcttcgaagctgatatgcttaccatgcttgcaacacttcatttgcacttgtatgtttatgcatccgggggctcaagctggattatcgacagcggatgcagaaaccacatgatgggggagaagaagatgttcacctcctatgtcaagaacaaagactcccaggatacgatcattttgggagatgggaaccaaggcaaggttaaaggtttgggaaagatagccatcacaaacgagcactctatttctaatgtattcctagtagagtcattaggatacaatctcctgtctgtaagtcaattatgccacatgggctacaattgtttgtttacaaatgttgatgtttctgtctttagaaggagtgatggttcattagcgtttaagggtgtattagacggcaaactctacttagttgatttttcgaaagaggagtccgatctagatgcatgcttaatagctaagactagcatgggctggttgtggcatcgccgtctagcacatgttgggatgaagaaccttcataaacttctaaagggagaacatgtgttaggactaacaaatgtctgcttcgaaaaagatagaccttgtgtagcttgtcaggcagggaaacaggtgagaagcactcatcacagcaagaatgtgatgactacatcaagaccactggagcttctacacatggacctcttcggacccgtcgcctacctcaacatcaggggaagtaagtatggtcttgtaattgtcgatgacttttcccgcttcacttgggtgttctttttgcaggataagtcagaaacccaagggaccctaaagcgcttcctaaggagggctcaaaatgaatttgagctcaaggtgaaaaagataaggagcgacaacaggtccgagttcaagaacttacaagttgaggagtatcttgaggaggaaggtgtcaagcatgagttctccgctccctacacaccacagcaaaatggtgtggtagagaggaagaacatgacacttatcgacatggcgatgatgatgcttggagagttcaagacgcccgagcggttttggtcggaagatgtgaacatggcttgccatgccataaaccggctctaccttcatcgcctcctcaagaagacctcgtatgaacttcttaccggtaacaagcccaacgtctcatactttcgtgtatttgggagcaaatgttacattctagtgaagaaaggtagaaattctaaatttgttcccaaagttgtagaagggtttttactagggtatgactcaaatacaatggcgtgtagagtcttcaacaaatcatcgggtttggttgaagtctctagcgatgttgtatttgatgagactaatggctctccaagagagcaagttgatcttgatgatatagatgaagatgatgttccaacggccgcaatacgcacgatggcgataggtgatgtgcgaccacaggaacaacaggagcaagatcaaccttcttcctcaacgatggtgcatcccccaactcaagatgatggacagggtagaagaggccttgcaggatccggactgggtgttggccatgcaggaagagctcaacaacttcaagagaaacaaagtttggagcctggtgccacgtccaaagcaaaacgttgtgggaaccaagttgggaaagccaatcccactcttttcactaagacttgtgacggtgacctttttgtgtgccaaatttatgtcgatgacataatatttggttctactaatcaaaagtcttgtgaggagtttagcagggtgatgacacaaaaatttgagatatcgatgatgggcgagttgacatactttcttgggttccaagtgagacaactcaaggatggcaccttcctctcccaaacgaagtacactcaagatcttctcaagaggtttgggatgaaggacgccaagcccgcgaagacgccgatgggaattgacggatatgtcgacctcaacaaaggaggtaagtctgttgatcaaaaggcataccggtctatgatagggtcattgctttatttatgtgctagtagaccggatattatgcttagtgtatgcatgtgtgctagatttcaatccgatccaagggaatgtcaccttgtggccgttaagtggattcttagatatttagttgctacaccttgcttcgtgatctggtatccaaaggggtctacctttgacttgattggatattcaaactccgattatgtcgggtgcaaggttgataggaagaacacatcggggacgtgccaatttctaggaaggtccctggtgtcgtggagctcaaagaaacaaatatttgttgccctatccaccgctgaggccgagtatgttgccgtaggacaatgttgcgcgcaactactttggatgaggcaaaccctccgggactttggctacaatctgagcaaaatcccactcctatgtgacaatgagagtgcaatctgcatggcggataatcctgttgaacacaaccgcactaagcacatagacatccgacatcactttttaagagaccaccagcaaaagggagatatcgaagtgttctatattaacaccgagaaccagctaaccgatatctttaccaagcctttagatgagaaaaccttttgcaggctgcgaagtgagctaaatgttctagattcatgtaacttggattga

SEQ ID NO: 97685 - DNA, 287 bp, Zea mays
  Clone ID: MRT4577_205C.1
ggaacaacttttttttttaagggagcaaggaacatgctttaccccaccatccacataaacacctaaaagaaacgggtgccagaatcacctacagggctcgttcgaaaataagggtcatggtcagggattctaactccactcatgccctacattacacttgttcctaaacaaaccctcaacacttaagattcttaaccactttagaatgcagcttcaaaacttactaaccaagacacacgatgagagggtcttaatcctaggttcggcagctttatcacaaaaagggc

SEQ ID NO: 97686 - DNA, 418 bp, Zea mays
  Clone ID: MRT4577_20600C.1
aaaagacccaaattttcatatgctcgggaattggtcttcaggcttggcccaatatacaggagagcatttgcatttttcaaaaactgaactgcaacatcgaaaaattggtgtccccgttaaaaaaaaattggcccaaatttggctttcctggcttaaaaacttttttaccggctttatatatatgtacacaggtggcaacttacttaagttggacaggggtcacactaatacaaagggatgtccaatgccagggaaggagagatcccccccttcactgggggggggggtaaaagatacagaacatttacaaagagaaccgcccggttacagttcagggccaaactagctgcaaaactggtgagggaaggccttcttgtttcccgaattaccttttcctgggggaagaaatatttttttt

SEQ ID NO: 97687 - DNA, 198 bp, Zea mays
  Clone ID: MRT4577_20601C.1
cgaatatcccggccacaggcgcacgggaacaagggttgtgggccgaggccccatggaggggttgggggtggcgcccacttggttcgagcatgctccatgcgcacgaaccatgaacttgcccagctggcagctgagaggttgtctgaattgggacctcgcaggggcggaaattatgtgctgctgcctaacatgaaggcc

SEQ ID NO: 97688 - DNA, 375 bp, Zea mays
  Clone ID: MRT4577_20602C.1
aattaacacacgtttaatgtttattaacatatttctataagatggactatttttatccatgagatacagatcgccgctaaacaaatgtagtggcattaccgatagcacactactactgtcaattcatctgtcgtgttttcatcctgcttggaaggagtatatacacaatcgcaggatgccagtcctttatatatttggatacgatggaacacaccgtaaaatgctggtatgctggtgtagtgccgtttcttcgcatcatgtttttattctggcttctttccttcaggatatcaacacatccgttggataattccacgcttgaacacgactgtactgacttgctcaactgcttcactttaccggttgcagttggtt

SEQ ID NO: 97689 - DNA, 261 bp, Zea mays
  Clone ID: MRT4577_20603C.1
catttttcttcctagtgagaaaacaacccatttgaagagaagaccactaatgagaagaccactaaagagagacatcaagaatggattcagcagaatcatttcacgttttgaacagcagcagtttgaagggccaagccttgatcagggatcagtcattaaaggacactcttgagtattagtaaaccctcttatgatgattaaaagagaagggcagccctctccaccttttggtactttctattcaacttgcactgaccataa

SEQ ID NO: 97690 - DNA, 648 bp, Zea mays
  Clone ID: MRT4577_20604C.1
ccggccgggaagggaagccgggccaattcaccgagagggttgctgcgcagcggaggaccaaaccgttgctggcaggactgcttgaaagaattccatgacaatggtggctcgtcgcgctggagttgacagtaccaagtcagagcgactcccgtcatgtgatatgagatgaacaaaaaacttgcagatgcactcgactatgttatgtctcaaatgcaagctacaactaagaaactacaagatattgcatctttctgctacatagatgaggatgttgtagatggtttcatgatgacgcaagttgctcggtcaatggatgaattggttgaaattctagatatcacttcaatggactgccagttttcgatgatggaccctgctgttgtattagaagctgggtatggaacgtattccgtgtccgagaaattatgaatcggcctttagaagcagagacgcttggtgagcactgtgctaaatgggagcttagcttcaatgagatatgggatagatctatgtaatatcgtcatgtgtagttcttttgtgttcactaagttggacaagtattgtaatgcatgtgttggatattgtcggatctggctattgtaagacatgacattttatatcaaaaaaaaaaaaaaaaaacccgcggcc

SEQ ID NO: 97691 - DNA, 492 bp, Zea mays
  Clone ID: MRT4577_20605C.1
cacacatctcggtgtttctctgattgtaatgtcgactggaatggattgctatcctcaattgttctgacgggcttagggaacctggtgcggtgttgttgcaggagtatcttaatctgcaggctcaggtgagtgccaaggaaggtggtggttgcggtgccaggggtggcaagtcgtcgtttctcaagtccagcatcactacgctgctgcacaatctcaatcaggcagagaaatcttcgccatttaagtacgcgtatttggtgtggaagctggtggagacaagatcacataggctctaaaatccatctgttggaggagcaaggccattcaagtagaggaacacttgctctggtgcacttttattttcttcagatgctaatttagactttaactcactaagctgcagctttagactttgtcctaaagcagttaattcctcaatttgcatgagcaagtgttgtcactctatctgtcgtaagaagaattattgattac

SEQ ID NO: 97692 - DNA, 244 bp, Zea mays
  unsure (1)..(244): unsure at all n locations
  Clone ID: MRT4577_20606C.1
attgtntaatcttgggagacaataaaaagctctatattgctttcttctatctctgggggcctttacaagggagactgaactgctctcctgtttataaagagaatggacaagcaaatctgtctaaaatcttttcccgggggtactttgcctagaaagccaaccctcctccttatactttgacgacatgagattccccggcccttgattgattcccccacgaagagaaatatttcctccggctcct

SEQ ID NO: 97693 - DNA, 276 bp, Zea mays
  unsure (1)..(276): unsure at all n locations
  Clone ID: MRT4577_20607C.1
ctcaagaccttgactgcttcagatacaagggcccatggtggattgtgtgtggtcatgaggcattctttagaatgtttgtctcaactggacatgtcttataattcaccatgnattgatctggtttttataggatctttatggaaatgattggcatttatgtcacattttttgaggcccacctagggtgcatgtactttattacaggttgaagttgttattatagtttttttttttccctcgcttggggacgtgtttttatttttattagtggttgtc

SEQ ID NO: 97694 - DNA, 549 bp, Zea mays
  Clone ID: MRT4577_20608C.1
gggggggttttttttttttttttttttttttttttttttttttttttttttttttttccaaacaaaaaactttattatggacctataccccaaaaaaaatcaaaaagggggcccccccaatgaggggttgggggaaaaaggctgcgggggggggcaaagcaagttgtttaaagggcaccaattgttgcagttgaaaaaggggcccagcgttaggcccaccgggctggaaaaacggcaacaactggggttgggccaaaaagggaccagggctcaccccacctagctggctaaagggaaaaagttgttgctgctgaaaaaaaccaggaaagtccaatgctgccagttggttgaagggaaaaaattgcggggggaaggcaacaaatacctggctgaagggaagttgttgttgttgcaaataaaaaccaaagttcaatgcacctagtgggttaaagggaaaaaactgctgttgctgaaagaaggcaacaaggtttgctaccacaagttgttgaagttgttgccccctgatgttttgggccaataaatgcccca

SEQ ID NO: 97695 - DNA, 234 bp, Zea mays
  unsure (1)..(234): unsure at all n locations
  Clone ID: MRT4577_20609C.1
tcacaaccccccaccacaagaactggttggatttaatagaagttggctgcccctcacggnaacccaaggaaagaggtataatacatgcttctcacacggtttccccttagttgttttttctttgggctccattaacatcatcaagcacgcgcttatttacatcttcgtggccaatggctctgtctagcatgctgaacacacagacttattctgtaaacttatcaccgttgcctt

SEQ ID NO: 97696 - DNA, 363 bp, Zea mays
  Clone ID: MRT4577_2060C.1
ctagttcaagacccccgagcgattttggtcgggggccgtgaacacggcttgccacgccataaaccaggtctaccttcatcgcctcctcaagaagacgtcatatgagcttctaaccggtaacaaacccaatgtgtcatattttcgtgtttttggaagcaaatgttatattctagtgaagaaaggtagaaattctaagtttgctcccaaagctgtagaagggtttttgttaggttatgattcaaatacaaaggcgtatagagtcttcaacaaatcatcgggtttggttgaagtctctagcgacgttgtatttgatgagactaatggctctccaagagagcaagttgatcctaatgatgtagatga

SEQ ID NO: 97697 - DNA, 377 bp, Zea mays
  Clone ID: MRT4577_20610C.1
gtgattcagatgctgctttatcctagcaaaaggcccacaacaagactgcttactactcaaagcttgcgactttctcatttcgtcagaacaatgacaaagtacacgattgatatcacttcggacactgtgtgcccgtggtgctacataggtgtatcccgcctcgaccgcgccatcaaagagcacaccaaactccacccgggcgacacattcgacctaaaatggcacgcattctacctcatgcccgaagctaccccttaccccggcgttaacaaactccaattatacgaaatgcgcttcggtggacccgaacgtgtgcaaactatgatgacccgacttcgcgcagtgggtgctcaggaaggaatcaacttctcatttgg

SEQ ID NO: 97698 - DNA, 201 bp, Zea mays
  Clone ID: MRT4577_20611C.1
taatttggggtataatacacaggacagggggaatctcaaagagaggatcaagggggacaacatgtatacttgatagagacctcatgacggaactaaccaacagacacacgccaaaaacaagacgtacaaccgagaccttctcaaagacatcaagccctaatcagatagcgcataagctgaactatgaaaactttaattatg

SEQ ID NO: 97699 - DNA, 329 bp, Zea mays
  Clone ID: MRT4577_20612C.1
ctggggattcggggcaccaaaccaagggaacacgcaccttgcaacccttttttttattgagacatggaattattacatccacaaaaccacgacgaatcaccaactcatcaacaagggtagaccatcattaattggggagctaacaaattattgcggttgggctttgtttgaaacctttggaccctcacctaggcggcaaatccaaggctgccggtaacattgatgacaaatcggtagcggacgcaattcttatcgagccgttacatgggcgggttgacggagtccatctagataacctggaccttggtccagaacccgggttttccccc

SEQ ID NO: 97700 - DNA, 846 bp, Zea mays
  unsure (1)..(846): unsure at all n locations
  Clone ID: MRT4577_20613C.1
attatgcgctactgtttcctctctctcctgtcgtgtttccttccaattccattctagcagttggccagaaggcaccacctttcccttcgcccgcaggcttttccgatccgcaaccagaccaaactccacaacatttcctcaagctgttccttcaagaaacctggatcaatccaaccttcaatcgcacagtccgtgggatctcccttgagttgcgatggaagaggggaccacggaacctggatcattctcccgctcttcctccttcgttggattcgaggagtgggtggcattggtgaggaaacgcaatgggaaggcctcttcgtgcgggcgtctgggtctccgttcaacagccagttcagaagtactagaacttgcagatcctgatagcaatgtcattaatcctgacccttgtgaccaagtgccagaaggaatcctttgggagaggcttgggagggtttccatgatggatattgagtcaagtgacttcagttggacctctctcacctcactgcaccatacaaaacatacggctacaagtactgatccatctgaggatgacattagcagaagttttgaggtgacagtaaattctgggggcattgtttttattgcattattcaaagctattgaaaatgttgatcttccgtccaaggaaacagctgcagtaattaaaatagcaccttcaaggatggccacacagtctgaacgctttgggtacgaactcgctaaatggcttggagtgagaactccctcaggcagagtcattcatagctcctcagatgaatggcaacagntcaaggatgcagttgaaatgctcgaatgatcgatagcttctgtgatgaactt

SEQ ID NO: 97701 - DNA, 322 bp, Zea mays
  Clone ID: MRT4577_20614C.1
cacgactgggcttatgaccaaggaatcagatattccttcacctttgaacttcgagatacaggcagatatggctttctccttccagaatcccagctccgggctacctgcgaggagaccttcctggcaatcaagtatgttgccagctacgtcctggaacacctgtactagttgagagagctgatggccttgtttcaaaattctcatttttcatttcttttcgttctcgaatgcttattttggtttgcctggatgtcttgcagatcccaatctttcttttaagcttctgggtctattaaactaggtagatcttttcgtattgatc

SEQ ID NO: 97702 - DNA, 341 bp, Zea mays
  Clone ID: MRT4577_20615C.1
tggctttgcttcctctactcgctccgggtcgcccctaacacgcgggggtccgcgcaaccttccccacctcgaggcgctccacctcgtcctcacccaccctgccatacagagcccgtccctgctctctccgctcccctgcacatatatatcctgcaccttcctccatcactccccgttgttgctcctgttcgctaacaaccccgcccggctcgcctgggccccaaccgggggtctccgagccctcttcgctgaggtactagaagccttgcgcggtgcccctcccgctacgctgcccgagaaactgctttgaaacttctaccacagtgtcagctgatgatatc

SEQ ID NO: 97703 - DNA, 1505 bp, Zea mays
  Clone ID: MRT4577_20616C.1
gtcgtcgcaagctcccccccccggcctccgccccgccggcgtcccaattctgaaatctgaaaacaaagcttttccgctgccgaccgagcactccgttccatggcgtcgccttcctcgtgggactagcaagcctcgcctcgctggagaccatcaagaagcaagtggcaatcatgtatttgtggccgaaggcgctagaagtacctataatggacccctcaaaagcatcaaaaaagcctgttggaattctacttgtgaaggtcgtaagagcccaaaatttgcgaaagaaggatctgctgggtaaatcagacccatatgtgaaacttaaaatgtcagatgataaacttccatccaagaagactactgtaaagcgcagcaatctcaatccagagtgggatgaagaatttaagtttgttgtgactgatccagaaagccagtctcttgaagttaatgtcttcgactgggaacaggttgggaaacatgaaaagatgggaatgaacatggtcccactgaaagacctcccgccagaggagactaaatttactacccttaacttgctcaagaccatggatccaaatgatgtacaaaatgagaagtctcgtggccagcttactctagaggtcacatacaagcctttcaaggaagcagatgtggagacagaagatacagagggtaccaatgtgatagaaaaagcaggaatggccggatttggggcaaaggagctctgggcgagcaggggttgggcgaattggatctggcctgcagctggactgcgtgggggagagctttctgcgcctaggaatggaggggaagggtcagcgtgtgccatgacaaagctccaagcggggaggagaaagaagacagggtcggacgccatggatgggggagagggacgctgtgccgggcgcgcggacagaggtgaatgggcgcccgagctagaggggcaggtccgaccatggcaggaccctgccagcaatcccgcgcacgagtagaaaggttcgtggcgcgctgctgcgggagggcactggcgccatggacgtcgggttggagcgccggccgaggaggagatcctcctagcatcatggatccgctaggggaaggggcgcctgcacctggagccgagcgcacatgcgagaagaaaccggcgaggtggggcagggagaggagagcggctgctccctgctgctgtcgaggcgcgccagggaggaggggttgtgcatccctgggggccgagcaccaaggagggaggagcccggtgtgctggtgaagactcgcaggggattgcctgccaccatgctgccatgtcgcgcggaggagatgacgctgggggaaggcgccggcttggagagatcacgagcaggggggcacgtccatgtgaggggcgcggtcaccagggctccatggacgagcaggagcaaagggaggaagatggccggaggtggaagacgagcaggctgcgtgcgtgagaaactggcggccaggaaaaatcttcttccgacccggccggc

SEQ ID NO: 97704 - DNA, 2856 bp, Zea mays
  Clone ID: MRT4577_20617C.1
caaatgcgaccctatagatatgctcctgcattgaaaactgagatagagaaacaagtggaagaaatgttacaatcaggcattgtccaacctagccaaagtgaattttcctcatcagttatcttggtgaaaaagaaagatcatacatatcgcttttgtgttgactacagacatttaaatgctttgactctcaaaaccaaatatccagtccctgttattgatgaattccttgatgagttacatggggctgcgtggttctctacccttgatttaagggcaggttttcaccaaattcgcatgagtccaaaagatcaacacaagactgcatttcaaactcatcacggccattttgagtttagggtgatgccttttggtctttcaggagcaccagcaacttttcagagtgcaatgaactcaactcttgctcctcttctcaggaaatgtgtgctggtcttttttgacgatatactgatctatagcaaaacctggacagaccacattaatcacttacaacaagttctccaaattcttcagaaggatcaatggtttatcaagatgtctaaatgtgcctttgcccaacagaaaataggctatttgggacatgtcattagtcagcaaggggtggctactgacccatcaaaaatagaggcagtgtcttcctggcctacaccttcaaactgtaaagacctcagaggatttcttggacttgcgggttactataggaagtttgtcaaaaattttggggtgattgctcgacctctcaatgatctattgaaaaaaggggtattgttcatatggacacaagtgcatgaagaagcttttctcaccctcaaacagggcctcactacagctcctgtactcatgcttccagatttttccaaaccatttgccatagaaacagatgcttctagcaaagggattggggctgttcttctacaaaacagtcatcctttagcatatgtgagcaaggctcttggggttaaaaatcaaggattatcaacatatgagaaggaatatctggccatcctgttagctgtggataaatggcgtcagtacctccaacattcggaatttttgatatattcagatcacagaagtctgtcccatctcactgaacagaggctgagtacaccttggcagcaaagagtgttctctaaacttctgggcttgcaatatagagtggtatacaaaaagggggctgacaatggggcagctgatgccctatctagaagaccacatcctgattcctcactatttcatgttacttcaatagtacctcagtggatggatcaggtattggatagctatgcagatgacaccttctcacaacaactcattactagtttggctactaccacagataacacaggaccttataccttacaatcaggcattctcaggtataaaggccgtgtttgggtggggacttgtgaagctcttcagattcagattatatccgccttgcacgacagtccagttgggggtcattcaggatttcctgttacatatcgaagaatcaagcaattgtttgcatggaagaatatgaaatctatgatcaagtcatatgtggcagcttgtacagtttgccaacagtctaaacccgatagacacaagtaccccgggttacttcaacccctacccataccagaggctgcttggcaaatcataagtatggatttcattgaagggcttcccagatctgctcacgctgacaccatcctggtggttgtggacttattttctaaatatgcccacttcttgccattgctgcatccctacacagccttgaaagtggctcaactctttatggattcggtatacaagttgcatggcttgcctcagtcgatagtatcagatcgagataaagtcttcactagcaagttttggcaggaactattcaagctgactggaacaacacttcgcatgagcacttcctaccatcctcaaacggatggccaaaccgagcgtgtcaatcaatgcttggaaacctttctacgcagttttgtgcacgcttgtcctacaaaatggtctcattggttgtctctggccgaatattggtataataccagttttcattcatcattggggcggtccccatttgaagtactatatggtcgagccccaaggcatttgggattaacgttgactgatgcagttccttcattagaccttcaggcttggcttgaccagcgggaactcatggttaaactggttcaacaccaccttcaccgagcacaacagaggatgaaattccaagcagataagaagaggacagaccgagagttccaagttggagacatggtttaccttaagctacaaccatatgtccaatcttcagtggccactagagcaaatcacaaactcagcttcaaatactttgggccctttgcaattattcaacgcattggcaaggttgcctacaaattgcagctgccttcttcatccactgttcatccagtttttcatgtgtcccaactcaagcactcagtgggctcccaaaatgttagttcagtgttgcctaacatgtccattcctctccagataccagaacaggtgcttgatcggcgtgttattgttcgaggaggcaagtccatacaacaggtcctcgttcactggtcatctacagatgaagcactatcgtcctgggaagatgaagcagctcttcgacatcgatttccagcagcgccagcttgggggcaagcggcttctcaaggggaggagaatgtcagagacctacaggcgccagcacaaggtgaagagggcgcaggaggaaaggaaccaagggatggcgttcaagtggtgggccgtcgcattcgtaggcctaatctccgtgtcaagggagcagaatggatagagtaa

SEQ ID NO: 97705 - DNA, 2970 bp, Zea mays
  Clone ID: MRT4577_20618C.1
tttttactcgtcaagtcattgctttggttgtctttttcattttttttttggtcatctgaggtagcgttatgtgtttataacctcttcgattcttgttcttcctctttgggcttgcaggcaaaaccacctgcttacgatcttgcagtcatcatcacgctattagttgaggataatttcgcgcacaagagcaattcggcacgaggatggagaggatgtggcccgcgcctcgctgtcctgctcgctctcgccgtcttcaccgccgtcgccgcagcggccacggacgaggtgcgcgcgcagtccacctacatcatccacctcgccccaggccacccggcgctgtaacccgccaccggggcggattggaagtgggaggtgggtatccttcctccactgtcctttttcatctctctctctctcttttctctctctaaaagactttgctaattggcctgctagccggtctccctcccccggcctctttccctttcagctggaggagatagatgagagagaggatcagaggaagcaggaaggagagagggatatataggccggtgtcttctgtagagagagagattgagagcaaaagggaaataaaggagctctcgcaggcactcggtactgacatgagtgatctcatgctcttgataccttggtactcttacatcaccccttcttcaccttcttcttgttcttgctcatccctcctctccggccctctcttcctcctgcctctctctagctaggacgatcttcaacaaccctctccccctctaattctctttccccatatagagagaataaaggagagagagaggcgaaggcaggcagctaattttcttttgttcaagggaaaggacagcacgtgccggagctcataagctggtagctgcatcagttcctgaggcaaaaccacctgcttacgatcttgcagtcatcatcacgctattagttgaggataatttcgcgcacaagagcacgacaagccgagatttttgggggcgtcggcgtcgacctgtaggcgatggcggcgtactaccacggtggcgccggcacggacatccaggccagcaccgacggcctgcagacgctgtacctcatgaacccgagctacgccggcggctacgctgacgacggcggcgcgtccacgccgggggcggccaacatgatgctcctcaactcggccgtgaccaccatgacgccggcgtccttcgcgcaccaccaccagcagcagtcgccgccggccgcgcagcagcacttcgtcggcatcccgctccaggtccaggcgccgccgccgtcgggctacaacctgtggaccccggccatggctggcggcgccgcggacatgtcgccgcaggcgcaggcgcagactcccggcgccgcgggtgctgctggggtcagcgccgtgctcagcctgtcgtcccgcgaggcgccgccggtcaccgtggccgcggtggccgcctgcaccgacgagggcaagtacctgggcgtgtcggccacgccgcaggggcagatggtcatgagctccaagtacctcaaggccgcgcaggagctgctcgacgaggtggtcagcgtcagcaagggcgtcgaggacgctaagacggccgctgccgccgcgaccaagagcctggccgcggtgaagaagaaggaggactcggagggcgcgtcaggtggcggcaccgacgacggtgccggcgcaaagagcggcggtggtgccgcgccagagatgtccacggcggagcggcaggagatgcagatgaagaagagcaagcttctcaacatgcttgacgaggtggagcagcggtaccggcagtaccacgggcagatgcaggcggtgtcgtcgtcgttcgaggcggcggcgggggccgggtcggcgcggacgtacacggcgctggcgctgcgcaccatctcgcggcagttccggtgtctgcgggacgcgatcgcgtcgcaggtgcgcgcggcgagccgggcgctgggcgaggacgcggacgccgccgtcgccgggggccgcaccgtggggtcccgcctccgctacatcgaccaccagctccggcagcagcgcgcgctgcagcagctcggcatgatgcagggcggcgcctggcggccccagcgcggcctccccgagcgctccgtctccatcctccgcgcctggctcttcgagcacttcctgcacccataccccaaggattcggacaagatcatgctcgccaagcaaaccgggctcaccaggagtcaggtgtccaattggttcatcaatgcgagggtgcggctgtggaagcctatggtggaggagatgtacctggaggagacaaaggaccaggacgctggaggcggcggcaacgacgagggcaagtccggtggcggcggcagcaagagcagcgacaccgtcgacggcgtcatgccgagggcggacgtgatgtccaagtccgcggtgcgcgtgggaggcggcggggcgggggcggagagcgcgtccaccaacaagggcatccatggctcctccctgctcgagctcggcggcggcgatcaccagcagtcccacgcggggttctacgacgacgatgaagacgacggcgacgacgtgatggggcggaggctcaagaaggcgcgcggcaacgagccggcgccggcgttccaccacgtgcacgacatagccacgctgcacgcgcaggccgcggcggccgccgactagaggtctcgcaggataggtaactagttgatacccaaacattgtacaagattttatatgtagatcatagggattggggggtatacagtaaagtatgcgaaaagggtatattggaactggacttagtgtatgctgtagaaattggcctactagtattatctgcagcaattcagtatttgttttgcttactgtaaacatagcacattgtgattcattggcagccccatgtgttgttagatgacattgtggaaaatgctgctccagtgagatgtttgttggtgccc

SEQ ID NO: 97706 - DNA, 877 bp, Zea mays
  Clone ID: MRT4577_20619C.1
aattcggcacgagggaggtgggtatccttcctccactgtcctttttcatctctctctctctcttttctctctctaaaagactttgctaattggcctgctagccggtctccctcccccggcctctttccctttcagctggaggagatagatgagagagaggatcagaggaagcaggaaggagagagggatatataggccggtgtcttctgtagagagagagagattgagagcaaaagggaaataaaggagctctcgcaggcactcggtactgacatgagtgatctcatgctcttgataccttggcaaaaccacctgcttacgatcttgcagtcatcatcacgctattagttgaggataatttcgcgcacaagagcacgacaagccgagatttttgggggcgtcggcgtcgacctgtaggcgatggcggcgtactaccacggtggcgccggcacggacatccaggccagcaccgacggcctgcagacgctgtacctcatgaacccgagctacgccggcggctacgctgacgacggcggcgcgtccacgccgggggcggccaacatgatgctcctcaactcggccgcgaccaccatgacgcccggcgtccttcgcgcaccaccaccagcagcagtcgccgccggccgcgcagcagcacttcgtcggcatcccgctccaggtccaggcgccgccgccgtcgggctacaacctgtggaccccggccatggctggcggcgccgcggacatgtcgccgcaggcgcaggcgcagactcccggcgccgcgggtgctgctggggtcagcgccgtgctcagcctgtcgtcccgcgaggcgccggcggtcaccgtggccgcggtggccgcctgcaccgacgagggcaag

SEQ ID NO: 97707 - DNA, 1024 bp, Zea mays
  Clone ID: MRT4577_2061C.1
ctgcgggtcgattctagatgcatgcttaatcgctaagactagtatgggctggctgtagcatcgtcgtctagcacatgttgggatgaagaaccttcacaaacttctaaacggagatcatgtgttaggactaaccaatgtatgcttcgaaaaagatagaccttgtgcagcgtgtcaggcaggaaaacaagtgggaagcactcatcacaacaaaaatgtgatgacgacatcaagaccagtggagctactacatatggacctcttcggacccgtcgcctaccttagcatcgggggaagtaagtatggtcttgttgttgttgatgatttttcccgcttcacttgggtattctttttacaggataaatcagaaacccaagggaccctcaagcgctttataaggcaagctcaaaacgaatttgagctcaaagtgaaaaagattagaagcgacaacgggtccgagttcaagaattttcaagtggaggagtaccttgaggagaaaggaatcaagcacgagttctccgctctctatacaccacagcaaaacggtgtagtagagaggaagaacaggacgctaatcgacatggcaagaacgatgcttggagagttcaagacgcctgaacggttttggtcggaagctgtgaacacagcttgccacaccataaaccggttctatctacatcgcctcctcaaaaagacattgtaacactacgaaaatcattaaataaaataatacatttagttaataatgatgttaatggtaatgaattttcttttaagcgtgtgacatttatttgcctttggaatgatttttggatgctcatgattgattttggtcattgaatagcatttcttgttaaatgaaaatcctagtaaattaataatataattattagtccaagaattaatattttattttggtttgattattaggatttttagggttattttaaaatgtatttcgaattcggaaaagggaattaaaaaaaagaaaaaaaaaaaaaagtactctgcgttgttaccactgctt

SEQ ID NO: 97708 - DNA, 847 bp, Zea mays
  Clone ID: MRT4577_20620C.1
acttcttgctcatccctcctctccggccctttcttccttctgcctctctctagctaggacgatcttcaacaaccctctccccctctaattctctttccccatatagagagaataaaggagagagagagagagagagaggcgaaggcaggcagctaattttcttttgttcaagggaaaggacagcacgtgccggagctcataagctggtagctgcatcagttcctgaggcaaaaccacctgcttacgatcttgcagtcatcatcacgctattagttgaggataatttcgcgcacaagagcacgacatgaacatgcagagcaccaagtcgttcgcggcgcagctcatgagggacttcgtggcctagctcccttaggacgcatagcatagcagtcgtccacgcaattaatcaaatcatctctccatcgatcaattaatttagagcttgtatagaaataaagggttcaagcctaaatatgctttgcgtatataaagcagttaagcttggactcataggtcttgctgggaatgtaaagatgggatatatatcatggggcgatgtatatataggtataggaggataggtaactagttgatacccaaacattgtacaagattttatatgtagatcatagggattggggggtatacagtaaagtatgcgaaaagggtatattggaactggacttagtgtatgctgtagaaattggcctactagtattatctgcagcaattcagtatttgttttgcttactgtaaacatagcacattgtgattcattggcagcaccatgtgctgttagatgacattgtggataatgctgcacaaaaaaaaaaaaaaaaaagcggcc

SEQ ID NO: 97709 - DNA, 2488 bp, Zea mays
  unsure (1)..(2488): unsure at all n locations
  Clone ID: MRT4577_20621C.1
aatctcacgcatctttataagaaccatagagtagatctcttcatctgcaaactgattctcctcacccttgtgctgcacaacaatcattgacttctcaccaggcccagaaatctcctttaaggtccacaacttgatatcactctggacagacgcatcattgaacctcctgccaatgagacgcttggcatcaaagacggtgtttatggggttcatggcgacttggttctctgtttcgcatatcccttaaaaaaaagctttccttgttggggaatataacacgccgctttttttttttttttttttgtataattgcatacatttattcatgacataatagcgtcacgcgcaacttaaccgatagaacataacggagcacaagacgagcaaatagataaaacgagtcccttgtccaggatcccaagattatgcgcctgtagtaatggtaagttcccaaaaacagcaccagggaacccgtacgcaaaatacaactcaggacatcatatgtcatgacgcgacattcttaaaaactccgcaacaacagaaactctctcagttccttccttcctggacacgtacaaaagacacgagcaagcgtgactcgggtgcggcttcagacttctgctgccttcggagagttctcgggcgtcttcagcggcagttcctgtgccttgcttgtcttgtgagactccaccgcatccttgaattcctccctggtggccgtgtccttgaacttcagagcaaatgtagcgaggctgctcggcgactccccaatgctgttcatacaggcaaatgtcacgcccttcttgtccatgtccttgagcgacatgtcgttgtagaggcttgcattcaggaccagccggtagttgccttttgtcctcatgacgagccgggctcgctcgcccccagatacggggacgttcagcttcagttcaccttttcctctttctttccagcccccatctaagtactcgtacaaagcagaatcagcgctgaatacagccttctcattttcttcaccggtttcgacagggccctctgtcatagcaaacatcttgggtgcctctgctgaagtagcaagagctgtggcagaacccccattggtggcagcaccaagattaaaagaagggaacgaagaaccatcagctttcagcccaaataggggaccagcacttgagccatctttagaggctgagccaaacgagaatgatgtgcttgaaaatccagttccggtcagacctgtgaaagcattttgaccacttgacagattcttaaacgagaaaaggggtgttgctgatggtgtttgccctttctgctctgattcacctccagtatcatcacctccatctttcttctcagtgtcatctccatctttcttcccagtatcatccttgctaattttatcgatatttccagcttcatctgtcctttccttttcttcagcatctccctcttttgttttgccctcaacttcagatggcatgcaactgccttcattgggttctccaactaccactttgtctccactagattcgtcctttgtgtcttctgccttgtcactggtttcaacaggctgaggtggtgcttcagttgaggcactagagtccgtatttaccccagagcccagcagtcttgtcgggcagagacaaagtatctttcccgctaccattgcttccctcgtcaactttgacatctgaaggttggacctctgggacaggagcacttgtttgagcactagaatcagtgggggcaaatctgattgcagagaaagggttagaagaagctgatgacgtctgctggcgccgaacctttacaatcctccgtgttgccataacttcttcagtagctttcttaaatgtacccatctcttgttctgttccttcatcatcaggttccggattatccttgttgatttgagtacctgcaacccttttcctagagcttggggcctgctcctcatctgccatcttccaaattgatagcacctttccggaagactgtggtgagctcgccgggggtgaagttggcagttgcagcagcgactcaatcgggcgacaggagaagggccggaggcggagaccggttagctgtctacgtagtcggggccacgcgccgtcgtgcccgcgcctgcgtcgcctgcggaggggccgcctgacgaatgggccaaaggcagggaagaacaggccagcgttcggaaggaccggagcagcgggcggctgcgggaggcagccgagggagtcgggcccggcggcccccgaggtacccaatggcccccgccggcctcggaggtacccaatgttcctagcagaagagacgatagttgagtacagcgtaatgaaagacgcaattttaaagcaattaggtgacctcggcccaacatgggcatgtcttgttcaagccagatggattttatttntttccatggccaccaactaaaaatcaaacactggatgattcatcgatcgcggacggtgggacgctgggtcgtacc

SEQ ID NO: 97710 - DNA, 247 bp, Zea mays
  unsure (1)..(247): unsure at all n locations
  Clone ID: MRT4577_20622C.1
gctagcgngcgtgngcgggngcagcggctatnccacctgcgcgacccaccgcgagcgcccgcagctaagctagctctcgctcgcgcgcgctgggagaggagagatcaatggcgtcccgtggccggttgacctggtgtcttcggctcgccgncgttggttccgccgccgtcgggctcgggttgggcgtgtcgggccggcgaggcgcgggtgggcggcgggcgctacgggggggcgttgccgtggcggg

SEQ ID NO: 97711 - DNA, 281 bp, Zea mays
  Clone ID: MRT4577_20623C.1
tccgtattcccggtttacccacgcgtcctgtagccacgtgacattcaaccaactggctgcggagaactttggtgaccatgagcaacaacatccacgatctagtcggcttgctagtgagcacaccaagtgctttcattaattcacccagctgacttgatcgtagtgtgctgattacacacatcagcaacagagtaccatcatacgggctgctagcatgatgtgcgcccagttgtctttgtgacacatcgacagtggtggccgttcctcctacacgctgattg

SEQ ID NO: 97712 - DNA, 275 bp, Zea mays
  Clone ID: MRT4577_20624C.1
gctcgcgaccagagcatcgacagcgagagagagaagcaacggagagaggggccagctcaagaggaaggaagcaagcaagaaggaaacaaggaaggaagcaagcaagcattcggagcgatggagcacgggtacccctgcaacggctgcggcaaggagaagcggccgccgctcttgatgttctgtttttgctgcttattgccaggatcgtgttcggaaggcgccagcgaccgtaggtttgtgttctctttttttttttcttttctttttcttttttt

SEQ ID NO: 97713 - DNA, 270 bp, Zea mays
  unsure (1)..(270): unsure at all n locations
  Clone ID: MRT4577_20625C.1
cactcgcccttggcgtggtcggaacgcggccttgtcgtaaaaaaaacaaagtacaagcttttttattattaaattttggaaaaaaaaaataataaaaaaaaaaaaagcttttccttggccgtgacccgctggggcgaattctggggtctccctccactggcggccggtggggggtgcgtctngggggcccctttcgccctttcttgagctcggttgcggttcactggccgctcttttccaccctctctcttggcaacgccctagcgctcc

SEQ ID NO: 97714 - DNA, 161 bp, Zea mays
  Clone ID: MRT4577_20626C.1
gtgacatgtgtgaaacatgtggtgtaccccggctgagtgaaatactgatgactgcatcaaatgatattaagactcctgttatgaaaagtccttcgctcgaacatatatctgaggatgatgctcaaatgctagatgcaaagcttaggatgtgtcgagtgggt

SEQ ID NO: 97715 - DNA, 569 bp, Zea mays
  Clone ID: MRT4577_20627C.1
gccggccgggccgggaatactctcaggactagatcagatctcgtccgccctgcgtatccattcttcccaccgccaaacacattctgcctcgtgctctcatcgtgcatactgtccgcactcgtacgatgagcggataggcggtcgttgcgggctccggtcgcacagcgctcctcgctctcctcgcgcctatggatggccggaggcgtgatgaacgatatcttcgaacaatgcaacaaaacttgtgagatcgcgacgatctactctagatgggaggactacataagcacaatctcagcgaaaaatatcaatgttaagacctgcctgtctgctgtcctgacaaagcgaaagacaatatgctagggcaattgtcagaagttctcaatgccagatcagaaagaattgaagacacttacgacattgatgagcgtgtagaacaaatatagatctattttgaccgaagaaacttatatgacatcacgtagtgagaacgcggaatacatagtcctggggatatctatgaaagaaagacgatgacattcgaattctgagctgctgaaacgccatatgag

SEQ ID NO: 97716 - DNA, 636 bp, Zea mays
  Clone ID: MRT4577_20628C.1
tctggccgggagatgttctaaatgcgggtagcgcgctggtcggtccgacgttccaccggaaggagccagctggccggaggaagccccccatttcctatgccctagtcggcagtggcggtatggtgtcgatcgctgtaccgcacagaagagcagcacccggctgctctgtggcgctagatgcattgcggcataggctgatgttgtgctcgtggttgctgtgagcccgcgaagcggcgtcgatacctcggcgtcagcccggtggcgatgcgcggcactaggaccgggctgagagcgggcgtcggcggcccgctggtctactgagtgtactgcggggggtggctggaagcgcacaagccatccagagatccctgatggacagacaatgacggtggatgcgctcgcacctggcgttcatggtcctggcctgcatcctcgctgccaccgcacacatgctgatggtcaacgaggtaggcaagggcaacatcaacgcctgtttacagagggggtgctaagcgggggctgcgcaaggaccacgcaacgcgcgtgggcaagcgcgccttattacgacacacgatgagctactagaggaggagtactacgacgagcaagcgccggagaatagcgccgactgacggc

SEQ ID NO: 97717 - DNA, 678 bp, Zea mays
  unsure (1)..(678): unsure at all n locations
  Clone ID: MRT4577_20629C.1
aattcgcggccnnnnnnnnnnnnnnnnnnnnnnnttttgtgaaaccagaatatacgtttaaatctggatcaagcacgttgttaactcttcagctgacatattacaccaatgttctagctttatagactagcttgatcctaagctaatgcaaggagccttgaaggatctgatatccgatcccaacaacattgcccgataccagcttttagacagtgcagtaagnnnnnaggatccgtctcgcaagatcggtagctccactcttcatatagattagatgcagattgaacgctgcctctcttcgcacatcacaataccctggcctcagatcctctggcgcacgtgaaccagcctcgtacggaagcttggggatgggatgatccttctcctcggttgacaaagccttgtcgtagtaaacagctgccaaggtattcaggccaatgtggtgatacgctcgagcaatgttgtacaaggcttcctgactgttatcacaaaggcgaaggtatctgtacaggaaagcaaaagcttggacgatgcactggttcttattctgaagcctgaagccaagggccaaactaatcaaggcagtgcctacacatagattaataagagggttttctgggtccagcttataagcttcaaggtaatcccgggcagnnnnnnnnnnnnnnnnatagcagt

SEQ ID NO: 97718 - DNA, 3903 bp, Zea mays
  Clone ID: MRT4577_2062C.1
atggatcctaagggaaaggggatggtggtcaacgacaaggaaaaggagtccatcttcaatgagctaagagacaacaagcctaccgactcaaactcgagtcataagaagagggtcgggaagaaaaaaaggcgcatcaagaaaattatctactacgacaacgatgcctcatcttcttcaccaagggacgacgacaacgacgactcctcgtcaaagaaaaaagacgaaaatgggatgcatttcgatagcactgataatcatgtgatcattaatgaacaaattcataagaatgcccaagccactactgtcttgctagcttcactttgcagggatgaatataataaagtgagtggcttggacaatgctaagcaaatctgggacaccctcaagatatctcatgagggaaacgacgccactatgatcacaaagatggaactagtggaaggcgagttggggaggtcatttactgtaattgacccccatcttgtcaatcttattcgtgaaaaccccaggtacaccaagatgacgcccgaggagatcctcggaaaatttgtgagcgggcgcatgatggtgaaggaggcgctgtgggggacagatatcccccgggtccactggaaggataaaagacctcacgaaaggcccaagggcccaataaatcgtaaggcgcgatacgtggatgatgcgctaaatggtccactgcccatctacgagctgcagcccgttgccctcaaagcaacgagcagcagggagacactaccgagcatggtagcacaagtggaggctgccgggctcaacgaggacgaaatgacgctcatcatcaagcgcttcaaaaccgccttgaaaggacgcaaggaataccccaacaagaataaaacaaggggaaagcgctcctgcttcaaatacggattggctgcctcagccttcgacaagtattcgctcttccccaacgaacgccatacttgcctcatggctaaggagaagaaggtttatgcatccgggggctcaagctgtatcatcgacagcggatgcacgaaccacatgacgggggagaagaagatgttcgcctcctacgtcaagaacaaggattcccaggatacgatcatctttgaagatgggaaccaaggcaaggtgaaaggcttgggcaagatagccatcactaacgagcactcaatatcaaatgtatttttagtagagtcgctcgggtacaatcttctgtctttatacgcactaaatgattttgcagctccccacccgaaatctggaatttgctcaacagtgaacaactcacctgcacacaaacaacataacatgtatagtagcatcagcaacggaggtaccagccttgaccagcaattccttgccaagcgtggcctcggccagaccgcacagacgtcgcgaaggagtgatggttcattagcatttaagggtgtattagacggcaagctctatttagttgacttttcgaaagagaatgccggtctagatgcatgcttaatagctaagactaatatgggctggctgtggcatcatcgtctagcacatgttgggatgaagaaccttcataagcttctaaagggagatcatgtgttaggactaaccgatgtctgttttgagaaagacagaccctgtgcagcatgtcaggcagggaaacaggtgggaagcacacatcacggcaagaatgtgatgacgacatcaagaccactggagctccttcacatggatctttttggacccgttgcctatctaagcatcgagggaagtaagtatggtcttgtaattgttgatgatttttcccgcttcacttgggtgttctttctacaggataagtcagaaacccaagggaccctaaagagcttcttaaggagagctcaaaatgagtttgagcttaaagtgaaaaagataaggagcgacaatgggtccgagttcaagaatctacaagttgaagagtttcttgaggaggaaggcatcaagcacaagttcttcgctccctacacaccacaacaaaacagtgcggtagagaggaagaacaggacgcttattgacatggcaagaatgatgcttggagagttcaagacacctgagcggttttggtcggtagctgtgaacgcagcctgccacgccataaaccggctctatctgcatcgcctcctcaagaagacctcctatgaactcctttccgataacaaacccaatgtctcttacttcgtgtatttgggagcaaatgctacattctgggtcttcaacaaatcatcaggattagttgaagtctctagtgacgttgtatttgatgagactaatggctctccaagagagcaagttgatcttgatgacatagatgaggatgaagttccgacggccgcaatgcgcacgatggcgataggcgatgtgcgaccacaggaactacataaacaagatcaaccatcttcctctacaatggtgcatcccccaactcaagacgatgtacaggtacctcaagaagaagggaaggatcaagggggagcacatgaagatcaagtggaggaagaagcaccacgggcccctccaactcaagtccgagcatcgatccaaagacatcaccccgtcgatcaaattctgggtgacatcagcaagggagtaactactcgctcacgattagctaatttttgtgagcattactcgtttgtctcttctattgagcctttcagggtagaagaggccttgcaggatccggactgggtgttggccatgcaggaagagctaaacaactttaaaagaaatgaaatctggagtctggtgccacgtccaaagcaaaacgttgtgggaaccaagtgggtgttccacaacaagcaagacgagcacaaagtagtgacgagaaacaaggctcgacttgtggcaaaaggttatgcccaagtcgcaggtttggactttgaggagacttttgctcctgtggctaggctagagtcaattcgaatattattagcctatgctgctcaccattcctttaggctatttcaaatggacataaagagcgctttcctcaacgggccaattaaggaggagatatacgtggaacaaccccctggctttgaggatgacaggtatcccgaccatgtatataagatctctaaggcgctctatggacttaagcaatccccaagagcatggtatgaatgccttagatatttccttattttgaacgctttcaaggttggaaaagcggatcctactcttttcacaaagacatgcaatggtgatctctttgtttgccaaatttatgtcgatgacataatatttggttctactaatcaaaagtcttgtgaggagtttagtagggtgatgacacaaaagttcgaaatgtcgatgatgggtgagttgacctacttccttgggttccaagtgaagcaactcaaagacgacaccttcatctcccaaacgaagtacactcaggatcttctcaagaggtttgggatgaaggacgccaagcccgtgaagacaccgatgggaaccgacaggcatgtcgacctcaacaaaggaggtaagtctgttgatcaaaaggcatacctgtccatgataggttcattactttatctttgtgctagtagactggacattatgcttagtgtatgcatgtgtgctagatatcaatccgaccccaaggaatgtcaccttgtgactattatgggaattcttcgatatttagttgctacaccgtgcttcgggatctggtatccaaaggggtctatctttgacttaattggatactcagactctgattatgtcgggtgcaaggttgataggaagagtacatcagggacgtgccaatttctaggaaggtcgctggtgtcctggagttccaagaaacaggcatccgttgccctatccaccgctgaggccgagtatgttgccgcaggacagtgttgcacgtaa

SEQ ID NO: 97719 - DNA, 227 bp, Zea mays
  Clone ID: MRT4577_20630C.1
ctggaccgtccaaatccactgcagcaaaaaagacagatggtgggtcacagtctaaggcatcagctgctcttgagattgaagacgttgagccggcagaaatgagtttcgaggaaatagaagagaggttaaagtctgttgtgaaagctgagacaatttcccagctaaagagctctgtctggaaagagcgtcttgaaggttgccaatatccctgtgttgtctatcctgtg

SEQ ID NO: 97720 - DNA, 1197 bp, Zea mays
  Clone ID: MRT4577_20631C.1
aattacaaaaggcaaacagagcaaagaaattaattgagaaaaggaccgctgcaaatgaagagttaaaacatgattatctgccaagaacaaagcaagttcctcctgttcctggtctactgacaaatgtggagcatcatcagcttgtgttaaatctttgtcgaacattagctttgctgcagcgatattgggatgcactgcagattatcaaccgaaccctcaaacttggaaatgacgcactcactggtgacaaaaaagaggaactcagatccttgggtgctcaaatagcttatagagctccagatcccagtcatggctttaagtatgtccgttacgttgttcagcagcacccatattctcttgccgcatggaattcctactataaggtggtatcaagaatagaggacaggtttccacatcatttcaaatatcttcttcggacaagagaagcgaatcctgactgtgtgcctccaataatcatatccgggcatcgatttactgctataagtcagcatcagtcagctgcccgggattaccttgaagcttataagctggacccagaaaaccctcttattaatctatgtgtaggcactgccttgattagtttggcccttggcttcaggcttcagaataagaaccagtgcatcgtccaagcttttgctttcctgtacagataccttcgcctttgtgataacagtcaggaagccttgtacaacattgctcgagcgtatcaccacattggcctgaataccttggcagctgtttactacgacaagactttgtcaaccgaggagaaggatcatcccatccccaagcttccgtacgaggctggttcacgtgcgccagaggatctgaggccagggtattgtgatgtgcgaagagaggcagcgttcaatctgcatctaatctatatgaagagtggagctaccgatcttgcgagacggatcctaaaaacttactgcactgtctaaaagctggtatcgggcaatgttgttgggatcggatatcagatccttcaaggctccttgcattagcttaggatcaagctagtctataaagctagaacattggtgtaatatgtcactagtgactttagatgtgtagctgaagagttaacaacgtgcttgatccagatttaaacgtatattctggtttcacaatgctgtgttatagtcaaatggttcagcgatgctttgcttc

SEQ ID NO: 97721 - DNA, 162 bp, Zea mays
  Clone ID: MRT4577_20632C.1
tattctagcgcgattcattacagaagccctcgctgaacaacaccctactgcatacaaccgcattgccactcataaaggatatagatcactatgaaatatataaaggctatgatgctataaactcagcatcttagaggtcatatatgatcctgatccttacat

SEQ ID NO: 97722 - DNA, 473 bp, Zea mays
  Clone ID: MRT4577_20633C.1
agcagtggtaacaacgcagagtactttttttttttttttttttttttttttttaatttttttttttttttttttttttaaaacacacaaaaaccttataaggttcaaaacctggctttttttttacccaccccttccaagaaaaaaggggctcaagggaaaggggccaagcagattcaaacctaccccaaccttaaatcaaagaggtccggggcctggaatgaacggtgaaagttgaaccctggttacccaaccgggttttgggttgacaacccactggggccgatggaatggaaaaccccaaccaaactttttggggtccgaaaagaatggtaccccagaccccaaacctatccctaaatcaaggggacctttaaaggccattaaagccaaaaaaaaagaatattccgggccctggtttataaccccccttaaaacattactcattttaacccgaacaaacccaggaattgg

SEQ ID NO: 97723 - DNA, 1326 bp, Zea mays
  Clone ID: MRT4577_20634C.1
cattgggtacctcgaggccggccggggttcgcggtgacggcgactggtacttttttgtcgctgcggagcgggggagtctggggactcttccccaacgggaattcctcactcacatctctacgcacgaacggaaacgccccgtgctgcgctcgcagtctcgcatggagtccaccactgctgctgctaccgcggcggcggcgccggcaccggtgctgctggtgacgaacgacgacggaatcgacgcgccggggctccgcttccttgtcgaccgtctcgtcgccgcagggcgataccgcgtactcgtctgcgcgcccgacacagacaaatcgggtgtgagccactgcatcacatggcgccctgcactccgctgtaaacgtgttgatataataggtgctacagcatttggagtttcaggaactcctgctgactgtgcttctttaggcatctctggaaaactatttgatggtttggttcctgatctggtacttagtggaatcaacattggaaataattgtgggtaccatgtcatttattctggaacagttgctggtgctagggaggcattcttatatgggattcctgcaatagctatgtcatatgattgggttgcgggtcggagcagtgttaatgacctcaaggtgtctgcagaggtctgcatgcctctgataaatgctatcgtgactgagatcaagaatgggacttaccctcaaggatcattcttgaatgtagatgtacctacagatgctgcgcaccacaagggctacaaaattacaaaacaaggaacatatatggccagaattagttgggagcagacggtttacaagaagcctgcagtagaaagttaccagacagcaaacatggatgttgatggtgaaaaggatagcgaactagttacttcagaaaatgacctactgtttaagagagtgattgtagggagaagttccaatggagtggaaggagaggaaacggaccacaattccctagttgatggatatatcactgttactcctttgggtgctctttcccgcacagaaccagacgccataccctatttcaaagcttgtgtctcacgtctggttgataatttctcttctcctggctcttctttttctagaagcagaggatgagccatgaaatttctaaagctgtttatttatcgccatgatcaagttccacattgctttttcctaccccataacattgttaccatacatgggcaatattgccattcttgctacctgaatgttattactgcaatcagcatgtgtattctgcttcatagcctatgtcagaattatgcattcacaaatggttgcccgcttaatt

SEQ ID NO: 97724 - DNA, 254 bp, Zea mays
  Clone ID: MRT4577_20635C.1
caccgtcgccacctacagcaccgtcgtagttgcaaattgccgacttcggccggcgcgtgccttctgtcattccccggacgagatctcactcgacgagtagcttactctcaattgtcgctatctaccccagggcaatgctccaggaaggacggcgccgtgtatcaacacagacggggcgcgcagaagccgatcaagtgcttacatgcacccatgcgcgtcagaccagcgcaggtttcggcctcgtgcagactacc

SEQ ID NO: 97725 - DNA, 615 bp, Zea mays
  Clone ID: MRT4577_20636C.1
gaggagtggtggttgctcctagtcgcagacttctttattaatctcaatctggatccgggcacggggagcgattgactgatcgacgagactcgagagcctggagagccgggggtttcgcttctcgttgcgtttggagtcttgccgggtctcggttttcgagcaggcaagaatttccttttaattttgggtgatctgttttcgtgtgctaagattttggatcatcgccccccccagtgttgttcctgctgatttaccgcctggattggattttttttggacgggttacctttaatggggcttctcccttctcgtcgtcgcgaatcagtggactaggacaagaaaccttcccgattggagcggattttctgtggtcgccgcgcttagtttcgaaaggcggcacctttatttgctaccacgctttgctgtggcccaaaagttacccattgtgtctgtttcaagaaatagattgggttttcttttcttttttctgaggtgtttgttttacttggcagatccagggaacaccggttttcctttgattttgccgaaatttttgatctgatcggagcgatcccggagcttcgcaaggagcaaggcatttttctgggggccatg

SEQ ID NO: 97726 - DNA, 1067 bp, Zea mays
  Clone ID: MRT4577_20637C.1
gcttttagcttctaattagttcaaaatcaagagtctctctttttttattattaataagtgataggagagcatgggtaatatatgtatgtccactttattatgtaggatagaagatgtctttaggatatatataggtttgggtaagaaagagtaggataagaaaagactccatccaagattgtggatcttgactcatcttggtgaccacacttgatccttgaagacttgagttggtgctcatcctcctttgatgaagttgatcatcttcttcagtcttgtctcattgattaggagttagtgtatattattgggctggggaatatggttaatataggtatggatgagatagactacatgatgtaggtcaaaagtttgtttgatgttaggtggtggttgatagattatgcaatccattaagactctattgattgggttggtctatcagtctttatttagtgtagggtggactaaattacaacatgtgaatagggtctaatccatttcacaagtattaactggtccattaagtaactcatttttttttgattagatcatagtaggttagatgtgatctagattagattggtatgactggtttgactagatatgatctaattaatcttgcattagatcatggttgttaaactagggtggataagtatgcctattaggataagatggatccataaggataagataaaatcttttggggtcagttagatctattaggatgagatacaatcttttcaagataagatgagtatcatttaagataagatggatctattaagacaagggagaatcttttaagataagatgaattggctagaatgagagcctttaggataagataattctcttaagctagataggttccaaatgggataatttaggttgcctagttattttataaatatatttttatacctatgtgtatatgcagatgtaattgtggacattactccacaacccatcacactcaatcaaagatccaaatcagacagatgtcataagaacaaacattcaagtgcatagataaaaatagttttcccggccgagcctcgagg

SEQ ID NO: 97727 - DNA, 385 bp, Zea mays
  Clone ID: MRT4577_20638C.1
cggtgctaactatttgcctcctgggcgcgatgtgcctcccctctgtcctcggttccatcttctcggccgccgcacggccccgcccgctccgccgcgcgaaaccccgatgagatcgccaggctcttccccaacctgctcggcccgccctctccgctccctggcgccgtcagccgaccccgcagctaccataccgctaaaggacgaggacgcgcctctctgtgggacaggcgtgcggcgccccccctgacatcctgcgggatcatttgattacccactggcgcgtgcaacagggagccaccctgcttggatccaagggaggtcctgttgggatgatgaagagaaaacatgaggagatcacttctgactctgcgtatccctacagaaa

SEQ ID NO: 97728 - DNA, 192 bp, Zea mays
  Clone ID: MRT4577_20639C.1
gccggccgggtacaaaaaaaacgactcacccctctgtccttctaagccgacgccggccaagccctgtccctctcccttgtctggtacggatcgtctttgctacccaggcgctggatccgcaccggcggcgccgcacatgcgacacagcatgctaggcgaccagcacggcctccccgaggacgacaacaagcg

SEQ ID NO: 97729 - DNA, 660 bp, Zea mays
  Clone ID: MRT4577_2063C.1
gtggccgcttttattaaccatcatttcgttactgaaaaagttcatttccgtgtacatgtacatctgacatgtcgtcttcgacaagctacgaacagcaaccgtgactcaagcctaaaacaagcagtgccttcttttcccttttggctttataagcttatatatacctcgtattttagagcttcgggtacaagcaactcaactgaactcaagtcaaaaaggccgatagatgttgccaacaacgtaacgcatcacccaaaccagtcatatttgaaacgagtccactatggctttcagaaccttctgcgacgccggccactgcttgtcgttggcgcttgcgacgaacagcaccaccgtgctccccttggcggtggccttggccaggttgtgcgaacctgttagcgccaatggagtctccagcacgtagctgtagtaagtctgtccatcgacgttctcgacgttggtgtcgacgagctcgtcggagtcgaaggtgttgccggtgacgaaaggccccagcgaggcgatcagcctctcggggctgccgatgtcctcgatcgtggcgttgggcttgttggtgaggcggatgagcggcgaggccaccacctgcaccttgccctgcttctcgtcctcgaacttcacctccacccacggctccccggccgg

SEQ ID NO: 97730 - DNA, 349 bp, Zea mays
  Clone ID: MRT4577_20640C.1
atatatcaacatacatatatgtctgcgtgtgggtgccttgcctatcttggactgatgatgccataaataaagaggtgggagtgcctcgcgggattcatggcaggccatggatctgagcacatgacggtggcatgctaacttaaggctcttgtggatcttatatatgggaaagcaagctgccaaagaatatatcaccatttaaaggccgatttggcttgtatgtactttgtaccctaggtttggtattacagcgtaatatcggagtaacctaatgcatactggcttactactatcactaccgaaatctatctctttgccgcgtgaaactaaaaaaataacaagtactgga

SEQ ID NO: 97731 - DNA, 107 bp, Zea mays
  Clone ID: MRT4577_20641C.1
ccggtaccaaaagcccaattgcagaaagctcttaagcgctaattgaactgcacaatatgactggcacttttgcaggaacattcgacttattttcgaatcagactgca

SEQ ID NO: 97732 - DNA, 374 bp, Zea mays
  Clone ID: MRT4577_20642C.1
ggggtcgaacacaagactttttttagatccaaacaattcaaaaccacaatttcgatcccctggtcattgggggagacaaaggtgaccacctaggagggggttattggaaaaataagccggggacacattacaatagcacagggtatgggggaaaaaaaaatagggtgggggggttaaaaagaaaaccagggggagcaactctgaatttgatctatgggggaccaaataagcatttaatcttttttacatttttttcctgggtctaaaccacaggattaggttcccagggggcatcactctttgagggatttttgacaatggcaccagcgaagtcatgcaggactgaccttggggacccatgggtcgtttcggcc

SEQ ID NO: 97733 - DNA, 388 bp, Zea mays
  Clone ID: MRT4577_20643C.1
ccgaaacaggcaagggttcaacggggggccaaacgagggaacccggaactacccccaaacaatggggtttctgaacaagccatccccagatcccctttgggggcccatttctggcagagggaaagccattccaagatcccctttcttgggggcgcgggccaggcaaatttttttttcgaggaccaaaaggccaaaaaaaaaaaagcaaggggtttcggttagatttcccccagcttctttggataagggtctaaacgggcctttttggggaggtcaactcttcagcctctctaagacttggggaggggaggggacccaccccgcccctttgggaggccggtggttccctccggcctccgcggcccgcggggggagaagaggaattggg

SEQ ID NO: 97734 - DNA, 400 bp, Zea mays
  Clone ID: MRT4577_20644C.1
gtcacctttttttttttttttttttttttttttttttttttttttttttttttttttttagacccttacgatcaccatttttattttgatttgtataaaaaatacgtactactccctccgttctaaatttttgttggtcaccttaatttttaaactaaaacgcacgcccaatattacaattttgagcgccgtacacattttattggacggaagctaccacggggagggggggcgggagaaacacggacgcccctccccattccattcgacgacgcggaagggggggcgaggtcccaacctttttttacgtcctttggaacacaaacaccgtacagggcctgccccaacaccccacaacggaggcccgagcttttcacgcccgggatgctcaacagctccg

SEQ ID NO: 97735 - DNA, 621 bp, Zea mays
  Clone ID: MRT4577_20645C.1
ctcgcgaaaaagccggcagaatcacgaggtatcgtgaaattcccatcgccctcctgctcctcgccaaatcgacgagacgccgacgagagatccgactacctcgcgctccgacacgccaacgcgtagatctggtagaataggtggcggtgggctcggacgtgcagtggtagtctcttctgcagtggcagcggcggaggagacgggggagcgagcagtcgccgcggcgtgggtctgttgtgtgctgggactcgggttccgtgaaaccctagacgccgcgggatggcgtcgtataggccgtacgcgccgccgccgcagcatccgccgccgccgccgccaccaccgcagggcggctatccgccgcagatgaattcgtacgcgccgccgccgcagcaggcgccgtacagcaggatgccggcgccgacataccacgcggggcctccgccaccaccgccaccggggccgccgccacctcaccaaccgcagttcaatttcggtcccgggcctccgcagcagctcccgcccccgcccccaccgcagatgtactaccagccgccgccaccgccctacggcgggaacagtaatccgcctcctccaccttcggcgccaccccccgcctccgtc

SEQ ID NO: 97736 - DNA, 800 bp, Zea mays
  Clone ID: MRT4577_20646C.1
gccttcttagatctaggtagaaccccacccctcaattcatccgccgccatgccagcgccaagccagatctgcgggctccgggcaggggatgcctcattgtttttttttcgttcgttctaatcggttcttcgcaagtgaagtgagatggcagtgacgactcggtaatattcaagctcaacagaccaaatcacaggtctctctgtatacgagatcgatctgtatgccgattttcccgctgaaccgagccatccaaattccttctttgggtctcgtttattttctattcgaaatattttcttggggcgattttttttgttctctcttgcttttttctttccacttgagcgtggaacagactgttgcgatgaggataccgagctccctcttctgaaggaattgaggacactcgctggtagaatcgaaccaataaccatattgccaccactgagtaaccaaaggccccccttcaatcttctcgtttcgttgtttttcctgctccgcattgtgattttggatagagagatcacctgatgcataatccgacacttgatccgagctcggcttctgccgagcgactgatgcacagacatctccgcatctgagtcctttacatcttactgtactggttttgaccctgctgagaaattttatctcttgattccacttcctgtgttgttgaactacgtcttcgtatttttctttgtagtatcagatgatgatagctcgaaacaatcttaggacaccttctgacacagtgtttcatcactgtgagtgagaagtacttcttttctgatgatact

SEQ ID NO: 97737 - DNA, 476 bp, Zea mays
  Clone ID: MRT4577_20647C.1
aacctgcattctctttatgtgcactgcattttagccttcctggtgctctgtccacgctctttcgctctgggccgccgaccgtcagcataagccacgtgctgaggctctcgttggtctattcctcggctacgagcacccatcattcttgtaaaaatggatgatgatgaggacatccagcctcttgtctgcgagagaggaactgcaatggacacaggtggatttgctgacgattatgcaccaagggcatgtttgcctagattagtttgacgcactcgccacactgatgtcatggtagcgatgggacacaactgacttatatgttgggactgaggcaccgtccaagtagatgtattcttaccctcaagtatccgatggagcacagcatcgtgagcacctgcgatgacatggataaattcttgcatcatactttatacaaacaggttcacgttgtcccagaggagcaccctgcgatgctc

SEQ ID NO: 97738 - DNA, 505 bp, Zea mays
  Clone ID: MRT4577_20648C.1
cgctgttgctactcctgaatcagagggcatgggagatgccggttcttggcgtgagcaacgagccatggtaaggagaaatggaaggagcaacggtgcagcaagatgggaatctgcaggtgcaatggctgccggcagcggaaatgacgctgcaactcctgaatcagagggcatggtagatgcgggttcttggcgtgagcagcgagccatggttaggagaaatggaaggagcaacggtgcagcaagatggggagctgccggtgcaacgggggccagcagcgacaatatgacactttcgagtgggagacggacggcatcgtagaccacggttctcagcgatgtcagccagccatggttagcagatgctggttcggcgtctgtgccgcaggatggggaactgcaggtgcaacggctgacagcagcgacaatgacagaggtcggagtggaagatggactggttcgaaggccacggcgcgcagccatgtcagacagaggggcgacagcaacg

SEQ ID NO: 97739 - DNA, 309 bp, Zea mays
  Clone ID: MRT4577_20649C.1
tctagctatagtagcttttctccgagaagcatttagagggaggagacatgtctagaggagaagctccgtcaccgcctgtgtctgggtcgaggtccttcgcacggcgacggcatcggtcaattcgacagccgacgtccgtggtcactctagccgagtcgggcgggccgcgtctgccacgagcgtcgagcgcgaggcggagggcaataccgagagcctccccggccttccctccccctcctacctccactgcaggctgatgggtgacaatgacttccacccgctgggcgctgtcggcagaccccgagaacc

SEQ ID NO: 97740 - DNA, 774 bp, Zea mays
  Clone ID: MRT4577_2064C.1
atggatcctaagggcaaggggatcgtgatcaatgacaaggagaaggagtcattcgtcaacgagcccaaggatgacaagcctaccgactcgggctcgggccacaagcgcaaagacgggaagaagaagacaaggcgtatcaaggagatcgtctactacgacagcgacgaatcttcctcttcccaacaggacaacgacgactacgagaaaaagaaaacgaatcctaggtacaccaagatgacgcctgaggagatacttggaaagttcgtgagcgggcgaatgatgatcaaggaagcaagatacgtggacgacgcattgaatggtccaatcaatgagccccaacctcttgctctcaaggcaacaaggagcaaggagacgctacctagcaaggtggcacaaattgaggcggccggacttaatgatgaagagatggctctcatcatcaagagattcaagacggcgctaaaaggtcgcaaggggcaaccaagcaagaccaagacaaaggggaagcgctcatgcttcaaatttggtaagcttggtcattttattgctaactgtcccgacaatgatagtgatcaggatcaagggaacaagagggagaagaagaaaaactataagaaggcaaaaggcgaggcgcatctaggcaaggagtgggattcggattgctcctcttccgactccgacaatgaaggactcgctgccaccgccttcaacaagtcatccctcttccccaacgagcgtcacacatgccttatggcaagggagaagaaggtgtaa

SEQ ID NO: 97741 - DNA, 127 bp, Zea mays
  Clone ID: MRT4577_20650C.1
gttacatctgttgtgtaatagattggtaagctttatgtagcatgatcttatggcagggaaatacgtctgtgatgataggttttccaggttgccatgtctaaatgcaagcgctacttccacacaagat

SEQ ID NO: 97742 - DNA, 553 bp, Zea mays
  unsure (1)..(553): unsure at all n locations
  Clone ID: MRT4577_20651C.1
tttcgatatgggtaccgggtcccccccncggatttttttttttttttttttttattttttttttttttttttttttttnttttttgaaaaggcgaacaggggaccctgacccgttcggaaaaaagggggggccaaacaactccggggacgacgagacccccgacgactacgaccacgacacgatacaaccccgggcggggggggtttttatgtaaaccaacgccggccggccactgacaacttcctggggacggactccccttgtttcacccggggcgggcgggcggccactttatcaaacggggagcccgcccatgaactcccactcctaatcgtcttcctcctcgggggccccgggggccgaccgttccgagtcgttgttttcgccgccggacataacgggggcctgggggtcaaacaccaggtacggctttgccccaaaggcccggccaagggcggcggccgtggccccgtcggtcctctgtttcagcacctggaacataacctggggctcgggctgaatcgcgcggagcacgtcggcccaggacgggcc

SEQ ID NO: 97743 - DNA, 540 bp, Zea mays
  Clone ID: MRT4577_20652C.1
gccccctcgcgagttttttttttttttttttttttttttttttttttttttttttttttttttttttttttttttttttttcccagttaaagaaaaacttgcttttagtttccttcaaatttttcccatgaaagagagaaaaaaaaagggaagggcgaccaggggcccctgccccgttcggaataaaaagggggccccaaacaactccggggacaacgagacccccgacgactacgaccacgacacgatccaaccccggggggggggggtttttatgaaaaccaacgccggccggccattgacaatttcttggggacggactcgccttgtttcacccggggggggggggcggccccgtattaaaacggggagcccgcccatgaactcccactcctaatggttttcctcctggggggccccgggggccgaccgttccaagtcgttgttttcgccgccggacataacgggggcctgggggtcaaacaccaggtacggttttgccccaaaggcccggccaagggcggcggccgtggccccgtc

SEQ ID NO: 97744 - DNA, 266 bp, Zea mays
  unsure (1)..(266): unsure at all n locations
  Clone ID: MRT4577_20653C.1
ggcgggaccagttgctgacaaggggcactacgggtataaatttttcgagaaagaggtccctgaagatgctgacttccaaaaggacgagatgacagacatcatcaggtgtgaccaaaggtaaagggaatgaaggcgtgaccactcctggttatggggccggccgagaccttanaattattgaaancaccacaaggggctngcagcggcgcatgacacccagntaggtcctcccacacgcatacacccagatgttcagagtggaaaca

SEQ ID NO: 97745 - DNA, 273 bp, Zea mays
  Clone ID: MRT4577_20654C.1
cggggctatcgaggcaagatgtattctttacaggtcctgaaacgcgggctgcagcagatcaccggccacggtggtctccgtggctatctacgggtttttttcaggacaaatgatgcgaaggttggtacattagtgggggcagacaatatggacacaatactatgaagacaacaagccttttttggcatcttagcttcacagtatgacgatgatctccacaacataaccattactgctctaattctgtggacgacctgattcacgtgatggcac

SEQ ID NO: 97746 - DNA, 357 bp, Zea mays
  Clone ID: MRT4577_20655C.1
ttgcatcgcacccttctgaactcaacgacaagattcgccactgcggcatcatggacgtcgagttcagaagggtgcgatgcaagtacccggccgaccacgagatctatctatacatcctatagtgcgacgacccacgagagccacctgagcaaggtaatgatgtcaaggaacacgaagatatcctgctaactgcaaatccacgatcatttacctatatattcgtaaaccatcgtactcgcagataccaccatctcgcataactaacaatttctaaacatctacatcaccattcacccatctctatcaccccttattccacggaataaagacttcagcacttacactttatcgtccaac

SEQ ID NO: 97747 - DNA, 258 bp, Zea mays
  Clone ID: MRT4577_20656C.1
ggagaattattcatagacgaggtcttcggtagggggaccctctctcccccatgttgttcatactggttatggatgtgctaggctatttaattaaggaggctgctaatgatggtttgatggtgcctctgatagaaagttcagttcataaccgtatttctatttatgctgatgatgtggtgattttcctccacccggtggctcttgatttagtaatcaccatggacattatcaggatttttggggaggcagctgggctca

SEQ ID NO: 97748 - DNA, 336 bp, Zea mays
  Clone ID: MRT4577_20657C.1
tgaaggtgctgatcgcagcccttgctctcctggcgctcgctagcagcgccggctggcaatcaagcgtgcggttgtggctgccacacaccaccgtcccatctaccgtctgcgcactatatgccgccatccggtctatctgtcgccgcggcaccatcacgcaccatggcaataccccactcaaccaccgcagctaagcccgtgccgatagttcagatcctgcggtgtagcaagcagaccgcagccacgatcctgggccagagcgtccaggtcctgaggcacaacagcaaccctagctgcgacgccctacggctcgccacaaagccagggcgctgcagc

SEQ ID NO: 97749 - DNA, 328 bp, Zea mays
  Clone ID: MRT4577_20658C.1
ggggcagggaagggctttttcattgaccaaaagggtagcaacagttgcatttgcaaagtccaaatttacagccctacaatacagggggcccatacataccttatttaggatttataaaaactaatttttgggatgggggcataacttacactaaaaagccccccgcctttgggggttttaactcacgggcccaaaaaactaagcccagcccgggcgggcttaaagctttgcaaaaactgcttttcgttgaaagctccaaaggggggatgttaaacattacatccccctttttttggccttcccgagcccaaataattggacccgtggg

SEQ ID NO: 97750 - DNA, 265 bp, Zea mays
  Clone ID: MRT4577_20659C.1
gcgagcggccgcccttttttttttttttttttttttgactacagtttctagatgtcagatttatataatatttgtatagatagacctagctcatgaattacatatagttaccgaaattacaacaccctgagatttctcaagttgtcacaaatgtttccccgacggacgacccggctctgacgaatacggccgggtacccgatcccgggcttcgacctgggacctcgaaccgctctgcaccccagcccggtactcgtcgggtagtg

SEQ ID NO: 97751 - DNA, 472 bp, Zea mays
  Clone ID: MRT4577_2065C.1
atcatagcactaaagattagcctagcatcacatgaattaaaaatgctatacttaaactagcaccacagacaaacatgataggatgccgcgctgttcaacgcttcggagaaacctatgcatagcataaagctgctagctgctcgacacagacgccaaggctggccatcgcccttggccttgtctttgttgcactacaagagccagccggtaccaccttgagctaccagcaccacgtgactcactcaaaacctgacgaactccaagaaactgctggcaaccagatggatcaccaccaacggacgcacaggttgttatagccgcagatgcacttgatccgaccgcatcatttttagctctatgctcgcttctccgtcagcaacgacaacagacacccgcgccttgctgttcctgcactcataaacaaagaccatgagtgcagtaatccgctaccaaagatcaaaaggcaggacct

SEQ ID NO: 97752 - DNA, 737 bp, Zea mays
  unsure (1)..(737): unsure at all n locations
  Clone ID: MRT4577_20660C.1
acggcgtgggcctcctcgttgccggactgnacgagtcaggagcccacctgtactacaactgccccagcgggaactacttcgagtaccaggcgttcgccatcggctcccgctcccaagccgctaagacgttcctggagcgcaggttccagggctacgacgactacaccccggagcagctcgtcagggacgctctctccgccgtgaaggagacgctgcagggcgagaagctgtccggatccaactgcaccgtggccatcgtcggcaggaaggacgacggcaccgtcgagccgttcgaggtgatcggcgcggcaagggtccaggaacttatcgactccatggagatggaggtcgccgaggagacaccgactgcggaggctgctgctgctagctcctccgtgcaggaggagggggagaggggctcggatgacgctgctgcacccatggacatctagagggctgggatagggggatgaccacttcttttaaaaaaaaagtaaattatgttgctttggtttggactgacaatttatcacgtgatgcgaacacataacgtgttggttttggaggccagcttgccaccacgcatactatttgcaagactgcgagtgcttttgctctggttttggaggtaaattcttctgtggctcattctgtcatagattggaaatggccaaaaagcggatgatgttcgtatgaaaaaaaaaaaaaaaaaaaagggcggccgccaccgcggtgga

SEQ ID NO: 97753 - DNA, 337 bp, Zea mays
  Clone ID: MRT4577_20661C.1
cccacacgtacgcccactcttgctccgacttatgcttataccaatacaaaaaaaaaaaaggaacattgtaaaatttcaaacggtctaaacaaacccagataccatacacattcataccacttcatcactctacaatatcaacacttacctccccttacattctaccactttacacaacttcaaaactaccaaaacccaatccattcccaacttatttccaactatataactcatacaaccttacactcaccaaatttcttagacttccaaaccacccacatttatccacataaatatatcccgaatagcacatgacaaactccctttaacaacactt

SEQ ID NO: 97754 - DNA, 1239 bp, Zea mays
  Clone ID: MRT4577_20662C.1
cattgggtacctcgaggccggccggggagaagaacaaggaggagaaggcaaaagaaggccgacgcgctcgccgctgctaccgaaatcggccagacattccccaaaccctacgctcgctcgctcgccggagccctcgttgaaccgagcaggcgggcgaaggaggctcgacgatgttccgcaaccagtacgacaccgacgtgaccacgtggagcccccaggggcggctcttccaggtggagtacgccatggaggccgtcaagcagggctccgcctgcgtggggctccggtcccgcacccacgccgtcctcgccgccgtcaacaagcctgcctccgagctctcctcctaccagcggaaggtgttccgcgtcgccgaccacgccggggtcgcgctcgccggcctcaccgccgacggccgcgtcctctcgcgcttcctccgcaacgagtgcatcaaccactccttcgtctacgaggcgccgctccccgtctccaggctcgcgctcaggctcgccgacaaggcgcaggtttgcacacagcggtcatggaagaggccctacggcgtgggcctcctcgttgccggactggacgagtcaggagcccacctgtactacaactgccccagcgggaactacttcgagtaccaggcgttcgccatcggctcccgctcccaagccgctaagacgttcctggagcgcaggttccagggctacgacgactacaccccggagcagctcgtcagggacgccctctccgccgtgaaggagacgctgcagggcgagaagctgtccggatccaactgcaccgtggccatcgtcggcaggaaggacgacggcaccgtcgagccgttcgaggtgatcggcgcggcgagggtccaggaacttatcgactccatggagatggaggtcgccgagcaggcaccgcctctggaggctgctgctgctagctcctccatgcaggaggagggggagaggggctcggatgacgctgctgcacccatggacatctagagggctgggatagggggagactcatatgaaacccgtacactgcattccgagttccaaaagactaagaccacttctttaaaaaaaagtaaattatgttgctttggtttggactgacaatgtatcacgtgatgcgaacacataacgtgttggttttggaggccagcttgccacgcatactatttgcaagactgcgagtggttttggaggtaaattcttctgtggctcattctgtcat

SEQ ID NO: 97755 - DNA, 2988 bp, Zea mays
  Clone ID: MRT4577_20663C.1
atggcgcaaccgaagaggatgcaggagtgggaggctgagcggctgatttgtggggaccccgtgtcggcgctgaggcccgcgctagagtgggccgtgcaggtgaaatattttgggtgttacacggagcgacctccggccacggtgacctatcaggagttcctaagcacgcagccgcccttgctcatcaaggcagaggatccgttggacaccgacgtgtggttacacgtcgtggagtccaagtttcccctcctcacgggagactaccctgatgacaccaagactcgcttcgccgcgcagcagcttcgcagacctgctcggacatggtgggaccatttatgcgccatgctacctgctggtcatgaagtttcttgggaggaattcaagactgccttcaaaggacaccacattccagctaggattcttgaccacaagttgaatgatttcctagcactaaatcaaggaacccatactgtgttgcagtatgcccaggccttcaacgacctgtgccagtacacgggttatcatgttgactctgatgaaaagaagaaagaccgcttctgcaggggtctcaacaccaagctgcgtgagcgtctcaacaatgtccgggctgatagctttaatgagttggtcaacctggccatctcacaggaggactgtattatagctcaccgggcagagaagaagaggaaggcaccaatgaataaccaacctcagcagcatcaacaattccgccagggaaatgggaacaagtgcttcacttgtggcagtgtgggccattatgccaagaattgcctaaagaaccagcagaggcagatgccagcaccaaatcaagacagaggaagaaagcaaaaggtgcaagttaggcaagggaagctcaacttaactactctggaggagttacctgaaggagcacatatcatgactagtatatttttagtttttaatcaacctgcattaattctgtttgattctggtgcatctcatagtttcattagccagaagttcggtgctaaatgtcaactgcatttctatcatacaaaagcgtcattcatgatagcaacacttgggggtaaaattgcaacgaaccaattaaaccgtaatgtgactatctcactgggaagcaagatcatcaaaaccacactcctgattttgggattagagggtatggacatcattctcgaagctgactggatgactcaacaccgagtggtgttggatgtagctgccagaactctagaaatccgttctcctacctttggagaccttgcattatatctacccagccaagactctactcgatcatatgcctttgctatgatagagttacccttgaagaagattctagtggtctgtgagtatgcagatgtttttcctgataacttgccaggaatgccaccagaccgggaaattgaattcatcatcgagttgcaaccgggaacgacatctatttccaagaggccttaccggatgccacccgctgaattggcagaattgaagaaacaattgcaagaattgttagacaagggtttcatccgcccaagtacttcgccttggggatgtccagccttgttggtgaagaagaaggatgaaatcttgaggctatgtacagattaccacccacttaatgcggtgactatcaagaacaagtatcatttgcctcgtattgatgttcttttcgatcagttggtcggagccaaaatgttttccaagataaaccttcgctccggctatcatcagatcaagatacgagcaagtgatattctgaagactgtcttctcaaccagatatgggctatatgagtatttggtgatgtcatttgggctgactaatatgccagcatacttcatgtatctgatgaattctatcttcatgcccgaactggacaagtttgtggtggttttcatcgatgatatcttagtgtacacaaagaatgaagaagagcacactggtcatttacatatagtgcttcagcgtctgcgagagcaccgtctttatgccaagctgttgaaaaatcataagagcctcaaatatatctttacccaggctgatcttaacatgagacagagaagatggctagagctaatcaaggactatgacctggaggtgcactaccacccagtgaaagccaatgtggtagctgatgccttgagtcggaagtcgaaatgcaactatgttatgatggattctcgcatcaacaccctgtgtgatgagttgagcaaaatgaagattgaagtgattccttctggtgctttgtctcacatttccgttgagccaacattgcaagaccggataatcatggcccaactcagtgacaagggagtgcaaattattaaggagaacctccatcagaagccagagaagtataagtgtttccgccaagatgggaagggtatattgtggtttggaagacgattagtggttcgtaaaaataaggatctcaagaagaaaatcttggatgaggctcatctctccaaattctccatgcatctaggaagcactaaaatgtaccatgatctgaagcccttatattggtggaccggaatgaagagggagatagcccgttatgtatcagaatgtgacacatgtcagaggataaaggcaagccacttgaaattagctggtgccttgcaacccctatcaataccttcctggaaatgggatgacatcagcatggatttcattgtgggtctgcccaacacatctcggcatcatgattcgatttgggtcattgtggaccgattgacaaaagtggcaaattttcttccagtgcacaccaccgataaggctcagaagtacacagagctgtatattgatcaaatcgtgtgtttgcatggattaccccagaccattgtttctgaccgaggaacccaattcgttgctagattttttgatcaattgcaagagtctttgggaaccaagctaatgagaagttcagcttaccacccacaggctgattgtggcggaacctcccgaattattctagcttaa

SEQ ID NO: 97756 - DNA, 1344 bp, Zea mays
  Clone ID: MRT4577_20664C.1
atggctgagatccatgccttccgccccagcacgatgaccaagagatccaggctcctggccgctgcgctgtgccgcgtccgggacccggactccaccgtgcgcgccacgctcgtctgcgccacggcgggcgccgcggcgctggcgccgctcgccgacaccgtgctccacgagccggaccagtgcgcgcagctggccgccgcgctcgccgctgccgtcgccgtcgaggcctcggagcccactgacgacctcgccgcgtacctccggaggctcctcccgcgcctctacaagctcctccgcagcgcggcgttcaaggccaagccgcgctcatctccctcatcggcgctgcctcggcagcctctggcggtggagccgcctccgccgccttgcctctcccgcccgcgattcgcctcccccacgcgaaccccccgccgtgattcgcctcccgcacgcgaaccccccaccgcgattcccctcccgcccgcggcgaatcccccgccatctgatccgccaaccggcctccctccctggacgcgctgggggcggtggctggggctggtgacggcggtgtgggtgcagtgcatctccggcaacaactacaccttctccaactactcgcacgcgctcaagacgctcatgggcctcacgcagctgcagctcaacggcctctccgtcgccaaggacgtcggcaaggcgttcggcctcctcgcggggctggcgtccgaccgcgtccccacctggctcctcctcgccgtcggctccctcgagggcctcctcggctacggcgcgcagtggatggtcgtgtccggggccgtcgcgccgctcccgtactggcagatgtgcgtcttcctctgtctcggcgggaacagcaccacatggatgaacaccgccgtgctcgtcacctgcatccgcaacttccgccggagtaggggccccgtctccggcctgctcaagggctacgtcggcctcagcaccgccatcttcaccgacacctgctccgcgctcttcgccgacgacccggcctcgttcctcgtcatgctcgccgtcgtgccggccgccgtctgcgcgctcgccatggtgttcctccgcgagggcgccgccgctgcggacgaggacgacgacgggcgctgcttcgccgcgatcaactcgctcgccgtggcaatcgcgctgtacctcctcgccgcggacctcacggggctcggcggcgggggcggggtcgtcttcgtcgccgtgctcctggtgctcctcgcgtcccccgctgccgtgccggcgatcctggcgtggaaatcgtgggcggagacccgcaaggccgcgaacgccgacctcgaggaggcggactccttggcc

SEQ ID NO: 97757 - DNA, 346 bp, Zea mays
  Clone ID: MRT4577_20665C.1
atttattttttttttttttttttttttttttttttttttttttttttgggggggaaatttaaaaacccaaccataccaaaacagaacattctggaagcattacacttaaaaataacctcatagatatttccttggtgcccatattaattctaacaatattattcaaccaaaaactacacctctgccatcagtattcctttttgttgccaacctctcctgtaataacggctgcatcttgtttgtgaccaaacacgcaaccccaccttgtctgcttttctcaatttcttcttaccaacactttccctttacaataagccaataagaaccattttaggcgtgaaatccc

SEQ ID NO: 97758 - DNA, 341 bp, Zea mays
  unsure (1)..(341): unsure at all n locations
  Clone ID: MRT4577_20666C.1
gaaaaatcccgttcgggccgaagcaatccctctctgcattaacagcaaggagcgctgcaactcgcacttgcagtttcgacttttcgagatctgcgccgctgttgctgtccccactcggcctcccctctctccccttcttccagacccttcccttcttccgctcacccacgcggacgccggctgcccccttccctgactgaccccctcgaggcccctcgatacgatacttcgggtgtaggggagcatgcggannnagaaagnnggcgggcggggtggccggagtgggctcaacagccaatttggtccgctaccccgcccgcgcccgcccagccggaccccta

SEQ ID NO: 97759 - DNA, 1012 bp, Zea mays
  Clone ID: MRT4577_20667C.1
ctttgtcccagcttcacttgatgtcggggattctttctcgcgttctggtaggagagggattcaattgggttggttgtaggcgccgagacaggagccctcatcttcgtcgccacggtcaccgtcgcctcccgaaccgttcacgtataacttcggcgcgggaagtaccggaggcggaggaggcgatggtgcagtagcagcgctccccgcgccgagacaggagccctcttcttcgccgccacggtcaccgtcgcctcccaaaccgtttacgtacaagcagaaggcggtgtggcgctggcgctggaagaggcagagggggcgcggcgcgggaagaggcagaggcggcgcgacgggaccgaaactctcttatttgccgtcgccgctttcacggccgttctccggtgacgaggagttttttgcactgcgccacgattggctacagctgctagatggcaagaagacatacctccgtggtactgtcgactccaattatgccgactctaacttcgtaaccccaaaacctcttacggacgcagtattatgtaaggagtcactatcagatttggtccttagaggtgcaagaaaacctatcacccagcaaaagttcaagatacttagtgaacattatgtgtgcttcagaccaatgcgaacggatgggtcacagttttacagagcgttccttttctcttacttggaaaatcttgggaaaatgcaaggtagtcaagctgaggtgactcgcttaatggaatgcgtggcaaggtccaaagtgaatttctgtcgtttagaatggaataaagcatacttctcaaatccaaaagcatttttctcaagtgttgtttctgaatttgagcacttggtcaattcagttgcaaatgggctgaatgctgatgagctttacaagataagcgtacaggagatttcgtcatccaggattctttgtttgcttagattgctgacagaagttcatatccgtacacatgaagtggactacaacagagaactgagtcagaatcgg

SEQ ID NO: 97760 - DNA, 359 bp, Zea mays
  Clone ID: MRT4577_20668C.1
tgggacgatggtatccgtgtcaggtgatttcatactccaggttgcgagtatgatcaaaatcatagttgaaaattagttaagtaattgtaatgccaaatagcaaattctcaaagagactaacaacctatggagggggagtatttcaaacactaggattgttcgatacataagattgtgacgatcctccagctacagaggaatcgactgaggtcctttctactaccaagatcaagaggcatatcgcacgtatgaagattattcatatgatctgtgatgcacaaaggagatccttatgatggccaaggactgtattatctaggatagtgacaatctactagaggacggatctgaccaagcca

SEQ ID NO: 97761 - DNA, 435 bp, Zea mays
  Clone ID: MRT4577_20669C.1
gacagaaggaacatccaatggctccattattcactcagggcataacaaacaggctcatgccaggcggttgcttattattattacgaccattattattaccgcatgctagcgtgggggggactacgaactaaccttttggtttacattttggcgagggcgcaccccccggcctttattggggcctagctaccactggcaagagccatgggtccaacagggacccctgcccctaccaagtgaagctggcccctggttcaacgcggagctggtggcaggtctgcttgtagcagccgacccccgcgttaatctgggcggggttgttgccgttaccctcgagggcgccgtcgatggccccaatggtggagccgaagccctcatgactgacacggagcccgttgtagatcccgaatccaagggcaccattgaacccgacca

SEQ ID NO: 97762 - DNA, 370 bp, Zea mays
  Clone ID: MRT4577_2066C.1
gtctcctttgcattatgagtgcatcatgagatctggacaggatgcctgttttttggaggaccagctcggcatggcaagtggaagagcaactccttctactgccgccatgccatcgtccgctgtaaaataatcaggattctccaacaccggcaccaaaactgacaccaccgccccatcaggctagtgcctgcggtactagaccaaacacctccgctcgccgtcgagccatcaccatccccgctgagagaatcaagaagccgtactgtaaatctgccgggaagctagcattttcccccccgccccttccactattccggcggtgcgaccttttcaaattttcgcccccgggccgagtagtgttttttttttc

SEQ ID NO: 97763 - DNA, 211 bp, Zea mays
  Clone ID: MRT4577_20670C.1
cccccacccgagaaaaaattcgaatccgaatccctggacacccatggagggtgatgaaaaaaaaattacaaacatactgttttttctctaaacacgggttttggccgaccaccccccagattagtaataagtctgggccgccgctaaacaccgttacaaaatttggcctggttcccggccctccacgtaaccacccctatttacaaccatc

SEQ ID NO: 97764 - DNA, 238 bp, Zea mays
  Clone ID: MRT4577_20671C.1
ggccaaccagaaataagaagttacatttccagattcagaaaaaaaaaaggaaaataaaaacataggcttgtacctcggcctgtaccacccgctggtggtgcttcactccatcggctgcaggtatcatacgtgtcatctttgtgaacttggagggcggctgctaggaccgggtccatagtggttgggcttcttcctgggggccttcgcctccacgagaatgcttgctaattttggctga

SEQ ID NO: 97765 - DNA, 255 bp, Zea mays
  Clone ID: MRT4577_20672C.1
aaataatttttctttactataattaccactaatatttaaatgcattattttaatattagtggtaattatagtaaagaatttttctttcaagtgcttgatttttacctttagaataaaattttgttaaaaaaaaaaacaaataaaaaattaaaaggggcggcccctaaatagggacctttttaccccggaaataaatcccggcccggaccctgaagggttcccatttttcccaatggggggtcgaattaaaccttg

SEQ ID NO: 97766 - DNA, 371 bp, Zea mays
  Clone ID: MRT4577_20673C.1
ggggaaaaaaacacacccggggaggtgggtttatttattgggaaacaccgccaaaaacaaggggcaagggggcgggggaaacttaaaaaaggggaacaaacctaccggggggggttttggaatttggttatccaaaaaaaaccaggggggttttattggttatatgaacggagggggagccaaaaccggggactctgtaggggaaaaattcaagggggggggtcagggtcaaggtcagggtcaggggccctgttttctttgggggggggcatgggggggagccctttgggcaagagggggttcaacatttcccaacgccacacacggttttttttttttggccccttgggtttttttttggaggaggggaa

SEQ ID NO: 97767 - DNA, 552 bp, Zea mays
  Clone ID: MRT4577_20674C.1
cattgggtacctcgaggccggccgggaacacattctctgaacgagaagagttacctgcccttctatcatatggtcaactgtcccatccggtggtgagaccatggagttccatctcatccgcgcatggggtgacggcggcaggcggccctagacctctccgcatcgtgaggtcgcttccgctctcgactcgccggcatgcgcacgctcaatcaaagtcgatgcctccaggtaccatcgcggcacgcgccacatctatgaccgctgctcgcgtcgcgctccgtggtgagcggggattatcgccctaaccgcggccgcatcttctcccacatcgtgctccacacgccgcacatcgtttgatactatataggcgatccggtatttcctttccatgccccagaacttgaaataagatatatataccatgaaatagcgcgcgcatgtgcagaataatggatgtgcgaattctgactaactaagcatatcgtagtatctaaccgcattcaaaggtcgccctcttcttgcacatggaaaaaaaaatgaataaaagcggcc

SEQ ID NO: 97768 - DNA, 304 bp, Zea mays
  Clone ID: MRT4577_20675C.1
ggtgtaagtttttgctcctccccgatgcggaggagaagctgtccaggcaaaataatatcaaactaccctagaaaaagcggcacccacagaagcgcggggcacacccccaaagacgggccatcccttttttttgccaagagccacagaagaggacccgatgttctcccacaatacctgcacagcaataaacccaaatcccgataatctcccccatcccgcgcaccgccgggacaacctccaaaggcggcacgggcccacccagccgccaaagcctcccataaattgggcgacgctaaaccccagc

SEQ ID NO: 97769 - DNA, 368 bp, Zea mays
  Clone ID: MRT4577_20676C.1
ctcactacgttggcagtgttaactatgagttctggggaggacgagagggttaccaagcggctctgagtactgatatgaacagagaacttggccatttggttaactatcttcatgctgctgtggactacaagaaaaagatgggattgaacggaccactatgggtggaccctaagccacaggaaccaggggaacacctggatgactgggatggtgcgactgcgttagctttggtactgaggtacggtcttacaggagagttgaagattaatgcttagcgcaaccatgctagtgtatatggacacagctgtcattatgaattggggactgcacggattaatgggctgcttggaaaaatggaagcaaacact

SEQ ID NO: 97770 - DNA, 1022 bp, Zea mays
  Clone ID: MRT4577_20677C.1
cccacgcgtccgcccacgcgtccgcccacgcgtccgcccacgcgtccggtcaagtcaatcaccaaagaggaccttgagaactacattgcaactcattatacagctcctagaatggttatcacagctgcaggcaatgtgaaacatgaagacattgttgagcaggcaaagaagttgttcaataagctatcaactgaccctacaacaacaaacatgttggtcgctaagcaaccagcctctttcacgggttctgaggttcgaatcattgacgatgacatgccccttgctcaatttgctgttgctttcaatggagcatcatgggtagatcctgattctgttgcactgatggttatgcaatcaatgcttggttcatggaacaagagtgctggtggaggaaagcatatgggttcggagcttgtacagaaagcagcaatcaatgacattgctgagagtgtaatgtcattcaacatgaattacaaggacactggtctttttggtgtctatgctgttgctaaggctgattgcttggatgatttggcttttgcaattatgcatgagatgagcaaattgtcataccgggttacggaagaagatgttatccgtgcacgtaatcagctgaagtcctctatccaactccaccttgatggttcaactgccgttgttgaggacattggccgtcagctgctgacctatggacgaagaattcctacccccgagctttttgcaagaatagatgctgttgatgcaagcactgtgaagcgtgttgcaaaccgcttcatctttgatcaggtactgttttggcaacctagaacctctcaccctgtagaacgttcagcatctttatgcttccttctctagtaaattctaaaggtagctctttttttcgttgggcactcattatttaagatgtactactctttttgtcgtgaagcaatatcatgctgtttttgtggtagacctctagtgataggattgtatggtttcatgttgtgcttcttatgcttacaactaatccattggatgac

SEQ ID NO: 97771 - DNA, 297 bp, Zea mays
  Clone ID: MRT4577_20678C.1
aaaaaaatcatacccaaggggcccctttttttttttttgaaacccaacccaattcttaaagacatacccgatcgaaattcgtaagagtccaaactttgcccaacggaaagcttactttgcccgagtttaaggggtttttgaacacaaataagccaaagcaattgcccacatgttgggtgacccacattttttttacaaaaacaatggcacaatggtcctttaagaaaccagcggggccgtggccggggaattggccgggccttttgcctccggagccaccagttgggggatgttttc

SEQ ID NO: 97772 - DNA, 144 bp, Zea mays
  Clone ID: MRT4577_20679C.1
tcgcgcgcacgcgtggatccaccaattaattaccgacccctgcctgcatgccaaccatctctatatatagtgagatgaataatagctggacgcatggacatacatagctgctgcctgaaagaaatagccattcacacacacaca

SEQ ID NO: 97773 - DNA, 389 bp, Zea mays
  Clone ID: MRT4577_2067C.1
ccgtcaggcccccattaaatatattaacaaactcccctttacgacctttccattcattgggaaggcgactgtccagggagggggggagtccatgacccatctctttagatctcgacggtttccctgtgccactgaccgcagttacattgcgtgcgctgcgcacatgctacactggccctcactattcctggaaggccatcaagtacaaagtgtggagttttaatcgagtaatacgggaggccatgttatatggcgctttaactgatcctgctaatacggctctgggttattatatccatctacaagaaagaagtttccccgacgagaagttcgtgctcaagcacaccgccctcggtgtgcttttcatggccaacgccgggcctaacacc

SEQ ID NO: 97774 - DNA, 191 bp, Zea mays
  unsure (1)..(191): unsure at all n locations
  Clone ID: MRT4577_20680C.1
gcggagggcggggggcttnatttcaaaaaaaaggaatcagggggcggctaataaggcttccttccgcctgaccaggcgacatggatatggcgaccgagaagaaggcaaagccagaccttaaaaagaaggcgatgccacctgttattgtaacccaacgcgggccgtngggcccattggagttgntatcatga

SEQ ID NO: 97775 - DNA, 207 bp, Zea mays
  Clone ID: MRT4577_20681C.1
tcggttcaagactccgcgcgacgagaacgggcacggtacgcacacgctgtcgacggcgggcggggcgggcgtgcgcggctcgagcgcgttcgggtacgccgcaggcacggtgcggggcgggtactcgcgcgcgcgcgttgtcgtcttccgcgtctgcttccgccccgttaacggcagcgagtgctttgacagcgacattctcggggt

SEQ ID NO: 97776 - DNA, 690 bp, Zea mays
  unsure (1)..(690): unsure at all n locations
  Clone ID: MRT4577_20682C.1
ccggggnggggatgtagctcggcaagccactgcagcgagctcctcccccataaaaaataaatttaatatcgaagtagacacatggtctacatatcagatattaaactgataagaacagatactacacttgatcttagccaaaaggccgagaaaggtatgctttgtacagccggcctccgtctccttatgtagcgagcgcgcgcctccgcgctgctttggctgggcgaggtgggactatctaaaaacggatgaagctgaacgcactgcatcccccgtgccgtgcgagcgctggctgctgcgtccgtctggtgctacgttaatgggccgcggcccagcgggcgttgttgcctcctctacttattagttaggcccaaccgttaaactccggggatgcagcacattcctacgttcgctgttcgtccacaaaaattccttacttacaacatctataattttgctcgaatgagaaattcctacgtttccgtctattattattatccctcccatacacacagctaagaacagccgcatcaagacaagcctctcccgtgcatgcgttgctggctgcatctccatccatgcatgacctccggtgagtgtctccctcccattgcccacgaagcgcagcgacgtcaagaaacaagagggagggttgatccatccaaagatgggattccaagcgatgcaatg

SEQ ID NO: 97777 - DNA, 412 bp, Zea mays
  Clone ID: MRT4577_20683C.1
gccggccgggttcgggatcaataaccatttagcatgaacacttacaagccttatagcgagcgtgccaaacaacatagcaatgcctgtgctagatcccttttggaattaatggaacgcaagcaaaccaatttatcagttgctgttgatgttaccacaaaaaaggagttgatttctattgctgatgccattggaccttacatttgtgttttaaagactcatattgacattgttgaagactttgatgctgacttgattcaacaattgcaagaattagcaaagaaacacgactttttattctttgaagatcgttaatttgctgatattggcaacactgtaaagcatccctatgcaaacgccatttacaagattgcctcatggtctcacatcaccaatgctcataccgtcgcccggc

SEQ ID NO: 97778 - DNA, 1309 bp, Zea mays
  Clone ID: MRT4577_20684C.1
cctgcaccacaggcctcccgcgctctattctctctatctaccactactactacccagcagcagcaggccagcacacaatacacacactctaatctctccacacagccaacacagatacggacaggacaggaggatgaagctgggagcaaaaggcctcggcctcctgctcctccttgtcctgcttgcgctttgctccaccattgaagtcggcgaggcaagaagagaccggcattggaggtcgtcgaggacctcctcctctcagctgctgaagaaaggcaaaggaaagaagaccagctcccgccgccaatacggcagcaaccggccaagtccgaagccaccggccagctcgacaccgagctctggtgccggcggcaaaggaaaccagactccgtaccaaccaagcccgaatgtccctcacatcccgaggccaagcccccctgccaatggcagcgcccattccactcccaagccgccgactcctccaagctgcgggaaggctcatcagcagccatcacagtcacagggcgcgcactcctcgcttcatcgcagtattcattttcttttgccgtggagcctcatctgcgcagacaccttggtactgattttttttggcgcatggaatctccacagtacactttttcagaatcccgcgtcagaaattttattttttggcatcttccctctgctgttcctggttctctgaccacactggtcagaaccacctgaactggcccttggggcggttgaactggtcctgaggaccagctcaactgcctatatatacttgactctccccttctcttctcccacttcattcactcttgccttagtcgcttcacaacctttagagccactctttcacacacctcaaccggttcacagtttcaccaccttttccatcatggtgcgtcgtcgcaacccctctgtgattgagtttagcagcgactccgacgagattcaggaggaatctcccgtcccctctcctccgcctcgtcgctccctctctaagagaggacatggctctggtcggacggatggcgagggctcttccatgccctcgcagccgactcgcaggagacgccaaaaggttggcgcctctcgtcctcgtcgtagcacgtcttcctctgggtatgctccctgccaggaggaggatggggctttcgatgacttcgtcgaccttccggcgcctgatgctctctacgtcaccggactgcacatgcatccggcgaaggtcagccgcggtccgcatgattctcccgtcgacttcactctgaagggaatagcccggccggaacacacgagggtaccc

SEQ ID NO: 97779 - DNA, 837 bp, Zea mays
  Clone ID: MRT4577_20685C.1
cccacgcgtccgcccacgcgtccggccacgcgtgcgatccctcctcctgtcctccacccaagccaaagcccctcggatcggatccggtctcctccgtgtcccattcgccacgcagcggcgccacaggagacggagacggagatgaagctgtccatccagtcgctcgccaggaagctgtccctgccgtccccgaagcggggcggcggcggcatcgtcgaggacgggaagaagaagaagaagcgctcgctgtcgcgcggcgaggcgccgtcgttcgcgtcctcttcttcctcctcctcctcctcctccgccaccacgacgccgcggtccgtgctggcggcggcgccggcgccggcgctggagatcccgcggcgggagctggaggccgtgctgcggcgcctgggccacgcggagccgtccgacgccgagctcgacgccgtggccgcgctcgccgcgcagcccccgccgtgcgacgccgacgccgacgccgacggcgacctcatggaggcgttccgcgtgttcgacgcggacggcgacggccgcatcaccgccgaggagctccgcgccgtcctggacgccgtcctcggcggcgggcccgacgcgtgcagcctcgacgactgccgccgcatgatcggcggcgtcgacgctgacggcgacggcttcgtcggcttccaggacttcgcgcgcatgatgatggccagcgccggcacggccgacgcacgggccttctagtttagtgatccgccaagcatcgccgccatagccctgatgcgcgccggggaagggatcatttaaaatctactgcggccgcgagcaagacgagggcagctttttgttgtc

SEQ ID NO: 97780 - DNA, 2104 bp, Zea mays
  unsure (1)..(2104): unsure at all n locations
  Clone ID: MRT4577_20686C.1
ggggccgcaaacccatggaccaagcgagcacccatcccgtgcgccgacctcgaccacgaccacgagcacgtggcatgggagatccgtggccaggagatggatgcgaggcagcagcggggtgagaggaagatggatgatggggaggctgggaaggtggctcagtggaggaggcagggcctccagaccgtgagggagcccgcttcgtacgagcatctgggttggaggaatcaacccatttttttacgtagcgggagtgtttgacaggtttttcgaagtgggtctgggtgaccacttcgatcatcttcatgataaagggtgcatgaacacaccctttaagaggagaccaggaagcacggacgatctcttcccagatcatgtcaaacacattgatgcgggcgagactgtttggagtaaggaggaggaggaggaagactcaactctccccaaggacgttcatttgatttccgcccttcgggagaacggtcatccgggacaaagaattaaggtacctgtagtacctatgcatgttagcagttgtccagaactcccgctcagtagagacatgaaagagttccgtctcttcccgcatgggcagccgaatgtcatgcactcgcatgttgctgccctgaatatctgtatcagagaagcccanaatatgggcaaaacgacgataactgactttgtgccagttaccctggatgaagaaatacaatgactgggtaatcatacccatcgcttcctcatctactttctttatccagagggtggcatagaactgagctaccacctcatcgttccaggggtattccatggtcataatgttacgtaacccctttctctctaagtgaacgagagctgacgacatgtcaacatctcccatattctacaaccctcccagtcaataaatctatgtcggacgactgggtgtttcttggtaagaatgacagaattgtagaagtcagcctggaaaagattccagaaccgagggtcctggacaccaggatgacgaggagtgagagtagggttggaaaacctcagacgctgaagggtttctattcccttctgagtgaagtcgatgggagattcatgcggaccgcggctgacgttcgccggatgcatgtgcagtccggtgacgtagagagcatcaggcgccggaaggtcgacgaagtcgtcgaaagccccatcctcctcttggcagggagcataccctgaggaagacgtgctacgacgaggacgagaggcgccaaccttttggcgtctcccgcgagtcggctgcgagggcaaggaagagccctcgccaggcatccgaccagagccacgtcctctcttagagagggagcgacgaggcggaggagaggggatgggagattcctcctgaatctcgtcggagtcgctgctaaactcaaccacagaggggttgcggcgacgcaccatgattgaaaacggtggtgaaactgtgaagcggttgaagtgtgtgaaggaaaggctctaaaggttgtgaagcgaccaaggcgagagtgaatgaagtgggaaaagagatgaggaagagtgaagtatatataggcagttgagctggtcctcagaaccagttcaaccgcccccatgggccagctcagctggtactgaccagtgtggtcagagaaccagaaacaacagaggaaaaaattctaatttgcgcgcagctgctgggaagtgactggacaggaaaaaaaattgggcgcccctgacacgcatgcatggctagtgcgcgggcatagcagaaatgtccaagaaaaatctgcgcgcgctgagcagaggagaagtgaccagactctgtatgcacaccaaaaaaaattctgcatgcacacccctgctgaccggacagaaaaagtaaaagaaatccctgcatgcgcacccctgctgttgaccggacaacacaaataaaagaaatctctgcatgcgtacccctgctgttgaccggacagcacaaaaatctgtgcgcgcagacaagaagcgaccgaaaaaaatactctgcgcgcgcgcagcgagtggaagtgaccggacaggggcgctgacagacgctgctcagaggaaatgaccggtcatgcaggatgcgaccgaaaaa

SEQ ID NO: 97781 - DNA, 118 bp, Zea mays
  Clone ID: MRT4577_20687C.1
ctggatcctactctcttattaaaaagatttttgctgacaatagaggaacggtgcctcacgcataatgatcaaggcaagctgagcttcgaccagcttgggggcatatcctcgaggaatc

SEQ ID NO: 97782 - DNA, 601 bp, Zea mays
  Clone ID: MRT4577_20688C.1
tcgagcggccgcccgggcaggtacaagctttttttttttttttttttttttttttttttttcttttagaatctggaaatgctacttgttattaatggttggccacttacataatccaaaaaattttattattgacttccaactaataagcaatctaaaagagggcccctccaatgttgtgttgatggtaggaggctgctgggttcgtcaaagcaagttggtcaaagggcaacatttgttgtacttgtaagtagggttgcggggttagccgcaaactgatggtagaaaggcattaactgttgctgagttaacaacgaagcacggcttgttgctgctagctggctaactggctttaatattcactagcgcaaattacctttggtagctcaaggcggccaattgcctaaatggaataattcatctacgacaatagtaggcctttgctcacttggttaatggtaaaaccatgatgctgctaacaaccacacaggattagtggagatactctgttaaatggaagaaattgtggaagctaataataaagagaaagggttgacagatctactcggccaaaacaggtagcaccatttgctgcttctgct

SEQ ID NO: 97783 - DNA, 428 bp, Zea mays
  Clone ID: MRT4577_20689C.1
ggcaagaagaaacggcccccctaaaatacagaacagatgatgtcactggctaacagatcgacattcacgggaaaactacaggtgcatagaacatttgctgagaagacattatgcgcgacagacaatatggacggaattttcgcattccacacacacagctatgaaggatgaacaacaccaaactacacatgctgagggcgccgcgacaagagaaccattatgacggaggacgtcatgaacaattatggacattatagggcatggacttcttgcttcagcctgtggagcgccattctgatggtacctgcttgggtctgaggggcagaacgcgaactgggttgagcccagaccatacttttatcgcattcttgggctgcaggcattatttttacttgaacgctgatcgagagatgggacaggaacacccc

SEQ ID NO: 97784 - DNA, 258 bp, Zea mays
  Clone ID: MRT4577_2068C.1
ggaggatcaccgacgtgatgatctgtgccggggccagtggcgtctcctcctgcatgggcgactctggcggccccctggtctgccaaaaggatggagcctggaccctggtgggcattgtgtcctggggcagcgacacctgctccacctccagccctggcgtgtacgcccgtgtcaccaagctcataccttgggtgcagaagatcctggctgccaactgagcccgcggctccctccgaccctggtctccacagagcctca

SEQ ID NO: 97785 - DNA, 1365 bp, Zea mays
  unsure (1)..(1365): unsure at all n locations
  Clone ID: MRT4577_20690C.1
cattgggtacctcgaggccggccggggtcgcggcttccttggctcggcacccagacctcagtgcggtgcggggccctgccgagtgccgcacgcgcacgcacgccccgccgggcctataaatccttgtcgccttcgcccttactcgccgtctgggcccgcgagggcgcgattggcgagccggccggggccccatcccccatccccatccccatccaagaaatactacgcccatcggatccaccgccgaggcaggcagaggagcacacaccccaggagctgaggaccggtttcgccatggccgccaagaagctggtgctcaagctggacctgcacgacgacaaggacaagcagaaggtgctcaaggcggtctccaccctccacggtatcgactccatctccgtggacatgaagggctcgaatctgacggtggtcggcctggcggaccccgtcgacgtcgtggccaggctgcgcaaggtcgccgccgccgaaatcgtctccgtcgggccagccaaggaggacaagaaggagggcgacaagaaggagggggacaagaagaagaaggacgacgagaagaagcagcaggtcctgtggtacccgcacccgtggcacgccgccgccgcagcgcagcagtaccacccccacccgtacccgccccagtacgccgtccacagcgccgaggaggaccccaactcctgcgccatctgctgatccgaatacccggtcccgtcttctttttgtacatctagctcgcctgcctacctacctacctacctacctacctactcaggctcgatccaccacgtcgtcggtgatcgccgggataggggccagaccgccagagcggctgtgttggttgcctgctgctctgctcatctctatcctgcgggcgtgggcggtgggccgtggggttggtcgttggcccgtccacaggtcgttatacgatggctcgtgcaaaatcatacacgcgaccccccaaccataaccatccaagagtagctagctgttggggtttttcacttttcaggctgttgctcatcagtgtcgttgtatagtgtgcagtgcatataatatatgtggtttgtgtccttgctatttaggtgtttgtggcacgaaactatatatatagagaaattttctctcgtttataaatgttaccatgttatgtaaataacacgctttcacttctatttattcaagtgcatattttttaaaaaaaaaaaaaaaatgtcactaacgatgggattgagcacctacgcaactacctgaacctgcggtgtgagatcgtgcctgccactcttaagaagtcttccaagggggggggccgtccattccgcttttttttttttgttgaccgcncaaggggcc

SEQ ID NO: 97786 - DNA, 405 bp, Zea mays
  Clone ID: MRT4577_20691C.1
aactaacccattcaagggaaatggaaggataattttagtaccattacatcatgtctaacttatggaacaaaaattacaagcatactttcttttgacaaaaccccggaaaccccttctaaacaagttacataatagaagtgacttggtaagtcacacacacaaacacaccatataatgacacggcaagaaggagaaaaatgaaaccaccgtttcacttaatgcctctacaaaaacaaaagaactcactcgaatcaacccccctataaacctagggggatggggaccatacatgccgttccacttaaacaagacgcccctatgataaatccatggaaacttcggccttgattcttgatctaccggtgaataaatcacaaaatggagcgcgcccccatctgacctttt

SEQ ID NO: 97787 - DNA, 169 bp, Zea mays
  Clone ID: MRT4577_20692C.1
cccacgcgtccgcccacgcgtccgtcacgcgttggtcagcctgccgttgaatctgtactcgggcctgtggaacgccgactactgggctacttgtggctgtcgcgagaagacggactggtttaactcgccttttgttgtctatctacttcggttttcactttgactgttt

SEQ ID NO: 97788 - DNA, 372 bp, Zea mays
  Clone ID: MRT4577_20693C.1
aagaacagagagaccaccctcctctcctctggccgccaagggaggtgagcatctcccgtggtcgggcctgacagcacggatgcaaagacgaacccgctatgccacaaaagggcgtactaatggagcttcaggacctgcgttaagcgaccacccaacgatcttgcacgggtacgtcctgcggcccagggcctggtgcattcacaggcagcgacgattccaccacctgacactcccggtgctagccggcgctctatcagtgcacctgcattgtccaccagaatctccctacgaacctgcacaggatgcttttcagacacaggcctgaagacctagttgccaaaaaagtgaggcttcttgacagggccctcgctg

SEQ ID NO: 97789 - DNA, 407 bp, Zea mays
  Clone ID: MRT4577_20694C.1
aaaagaagggcgggctcagcaccacagaccagtccggcgcccaccgcccgggcagggatgaccttagaatggacgaggtcaactacaccaagttatcctatcccgtccgtccctacgcagcgttcttagctgtctgcgtaccgtaccttgacctaagcttgctctactctctactttggagtaactatatgataataatttacctagcaccatgcatgtatgctaccatacatacttccctacaccggtacgtgtatcatatcatctatgctaacagaatgctatcctaactaaatcagtcacgtcgtcaagtatataatatggcaggttcacgtcagggctttgtaatttgatagcctacttcacgactactcaataatcaagtaatgtaatgaaagcttggcctt

SEQ ID NO: 97790 - DNA, 206 bp, Zea mays
  Clone ID: MRT4577_20695C.1
caacgctctctagcgtccgagactccaagcactagcgcggcggagctactgcagcgaccatgggtgtcctggaggaccagaggatctccaatggggagcatggctgccaggaaaggaccgtcgaccctttctctaaggaggattggtatgacatccagggaccgtcggtgttcagtgtccgcaacatcgggaagactctcgtatcc

SEQ ID NO: 97791 - DNA, 632 bp, Zea mays
  Clone ID: MRT4577_20696C.1
cattgggtacctcgaggccggccgggaaactttcgtatacttatcgtccatccgccatattctagaatatatacacgaggggccctgacccctgctttcctttcctgccccgttcacaatagatgtttaccgtatacatcaacacgactagggatcccatgaactatgcttgactattcctgatttgggtgtagcttctactgtctctccgggttgcgctctgaccactcgcacagtcccgcgatgctcgcagacaaattcccgaactcaccctctggtgcttgctgccgctgaccatggtgacacccttcgccgtcttccagatcctcaatatctactgccagaactagcacctagtgatacgttcctcgaagacttgcaccacaaaaaagagcactcacgactataatacaaggctgatggcgcaaaaacatgccattataagggacccggcatgaactctgaactaccgcatttatcccagtgtaacagtgtacgacgtgatcaaggatttggaagagaccgagaagcgcctcagggcctcagaacacctattgttgttcactgtgggtagggtctgctcctgctcttcagaataatgtgcataatagcatgctgcgtaagatatctat

SEQ ID NO: 97792 - DNA, 220 bp, Zea mays
  Clone ID: MRT4577_20697C.1
tcttttctctcctcacgttgccaatgtttaaacccctggaaagaaaagaaaaaaagagggtcccctctaaaacccttcttccctagacctggctggcacccaacaatggcgaggccgccgcctgcggcgcccgccccggtgaggctccttctgatcttcgaaaacagccgtctccttcgacgtgttcagagggatgaaggtctttcatttttctggtttt

SEQ ID NO: 97793 - DNA, 166 bp, Zea mays
  Clone ID: MRT4577_20698C.1
agggacggcctggagccgctggaaaggatggtgcgcgaggtgttccaccgcatcgtgcgcagccgcgtcgatggcctagattcatccatgcacaatgccgactgactcgccgatccgagttctgccttcaattgcgcgatgcggcgaccgtaggtatcttcttgta

SEQ ID NO: 97794 - DNA, 2253 bp, Zea mays
  unsure (1)..(2253): unsure at all n locations
  Clone ID: MRT4577_20699C.1
gtgccgcttcgagcaaggggcgggagggaccgaggcagccgggggccgtgggcgctcgggagctggggaggcgggaagtgtgggggctctggaggtggagcggatggaccagggcttgcactgggggcccctgcctctcgtcattctcccgtgccccggtctctgtctctagtggcgacgactgcgctgcgccgccgccctactcaggtgcccaagtgtctatcttcgggactgcgccggcgacgagcacccaccagaaattgttggacctgggtctgcccctggaatcgagcttggggccaagctaattcgagctctgagcatttgatttctagcatcttacatgcaaaaagctagtacttggaatccgagcaagatctaacccagacagtgcagtggcaggtcttttcagttcagcgcagcatatcaagattgtctctgttaatttgtgtatgagatcagttaactgataaggatatgtaaagaaccaatgatcagtaatttttacactccagattgtagtatcctctaagatggacggaagagaatcagtcttatggtaaatcctggtgaatattcatgggaggtcagcaagttctggcctgactaagtctggtaaaaaaagttgcttcatctcagatcatcaatggtgagaatgaggttcccgaaacgttatctcatagtattgctgacattcatctgcacaaatgtttgctacattgagcgcgtgggtttctcgattgcttacactgttgcagctgatgccattggtgtgaatcaggccaacaagggcatgatactctctatgttctattatggttatgttttatcacagattcctggtggatgggcagcacagagaataggaggcagacgtgttctgctactgtcatttgtattgtggtctatgatatgtggtttaatcccactcgatcccaacagagtaaccattctggtcctttctcgcctattcgtcggtgtagcacaaggtttcatattccctgccattcacactgttctggcgcagtgggtgccaccgcaggagcgctctcgctcggtatctcttactacctcggggatgtatcttggtgcagctggtggcatgcttttcttcccaagtctggtgaagcacacgggaccccagtcagttttctttgtcgaagcagtgctgggagtagcatggtctgtcatatggttgaaattttccagtgacccacctcgtactgatcttccaaaggtatcgatgccgaaagtggcatctcgggacatgattaaggcacaagcagggggggttgttgcacctcgcacactcatgatcccgtggcgaaggataatattcagtctacctgtttgggcaatcgttgtaaacaacttcaccttccactatgccctgtatgttcttatgaactggctccctacctattttgagcttggcctcaagcttagcctccaggacatgggttcctcaaagatgctcccttatttcaacatgttcattttctccaacatcggtggtgtgatcgccgatcacttgattacaaggaggattctgtctgttaccaagacgaggaagcttctgaacaccatcggattcatcatctcagcatttgcactcatggcccttcctttattcagcacaccctcaggcactgtaacgtgttcggcgatatccctcggttttcttgccctgggaagagcagggtttgccgtaaaccacatggatgttgctccgaagtttgcagggatagtgatgggcgtctctaacacggcggggacactggctgggattgttggtgtcggcctcactggtaatatcctggaggcggcgaaggcttctaacaaggatctaacggactcggaaacctggaaaacagtcttctttgttccggcatacctttgtatcttcagctctgtcatttttttaatcttttcgactggcgaaaagatattcgagtagaggatgattatatttttttgtttctcatttacagtgaggcaggatagcagaacgggaatctcacatgtacccgtagcatttttacaaaatttcatactgtatcatacacatgatctaaagctatgtcaggaaatctcacatttttcattagttaacttcttggttttggtacatagtcccaccacaaagtttgtcaagttcccttacctttgccatgcaatgtaaacatatatnnnnnnnnnnnnnnnnnnnnnnnnnnnnnnnnnnnnnnnnnnnnnnnaaaaaaaaaaaaaaaa

SEQ ID NO: 97795 - DNA, 409 bp, Zea mays
  Clone ID: MRT4577_2069C.1
cctgtttttttttttttttttttttttttttttttttttttgatgtttttagtgtttttgggtaggtttttatttttttttggaaacccaaccccccataaatgggtttttattggctatatatgatcaggggcttttgaaagacgagggtgccatgaatattttttctacaatataagctgagttctaaaagagtcaaatgagatttaatcagacttaagtttatgagatgcgctttcggtaattaggagccccacaggggtggggcagctttaaaatttttccatgaggcccaaaaacattgtccaatcaataacccgagtcataggatagctcctgaaaaagaagtttggggtcaccatcgaaaaggtatatttttcccagtttaacaattttgggggggcttaaa

SEQ ID NO: 97796 - DNA, 269 bp, Zea mays
  Clone ID: MRT4577_206C.1
cggctcgagggtgaaaggcaaacagcctccaacgaagggtgttgtggtaattgctactatgattctcttggcaatccgaccattggcataggattcaacttgcaaaggagtgacgctaggagcgttttgggtcaatacggtcttaacatcaccaaagtcctttcgacctgcagttcctgcaaggcactgcagttcgacatcgaatgaccacactctctcttccaacgatgcctactccatgttctcggacatcctgtaccctcctttcg

SEQ ID NO: 97797 - DNA, 349 bp, Zea mays
  Clone ID: MRT4577_20700C.1
ccggcgcgagaacctgctgagcatggttagagcgctcagccccacacccaactcgtcagatgctgaagatcccaaagataagtagtcacactagaacggaatctaatgaagcagttgttcatgatcgacgccagtaaagtttgtgtcatatttcagttgattgattttctgtgagtaaattggagtagcggtcacattgtgtcatttgtataaaatcgtctaaaaccggttttattctaatgatgtggcgtgtcatgttggagcatactaagaaaacatcgaggacccaaatgagtaataagtgacacaatgccaatttcgaaagctcaaatgacacatgttaagtttg

SEQ ID NO: 97798 - DNA, 650 bp, Zea mays
  Clone ID: MRT4577_20701C.1
actcctatgggcgattgggttcctcgaggccggccgggacgagctcgatttcgaatataaagccccgacgccaaaggcccggatcattcccaaggccgctaggtcttaaccccccaagtgctcatacttctctctctctgccattccaattccttgccatctatcccatgagcctggggacatgagcgcagcctcgagggaggacacggtcacagtcactacctcgaataaagtcgaggaacctttgaaggcacaaaaggaaccaaaaggctcttgctcaatgtgatgtcgattgtgctccacatgctgagagagcacgtggtgcaacatttgctgtggcatggcaaagcggtgatgaagctaccgagctgaatgatagccttcatcggtacacacagatgatgacaatcctgagaatacctgaacgaaagcttacatgattgagcgaaacagctgggacagaaatcgatatcttccactgccattgctgaatgtggatcactgtcgccctgcttgtatgtatactgctgccttggatagatacgattcatgtgaagcgtggccaacattggtctctccatgtgcataacctgatactagtactggtgggcccactggcaatctcgatgtttctgtcgtacatgcgagat

SEQ ID NO: 97799 - DNA, 314 bp, Zea mays
  Clone ID: MRT4577_20702C.1
caattggtcattcagggcattggtcacactgacactgccacccatgggggtgcgtgacacatttttactcaatcatcgccgctaaatgactcaactagcttgctagccagcgggttttctacagcacatagtttttttagtgggggacacccccggcagcagcgtaggggcatggagttggctgctgcaggccccacattgccgtcagttgctgcgctttttgggccgccaacagccccgcgacctggccgcttttcggttgttgcttcaggatggactggaggaccaaaccgaaaatcgcctggtaccggtgc

SEQ ID NO: 97800 - DNA, 296 bp, Zea mays
  Clone ID: MRT4577_20703C.1
tatccaatcgatcagtaaagaccccatctggcttgtccatgccgtatcccaacatggatgtcacttgatatgagcatctcaaatctcaatgccttataagcattccttcctgtgtccattaagactctgataattgtctcgcctccataggaatttctcccaggaaagaaatatatccccatctccgtttcatatcagaactaccgtccccgatattcccttcagagagattaaagaccagaaaaaagtgagcctcttcatctgcacctgtaatagtttcagttcctattttcttc

SEQ ID NO: 97801 - DNA, 1829 bp, Zea mays
  unsure (1)..(1829): unsure at all n locations
  Clone ID: MRT4577_20704C.1
tggtcctccttgttttcatccgcctgtccatcagtttcgaggcccacctatgtttaaccttagacctcaaatgaagttaaaccagcctggagtttcatatcccatgcatgatgctgtcgataggttttcaacccacatgcacccatttgggtggcctaatcatctggatgaatcatgcccacctcatatgcaagtttggaatggaggcagtagtgtgtttccgggtgaaccctatatttacggtagacaagagtgggatcagaatagacctcatggtggcagcagagggtgggagctgactggtgatatatccaagggaccaaatgatgtgccggatgctgaacttctgatagctaagaaggatccttactctgcaataactgctgtttctgattctggtggacaacataatcttcaaccccaggctgagcaaaaggagattggacacttgactgctgaaaaatttgaaacaaaggatgattctaaaagttcaaaaagtttggaatctcttcaaggagtacaacatgtgacttctatgctgacaaagaatggtgcggtcttttgtaaagactatctagccagaatcaatgtttcacatgaccttgttgagtctgagttgtacaaaaggtgtatatccttgctgggagacttgggcgtaacaaaagcctctcatttggttaggaatggaattcagcaggataacgaaaatattgaaaaaatgtctacaaaatatggacacctcaaccctttcagttcacgttacctcaagagtgacagtactatctttcagagggctttggcccttcgtaacaaccagactcgaaagggtttaattattgtctccgcatctgtaaaaatggaagcgaacatggatgtactagaagatgaccatggcaaggaaatgcttgaacaagtggtgagcaatcctgctctgcaacgtcacactgaggtcatggaggaaggatcactgtcaaaacaggaacttggtgatggcatagaggggactattccagcaactataggatctgggggtctggatgcacctccagaaattccccaacctgaggtggtggtggcaacaacagcaatcacacagtttaacaaggacatggaggatgtgttacctccagcaattgaggatggtgcactacaagcaaccctcgaacatgctgttggcatactggaagttacacctggtgatggcttggggaatgttgcaccttcttcaggtgatgacatggagattatgccctctgctatgacagaacctcgactaggcaaagaaactgctcctgttgctagccctcctgacagtcaagagaagccatccatcatgcatgattctgagacaggtatggaggttgataaagttatcgatgatattcatggggatggtagggtgagctctattcttggcaccaaacttgatgttgctgcaagtgatggggattctgaagctttgttggtggaaagtagggtaaatttaagtcggatacctaattccccagaaagtacacattgaacaccttttattccaaaaaaaaaaagagagatacagataactggacaaaattgggcacgtcttcttctccgcgaacctcgcgtcctcttcgcctgcctgcctacaagtctcctcccctccccgtgcctccctcgggcctcgcttctcgcgctcttcctctcctgcctccaggctccaacaacccngggagggcgccgtccgcccccgcctccgggagcgatgatgatcgcgcgacgcctgctccgaccaatgcccccgccaggcaccagcttattgaagcatgtaactggcaccgcaagtttgcaag

SEQ ID NO: 97802 - DNA, 655 bp, Zea mays
  Clone ID: MRT4577_20705C.1
ccggccgggaaaccagcaccagcgcaaatcctcgcccctgccgacacgggcgcgccacgcccgagccctaagcccgcacgcgcattcgccgggctcccgctgcgccccgccccgccctccgctctgtaccggcgccaatcgccggcggagggttgcttaccttgactgatataggcaattgagtatgctgctactttaatttgcccgtggaaattcatcagatggattgtctcaaccttaggacatctttccgtgttctgctctcgatacagttgctgctatcatcgttcagtcccttgattgtagcgaacttatcttcggagaagcaagcccttcttgactttgtctctgcagtctatcatggaaacaagctcaactgggataaacatacctcagtttgttcatggcatggcgtaaaatgctcagaagatcagtcacaagtttttgaattgagggtaccggctgctggtcttatcggaaggaaaggcaaggacgagattgatgtggaatccaaaggaaagggtactgccaccaggagcgagaagccgaagcaagaattcagtagcggcggccaaattgctgagatgaataagttggtgttcttggagggttgcacctatagctttgacctggaggatctactgagggcttctgc

SEQ ID NO: 97803 - DNA, 2398 bp, Zea mays
  Clone ID: MRT4577_20706C.1
ccccctagagccggccggggaaaaacgcaccagcgcaaatcctcgcccctgccgacacgggcgcgcgacgcccgagccctaagcccgcacgcgcattcgccgggctcccgctgcgccccgccctccgctctgtaccggcgccaatcgccggcggagggttgcttaccttgactgatataggcaattgagtatgctgctactttaatttgcccgtggaaattcatcagatggattgtctcaaccttaggacatctttccgtgttctgctctcgatacagttgctgctatcatcgttcagtcccttgattgtagcgaacttatcttcggagaagcaagcccttcttgactttgtctctgcagtctatcatggaaacaagctcaactgggataaacatacctcagtttgttcatggcatggcgtaaaatgctcagaagatcagtcacaagtttttgaattgagggtaccggctgctggtcttatcggagtaatttctccaaacactcttggcaagctttattctcttcaagtactgagcctgcggtctaatcgattgaccggaagtcttccagctgatgtggcctcccttccgtctttacgttccatatacctacagcacaatgaactttcaggagggttgccttcttccttcagtcctaacctcagtgtaatagatttctcctacaattccttcacaggagaagtacctgcaagtttacaaaacctcactcagttaaccgttcttaatttgcaagataattctttctctggatccatccctgacctcaagcttcacagtctgaaactattaaatctgagcaacaatgaactgaaaggctcaattcctcgatctctccagaaatttccaaagggttcattttcagggaatcctggactgtgtgggctacctctagctgaatgctcacatccttcaccagcacgctcacctgaatcatctccatcgcctcaatctccacctttgacacatcatgataagaaactaggcacgggtttcatagttgcagttgctgttggtgggtttgcattgctgatgctagtcgtggttgtgtgcttttcaaagaggaaaggcaaggacgagattgatgtggaatccaaaggtaagggtactgccaccaggagcgagaagccgaagcaagaattcagtagcggcggccaaattgctgagaagaataagttagtgttcttggagggttgcacctatagctttgacctggaggatctactgagggcttctgcagaagtccttggcaagggtagttatggaactgcttacaaagctatactcgaagatggtactgtcgtggtagtgaagagattaaaagatgttgtggcagggaaaagagagtttgagcagcagatggagctcatcgagaggttgggcaaacatgcaaacctactcccactacgcgcctactactattccaaagacgagaagctcatcgtgtatgattatattgacactggaagtgtctcggccatgttgcatggtatccggggtgttaccgcgaagacaccgttagactggaactccagaatgaaggtcatccttggaacagcatatggaattgcacatatacattcagaagggggcgcgaagctcacccatggcaatgtcaagtcaaccaacgtactcgtagaccaagatcacaatccttccgtctcggactatggcctcagcgctctgacgagtgtgccggtcaacgcatctcgcgtcgtggtcggctaccgtgctccagagatagtcgagaaccgcaagatcacccagaagtccgacgtctacagcttcggcgtcctcctcatggagatgctcacagggaaggccccgctccagacccaggggaacgacgacgtcgtcgacctgccgagatgggtgcactcggtggtccgggaggagtggacggccgaggtgtttgacgtggagctgatgaagcaccagaacatcgaggaggagctggtacagatgctgcagatagccatggtgtgcacggccaagtcgccagaccggcgcccgacgatggaggaggtgatcaggatgattgaggggctccgccagtccacctcggagagccgcgcgtcttctgatgagaaatccaaggagtcgaaccctccatcggtgtaaatcctgcgcagctcccttcgtccgcttgatcggttgttgttgccagttgcacctcatttgatttgttagctaatttatttatgattgagtttcttgtaaaccgtggttagcatctgctgcatttagcctcagatagaaagaactgagctttcttattgatagtctgaaactctgtttcatggcgagcgtagaattcttccgctggaaaattgaaattgtaaacctgcccgaaaaaaaaaaaaaaaaaggcccctagggcc

SEQ ID NO: 97804 - DNA, 296 bp, Zea mays
  unsure (1)..(296): unsure at all n locations
  Clone ID: MRT4577_20707C.1
gcttgttttggttttttgctgtatgaccatttcaaatgagagatatttatgtttacctttgatggaaaaaagctgcaatgttgtgataagatgacctcaaaataactgtgtatgtgctcatcagcaagcaatggtgcaaatggggtcncatctatcggaacacgactcggggataancaccaatcaacaaacaaaggcgctttgagtgtgtcagcntntgtcatcttatgactgtgggttgttgccggcgggttttcctttctgcgtgtcggcttttgggggggctgttggggtgt

SEQ ID NO: 97805 - DNA, 322 bp, Zea mays
  Clone ID: MRT4577_20708C.1
tattattttttttacgtatccattatcattttggtttatttaattgcttcgggggtggagatcactttcgatcttcacaccgtctaacggcacgcaaaaacccttggtgcactttcacaaaccataacgtgccactcctggactgctccaccgtgacaatcacatcgttaaattgacaccggtacccccctgtataaaccgtgagatagttaaggcattcttaaacctatttacacatcacacacttcggtcagtacactttttacggccaccaggccgacccaattgcattgcgcgctctagctcccttaactttcagggg

SEQ ID NO: 97806 - DNA, 824 bp, Zea mays
  Clone ID: MRT4577_20709C.1
cccaccgcctactctgttctcctccccaccactgccgcagcaccgagaaccatggccgccacgtcgcccttctcctcgtacccctctcgcctacactccaaaaccttgaagcctcgtcattctcgcccgctccaccacaaggccgcgcccgccgcctccgccccgcgtccgctactcctctccttccccgcgcctgcacgccactgcggtgctgggctccgcgcttcagcggcgcagaaaaactctgctgattacaagttcgatgaagacgacgacgacgacgaggaggaggagtacgaatacgacggcgaagaggaggagtgggaggaggaggatgatgaggatgcgatgaacgtggaggcgatggaggaggaagcccgtggcgccgctgccgacctcgccaaacgcctcgctcgggagctccacatcgatgatgatgtcagggagaaacgaagaaacatcagggataagacatctgtgtctaaacacattccagataatcttcttccaaaggtggcaattattggtaggccgaatgttggtaaatctgcactcttcaatcgtcttgtcggaggcaatagggctatagttgttgatgaacctggtgtgacaagggaccgcttatatggacgatcttattggggtgatcatgagtttatggttattgatactggtggggtaattactttgtcaaagtctcaagcaggtgtaatggaagaacttgccgtcaccactactgttggtatggatgggattcctctcgccactagagaagctgctattgcaaggatgccatcaatgattgaaaaacaagcagttgcagc

SEQ ID NO: 97807 - DNA, 464 bp, Zea mays
  Clone ID: MRT4577_2070C.1
ggaagcactagggggctgctcttatttcagggaaaggggcccaagggccctacgatttttattcagggggcaacatcccatccaggaaacaaagggggccccacacccggggggacaaacaccaccaccaccaccggtcccttttaaccggcgcaacgcaaactactaacaggccatcagactactaaaagggacccccgggtcaatgagggaacaagaccttgacaagggggggaaatttaacttttgaagcaaagagcagcaacgaacgcccgccgcctaaaaaaagcaaactttttttttttcccccccggggggggaaaagaagaaagaaagaaatggccaggggaaaaaacaccacactccgaggggtccctttcgctcaaagaacgaacagggttggggcccccgtcacccataaattggtgggggggttttcctccacggccagggggacggggctc

SEQ ID NO: 97808 - DNA, 462 bp, Zea mays
  Clone ID: MRT4577_20710C.1
ggacactaacccagaccatttacattttattgctactgtttttttacgaaaaaagcaagccttcaaatggttggactctaccctagcccctaaattggggcttcatatggtacgggcctaagcaatacgggtgaaatttcaacaggggtgtggataaccggggatcccgaccaggctaacgcttacattcaaaccctgatccatctgacgtgatccgtaagcccttgcagttggggggacacataaggttgtatttatccttgggggaaaatatgaatatacccttgaggctctgtggtggtgaaccctgccctaatgaacattggcacccaaaagaactaccagttctggcagatcattttatgctactctggtataaacccaagaatgaaaccacgtggcctcatgacccaccacatgtccttctgccgagctaacatgaagcactggatattgatgggc

SEQ ID NO: 97809 - DNA, 835 bp, Zea mays
  Clone ID: MRT4577_20711C.1
cccacgcgtccgctagcttcttacagaatatgcattgcagagtctccttctgaggatcaggccagaacccaaatgtctatcctggatcataagacctagccttccctttaggatctttaaccatctcttcaggatatggtgttaaggcagctatgaccttttctgctaagtgctaaggatttagatgtgaaatctggagcagcagaggaagcagtggcagtagctgatgaacttgtgacatctgcttcgatcacaggaggcattatcacttctaccatagctgcacgccgttgatcttgatccacatctataggatacaggcttatgtaagcaccagcagcatataggacttgaggtaaaggcctagagcagcaagaacaaaaggcagcagcaaccagcaagagtagaaggaaacaaaaaatagagcagcaatagcaggccataaagattctagtaatgaactagaaacacagcaataagatggaggattgaaagacaagatagtaagaggatgcggcaaaacactaaccttcagaggaggagctcatcttcggacggcggcagcacacaacagagtagcagacgggcacaacctccaggcggatgtgcttgaggcctcatgggaatgcctggtggaatgcagtgtgattagttgatgtcggacaactatacaactaatcgctgacctatttgatggacctgatcattgctaaaggattgataacttaataacaagcttggttgatctaattttgcttctttcttggtatatgaatattaccaagacatcgcaacaatgaggacgtctctgtgtatgaaattacaaatttagttt

SEQ ID NO: 97810 - DNA, 494 bp, Zea mays
  Clone ID: MRT4577_20712C.1
ggggaccaaaaagaaagcgggggagagaaccccaaccagggacaagcgttcttttaccaaaaggggagaagaaaagcgggggcaccaaaaaaaccccaaggggggggggggggagaacaatgctcccccccggggggcactaaagggggaaacggggaacccgggaccgggatcgagccgatggggaccaacccaggtttgggggtgttccggggagcctccactacctgggaacggagtttgaccttttgggcctcgccaccctaagggaacggggcgcccaaagccactgactccattaaggggggtctccataccaggggggcgaggcttacggggagcctccacggcgttggggcttatctggagagacccaaggttgggggggaccctttgcggggccccaccctttggaacggggaactgggctcccaaagccgctgactccattaagccggttttaaggggctttaagggagccctgggcagcaccg

SEQ ID NO: 97811 - DNA, 573 bp, Zea mays
  Clone ID: MRT4577_20713C.1
gggtggggtttgtttggtttttaatttttttttttttttttttttttttttttttttttttttttttttttttccgagaatatggcccatgaatattatttctcgacacatgacccattggctcttacattggcttaatggtaccccgcggggggggggggggattatttcttcagggccaaccccgactaaccaatgcctagctctgacccccttggccatgggttcagctaaaggccccccgagtatggcgttcccaatgtcttctctgcttagggcggagctaaaccttctctccatatccttggaaaaatttccagggccgcttttcaagtccctgatggggagggcggggacatcaaggctaaaacccccgtcccaaagcggtttttcggcaacccaaacgggggggtcctcgcgggactgcgggaacccgaggctgcgaccccacccctcaatgcacggaaggctgggcgtgtacagaggcttttttttttccgggagccgttccagccattgcgcgtccgacggaagggccgccgccagcgccaaaacccccgcccctctccccgt

SEQ ID NO: 97812 - DNA, 283 bp, Zea mays
  unsure (1)..(283): unsure at all n locations
  Clone ID: MRT4577_20714C.1
aaacacgtacgtaaacgcttgtgntaaaacggacccgactaatagggcaaattaaaagattacggggtactcttaanacaatacaataaatccaacccctattgttagtcaaaataacctagacgagggcatggaaatatatatgtctagtgtaagataacatcggcttccaaaaaatgcatttgctgtcttaatgtgctggcaaacgatcataaacaaaggttgataatataatccaataaatataagcataactgtgtggtgcaaataggtggcattatat

SEQ ID NO: 97813 - DNA, 353 bp, Zea mays
  Clone ID: MRT4577_20715C.1
gagtctactagtcggcggacgcccttgatttttttgtttttttacgctgtctatgtttacggtttgtcgttgcctacaataaaaggaacaggacttccacataatcaggtagaaacagatgatagggacgaccctttctaacatttgtacgcaacagaaacctgggataaacttttattggtgcacacaaactgggggcgtgcgggtggtttatatttaaacgcgcttgggatattacttacacacatttattcacatggcgggtgcaacgacatgtgggactttcggaaccggatcggccagagggtaaaggcaggggcttaaaacccgcctggggcaactaggggccatga

SEQ ID NO: 97814 - DNA, 123 bp, Zea mays
  Clone ID: MRT4577_20716C.1
tcttgccagtctaatctaatgcattcatccgtatgagctgggatcgattactgatgtatcggattagtggattagtatgtttctttctagatttcttggtagatttgacaagcgtcacctgaa

SEQ ID NO: 97815 - DNA, 672 bp, Zea mays
  Clone ID: MRT4577_20717C.1
ggggagaagactgttgcagcactggctttgctttttgccattcacagttttaggccatcaccgttcttcatattggacgaagtagatgctgctctggacaatttaaatgtggccaaggttgccgggtttatcagatcaaaatcatgtgaacgtgttggtgatgaacaaggcagcgatggcgagagtggttttcagagcatagttatatctctgaaggacagtttctatgacaaggccgaggcacttgttggtgtttatagggactcagaacggagttgctcgaggactctcaccttcgacctgagaaagtatagggaatcgtgaagcagcttttgttgaatgtttgtatcgaggactctcaccttcgacctgagaaagtatagggaatcgtgaagcagcttttgttgaatgtttgtactatgtgtgtagttgcctgctccatcagcttgctagatagctgtcgtgagccttcgatgttttaactatctgtatactcctagtcctacataagtgctagctgaacaaggaccctgaaatattcatttggtaggtggataactgatgtttcgaacacgcataaacttttttacctgttgtatgaagccatttctccgaattactataatctgtttaattatttcgtggtgttcaatttatctccacggttcgctc

SEQ ID NO: 97816 - DNA, 1855 bp, Zea mays
  Clone ID: MRT4577_20718C.1
cgagagtggttttcagagcatagttatatctctgaaggacagtttctatgacaaggccgaggcacttgttggtgtttatagggactcagaacgaaggtaggtcgggtatgcattactgcacctgtcttatttcctgtgcgcatgcttaacacagtgattggatgtgcagttgctcgaggactctcaccttcgacctgagaaagtatagggaatcgtgaagcagcttttgttgaatgtttgtactatgtgtgtagttgcctgctccatcagcttgctagatagctgtcgtgagccttcgatgttttaactatctgtatactcctagtcctacgtaagtgctagcttgttgatgaccctagaaaataaaaaaaaactcggcgggggaaggtaagaccaccctcgtggtattatatcaatagaaggccgtggcaatggcccctaacgagaaacccccgaacccacctatgcatttatgtcaaataatgataaactttccaaatgtcacaatgcaatattcattcttctgttgatatttctagtgatttcatgggtctctttattgccctatacagactggaaatccaagtcggatgaatgtgagaaggttattgatgaattgaaggagcagaatggtaatgttgcatctacattggcaaagatggatcgccaagtgaaatcaaaggagggacaacttgcacaacttatatcacgccagcgagaggttcatgagaagtgtgaacttgaacagttgaagcttcctactgtaaacgacccaatggataccggaacatcctcacaagaaccaatccttgattacagccagcttagcaaaagccatctgcaggatatacgaccttctgaacgtgacaaacatgaggcagagttcaaaaaaagaactggtgtgctactagctgatattgagcgcactgctcctaatctaaaagccctggatcagtatgatgcactccaacaaaaggaaaaggaggttactgaaaggtttgaagcagctaggaaagaagaacgagagatatctgacaaatataactcagtcaagcaaaggaggtatgagctgtttatggaggccttcgatcacatatctaaaggcatcgacaaaatctataagcagctgacaaaaagccatacacatccactcggaggaacagcatatttaaatctagaaaatgaagacgaaccgtttctacatggaatcaagtacacagctatgccacctaccaagcggtttagagatatggaacagttatccggtggggagaagactgttgcagcactggctttgctttttgccattcacagttttaggccatcaccgttcttcatattggacgaagtagatgctgctctggacaatttaaatgtggccaaggttgccgggtttatcagatcaaaatcatgtgaacgtgttggtgatgaacaaggcagcgatggcgagagtggttttcagagcatagttatatctctgaaggacagtttctatgacaaggccgaggcacttgttggtgtttatagggactcagaacgaagttgctcgaggactctcaccttcgacctgagaaagtatagggaatcgtgaagcagcttttgttgaatgtttgtactatgtgtgtagttgcctgctccatcagcttgctagatagctgtcgtgagccttcgatgttttaactatctgtatactcctagtcctacataagtgctagctgaacaaggaccctgaaatattcatttggtaggtggataactgatgtttcgaacacgcataaacttttttacctgttgtatgaagccatttctccgaattactataatctgtttaattatttcgaggtattcaatttgc

SEQ ID NO: 97817 - DNA, 192 bp, Zea mays
  Clone ID: MRT4577_20719C.1
gaagaagagactgagaaatctctggacttacaagattaggtctgaagtgtgaataggattccaaagccaaaaccgaaggtcgagaagaatacagcgtaggaggaagaacctgctttcacggagaaaaccacctattcggaatctgtacccgacaagggtgaatacactgatacgtgtcataaatctaatgct

SEQ ID NO: 97818 - DNA, 258 bp, Zea mays
  Clone ID: MRT4577_2071C.1
caagacaactggctttggcatgatttatgattccctggattatgcaaagaaaaatgaacccaaacatagacttgcaagacatggcctgtatgagaagaaaaagacctcaagaaagcaacgaaaggaacgcaagaacagaatgaagaaagtcagggggactgcaaaggccaatgttggtgctggcaaaaagccgaaggagtaaaggtgctgcaatgatgttagctgtggccactgtggatttttcgcaagaacattaat

SEQ ID NO: 97819 - DNA, 409 bp, Zea mays
  Clone ID: MRT4577_20720C.1
gtcttactatttcttgacgcatgcatcgagcggaaacaggaaattttaactttacaggtacaattccccggacctgactctgagtgcacataatgtgaattcattccaacttaacccacaggcttattattttactactccgctcacacttattgctcacacacgcttaaaactcatgcataaaaacacacggtggccgtactcgctcacaaactctctggacatgcctggcctaagatcaagataataatgaatcaatcctgcgaagcatcagcccgaacgtaaggctatgctcaccttgaggacacagaatgcattcgtgacaggaagcctttcattctaagtacagaatgcctgacacaacctttgttgatctatggctttattgcacaaattcaaccccgcgtcc

SEQ ID NO: 97820 - DNA, 217 bp, Zea mays
  Clone ID: MRT4577_20721C.1
tatatagggggggagttctacaaaaaaactggcggggtgcactcccatgctccaccttgtggccagaagaccacaagacgatcaccgttataggaggaacaaccgggtgagtaattattctgaaggaataataagagggtctaaccgggaggaaaacattcaatgcgagccgtgccagagtagaactcctgcggggaacaacggaaaacgcgaccaa

SEQ ID NO: 97821 - DNA, 433 bp, Zea mays
  Clone ID: MRT4577_20722C.1
aagaaaagagggccccaaggcccccccaattattatcaaaggggcacccccccacccggggagagaagagggggcccccccccggacggcacacaccccccccccaccaaggttccctttaaaccgccccaacgaaaactacaaacagcccatcaaactacaaaaaaagcgacccccggaccaatgagggaacaagaccctgacaaggggggaaaattaaaccctggaagaaaaaagcaaaaacaaacccccccccccaaaaaaaagcaaactcttttttccccccccgggagggaaaaaaaaaaaaaaaggggcagggaaaaaaaacaacactccaagggccccctttccctaataaaccaacaaggtctggggcccccctcccccataacttgggggagggccccccctccacggccaggggaacgggccc

SEQ ID NO: 97822 - DNA, 427 bp, Zea mays
  Clone ID: MRT4577_20723C.1
cccaccaactcctcaaagtagcggctggcaatggtgttgatgaggctttccaaatgctgtggtgtcgttgttgtttcttgcggctctgacacgattcacccatggatttgtcatgtcacctcgcactttgcttaaccgcttctctcaaaacagcaattattatttaaccactgaagagcactggttctatcagactctcgatcactattctccttacgaccaccggcaatttaagcaacgttactatgaattccttgactactttcaagttcccgatggacccattttcttaaaaatttgtagggagtcttcgtgcaatggcataagcaatgactatctcagcgttttggccaagaagtttggggctggcgtgggttcacttgagcatcgttactatgggaaaaacagcccctttaagtcacacaca

SEQ ID NO: 97823 - DNA, 280 bp, Zea mays
  Clone ID: MRT4577_20724C.1
atatgaatcatttccttaaacaatatatttacaaagggctggttgcttgcatagcagtccatgcctgcatatatgaatcattggctggatatttgccattgccattatccatcattaattggtgatgaggacctacctacgtacgtatttagcaaccttgccggccagggactcattcattcatcgtctacactagctgggtgcatcacttgctttctttggcagactgacttgactgtgtcgatgggttgccctagctcgtcgatcttggggccgggca

SEQ ID NO: 97824 - DNA, 681 bp, Zea mays
  Clone ID: MRT4577_20725C.1
ggtaccctcggagtctcggccgggcttcgctgcgccgacggctacgaatcgtctcttcgtaccccgagcaaccgataatccggcggcgctgagatgttggtttatacaagacctcctatctggagacgagctcctgtaggattcattcacctacaaggagctagaggaacggaaccctgtgagaggtcgagggaaaacgggtcacccaaggtcctgtagatgctagacattgcagccaattctcatcgcagacgaggcaggcgacgatgaaagcgttgatgacacaggcgcgaaggtggctgatacttgctgacacattccgtgtacaggagcaacctccttttgacaagaaatcatatgtctcttacataaaaaaatacatcaagaatctcactgatgtgatggagccagagaaagcatatgagctcaaaaagggtgtaaagggtgcaaccaagaaaatccttagcaagctgaaggaccttaaattctttgttggcgagagcatgaaagacaaatcgtacgtggaattagactattacaaggatggcgccactaatacgacattactctatttctctcatggacttaaggagatcaagcgctagattagatacccatgttgagcactatatatgccctattgctatagccacaaatatagctgctctgtctgaactgaac

SEQ ID NO: 97825 - DNA, 641 bp, Zea mays
  Clone ID: MRT4577_20726C.1
tctgagttctcgcttctcacttgtgcccagatgccggccctttccttttcgggatctcctcggtgacctagatcggatggacccgccgccggcgacgcgcgcggcgtccaggcggcgggaccgccgacggcgcctgcggcagcggcagcgcgcagctgcagccacgaaaacgaaggtcggtgcggccgtgctggccgtggagccgcagagcgcagcagtcacaaccccggtggcttcgatcggtcctgctgccacgccggcgtcgaggggcaggaaacggcggaggcctcgtagacggcgtggccggaacgcgggcgcggctggggtgtcggacgaaccaccggctgcgtcccccgttcccgttccagatgccccgcaagcaagttgcaatttggaagcaatggcatcacgtctgagcgataatgtgctgcaaactatgaccgagaagataatgaggtcagataaaacaagcaagagaaattttcagcacggaaatgaggcgctaaaagattctgtggctgaaggtgctgcctgctcttctcttgcccgtcgtgaacattctaccagagaaaatggagcctcaaggagtaagatacttaagagatccaatgtaaaatccccagttgatagttgcactgaac

SEQ ID NO: 97826 - DNA, 578 bp, Zea mays
  Clone ID: MRT4577_20727C.1
acctttgtcttctttccgccctacttgcgcctgcgccgccgcctccgtcgttgtagcagaagcagcgatcccccgtcaccaacagccgaagaaagcatggatacccaggtcaagctcgcagtcgtggtgaaggtgatgggccgcaccggctccaggggtcaggtgacccaggtcagggtgaagttcctggatgaccagaaccgtctcatcatgaggaacgtcaagggccctgttcgtgagggcgacatcctcaccctgctcgagtctgagcgggaggccaggaggctgcgctgagcggctgcttttcctgtcttcggaagtaaactctactgcatttaaatcaacttcttgaacgctggctttgtcttttgcctaggctatggaaatgtaagcagtacttaatatgttgcagttttcttctgttgcctgaattaaagtgcacttgatgttgtgagacttgataatccttgcacacctctgggttatttgaattgattggatgaatgatgtattgtatcctatgatttgagtgctggtgtaaacctgaattgcttctagtaaaattatgattacctgtg

SEQ ID NO: 97827 - DNA, 2127 bp, Zea mays
  Clone ID: MRT4577_20728C.1
cttgggaattctgtgcagtctgatcaatttgatgaaatggttcatccaagtgacgttcttggtccatcaattcctggaccaactgttcttctggtggattgccccacacagtatcatatgccagaacttttttcactgcacccccttagctgcttttatgaagattctccagaacaaagtggcaagaaagtaaattgcataatccacttaggtccatcacctgtgactagatctgttgactaccagaactggatgaaaaaatttggtgcaacgcaacatatcatggcaggacatgaaattaaaaacatggaaattcctatcttgaaaggtagtgcaaggatatcatcacacctcaattttgtatgccctcagcttttcccatcctctgggttttggtcggaacaaccttcaaatgatgtcatggaaaatgataagagtgtttcatcggaagcctgtggaagtgtgtctgcgcaaaacctcctaaagtttcatctgcgtccttatgctcaattgggtttggatagaacttctattccaaacttgttcacctacaaggattttgtagaagagcttgtatctgagatcccagcgattagagaagttcctgaacaggtttgcaaattctggcaaaataatgtgaatgataataatatactaacaccaactggcaatcatatgggtgaagaacaatggatcaataaaaaatcagataaggtagatgatggcactctttttcaagaaattgtcttgagaaagcatccaagggacaatcaggaaatcccttgttgtgtggaggatgcaacaagggaagatatggagatcacttttttgggcacaggttcatctcagccttcaaaataccggaacgtaagttccatatatattaacttatttgaacgaggaggtatacttctggattgcggcgaaggaactttaggacaactgaaaaggagatttggtgtaaatgatgctgatgaagctgtaaaaggtttgaggtgtatttggatttcccatattcatgctgatcaccacactgggttggccagaattcttgctctaaggtcgaaattgttaaagggggtgcctcataaacccttgcttgtgattggaccaagaccacttgagagattcctaaatgcatattctacactcgaacatcttgacatgcagttcttagactgcaggcatactttgaagtctagtgttgaggcctttctcagtgaaaatgatactgacccagccacacctcaactggagaccaccatgtttgcccctggaactagaatggagaactacaacaggaagcctgcaagtccaagggataccacagctcttgctaatttcaaagaagtcctacaggaatcaggtttagagattttgtacagcgtccctgtactacactgtccacaagcatttggagttgttttgaaggccatggaaaaagcgaacagcactggaaaggtaattccaggctggaaggttgtatattctggcgacacacgaccctgtccaggtcttatagacgcttccagagatgctacagtgctaatacatgaggcaacattcgaggacagtatgaaggacgaagcgattgcgaggaaccatagtacaaccaaggaagccatagaagtcggcacatcagctggagcgtaccggataattctgacccacttcagccagcgatacccaaaaatcccagttatcgatgaggttgatatggagaagacctgcatcgcctttgacctgatgagcgtaaacctcgcggatctgccggttgtgcccaaggttctaccgcacctgaaggtcctgttcaaggacgagctggtagttgatgaagccgaagaggtccaagaggctgctgtgtactgacatattgcatggataaaaatgatgtaaattaacttggatcgccttgtagcttagcgacattgtttttgacctgaactccagtccaattgaaggtctggatcatctgtctctgtgtctccctttaatggttgcatcgatttttacagttggttttgttgggtgagtgttgtgagttgagttgtgaaaataacaaagataattgtaattgttttgattgtgttggcgccgatcaaaaaaaaaaaaaaaaaaaattttttt

SEQ ID NO: 97828 - DNA, 296 bp, Zea mays
  Clone ID: MRT4577_20729C.1
ctcggctacaagccgcccgccgctgtgccacagtgccagactgccagtgccttccactagcggccagccttcctccgttagccgacgccgctgtccccgtccagccgtccaccgctgtccccgtccgccgacggctcgatgccgagccgctgtccgcctgtccggctggggcctgtctctatccctccgtggctccgcccctgtgcctccgtccgccgaggctgaggcgtcgagctgctgtccgcctgcgggccgcggccctgccgcctgtccctgctccccccgctctccgtccg

SEQ ID NO: 97829 - DNA, 313 bp, Zea mays
  Clone ID: MRT4577_2072C.1
gggcttggggtttttttttttgggttctggaccaaaccattgttcttccatttttttttattgtgagcccaaaaaaacccccaaatatggtgaccatagctggttcccctgtgaaaccgggatccgcacacaacccacacaaaataccaccacggagcatattgggtaaaccctgaggcccctaattgagataacaactcacataacagtgaacatgcccacatagagctccaaaactattaggccttaagagacagctacattaatgaatctgccaacgcggcgttgagaggcggttcgcgtattgaactcc

SEQ ID NO: 97830 - DNA, 504 bp, Zea mays
  unsure (1)..(504): unsure at all n locations
  Clone ID: MRT4577_20730C.1
tcgttccccaacggcgcctgcaatactcccaagtctgacgcccacttgatcgcttaccagaggatctagaggtcaggcgaagtcgagccagtaccgggaagatcttgcgtggcctccttttgccaactacgtgactgtgccgctcgtgtccttcactctcggtccgtccaaccgatgatccatcgatccatgcaccaccaccacctctttgaggcgatgtgcggcggggccatcctctcgggtttcatcccgccgtccggggtggcagctgctgcnattctgttgggcactacgactcgcatgtaacagtgacacgccactgcgaacaccgtagaggcggagtccgaggtcatgggagctcccgaggacaaggaggaggacttctaggccgacttcagggagttcgagcgcggcctcggcgaggatgacgtggacagcgccggcgaaggcggccaccccgaggtccaagagcttcctccgccggagccgacgaggtttgccttc

SEQ ID NO: 97831 - DNA, 777 bp, Zea mays
  Clone ID: MRT4577_20731C.1
ctcgaggccggccgggactatatacgtatatagacgtggtcaggatgacgtcgtcctccgtcttcttcctcctgctcgcttgcttcgccacatgcgccggcgccgccacgttcacggtacgaaacaactgcgggttcacggtgtggccagcaggcatcccggtcggcggcggcacgcagctgaacccgggctcgacgtggactgtcaacgtgcaggccgggaccagcggaggcaggatctggggccgcaccggctgctccttcagcggcggccggggccgctgcgcgacgggcgactgcggaggcgcctactcctgcagcctgtccgggcagcccccggcgacgctggcggagttcaccatcggcggcggcggcaaccacgactactacgatatctcggtgatcgacggctacaacctgcccatggacttctcgtgcagcaccggcgccgccctgcggtgcagggactccggctgccccgacgcgtaccaccagcccaacgaccctaagacccgttcgtgcaacggcaatagcaactaccaggtcgtcttctgcccctgatgaacatgcatgcagcttgccatgagcccatgcatgcatgagagcgtagcggcatatatacactaattgttcgtcaactcacatgcacgtacctactagtgaagttgataaataagacgatcgatatctgactcgtccaatgcagcatgtgtgtatggtgtgatccttatactttcctacatatatggaactttttaaagggaggaaaaaaaaaaaa

SEQ ID NO: 97832 - DNA, 206 bp, Zea mays
  Clone ID: MRT4577_20732C.1
gggcgggggaacctaaggcaaattttattttaaaaaaaaccacaggatttctcatttccaaacaattcaaggtctcgttacaagcaaccttgcttacacataggccctcaactttcgtaataaaaagacacattactgaacaagcaaacaacccaaaacagacttggcttattccattcaccgtttgacagggcaaccgtttaaag

SEQ ID NO: 97833 - DNA, 174 bp, Zea mays
  Clone ID: MRT4577_20733C.1
gggtacctcgagtcggtcgggattcctccccaccgcgccgcccaaatcacagccttcgccgccatggcagcctccagccgccctctcgtctccgtgaaagccctgaaggtttgactgcccacggacgcccccgtaatcttcttgccgcccgttttctgtgtcacgattctcacg

SEQ ID NO: 97834 - DNA, 249 bp, Zea mays
  unsure (1)..(249): unsure at all n locations
  Clone ID: MRT4577_20734C.1
gggagaaccagcagcctccaataagagccagccagatatactaataatactctcgccgccgccatccgagggggcaagnggaacgacctccaacccaaggcaacccgccgaccccataccaccaccaccgtaggagcgagatggagatgaagaggatcctcttcgccgcccacgacgacatcgccgccacagacaccgcaaagcaggcctccaccgaggccgacgccgcaggcgccccaacagcctccg

SEQ ID NO: 97835 - DNA, 451 bp, Zea mays
  Clone ID: MRT4577_20735C.1
cccagacgcttggggtcacctgggaatacccggccggtaccggccggggccccaaggtgtcccaaagtgagccataataaagcgtggcaaaaccaggggcaaaaatggtcacagggggaaactgggaaaaactgacaatcccacacaacatccacaaacggaagcaaaaagaggaaaaaaaggggaacccaaggggggaaaaaaaggaaaataaatgagatgaactgactggccgctaatcaaccgggaaaactggggaaacaggtgcattaaagaaaaggaaaaaacccggcaaaaggcggggagaggaaggggccccaaggggggccaaggtggcaccagtgagaacgacaaaaacgggcaacacttgaacgcccggcaccgacagagccggagaaagcggcacacaccgggtcaccccaggatgccaaaacacgggaaaatggtggtt

SEQ ID NO: 97836 - DNA, 672 bp, Zea mays
  Clone ID: MRT4577_20736C.1
cgggcgcgacgcacgcgatacggcagctcttaactcaacatcaacgcgtcgggcagctttagctgaacagcagcatatgcatggacagtcttctagtgcatcggcttgccagacaacaaggtttgacatccttagcagatcagacagatcctttacggaggatctgagtgtagttgggaacagttcttcagactccagagtcgacgaaccgtctagcagcagtacgcaccgaacagtagagggttcaaacggctggtggtccgaggtggctgaggctggaaccaggatcgctgaatctgatgttacagtggaggctggtgttggcaattcgtccacttcagctgtgtccaacattggctcgggcagtgttcctgatagcttcgaggagcagatgatgctagccatggctctttcgctggtcgatgcgcgtgctagggcaggttctccagggttagcttggcggtagcgtttgttagtaggccattttactccctttatttgttctttttcggtttgtgctgcgttttgttcttattgccatttaaaacgcaggattagatgcggaataggttcagacttgaagaactggccatggtaattgtgaatagtgggggggtaaatctgtacactggaagccagtgatttggctaattgcacttctcttgtttttct

SEQ ID NO: 97837 - DNA, 523 bp, Zea mays
  Clone ID: MRT4577_20737C.1
ttttttttttagttacaacaacagtggtatttattcattaacaaatatctgttttacaaagaacaacctgtagtgtcatctcttccaatacagcaggaaataaatttgtcccactagctatagattgcttaacagtcgcaggatcatcatgcttcaaaaatgacagcaaatttggcatcagcacaaccaaatcttctgtaacatttgtgccaagctctctcagcaatcttagggcacgagacgaatcgaagcggggcgaggcgacttcctcgcggtcacccggcggtggcggcggccgcgcttcggcagcatcgcctcgcggcaacggccaccgggagccgcctgctccgaattccatgggtggggcctaaaccctagctcagggagcacagggccacgcggacacgcgaagggatagctagggcacgaaaccacgactgggagaagtaagcagcagcgactgggttgggataggtttgtgttcggcggtggccgcaggccgccaaagcaggcgacgcggcgg

SEQ ID NO: 97838 - DNA, 194 bp, Zea mays
  Clone ID: MRT4577_20738C.1
atcatctcgcatatcttgtgtaagtatcaggatgatatggttcaaaatttaaaccatatcatctcgcatatcttgtgtaagtatcaggattccccaaacccacgagatatgcgagatgatatggtttaaattttgaacggaagttgcggatccttttattttttaaaatctcggtgcaatgtttatcactcgtc

SEQ ID NO: 97839 - DNA, 314 bp, Zea mays
  Clone ID: MRT4577_20739C.1
tgcaagcggccgccttttggacgttgggccgaccaacggaccccatcacatggagcactcactgacgacaagtaggcaagaccacgaggccgacctaacaaactgcaagagcaaaggactgtcacagagaaatgggtggaggagatacgctagcgcttcacaaaatcgtggcaagggaagcggacaagccgcccatgctcggaatcggacggccaaaacaccaaagacagatgacaggactgacacactggggaaggataaccagaagggcacgcttacaagtagacacgcaacctgctatggggggccagaaa

SEQ ID NO: 97840 - DNA, 523 bp, Zea mays
  Clone ID: MRT4577_2073C.1
cacgacgtcacgggccgccgggagcaagaagatcaagaaatccaaggcccgggggaaagcgcacggcgggctgggtatgaagctggtgaacctcgacgccggcaacaaggacatgctgctgtcgcgggtgggagagcagcaacgacacaatcgtcaaggggctagggtacatcgatttcatgtgtgagtgctggttgaaggcaaacgacaggtctgggtgtttgttcagccccgtttccgtctcttcggcaaggatatctttggcgactgtctcctgcatttactcatcgtcaagaaagacaaacagccgcaacaatgctgctactaccgtctgatcatgatgagctcgtgatagctcagacaggacccgtttagatattattaatgttttagtattagttaatagttatcatttttctagctacaagctatatatccatgtgtaggaaacgggtgacgcctaagagggggtgaattaggacttctaaaaaaaaaaaaaaaaaaagctagttctagatcgcga

SEQ ID NO: 97841 - DNA, 1159 bp, Zea mays
  Clone ID: MRT4577_20740C.1
actcctataggggattgggttcctcgaggccggccggggacgggtactacgccaagaagaacgcggccccgctcccgcacacgccccacctgaacgtcctgagcaaggcggcggtgaagacgaccggcgggggcggcgcgcctgcgtcgcggtggtcgctcagcacggtgacgcaggtggaggagacgaagcggatgctcaagatgctccccgtgctggccatcacgttcgtgcccagcgcgatgatggcgcaggtcaacacgctgttcgtcaagcagagcacgacgctggaccgccacatcggccgccacttcgagatcccgccggcgagcctccaggggttcgtcaccatctccatgctgctcgccgtcgtgctctacgaccgcgccttcatgccgttcgcgcgccgcgtcacggccaacccgcgcggcatctcgctgctgcagcgcatgagcgtcggcctcgtcatccacatcctcatcatggccatcgcgtcgctcacggagcgccaccgcctggcggtggcgcgcgaccacggcctctacgacagcaagggcaccacggtcccgctcaccatattcgtcctgctcccgcagttcgtgctcatgggcgtggccgacgccttccttgaggtggccaagatcgagttcttctacgaccaggcgcccgagggcatgaagagcctcggcacctcgtacgccatgaccagcctcggcatcggcaacttcctcagcagcgcgctgctctcagctgtgtcgcacatcaccaggcgccacggccggaccggctggatcctcaataacctcaacgcatcgcgcctggacaagtactacgccttcttcgccattctcaactgcgccaacctcgtcgccttctgcttcgtgtgccgcttctatgtgtacaacgccgaggtatcccacgtcgtcgacgccgggagcagtaagcagaagcgggaagtgcccatggcgatgcagccgccggccgtgggcgcagtggacgccaccctataggactagtgttccggtccattacaaatgtagttgtcatactcatacgtaccggtcatacatacgtgacgtgaaggatgaagcgccgcgtgtacagtgctgtaatctctacgtacatgcacctgcaatggatatgtgaaagtagtacgagc

SEQ ID NO: 97842 - DNA, 323 bp, Zea mays
  unsure (1)..(323): unsure at all n locations
  Clone ID: MRT4577_20741C.1
gagcnctcnagtcggcggccgcccttgtgttctttgggttcttttttagtacaacgaacgcataattaccacatccaacaccatcaagagacaataacagtggcaagaacggtaaatcacaatacacgaggtcactcagaagaaatctcactggcaaacgaaaggacatagatgtcacgtcacctaccacgcttgagaatgctactcatacgacagatctgatattatgaaacaagaagtttgtacaagaaacagtcgagcatcaagacatgggggaggacaacaacagagtcctacgaaaaacaaggactacagggtgcaac

SEQ ID NO: 97843 - DNA, 2328 bp, Zea mays
  Clone ID: MRT4577_20742C.1
cattgggtacctcgaggccggccgggtctccacaaaccaagttccaccagacccacacgtttctttaccctaaccttttcgctgccgcggaagaacacagccaccgccgtttcttcgtcttcctcgcagcgccggcgcgccatctcggtacgaaggcgacggcggcggcgacggcggcgttcaggatcgggatctcagcgacgacgtcagaggcttcccatcccgacccccgccagtcgcctcgcgccctcgactccggactccggtcctccgcacaccggccggttaccctgcgtttgaacctgctatagaaatttataaaatggccgcggttgatgcgacaaccaaggagatggatgcactgcatgttggacaaaatgatgaaacaaaagagagactgattaaagaagacaaagctgcaaacagcaatcattctgttgttgcagctcagtccttgccaccagaggacgacgatgatgatgaagcacaagctgatggtccatctcaagatggagcagcagcagctgtaaagaagaaaaaaaaaaaaaaaaaaggcccctagaagaagggcccccttcaacagacagatcctccatcaatacctgttgatgagcttttcccctcaggagaatttccagagggcgaaatccaacaatacaaggatgacaatctgtggagaacaactagtgaggaaaagagggacctggaacgactgcaaaagccaatatacaactctgttcgccaagcagcagaagttcatagacaggtgcggaaatatatgaggagcatcataaaacctggaatgttaatggttgatctatgtgagacattggaaaacatggtccggaaacttatcaaggagaatggactgcaagctggcattgcttttccgactggatgctccttgaattgggttgcagctcactggactccaaatgcgggcgacaaaactgtgctacaatatgatgatgtgatgaagcttgattttggaacacatatagatggttacattgttgattgtgcatttactgttgcattcaatcctatgtttgatccattgcttcaagcaacgagagatgccacaaataccggaatcaaggaagctgggatagatgcacggcttggtgatgtcggtgctgcaatccaagaagttatggaatcctatgaggttgaaatcaatgggaaagttttccaagttaaaagtgttcggaacctcaatggacacagcatcgggccatatcaaatccatgctgggaaatcagttccaatagtgaaaggtggagagcaaacaaaaatggaggaaggggagttttatgccattgaaacttttggatctacgggaaagggatttgtcagggaggacttggaatgcagtcattacatgaagaactttgatgtcggacatgtgcctttaaggttagcaaaggccaagcaactgcttgggaccatcaaccacaacttcggaacgctcgccttttgccgccggtacttggaccgccttggtgagaccaagtacctcatggctctgaagaatctttgtgacaatggcatcgttcagccgtaccctcccctgtgcgatgtgagagggagctacgtctcgcagtttgagcacacaatcttactccggccaacttgcaaagaggtcatttccagaggcgatgactactgattgcggctggaggaggctccctgtaccaggttgtgtgtgtggagcgccatccgtttatggatggactataggacgtgtcacactcggataaatggtttggtcctccagagttcaggatgttgtatgagttttataataactcgctaaagattgtggatgtacaagtagcagtaatacgttttctgggaacatggacattgttaggctatttccagcggggatttcgtccgagtttcaatctcgattaaatgtgttgccacataagaaaatatgataatatggtaagaatttaataagagagtgagttttattggaaaaaaaaaaaaagaaaaaaaaaaaaaaaaaagcggcccgaggtcatgatgatcgagcaacactcatcttggattatcatgacaagattgatactgagctgaccaagatctgtgatggtatcctcgagctgcttgagacccatcttgtgccgtcttccactgcccccgagtccaaggtcttctatctcaagatgaagggtgattactacagataccttgctgagttcaagactggagctgaaacaaaggacgccgctgagaacccgatggtggcatacaaggctgcccaggacattgctctggctgagcttgctccaactcaccctattagggttggactggcac

SEQ ID NO: 97844 - DNA, 114 bp, Zea mays
  Clone ID: MRT4577_20743C.1
gccgggtccggcacctggaattagtctacgactcattagccgtggaatccatcccggccacggtcggaggaagcgactccgccgcgggctgtcatcttcgtcggtgctcttctc

SEQ ID NO: 97845 - DNA, 277 bp, Zea mays
  unsure (1)..(277): unsure at all n locations
  Clone ID: MRT4577_20744C.1
ggtcacaaactcacaataaatatacgaaaatagtggcaaaaaattaaagtcggttgtttggactgctgcggctacaatccatagagacagtataagaagtagaagccggtatagattaaagccatacgaacattgctgaaactcgctctcttatcatgaaattaaccaacaacctcggtactgctggacagataaaacagtaactagttgaaagcaccgggnatcctggccaagcagcctgccttgtgctggaagcagcgagcactgccattcagca

SEQ ID NO: 97846 - DNA, 149 bp, Zea mays
  Clone ID: MRT4577_20745C.1
caaacaaatggcgcgaatgcgcaagttttattaatctcacagtcacaatcgcagcaggatcacacttacacataacattagcaccacacaaaactccgacaatatcagcgacgacaccatatgcggacgcagattatagatatacttgc

SEQ ID NO: 97847 - DNA, 773 bp, Zea mays
  unsure (1)..(773): unsure at all n locations
  Clone ID: MRT4577_20746C.1
gtccctcgaggcctccgggccaatgccgctcgctgatgatttccaatccggtgaatcgattcagaaccttagcacttgttatttgctaggctgcaagttattgtaatgaaaactggattaattgattttaattaatcttcaaagaagttttgataaatttaggcagagctactgttgttgtgaccagcaatatactccagtccatccgttctaaatttttaagccgttttgcttatcctctggtgcatagcaacagctatgtgcatggaaaatccaaaaacgattcataatttaaaatggagggagtaacatcgactgagatggtgttcatgacattggaaagtgttatgatggaagcaaagatatattattgattgtgatgggtcaatggcatctggtttctaaaagcatacaacaaactgaacatagctaatctgcacagagtacaatgtggcgataacgaataaatgtgtgatgaacatgaaaaatagaaatctatgttaatgatcatatggttttttggtcccttaggctatggtcctgttgctgaaggaagacctgtgagaatgaggcgtctcccatgttgtggcctcggcttaggctggtgcctgtgagtgtctctgcctctgcacatgtgttcccttccctttattttctgaagtaatacagcactactgacgaagttcatttctcttcctcaacaaggttcattgctgggtttttccttgctgccattccatggtacattgnggctttcgttctgatatgcgtgc

SEQ ID NO: 97848 - DNA, 799 bp, Zea mays
  Clone ID: MRT4577_20747C.1
tgggtacctcgaggccggccgggagtccttctcattcctcttcaagtcgcaactcgcaacgcaaagcgcaaggagcatttcaaaaaccctacctccctaccccacttcgcagtccgcacccaccccgatctccttctcccacccagatcgccggcccgtggcggcacgaaatggaggtgccgccggagatgctcgacgccctcgcaggctggttcgcgcagtcgctctctcccgacaccgccgcgcgccgcggcgccgagcagagcatcgcctccgccgcctcctccccgggcttcgcgctggcgctcctcggcctcgcggcctccccgcgccacgacctccaggcccgtctcgccgcctccctccacttcaagaatcttctccgccgccggtggcccaagcccgacgccgatgccgacgccgacgtcgaccacctccccgcctccgactgcgccatcatcaaggcgcaccttctccagctcctcctcaccaccccgcccctcatccaggcgcagctctccgaggccctcgccgccgccgcggcctccgatttccccgccaggtgggagtcccttctcccgtccatcgtgtcctccctaggcactgccgtcaacgcgggggacatcaccgccaccaactctcttctcgctgccgtggtgtcgctcttctctcgcttccgcaacgcattcgacaataatgccctccgtctcgacctcaagtactgccttgacatcttcgccgccccactccttgaggttttctcctttgcctcccgccgccttcaagccgctggcaccac

SEQ ID NO: 97849 - DNA, 2247 bp, Zea mays
  Clone ID: MRT4577_20748C.1
cggccgggaacccatccccgcccccgcgggctcggaaagctgaggagaaaggacttgattgggaagccgcctcagaaaggacgctcctccccaaccccatccccgcccccgcgggctcggcgggttgcgctgctgcggtgcggtgacggcaagaggagacgcgggggcacggacggaggcagtaggaggccgccactggatctcgtggagctggcccgcgccgagagcgatcatgagctctagaggccttgtccgcctcccggtttcctgtagtgctgctgttgatggagtcaatggatgcctcacctacagtacatgtcgttcaagaaactactactatcagtattctcataccactaacttgcaaatttcaccagtagaccagatgcctttgcctcggaaattaaagaaatcaattcagcgaaacgcttactttttaacccagaagaggaagctcgtaccacactgttcatcagaccttagtacctcctgcagaggagtgcccaactatttatcaatcaatgttttgcaagaccaatcaaatacaaaacagggagctattcgtaaagcgcttgtcattttgaatcctaattctggattccgcagctctcgggatgttttctaccagaaagtgcaatcaacattgaagctttcaggcttcaagatggaagtcattgaaacagcatatgccgggcatgcaaaggttctttcttctactgttgacctcaaaaaattccctgatggtattatatgtgttggtggcgatgggatcgtcaatgaggttttgaatggattacttagtagagacgattttgacgtggcaattcgatttcccattgggataatacctgctggttctgataattcattggtgtggactgttcttggcatcagggatcctgtttctgcggcaatcgctttagctaagggggatttcacaccaatagatgtgtttgccgtaaagtggatccaagctggagtgactcattttggtttgacagcttcctactatggtttcgtagctgatgttctgcaactgtcagaaaagttccgcgtgcagctcggtcccttccgttacgttgttgctggccttctgaagtttctttcattaccccagtacagatttgaggtggactatctcccttcatcgctgcaggggagaagttctgaatcaagaccactggctgaaaaacgtcacgaacagctttctgatgacggcaaggttaggagaggcacacagaccaacggtaggatcaaagacgactgggttaccaggaacggggagtttcttggcatttttgtttgcaatcacttctgcaagcctgcccaggggttactttctcctgttatcgcaccgaaagcgcggcacgacgacggcagcctggacctgattctcgtccatggaagcggcaggctgagactgttttgcttctttgttgcctatcagctctgctggcatcttctactcccctacgtggaatatgtcaagataaaagaagtgaaggttaggccagttggcagtacccacagtggttgtggcgtcgacggtgagcttcttgatggagagcgcggtgctgaatggcagtgctcgctgcttccagcacaaggcaggctgcttggccaggatcccggtgctttcaactagttagggctcgttcggttagctctcaatccatgtagattgagtgagattagatgagtttgaatcccaaacaagtcaaacttcttaattttttccaatcccatctaatccatgtgtattgggaataaccgaacaaggcttactgttttatctgtccagcagtaccgaggttgttggttaatttcatgataagagagcgagtttcagcaatgttcgtatactgattatacagtattctgtctctatagattgtagctgcagcagtctgaacatgaaattaacgaacaacctcggtactgcttggccaggatcccggtgctttcaactggttagggctcgttcggttagctctcaatccatgtggattgagtgagattggatgagtttgaatcccaaacaaattaaacttaattttttccaatcccatctaatccatgtgtattgggaataaccgaacaaggctttactgttttatctgtccagcagtaccgaggttgttggttaatttcatgataagagagcgagtttcagcaatgttcgtatactgattatacagtattctgtctctatagattgtagctgcagcagtctgaacaaacatcaat

SEQ ID NO: 97850 - DNA, 234 bp, Zea mays
  unsure (1)..(234): unsure at all n locations
  Clone ID: MRT4577_20749C.1
caagcacaagcgcacncnagcaatggcttctgaggttgtccgcccnagcgacgccgagctactaaaggcacaagccgacatatggcggctcagcctctccnacntcacgcccctgtcacngaggtgcgccgtggagcttngcatncctacggcgatcnaccgccatggcggggctgcctcagccgctgagcnggtcacggcgctgtctctcccctccataagngccgttcctcg

SEQ ID NO: 97851 - DNA, 1493 bp, Zea mays
  Clone ID: MRT4577_2074C.1
ccggccgggattgccaacccgctgctcacacactcacacacacacacacacactctacacgcgagcgagaccacgcgccggaccgccgcaagccggtcgccgccgccgcgacctggagcttgcgagctagctctggcctcgctgcctgcgccgactgagatggacccgcgctttccgctgccggccgcggcggcgccgtccacgggcggcggcggcggcgccagagggcaccaccggcgggcccactcggagacgttcctcagcttccacgacgcggacctgctcctcgacccggacggcgacttcttctccgacctcgacttcccctccctctccgacgactctccggccgcctccgaccccaccccgccgccgcatccgcagcagcagccgccgcaggcttccccggccccacgtccgcccggcgggacccacacgcggagcctctccctcgacgccgccttcttcgagggcctcgcgtttcagggacccagtgggagcgccgggggtggaggtgggcccggccacaagaggagcggctcgatggatggggacacctcgccgttcgagggcgagtcggcgctctccagcggcctgccggactacgccaagaaggccatgcccgccgagaggatcgccgagctcgcgctcatcgaccccaagcgcgcaaagaggattctggcgaacaggcagtcggcagcgaggtcaaaggagaggaagatcatgtacactagtgaactggagaagaaggtccagactctgcaaacggaggccactacgctgtcagcacagctgaccctgctccagagggatacaactggtttaactgccgaaaacagagagctcaagcttcggttgcagtccatggaagagcaagctaaactgcgggacgctttgaatgaagccctgcgagaagaagtccagcgacttaagatagccgcaggacaagtcgggaacatgaatgggaaccccttcaatggtggactccagcagcagattccatcctatttcgtgcagcagcagcacaggatgccgtactttggtggccaccaggctcagcttcacaatcaaaatcaaaaccatcgtcaccagatctcgtcaaatgttgggcagacgctcagtggtcagtccctaaacgactccatggatttcatgtgaggagtacaatatcagggccagtattacatcgtataccgactgcagttcagcactgtaaagatagctaaatgtacaatgtatgcatgtgcctcattggtagtgtgtagttagctcttctttgtatcattattctgaaaatggctcgtgtatgtcaaaatgatgtctcttttcttctttgctggtttctggagtaatgtgttagactgactagctacctttaacaatttatgtaaatctttagctttttttttaatggtggaaggttcttatacatacatacatacctgttaacttatttacagagtggagtttataagattttaccattttttaac

SEQ ID NO: 97852 - DNA, 487 bp, Zea mays
  Clone ID: MRT4577_20750C.1
aagcgcgactgccacttcacaccttcctcaaggcggcgaagatgtcggtggccgtgtaccgtggcccagctgctgttccggcgttcgaggcgccctgctggctgcgccctgctgagccgtacaagcagccggaggccgtcgtcgacgaccggcctgcgcaggtggacatatggaacgccatccaggccgacgtggacagggcgtccgccggcgctaagaaggcgtcgaagccgtacgtgcaccggtcgcggagcctgatgagccagaagagcctcgaggtctgcacagagagcctgggcaacgagaccggctctggcgacttcacgtcgtccctggacatggccttcctgttcgactcgctgctgccggcgggtgctgccgcagaggaggagtccttctggcagcacgacgggtctcgccgctgcgaggaggagcagtgggaaagcgaggacctcgcggcggtgaactaccactgctcggccgggac

SEQ ID NO: 97853 - DNA, 291 bp, Zea mays
  Clone ID: MRT4577_20751C.1
gctgccgtgaggcgtaagctgagcagatgcagatcgactgaccaactgtcggtgaccgcgagggatacacgacacacccgtgctggcgctgcgaccaccgtgatgtgctgatggccacttctgccggtaccatgcgcctacacatgtgcggtgcagtgcaggccatgcgtgaacatccaagtggtctcagagccagaggggacgaacgtgtgcatgcatgctcccgccatggatcgcagcttgagaagataaacaatcactagagtatgtcagtacactcgtgttcatgac

SEQ ID NO: 97854 - DNA, 361 bp, Zea mays
  Clone ID: MRT4577_20752C.1
ttttcttgatatttgcatattttgaaattataaaagcgggaaggttttcagaaaccttaccacaattaattctaatacaggggggaaaaatttcattagggtacaatacaagtgggaaaaaccctggattattcattatataatacctctccagcgggatgacccagaaaacctttcattgtcgagcgcccacctccacaaaaaaacctcatgctaccgtggggattgctacgagctcgaacctatccaggtgctggaaacacttccacgccttatgccacaccttggcctcggacaagttcttttcgacgacgacggccttctttaccttgacgaagaagtggtgcatggtcccggccac

SEQ ID NO: 97855 - DNA, 258 bp, Zea mays
  unsure (1)..(258): unsure at all n locations
  Clone ID: MRT4577_20753C.1
actacccgttttcctcacactcggcacttccccgaccacacctacggtggaggcggtagctnctattacgatgctcccccgtgaccgtccagcgacaccttcccgacgacgcccggtggtggctactacggtcccccctggtcatcatttgacacctccccggtgcacgcctcctggcggtggcgctagtagtatacagccctacggggggggcgtccagagatccctgccaatggaatccccgacgtgcaggtctca

SEQ ID NO: 97856 - DNA, 881 bp, Zea mays
  Clone ID: MRT4577_20754C.1
gccggccgggaaaagaaaaacataagagcttctgagtctagacactagatacagtaagccttagcaccaacagaggttagtatctcaacaaggatacttcaaatatgtccgcctcacgcagctcctctcccaactccatctcacagtggagccagaaagagaacaagatgtttgaagaggcactcgcatactacggcgagggcacatccaaccggtgggacaaggtgtccagagccatgggaggcatcaagtctgctgaggaggtgcgctgccactatgaagatcttgactatgacgtcaagatgattgaatcaggccacgtgccgtaccccaagtacaagacacatggattctggacctgaggttgaaatgttggagggctcaaggaggcagaaaacaaagctctatgaatctaagatggacctaggttctagaaggaagcaaagaaatccagccatggttggaaaataaaatgatgaaacagtgtgcatatgtatagtataggttatgagcaagtttatgtttacctgtggttgtaggatctagtgtaccttcacaaactgcatgatttcattattcccttgaactaagttatggaggatgtaaactcatgtatttatgaaaactaaaaaaatattaccttgtagcattttgttaaaaaaagttttttctttagctgaacactgttttttagcatcgggctcaaaaagagaggtcactagactgtgctcaggaacacacaaagaacaaatgctagaatcgtgtatgtttgagtccacaaaagtcactgttaaagaatccctgtccaaaagtagaatcgagatggtgtaacagtaggatcaaagcagcaatacatattggtccggacaaaaacttattcc

SEQ ID NO: 97857 - DNA, 202 bp, Zea mays
  Clone ID: MRT4577_20755C.1
acggatatcttcacgttgatagcagcatttgttatttgaatgaaacgcgccactctctgggggcgtgcaactttctactgagagcattccatcctcgtatgttcctttcatcattccatcagctcttccagcacatcagctacgcccttcagtagcttaatcacctcccccattgaccatccatgacactaatgcccacact

SEQ ID NO: 97858 - DNA, 285 bp, Zea mays
  Clone ID: MRT4577_20756C.1
tccagctggtagagcttggtcttcttcgtgaagaggcaaagcaaagggctacaagggaacatgagattgtcgtcaataaactgaaggctgaatcagaaaagatgaaaatagcgctgaaaaagactcatgctgctgagacagagatgacactggaaaaggccaacagcaagctgaagcagattgagaaggaatacactacagaagcttgccaaatcttcacagatcatagcagaacgtcagacaaccatttcctctctgaaagaagagaacagccagcagcagctt

SEQ ID NO: 97859 - DNA, 523 bp, Zea mays
  Clone ID: MRT4577_20757C.1
gaaggaagcagaaacagagaaaataaagaagaaatctgacagtgagaaagcttgtaagaaagaactggaaaatgataaatcttctaagaaggattcagcaaatgagaaaggcaagcttaacaatcccatcaaagagctagatatatcacttcaatcacctgcacaaactgccagtgccaaatgacgaccgtaccagatgaactaacagtagcttttccgaaagaggaaaactagttttggctgctcccaacagtgcttccttttgacgaatcatgcaggataaggaagccgaaaactgcacttgtaagcatcatagatttttttttcaatttatagaaaaaacagattagttcttgatcaataaagtatatatttcagtcttagataagtgctattgtatagcccatttcatagtaaggtctatgttctgcagttaatacgttctcaggggattgtcgaagaaattaacctggcgacaaagctgtacagatctgacataataatagccttttcttttgggtag

SEQ ID NO: 97860 - DNA, 285 bp, Zea mays
  Clone ID: MRT4577_20758C.1
caaaccgcctccggtttctaaaaatgggatgggggggggggcaaaccccgccaattttggggcagaaaacagccggacccatccccattttgcagcacaagaggggggtccctcccgtaagggggcccgcccaaagggacaaaaaccccgcccgggcaatcatgggggggcccatcctttacaagcgggagttgtaaaaacgggctgaagggctccggcaggggttcaaaccggggggaaaacagggggctttgggcgggcttgtaataaagcccgggcagccag

SEQ ID NO: 97861 - DNA, 331 bp, Zea mays
  Clone ID: MRT4577_20759C.1
gggggggacggactttatgtatatttgaataattctcaagaaaaacattacatgttatgagagggcatgtgctcatgcaatgtacagtgcttacggataccaataagcaaactatcgtggtgcaagatgattagctttagagcacacttgcttgcgtggcttaggtgaccccaattattaaaagcaattcatgcgccacctatactgacatctatgcagaaggaaccgtacgcggatgaattattggtgccgatatatataggtagataagcagactttggcacaccagtgcatccggttattagccggctatgtttctatgggggacctt

SEQ ID NO: 97862 - DNA, 275 bp, Zea mays
  unsure (1)..(275): unsure at all n locations
  Clone ID: MRT4577_2075C.1
agcgngctgcagctgcaggccatcatgtcgtgccactagtgcggcggcaacgtcggagacgtcgtcaacatcacgatcacgcagtgtgtgcgngacgtcggcatgagcaacaacgacatcttctacagcaaccggacgtgtgtgacgaacatcgagtagctcatgcttggagtggacgaccagcatctcttcactgngagatactgcattcagctgtagtctgattacatgaagagcttcagcgagaccatggcagacttactggatgctggtgt

SEQ ID NO: 97863 - DNA, 295 bp, Zea mays
  Clone ID: MRT4577_20760C.1
gtaagctcggaattcggctcgagcacttttcccaccccccatttattccagacgttgtctctcttgccaaaggggggcaattttaaacttatggcgggattcatacctaggatcacacgtttgggtggatggttcgtaaataccttcctcataccgctcaacgatcttaaagaaccacagttgcggaatttttttcatggctgttgcagtaaccaacatgcgccccatatgcactacaatcaaaaccaaaaaatcctcaacattcctgggacgcgacctcataaaagacacctcc

SEQ ID NO: 97864 - DNA, 437 bp, Zea mays
  Clone ID: MRT4577_20761C.1
acgtgcacgggggcaatagctctgttgatctagcctctcacgggcactgtgtgggggtatttataggtatccgagtgcccagcgccttgtgttaaggacgcatgtgccctcagacacctagtttatccccagaatattcccataaagcagggttacaagctgtaattacaagaatgcctttacaagctaggcccgtaacacaaaggcggccacgcggggcccgttacaatgggccagatcacgcgtgggccttagagcaggacgaggccgcgctgcggggagacgtcaccgcaggccttcgtctggtgctgaatgaagcgaagggtgtccctgcccgctttgtctttgtcagaccagcgaccgcggcggaggcttcgagcgaagggtggcgtctttgccttcgccccaacacttccgaatgaatactggaatgtgtc

SEQ ID NO: 97865 - DNA, 355 bp, Zea mays
  unsure (1)..(355): unsure at all n locations
  Clone ID: MRT4577_20762C.1
ccttctttttctttatcaatcaactacanacgggatgaancttgttgacttgtgggaggatcacaatatcatacctcgcatcaatatttacaatacttttttttcattccctgcatccaacaatcaatcatcgttccaacttctttatacttaaacttcaacgtctgctaagtactataatcaatattcactcttcccaaagagaatcactgttcttatcattccttcttgtccatcttcattaccaatcaactaatcatcatcttgactttctcaatatacttctattactcaatataatcatttacttccaatattagtaccaataattcttcttcattgataccatagtatc

SEQ ID NO: 97866 - DNA, 223 bp, Zea mays
  Clone ID: MRT4577_20763C.1
cagggggggaacaaaactagaaaccatttttggctcaccccaagttttggtaagtcttaaataacactctggttttaataaaaataaccattttaaatcgtccaaacaaaacgtggggaggcttatttaaaccatgacttttacaagaccagatttttcctttttccactagggttcccttaaggaaacacctaacctggccgacccattatttttttttttt

SEQ ID NO: 97867 - DNA, 349 bp, Zea mays
  Clone ID: MRT4577_20764C.1
ctaaagctcatagccctctccttccagagcatttcacatcgctctcatctgcacctgcttgcatccagcgcctcgtcactctgcaaaacagggactcctccaggagggcgatggctgatgaggagtcatccccgagctcctgcctatcgtcagagaacgagcatggcatgcagtggtccaacagccctgaggccacatccatggttcttgctgcctgtcctcgctgcttcatctacgtcatgctcccacaagatgaccctcggtgcccccagtgcaagagccctgttctccttgactttctgcaggacaacaacaacagtaagaacaacagttataatagcagcaggag

SEQ ID NO: 97868 - DNA, 324 bp, Zea mays
  Clone ID: MRT4577_20765C.1
gcccgacgcgcccaattgaaccgttatggggccacatggaattgggcggttgatatatagcaatgatcagcgagcataccgtggcatactcgcatttagcattgctatggcactatacgacgacactggtctggagagctttcgagggacacggatgaagagtcgtcaccaaagtctgggcagaatatcttgatggccaagagctcaaatgagaagactatgcaactgctaagcgatgcgctggtgaacatagagctatcttcagaacggactaagtgatgcgaggacagagaggtaggggagaactatcggcacttggagaca

SEQ ID NO: 97869 - DNA, 806 bp, Zea mays
  Clone ID: MRT4577_20766C.1
aaaaagctagaagccctctgcgcattctaaagctcatagccctctccttccagagcatttcacatcgctctcatctccacctgcttgcatccagcgcctcgtcactctgcaaaacaacagcacatacctccaaaggatgagccgcagcaacaggaagagctctaggggccttgacctgaaactgaacctctcacttcctgcaacaggggactcctccaggagggcgatggctgatgaggagtcatccccgagctcctgcctatcgtcagagaacgagcatggcctgcagtggtccaacagccctgaggccacatccatggttcttgctgcctgtcctcgctgcttcatctacgtcatgctcccacaagatgaccctcggtgcccccagtgcaagagccctgttctccttgactttctgcaggacaacaacaacaacagtaagaacaacagtaataatagcagcaggaggagcaggaggggatgagcaatatggttccataggcggcacgacatcaagaaaaaaagttatatgaagtcctaggtccagtagttctatttgtctagtcatttcttcagtgtaactgtgatatatccattctaaaattgcgaagctagcacccatacgttagtatcacaattttgatatatcacagatacactgagtgagggcgatatctttaatccttgtttccttcctttgtgtctctaaatgtaatagttttgtttagacataggaccagacttcctatcttttcgtttcaagataagaaaagttcaccctgatagagtgaaattgagacgtaaaa

SEQ ID NO: 97870 - DNA, 780 bp, Zea mays
  unsure (1)..(780): unsure at all n locations
  Clone ID: MRT4577_20767C.1
gcgccgcaccctccccaaaccctaaccaacaccaggtgaatcgtcgaccgccgaccggcgacagccatgagtaagctgcagaccgacgccctcaaggaggccatcacccaggtggtggcagacgccaaggagaagaacaggaagttcaccgagactgttgagctccagatcggcctcaagaactatgatccgcaaaaggacaagcgtttcagcggctctgtcaagctgccccatgtccctcgccccaagatgagggtctgcatgctcggtgacgcccagcatgtgggagaggctgaaaagattggtcttgattccatggatgttgaagctcttaagaagatgaacaagaacaagaagcttgtcaagaggcttgccaagaagtaccatgctttcttggcctcagaggctatcatcaagcagattccacgtctccttggtcctggtctcaacaaggcaggcaagttcccgactctggtttctcaccaggagtctcttgaagccaaggtgaacgagacaaaagccacaatcaagttccagctcaagaaggtgctgtgcatgggcgtcgcggtgggcaacctgtcgatggaggagaagcagatccagcagaacatccagatgagcgtcaactttctggtttccctgctcaagaagaactggcagaacgtgaggtgcctgtacatcaagagcaccatggggaagcccggtccgtgtgttctanagcctgtacccctaccgcccatctatatcaatgctacctagaatactggacttctttactat

SEQ ID NO: 97871 - DNA, 244 bp, Zea mays
  Clone ID: MRT4577_20768C.1
tggtctcttcctgctacatcggcactcgctcacacacatggcaggcctgatcgatatctggacgctggagagggagcggatgctccgggccggcggggccgcgcgggcgttcaggtcgctcggcgggggggggcgccgcgacaccggtcgggcggaggagtctggtgggagcagtagcgacgacggagccggggccgcgcgcgtggacgctgcggatgagcgggccggtggggctggtgctggt

SEQ ID NO: 97872 - DNA, 1023 bp, Zea mays
  Clone ID: MRT4577_20769C.1
atgaataaattatcaacaaatgaaactcgcacgcgattcaatgcagttcataaatcggggaaggagatcagcactagccttggacttgagattgtctatgctctcgcactgctcctcgaccagcttgccgagcgacgctgccttctgctccagccggacgacctcgacagcgttcctcgaggagaggcaggcctgggtacacgctctgggtggaggaatggatggccgtgccaaagcggtgctggatctaccacctcgcctcgctgtcgccgttcctgctcgtctttgcaggccacatctgggtggtggaccactggtggaaccagcacgggctcggcggcgacaacgtcgagggccgatgtcgtggtctccattagggccatatcaacctccttcactggagcggcaaggggtctgtttggttggtttctctcgccaacctggctgtgtaagccaggatcactggagtctggctctggagatgcgaccaatttgctcgtatctagcacatgggccgcccggttcacagccaaggcatggcacagacgcaggggcacggtgctccaagtccccaacagccaacaacaacaacaggatgcgcccagccagctcgtcgaacgaaaaggaaccgtccggccgcgccgatcaacgcacaatagccccatcgagggtggcactggctgcctggcccagtggccacgcttttggccagacggcatcgtgcatcccaattggcaaagggagaataacgcagagcggcagcagctcaggagagtacagacattacgagtactgccagtaaagtttgctgggcaaatactgactggtggcaacaaggctgttattgttattatttcatatagtacgcaaattcgtatcattagccgaccgatcgactgccgaatggctttggctcatctaaagaagtggtttcacctcagcgataaggagaacaacggttattcggagagagagtactctataggagctggtacggttataaatggattgaaagtaatttaa

SEQ ID NO: 97873 - DNA, 278 bp, Zea mays
  Clone ID: MRT4577_2076C.1
taggtttcggactttcagtttcgccatcgtcgtcgtcttgggtcggcggcggatccagagtctgatctactgcttgttgaagtcctctgtggacactgcatcaggtcctaattcactaggatataaattctcaagtctcgacctgaggcagctgagagaaatacaagatcctcagtgcaactgagccactggctgcacggcgaatggtgtttcttcgtacaggagaaagggaattaaaagtatgcattggttttggaacaaaaaaaaaaaaaaaaaaa

SEQ ID NO: 97874 - DNA, 547 bp, Zea mays
  Clone ID: MRT4577_20770C.1
ccactgaagcaacagataaattaaaagacaatttgtcgcaaagacaacaacctgtcagcactgcatcacgctgcgcgctcaattgtggcgcggcgcggcgccgcgtgggcccaaattaaaagaaaccaatgagcccgcaccgggctttcaccttcacactcgattatgcatgcatgaaacacaaacacagggagacagacactagctggctactgctctttgcacgtcgcgaactcgcgatgctttcaacttgtctttctattacttttcagcaccatttagcgctaggatctccgagatgaccgtagctttatcggcttcgaacttcttgtcgtctttctcgacggtggtgaagtctttcaagaacctcaggagcttgcttctgttggcgagcagtatgccggtgatctcaggtgcctgctccttgttagcgacgaacagcttgaagacatggaaagcctctacttgaatggctatgctttcatcccttagaaggttcatttgaatcatgagatgctctttcgaactaacatagcgcaccatcact

SEQ ID NO: 97875 - DNA, 353 bp, Zea mays
  unsure (1)..(353): unsure at all n locations
  Clone ID: MRT4577_20771C.1
agaaacagaatagcacgttacaaagcgagtctcgctcgtcacagtacaagttcaggaatacagcacgtacgtacacatttatcttatcttacggatcctggtgcccagccagtgaatgcagccactgcaacaagcaaacaatcacacccaacaccacacggccgcagcacggtggagcaccgatcctctttatttatttcttaaccgaagccgctctgctcccggatcatcgcgtcgcatggcgtcgctgctcggcggccagatcacttggtcgcgatgaacagcccccacttctgctcgccggcggagctccgcttcagcttcgcgctcccagcgttgnacgatgtcgtcgt

SEQ ID NO: 97876 - DNA, 562 bp, Zea mays
  Clone ID: MRT4577_20772C.1
atgtcttccgttctgctgtcacgctgactctgaggtctcgtctcatgaacctttcccttgctgatgttaatgcctatccgaccaacactgagtgatcacaccacccaatctgctgcgaatgacgctttccgactatccaacctcgactccctttactggtggttcctatgcatcgcggtccacttgcgcgaggcatgacgcaacctccccccaatgattcccaacctcgacagcaacatctctgcatcccagccgaatgatcggtgatacgtgaacggaaggactcaattcaccacttgctcacagcataccatgctgactgcataccattctgtaaagaactcctgcaccttcacaaacagcgtgaggagcagcaacgacttgctcccgacatcgcctgaagaaccatgatcgttctggttcatgcacctcgcaactgtactaagaagatcattataagacactaccttttacttcctttcaaacgaacactttgtggctctgtcgactgctgtgactgacatcgttcgaaagagactaaacgccgactaacattgtctta

SEQ ID NO: 97877 - DNA, 316 bp, Zea mays
  Clone ID: MRT4577_20773C.1
aaaatgtgtacacgatcattatcgctacgcaagtgggcacgttcaagaacatggtcaacttgttggtaaggatcagcaggactgtggactggggggaactgactaccgaggagctaaatctcttgaccgtacaataccagatcgtaaccgcagatcacctgacctcaaggtccatgttctactccgtccagcatcaaggggagggcagtggcattgaggtcagagacacaatgaccctggtttttagggacaagacagacaccgaattgaccatcatgtgcccagagtaaataagctgatcgaaagctatgttgtg

SEQ ID NO: 97878 - DNA, 170 bp, Zea mays
  Clone ID: MRT4577_20774C.1
aatgaagacacgagcttccattaacatcttccttttttggtcatgggcactcctacaaaaaggagcccgtttaacctttggggcggaaaactgcccctgctatctcagctaagaagctagcaacaaaaacggcccgtgttctaagtcgaaaaagggcttacaaaggcaaa

SEQ ID NO: 97879 - DNA, 264 bp, Zea mays
  unsure (1)..(264): unsure at all n locations
  Clone ID: MRT4577_20775C.1
tggggtttgtagcnanttttanaacccaggaaggatanttatgcagttgtaagcacctgctgaggatatagcaggccactggatatggtgtgtcatggaaatgggctcccagagctaacggtacggatacacctgccgaacaagatatcgaagagccccggattcttactgtagaacgtcttacctgagcacacaaagggggtttgtgggagtagactgctattgacgaaggttgtatattggacctagtaacaaccgactagg

SEQ ID NO: 97880 - DNA, 133 bp, Zea mays
  unsure (1)..(133): unsure at all n locations
  Clone ID: MRT4577_20776C.1
tccgnatcccgtcccccgcgtccggagccagtaacaaatcctgcagcgggggcagaacttcccagttccaatacttctgttaatgagttgtgcgaaaatgatggattctggctcctctgtttcttgctgttcg

SEQ ID NO: 97881 - DNA, 600 bp, Zea mays
  Clone ID: MRT4577_20777C.1
gaagaagctacggtcgagctggctaggtcgagggcagactgagaggatgagacagaacattctcaccatggggcagtgctgccttccgagtctgaactggatgttctgatgaagttcacgagcgaggtacaagaacagctgcctaacctactgagcatgaaagcagatgcatcattccagaagagaaggatcgataaactccaaaacgaaattgaaagacataactcgtctgttcgtgcaactctagcatgagcttaaactggaaaggaaggcactatctatggcaaggtcttcagctgatgaggaagccaaaaaggcccgggagcatccacgcgcacttcatgaggctcctaaccatatctgacgcccatcgaatcatacttcttgttctacgagatactgaaggatgacgccttaactgacgtgacatgggctaacgctggcaaagaacacacagtcgacgactctatcaaccgtgctgaagctctactggagatactcaagacaatgtctgttgagatggatgtgcactctcggagtgcggcggagagagcgatgcagcatgtcacgtccttcatcgcaatactaaagcacccagct

SEQ ID NO: 97882 - DNA, 280 bp, Zea mays
  Clone ID: MRT4577_20778C.1
atgtttcttatttatcgcgtggagccgtagtcttgtgtcatctttattgtgactgcgagggagacattaatgcagcacgtatcggagttgaagcaaaatttttacagcaaacaactttgtgactacggaagaccctgtagagccgccaaggacctaaaacaaccatgacactgtgtagtacgtaccgaaaccaacgacaggtgagaagtacttgttgaagaacaaaacaacgctgaatatgggtacagccaattggtttacagcaactgtggctcatgat

SEQ ID NO: 97883 - DNA, 191 bp, Zea mays
  Clone ID: MRT4577_20779C.1
cgtgggggcacagcggggggcacccttctggatttaatatagagccacagcgtgctggaggtccgtagtgaagtgcacattaaatcccctggatcttagaatgcgagtgggatttgtcatgtagtttgctcaatagttaggaattccactattggtagagcagtgacatccattgatttgttgttgccgaa

SEQ ID NO: 97884 - DNA, 605 bp, Zea mays
  unsure (1)..(605): unsure at all n locations
  Clone ID: MRT4577_2077C.1
cgggagtttggccctgtgcctccctcgtgcagcggcagtagcactcgtctcagctcccttccttcatcacacaaagccccacttcgtcgtgcctccaccctgcttagatttccccatcgtacgaggctgctgagcacctcgccggggctacagcagctgtcagcaccggttttccctggtgtctgcctcacagctccggcacgccagcgtctctctactcgacctctctcatcgctgcatctggacatacgccgctactcgccgctctccctgagctcttagaaaaggaagttgaaattcaagaagaagtggttcctgaagaggagtctgttccagtgctgtagatccagtggttggttccatctgactggttattgtgatagaaggactttgaatcttatccggtaacaaggcaagccccggtgcatttgctaccttccttgtgtttataaaatttttatcacttatatgttgcattaggttataggagttgattgatcaaacccttgatgtattaccatccttgaaagcttgatcaccataccttgttacctgtttaataaaagctagtgatgcttagtcaaaaanacanannaaanaaaann

SEQ ID NO: 97885 - DNA, 690 bp, Zea mays
  unsure (1)..(690): unsure at all n locations
  Clone ID: MRT4577_20780C.1
aatactgaaaccaggggaaagtgaagatgtaatacntgttggcgtgccaaaagcttctatcaatcttcagtcaccggcctgagcaaaaacagatctatatggcacagaatggtttcctcccgctgatggaactccttgaaattcctaaaaatcgtattttatgctcagttctgcagcttatcaacaacattgtaaaagatagtacaggcttcctggaaaatgcttgccttgttggccttattccagtggtgatgaattttgcagaaccaaatcgcccaaaggatgttcgggtgcaagcatccttgtttcttcagcagctttgtcaagccaggtctttttctttgctttgacacagttgatagtttctgacattttttagtaaaagagtggaagggacaaatgctttggcgtacctaattttcagtttccatctccagcaccttgacattgcaaatgttcattgcatgtcaagggatccctgttttgggatatggttcatcttgcaattgacgncatttggcaggtctttaagctccagcactcaactccaagaaatgacttctgccgtatagcagcaaaaaatgggatgcttcctaggctggtgaatacactatatagcttgaacgaagcaacacgatttgcctcagtctcagggtcaggtgcttcgcaacacagaatggctccaccccc

SEQ ID NO: 97886 - DNA, 2763 bp, Zea mays
  Clone ID: MRT4577_20781C.1
aaagtgaagatgtaatactgttggcatgccaaaagcttctatcaattttcagttaccgccctgagcaaaaacatatttatatggcacaaaatggtttcctcccgctgatggaactccttgaaattcccagaaatcgtgtatgatgtttcactgtggttttacaaacatttttcctgcccctttacaccatagaagttgtttattttgttttttttatttttttattttgcagatattatgctctgttctgcagcttatcaacaacattgtaaaagatagtacatgcttcctagaaaatgcttgccttgttggccttattccagtggtgatgaattttgcagagccaaatcgtccaaaggatgttcgggtgcaagcatccttgtttcttcagcagctttgtcaagccagcaccctgacattgcaaatgtttgttgcatgccaagggatccctgttttggtaagctttatggagcctgactatgcaaaatacagggatatggttcatcttgcaattgacggcatttggcaggtcttcaagctccagcattcaactccaagaaacaacttctgtcgtatagcggcaaaaaatgggatgcttcctaggctggtgaatacactatatagcctgaacgaagcaacaagatttgcttcagtctcagggtcaggtgcttcagtaacacagaatggctcaaccccccgacgaagatctggccaattagacccttcagttcttgaaagttgcaaggcaaggctggatcatcatcattcatctggttctctgcaatctctacaaacagacgcagataagcaccatatattaatggactcgtcatctcctaggtttagtgataaaaccggcagtaacttggagaggaatgataacgacttggttattcggccacagaggcttagtgtttctgctggaaggacatctacagacagatcaccaaagcatgtagaactagtttcaaatggtcatattagcggtcaaaatgaccaggtccgacctctactgagtttgttggagaaagaaccaccttctcgacatatatctggacaacttgattacgtttgccacataactggattggaaaggcatgaaaccattttgccactattacatacatcgacagaaaggaaaacaaatggtgaacttgacttaatgatggattttgctgaggtctctagacatggaagagagaatggccatctggactcgagtataaaagtttcaaatagagttcatagtatgaaatatgcaccttcgacaagtgcctctaatgaaggagcatcaacttctggagctgcatcgcaaacagcatctggtgtgttatctggatcaggagtgctcaatttaagaccagggagtacaacatcatcaggcccattagctcagatgttctcttccatgagcgcagatgtggcacgcgaatatcttgaaaaagtagctgatcttcttttggagtttgcacaggcagacactgtggtaaaatctctgatggccagccaaagccttcttacaaggctttttcagatgtttaacaagatagaacctcctattcttcttaagattcttaggtgcattaatcatttgtcgggtgatcctaattgtctcgagacacttcaacgcacagatgcaatcaaacatctgataccgattcttgagcttcgtgatggacctctggtttttcaaatacatagtgaggtcctcaatgctttgttcaacctttgcaagattaataaaagaagacaggaacaggcagctgaaaatggaatcattcctcacttgatgaattttgtcatgtcagactcacctctgaggcagtatgccctgcctttgctgtgtgatatggctcatgcttctcgcaactctagagagcagttgagggctcatggaggactagatgcgtacttaaatctgttggaggatgatgtatgggcgtgcacggcattagattctattgctgtttgtttggctcacgataatgatcatagaaaagtggagcaggcactgttgaaaaaagaggcaattcaaaagttagtgaagttcttccaagactgcccagaacagtattttgtccatatattggactctttcttgaagataataatgaaatcttctaggctaaacacagcaatggccaccaatggcttgacagcattgctcattgcaaggcttaaccatcgagacgctattgcccgcctgactctgctgaaactcataaaggttgtctatgagcatcatcctcgaccaaaacaggtcatagtagagaatgacctccctcagaagctacaaaacctgattgaagaacgcaggggtggacaacggggcggccatcaagtgttggtcaaacaaatggccacctcattgctgaaggcgctgcacatcaacacagtattgtgattttgatgggtcatgtgttttcctctcaagttagtgtttacgttttcgctagaggaagaaaaggggcgtccttctctttttgcctccttttctgctgtggtggcttctcacgagcaccagactcatttgttgtacctgatccctccttttttgggagaaaggttcaacgttttggtgcaggataaaatgggcttgctatcctccagtgctgtgtatatctagcgtatgttagtgaagaaattgcaaattagacaatctaattaaaaaaatttaaaccatattgacatttaaaaaaaaaaaaaaaaaaaaaaaaaaaaaaaaaaaaaaaaaaaaaaaaaaaaaaaaaactcgagaggggg

SEQ ID NO: 97887 - DNA, 4592 bp, Zea mays
  Clone ID: MRT4577_20782C.1
ctcggaatgaccaaaaaagagtaagaattacagaaaagcccctccggtagtctctctcttttccgtttctcttctccggccttcgtcttcctgcttctccccgtccgccaattcccttccccacccaaaccctagagcaaagctcaatggccctcgtcacgagttcgcgagagactctgcaccgccgccgttgactgctgatccaaccgctcccgcggcgcccggggccctgtcacggaggcggcggcgacatggcgtcgaggcagcacaatgcgcagttccacaaatccaagacgcttgacaacaaatacatgcttggagatgaaatagggaagggggcgtacggccgcgtatacaaggggcttgacctggagaatggcgatttcgtggccatcaaacaggtctcgctggagaacattccgcaggaggatctcaacataataatgcaagagatcgaccttttgaaaaatcttaatcataaaaatattgtcaagtatttgggatcattgaagacaaagagccacctccatattattttggagtatgtggagaatggctcacttgctaatattatcaagccaaacaaattcggaccttttcctgaatctttggtggctgtatacattgctcaggtgttggaaggtcttgtttatctgcatgaacaaggtgtcattcatagagatatcaagggcgcaaatatactgactaccaaagagggccttgtcaaacttgctgactttggagttgccactaaattgactgaagctgacatcaacactcattctgtggtcggcactccatactggatggcgcctgaggtcatcgaaatgtctggtgtttgtgctgcctctgatatctggagtgtgggttgcaccgtaattgaattgctgacatgtgtcccgccatattatgatctccaacctatgcctgccctgttccgtattgttcaggatgtgcatccaccaataccagaaggactgtcacctgagattactgattttctccggcaatgttttcaaaaggatgcgatgcaaaggcctgatgcgaagacattattgatgcatccatggttgcagaactcaagacgtgctttgcctgcttcccttcggcaacctactccattaaggaatatcgacggggatgatgaaagctcaagaggggacaataactcgggtttttgcgacacaccaggagatacccgagcaactattgcttctaatgttgaccaggtgaatgggaggaacggaccaaatatggactctgctgcgcaaagtaaatctgaagagcttcatgatggaaatttagaacttacagagggcattagttcgaacaatgtggcgcttgtgaaagataatgtggtccttaataaagatccgacactagttttacatgagaagttaccggtggaatcttcatttggagatgctgatttgaatggcaaagtaatggcacatgaactattgcaaggtggtctgccaagtaagatagagctggagaataaagaaagttcaactgttgaggatggtgatgtattctcatttcaggctggaagacagaatattgacttccaaatggtggttgaaccttcagttgttgagggaccgaaacagcttagtagatttagtgacaaacctgaagatgcctctttggaagacttatttccaccaatcgacaaacggggagataatggggctgaaccttcaacatcaactactgtccaagaacttcaatataatggtgtacacaatggattcgtgaaggggctcaatgccagggtggagaagcaaaaagaaaatgatagcgagtccatgaatggtggaaaactaattgaatttgccatgcagctagaaaatattgatgcatcgggttttggtgaacatattcctggagagagtcttttccctctgcagtctgtggagtacagcaaaatagtagcacaactgaaaccaggggaaagtgaagatgtaatactgttggcgtgccaaaagcttctatcaatcttcagtcaccggcctgagcaaaaacagatctatatggcacagaatggtttcctcccgctgatggaactccttgaaattcctaaaaatcgtattttatgctcagttctgcagcttatcaacaacattgtaaaagatagtacaggcttcctggaaaatgcttgccttgttggccttattccagtggtgatgaattttgcagaaccaaatcgcccaaaggatgttcgggtgcaagcatccttgtttcttcagcagctttgtcaagccagcaccttgacattgcaaatgttcattgcatgtcaagggatccctgttttggtaagctttatggagcctgactatgcaaaatacagggatatggttcatcttgcaattgacggcatttggcaggtctttaagctccagcactcaactccaagaaatgacttctgccgtatagcagcaaaaaatgggatgcttcctaggctggtgaatacactatatagcttgaacgaagcaacacgatttgcctcagtctcagggtcaggtgcttcagtaacacagaatggctcaaccccccgacgaagatctggccaattagacccttcagttcttgaaagttgcaaggcgaggctggatcatcatcattcatctggttctttgcaatctctacaagcagatgcagataagcaccacatattaatggactcctcgtcatctcctaggttcagcgacaaaacgagcagtaacttggagaggaatgagaacgacttggttattcggccacagaggcttagtgtttctgccggaaggacatctacagacagatcaccgaagcacatagaactagtttcaaatggtcataataacagtcaaaatgaccaggtccgacctctactgagtttattggagaaagaaccaccttctcgacatgtatctggacaactggattatgttcgccatatatctggtttggaaaggcatgaaaccattctgccactattacatacatcgacagagaggaaaacaaatggtgaacttgacttaatgatggattttgctgaggtttctagacatggaagggagaatggccatctggactctagtataaaagcttcaaatagagttcatagtatgaaatatgcaccttcagcaagtgcgtctaatgaaggggcatcaacttctggagctgcatcacaaactgcatctggtgtgttatcaggatcaggggtgctcaatttaagacctgggagtacaacatcatcaggcccattagctcagatgttctcttccatgagcgcagatgtggcacgtgaatatcttgagaaagtagcagatcttcttttggagtttgcacaggcagacaccgtggtaaaatctctgatggccagccaaagccttcttacaagggttttccaaatgtttaacaagatagagcctcctattcttcttaagattcttaggtgcattaatcatttgtcgggtgatcctaattgtcttgagacacttcaacgcacagatgcaatcaaacatctgataccgattctggagcttcgtgatggacctctggtttatcaaatacatagtgaggtccttaatgctttgttcaacctttgcaaaattaataaaagaagacaggaacaagcagccgaaaatggaatcatccctcacttgatgaaatttgtcatgtcagactcacctttgcggcagtatgccctgcctttgctgtgtgatatggctcatgcttctcgcaactctagagagcagttgagggttcatggaggactagatgtgtacttaaatctgctggaggatgatgcatgggcatgcacggcattagattctattgctgtttgtttggctcacgataatgatcacagaaaagtggaacaagcactgttgaaaaaagaggccattcagaaattagtgaagttcttccaagattgcccagaacagtattttggccatatattggacgctttcttgaagataatcacgaaatcttctaggctaaatacagcaatggctaccaatggtttaacaacattgctcattgcaagacttgaccatcgagaagctattgcccgcttgactctgctgaaactcataaaggttgtctatgagcaccatcctcgaccaaaacagctcatagtagagaatgacctccctcagaagctacagaacctcattgaagagcgcagggatggacaacggggcggccaacaagtgttggtcaaacaaatggccacctcattgctgaaagcgctgcacatcaatacagtattgtgatattggtggatcatatgttttcctctcaagttgtatatgtttgccctagaggagaaggtgccttttccttttgctctgctgtggtggtttctcatgagcaccagactcatctgttgtacctgatccctcttttttcgggagaaaggttttttaggtgcaggatgaaatggacgttctgtccttcagtgttgtttatatttagagtgttagtgaggacattgtaaattaagacatataattaataaacaaaacccatgttgagataaaaaaaaaaaaaaaaaaaaaaaaaaaaaaaaaaaaaaaaaaaccgagaaggggggccggtac

SEQ ID NO: 97888 - DNA, 430 bp, Zea mays
  Clone ID: MRT4577_20783C.1
cgaggcgggccagatgaaatgaatgttcactaagaaaacacctcctgatagtccatatgctgaaggtgttgactagctcatcagacaattccctcaggctgtaggagagcgtcgccggagaccgggatgctgacttctctatcgcaagatacatcgacactgtgtacaatgggtgaaaggacactcactctcacgaatgagtcaatactacagcggacttcgccaccgctgtcatcacgcaccatgctcacgaccacctacgataggtaatgtttcctgcagctgccagaacccggcaccaatgaatccgcacgaggatcctatcctcaacatgaaaagtgtcaaggccaccaacgactgcaactcccccatctccagcgaggtcgacaagttcaatgcctaactgtcagagactgccagcctgatcaac

SEQ ID NO: 97889 - DNA, 371 bp, Zea mays
  unsure (1)..(371): unsure at all n locations
  Clone ID: MRT4577_20784C.1
cgcccccccacagtttcgtcttcctcttctccgaccccgaccatggagccggacgccgatgaggactacatgggagacctctcacgcttcctcccgccgagtccgtcctcctccccaccgaagaacctcgggcgccggaagcagccatccacgcaggcgcagccgagggcgaagcgcgggaagggtgtgccgtggcaggagcggcggaggcaggagcgcgagcggaagcagcgggaggaggacgcacgcacgatggccgggctcgcggaagctatccctgagagcaacgtagggttcaggatgttgaggcagatggggtacgatcccgacttcccgcgcggngccggcgccgaaccggtcgggatcgagat

SEQ ID NO: 97890 - DNA, 672 bp, Zea mays
  unsure (1)..(672): unsure at all n locations
  Clone ID: MRT4577_20785C.1
tcgcggccgcgtcgacctccatcaccagctacatcaagggcatcaacatcctgggcaacatcatcgaaggcaaccaggactccgtcaacaaccgcgtactacggcgcctacaccaccatgctccgcaacctgttcgccctcatcatggaccccagcgctgagcacggcgtcgcccccggcgtcatggcccactacgagaccgccctgcgcgaccccgcattctactactacaccagctacatcatgggcttcttcaagcagtacaaggacaacctgccctactaccgccacgaggagctcaacttcaacggtgtggccgtcaaggacgtcgccgtcagcaagcgctcatgacccnntacttcggcctcttcgacgtggacgtgaccaacgccgtcgacttcgcctccctggacgagatggacaagtacgagtacgtcgccaaggccatgcgtctcaaccaccagcccttcacctacaagatccaggtcgccagcgagaagcacaccaacgccgtcgtccgcgtcttcctcggacccagcaccgactacatctacaccaacttctacggtgaccaggcctccgacgtctactacggccacgacaccgccgacttcgagcgcctgcgcgagtacttcgtcgagctcgaccgtttccccgtccagcttaagaacg

SEQ ID NO: 97891 - DNA, 2102 bp, Zea mays
  Clone ID: MRT4577_20786C.1
ggtatacgagctatgcctctccgtgtgggcttagccgtccggagatgacgatgtcgtcacaagaggtaactctagaacttcttttaggcgatggttctaattataaatcttggtctgtctctatttataatgctttcatgcatattgatcctgatttgagacagatctttagtagaagtatttttccctctaatattagtaaaaacccttctaatactgaactaagatgtctatctcttaatcaccatgcttgcaacatcttagttgactctctttctagaggtgcttattttgccatcatgagtagtgatagtgatttatttgttgatgctcatgatctatggactagaattaaaataaaatattctgagtccaattgtactacttctactccctatgttgcttgtggtactaacctttcaaagggagaggaaaaacgatggcaaccaaacgatgaatccacctcaccgacaggtttgtcttccactagttataaatgtcttattgctaacaatgatagtggagacgaaagcgatgatgaggaggaatatgaggatgatagcgaggatgagtcttcatcaccacaaggtacattttcctgtattgcttccactaataataatgacagggaaaatgagaccggtgatgcggaagaagaggagattcgtcggttctacaccaatctcaacaaagaagacaaagtgctcttggttaagttgttgagtaggaacaaggaacaaggcgagacgcttctcaggctagaggagactctcatcaaaaccaacgacagcctggagaagatgaccaaagaacatgaggagctaaagtgctctcatgataatttggtccaacggtatgaatctattttatttgagcaaagaaataatcatgatgtattatctgatgttgctcaacttaaaattgaaaattctatgcttaggaataaagtagaattgttgagtcatgataaccttgctctgactcaaaaatatgacttattgtcttgttatcatgataatctcttggataggcatatcatgcttgaagttgctcatgaggtcgtaattacgaacttaaattcatgtgaacttcattcttgcacaagtacacattcagatatttcatcaccatgtgctaacccctgcttgtcaaaagaaagccaatgtttgaataagcatcaagctgcagggtcacaaaagaaattgtgcgggaacaagaaagcaaagcaactaaggagaagacgcattgctcaacctcctcaagatatccacggacgcatggtgaagaagcttgagacgggagaaaccgcagcaagtgttaaactccataagaaggatgctcctaaagcaataaatgaagaaatcaacatgaacaaggaaaaaggtaaaaattcaattagtcatgttgtttgcactgatcatctctctatgtcatccaagagcaaaaaggggagaggaaaaaggaggtgcttcaagtgcaaggaattaggtcacttcattgcgtcttgtccacacaaagacaaggatgaaggaatgaggagatgctttggatgcaacgataaggaccatatgatcacttcatgtccgctcatgaagaatcaaagacgtgcaccctccaagatgaccctcactaagcaaaaagacaaacaacaagtgtcaagtcaggttgagcgacgcttctgctacatgtgtggtaagcatggtcatctacctaagtctcaaggtggaaaagggaagatgagcaagaaatggagcgatcaggacttgggtacctccacaagtcgagtaattgcaacaagaaaaggtcaggataaaggatcagacataagtgtaaaggaactccgcctacttagatggaaagtacaccataacatggtaaagatattcatgtggttctggcgctttaaaatcggtatcttaatggtgaatagtgagacaatcgatcaagccaaggatggaggcaagaagaggttcgaggtaccgagtgcacgggagaaggtcaaggagaccaggatcccaaagccaggggtgaagaagaagacttgcaaagtcaaggttgatcgagttaagaagagttatggtgcatcaaggatcactacataa

SEQ ID NO: 97892 - DNA, 299 bp, Zea mays
  Clone ID: MRT4577_20787C.1
gggatagtgcacttctggtatggggacatatacaacccgggcccgattattctaagatttttctaccacaaagaatagcgcgggggtacccatcaataaattggcacggcaatatcagtcacggcaacacacacattcttgtgtaccccccaacatctgctcacatttcggatctatcattgcgtggagaggctccaaacacgagcaaactggttctctccatattaccaaaaatactaacattaccttgttgtggaaaaaatattggcactccctcttttaatacccacggtattttg

SEQ ID NO: 97893 - DNA, 520 bp, Zea mays
  Clone ID: MRT4577_20788C.1
sgcggcggagggggataggggggccggagccgagcggcggagtttctgsaggtagacgacgcaggagctcgaaaccctaatactgaggctgcccgcggcggcgatcgcctcctcttccttggacttatcttgcttcaactattaaggcggagtcaccatgaacgaccaaactaatgaaaaatgtccactttgcttgaacaagatggatttgacagataaacaactgaagccatgtaaatgtggatatgagatatgtctttggtgttggcatcgtataattgatgaatctggtgggaggtgccctggatgccgttctgtatataacaaggataagatcttggagacaagcgccaggaaccaaattttaaagggaactttgtgctgataaagtccaactatcaaaaaagaacaaagtcaagtctcatgaagcaaacatcttgcaaaagttcagttggggacagtcagaaccaaaagatccaaatagsattccgtgtgattcaacggragcttgtctatattg

SEQ ID NO: 97894 - DNA, 636 bp, Zea mays
  unsure (1)..(636): unsure at all n locations
  Clone ID: MRT4577_20789C.1
cctgccctccttgagtcgagcaccggccggcagggcaccgtcgccctccacctggctccattagaagaaggcgcaagcaccacagaatncgcacatagagcaagggcagggaatccgtgtggaggaactatcggacacgcatgctatcgtggcgcgtaggctaacctgtcaagcagcatacacccatgcatggtgcgtgatcacatcatatccaagtaccttgggcaagatctttatgaagctagctgggaagaggaaagcgaacaataattagggggggcaaggcctgctgccatagataaggctggtggggcttacaccaagaacactagtaacgcagtcaccgacaggagcacgtatctccgcctgagggagcacactgaatcatgacatagccttacatatgattgccggcatctggagtggctctagtgcaagcatgtggagccaggccttatctagtggaaatgtggaatcactggactggctgatatgccaaaacaatgctccttatattgggattatgctctaggggctcaaggttgtgatgagataagcccttggtcaccggcctgcatctgacaagcgatattttatcctatgccatcttgacgtcaaaggcggttgtggtacacc

SEQ ID NO: 97895 - DNA, 464 bp, Zea mays
  Clone ID: MRT4577_2078C.1
tggaacctttgggctgatttatgtgcttgtctggatggatggcttgttgggtggtcgtgttgtcaggcaagcaggcagtcagaggggcgtgttaattatgatgcagtatacgtaacggtatctgtggttgcggtgtcgttgctgcttctgactgctggttcggcgctcagtcgtatggaattgtagttacgtagatgactctgattgcatgttgcgcgcagttggttttggttattgtttatcgtcgttaatcgtttagcgacgatgatttggttacgcttgttgcatgtatggcttcgttctctgactgcatgttgcgagtaataggagcctcgcttggtgtcggaggctggcttccgcttcggtcagagtcagtttgtttgttggctatatggactggactctcttacttatctttagtcgcaacccgcccttgtcgtacccaaccggcccggacccgaaaa

SEQ ID NO: 97896 - DNA, 493 bp, Zea mays
  Clone ID: MRT4577_20790C.1
gtcccaacaggcaacaattcaggctgaaactaatggcatgctacttccattgacacatgtatctctctacatttgtcgatggcaaggaacataagctggaaacaggataattaaaaagtcgttacaaagtacatggtcacgttctgaggtattgagaccatcagtataatttgtaagacttgacccagcgggcctgtttcatgcttcctcaaactgcatgaattggactgctgtttctcttgcttagttcaggtctattcatcggtggactcacatgaaaagctgattgccttgtatctgtggatccaataagctcaagggaaagagcagtgggttccatggagccagagctagcttcgtcgatgctgagcttagacataccaacaacatcatctgccttaaccacccccttaccattcaaaggagttggttttaggatttcatgggttctggctgcttcctccacgtgggaaacacttggaggccaaagagt

SEQ ID NO: 97897 - DNA, 286 bp, Zea mays
  Clone ID: MRT4577_20791C.1
ggacaatggcgccattgttcttcgcgtcttcaaagcagtttccagaggacacaaagatggcggggagctcacagcatccgagagaattcgtgcagggaggaaagttgcttaagacttgaccatgttaaagttcttactcctggcacgtcgtgatactttctgccagcagtgaatgccagcccattgagatgcccgtcctctgggaagctcctggagcagacatgcatggccagtgacacgagacttcttgcgttgcaacactggatgtggtgatgttcagaaaagc

SEQ ID NO: 97898 - DNA, 185 bp, Zea mays
  unsure (1)..(185): unsure at all n locations
  Clone ID: MRT4577_20792C.1
cgcacgcttaccacttcgaattcagctttattttttcacgcaaaagcacacaggggaaggtcccaatggtatgtttttcatataacatcaaattattatcttaccatatcagcatcccgcccaccacaacaaggaacaagngcgacaacaaggtgacaaacaccaacatggccggcaacgaaaac

SEQ ID NO: 97899 - DNA, 196 bp, Zea mays
  Clone ID: MRT4577_20793C.1
gggtatgattaatcattaggagagatgaagtcgacaggctacatgcgtactaaataatgcgcgggatgactcatggcggggtacaatatatgaaaagcaagaaaagtcccagtggtatctaaacagctcactccttagcagtaacaatgaggccgtccttgacctggacagtatttgtgacacccttgatgaagcc

SEQ ID NO: 97900 - DNA, 423 bp, Zea mays
  unsure (1)..(423): unsure at all n locations
  Clone ID: MRT4577_20795C.1
tgggacctcgagggcggcggggacggttgtcccatnagtnggtnggatccccacatctgcctcatatcctcctacgacgtcgccatggtgtgcacccatgcggcgccgtggagatatgagctcgcctgctccgcagcatctcggcgctgaccgacatcaatccgacggcggcctccacgagaaggcatagcccgggcgcgaacagctccacctcctgccgcgcctccgtgatcgacctccagctaagcgcctgagtggagccagaaccagcgcgtatccactcacgacgagactcagcgctctccacatatggaatgtcacgccgcgacacctcgagggagctctgtgctctggccactttttttttgagccgcctccggagagccgaccattccagctcgactcctcgacatccgccttgcc

SEQ ID NO: 97901 - DNA, 313 bp, Zea mays
  Clone ID: MRT4577_20796C.1
actagtggatcccccgggctgcaggcataaatcgccgaggaaaacaagatgtcggggcagcaagaagaagataagaaacccggcgatcagtccggcggtcacatcaacctcaaagtcaaaggccaggacgggaatgaagttttctttaagatcaaaagaagcacacaattgaagaagctcatgaatgcatattgctaccgacaatctgtggatttcaactcgattgccttcttgttcgatggtcgccgtctgcgaggtgagcaaactccggactagcttgagatggaggatggtgatgagatcgatgctatgc

SEQ ID NO: 97902 - DNA, 241 bp, Zea mays
  Clone ID: MRT4577_20798C.1
caactatatatatacacttgcacacagcggagtgggctactcgagatgcgcttcgccaggcgctgacgccttaggagataagtttacctacccatagcacgtcaccacgaatgggcctgaggacattgctggagggcaattcgctggttgcaaatgcacaaccgatattgaacgaaaaccgtttccttggtccaaggagatggagcatgtatgaagtatcaggaaacggtcaaaccaagtc

SEQ ID NO: 97903 - DNA, 468 bp, Zea mays
  Clone ID: MRT4577_20799C.1
ggggaaaaacatgggattccctcctttcccatcccaggtttttttcgggggggtgggggacacaaatcggcgcccatcttccccccccttttttttacccggggggttttggggcccctttggtcttctccctccccccccctcccttggtgggaacgggccgaaatcccttcccccttggggggaaaaaaaagagagagacccccctgattttttccccttccggcaggcccccccggtttcccctttttatttcacgagggcggggaaacaattccccgtgccccccaacgagctccgggacccccccccggggaggggggaaacccccgggtcgggggggtccccccttgggctttttggggtggaccccccctttctttaccccgggggggaccccaaccttgggggcaacaaaaggggccacgcaacgataagccccttggggctgcccccgggcaacggggg

SEQ ID NO: 97904 - DNA, 722 bp, Zea mays
  Clone ID: MRT4577_2079C.1
gcggaagacttttacaaagtacactttacattccagaactcaagttttacattgtagaaagagatgtatttattacaagtcttgataatactcgaagtgcataacttattacaataattggaagggtgaagcctttccataagagatatataaaaacattctaagcttcaagtcctccacatgaagtaactacccaaaggataagggaataaaacttctccttgttaccggagaagattcaaagtccttctatcataataaccagtcagatgaaaccaaccactggatctacagcactggaacagactcctcttgaggaaccacttcttcttgaatttcaacttccttttctaggagctgacggcacgacagcgcgacgacgatgtcttgatggtgaggcgaggactctgacgtggagaggaggactgggtgccggcaagctcgcacaccagggagagcagcgagcagcggcgtatgtccagttgcagcgatgagggaggtcgagtagagagagacgctggcgtgccggagctgtgaggcaggcaccagggaaaaccggcgctgacagctgctgtagcccaggcgaggtgctcagcagcctcgtacgatggggaaagccaagcagggtggaggcacgacgaagtggggctttgtgtgatgaaggaagggagctgagccgagtgctactgccgctgcacgagggaggcacagtggccaaactt

SEQ ID NO: 97905 - DNA, 304 bp, Zea mays
  Clone ID: MRT4577_207C.1
attcggctcgagctcacatgatcaaattttttttccccactccacctttatcactaggggggttttttatacctacagggggtcatacatgaaagctaaaatctaacttctcttaccgtttgatttctccaactgccttgcccccgcggggaagaagtttatactacccgctatctccaaaaatactaccggcagtgaggccaaaatagacaacctttcataacagcttttcacccctactggacatgaaccacacagaggaccaggcgctccttctgaatcttcaagaaggtcatggcgctga

SEQ ID NO: 97906 - DNA, 477 bp, Zea mays
  Clone ID: MRT4577_20800C.1
atgggtttgagttactgtgtcatcgctgtcccctaccccttgcaccggcgacgtggctttacggccgtcaccggagttgccgttcttcaccacgatttggccacgctccaggcctttaaccacgtcgccactagccgcaccagctcgccgataaccgtcgtagctcctcaaccgcattacatgagcattcatgcttacatatggttatatctagagaacgaagaggaaatagaagttgaagaagcaaggacttcaccaccaccacctgaagaacctcagatgatgcttcaaagtgggtgggatgtttcaaaaataaaacttgatggtggatccatcatggccatgatgggttcaacatcggaaaagatgtacctctgccaggtgaagaagcagcaaacttttgttgcttctgttccaaggtggtaccaaaagaagaaaatcaagactgaacctgcgggaggaaaggtcctccgttaa

SEQ ID NO: 97907 - DNA, 517 bp, Zea mays
  Clone ID: MRT4577_20801C.1
tcccggggtgaaagtcgcggaggcatcgtccccgctgcggcgcgccggggggagcccgggttcagcagcaggcgcatgcgggggcgccgtcaccgacgccgcgccgcgctgtgcacgcggttcacaagccgcgcttgcagcaccaccagcagcgccgcgcccaccaccgccagcatcgcgatgagcggcgggctcaggctgggtccggcgcctccgatagcctgctgcccgcgaacgacgccgccgcctacgtgttatatggctcgggctccgtacctggtctggcggcgctaatgcaccgtagggagtagggagaccagttgatggcgcccgatagctaggcttggcgaaggatcacgctatggccgtctgcgctgcgggcgcatggcggcgctgtcgtcctctatctgggcggtgcggggcgggtcatgtgcgacatgagagtccatgcgcaggcatggtacggccgcaagaggccaagagctcccgctgcgggtggctagtgatagtgtggcac

SEQ ID NO: 97908 - DNA, 1353 bp, Zea mays
  Clone ID: MRT4577_20802C.1
aggcgtaactcaccgacggtggtgtgtgccatacatataaactgtgggcacctcgaggccggccggggcaacgtcatccaaggtcacactagcaataatgcctaataacggcgtccgcgccgtggcgacgcccgtcgcgcgagaagagccgctcctacggcgggaagacgacgcagcaccgccgaaggccgccggtggcgatgggcagccgctcgacgcgggcgcccgtgacgccggcagcttcccgtggctgccagccgcgggcatcatgtacctcacgctcagctccgcgatggccctgcaccgctgctggcccgaccccggcgacgtcgcgttcgtcgtgtcggcgtacgtcgacctcgtcctgctcttctgctgcctccggaggtacgagcgcgcggagcctgggtcgccgctcagggagcggctcaagctggcggtgtggctgctcacgtccgcgctgacgctcctcttctcctataaggtcgccgccgtcatgccggccgccgttgctgccatcgtctggctcatgggcctcaccaccatctgcggtggcttcctcgctttcttctgcttccagaagaaggcgtgactttcgctctatggacagagataaaaaaaatgtcggaggttgacgatggacaagattaccgggttatcaaatttttttagtgataagcaattttttggcacaaatttaaagaaataactcagtttgtctagaatataattgtatctagacatttaagaaatgaaaacaacacatgagtcagccaaacgaggaatggaggaaagaaattagtgtaaagcaactccaataattatctaaaaagagcatgctaaaatcatatttaataagttgctaaatagctacgggagtaaaaaataagaaaaattctctgttgagggtaatgcttcgtagccgaagatcctagaaagaacaccttcgaaaggtcttctcagaagcaagcgccgaagctattatctataaagcttcggtacaaagacaaatctcaagatgaatggtcgaaccgacttaaagatgagttgacttaaaggcccatgatattttgtgtcattattgtagtcgattgtaaaggacataaatgtaattttacgcaggttgcatcctgtgcctataaataggtgaacagtatcccagcactgttcacacgatcctgtaatcacggacacattacgcttgaattattgctttctgccaaggcaaaggtacaaatgtgcttaaatattatgtttagatacttgtatattcatataataaaaacatatgaaaatattttatactttatatttcattttccaaaaaaaaaaaaaaaaaagcggccctcgagc

SEQ ID NO: 97909 - DNA, 466 bp, Zea mays
  Clone ID: MRT4577_20803C.1
ccaaaagcccaaggggcaaatactagcagaatccattacatcacaaaactggggggggcccatatttataggggaccgggggggggacaaaaacaggacggagcccttattggggtcatggtcatgggggggggttattctaggcccacgatggggaaacacacggggtaatcgctccctcggaacatactagtttaccactatagggccctggggacggggggaagccttttttttataatggaaacaataataagattagctcgccccgtaattggcggggaacatcggggggggcgcttccgcccccacgggtccctttgggttcagggggggcggggccccgggttgaaggggggcagctggcgggggcgggtccagacctgtttttacaccacggggaccttggggaccgggcggccgggggggttggggggccttcccttggggggggggttcattcccg

SEQ ID NO: 97910 - DNA, 367 bp, Zea mays
  Clone ID: MRT4577_20804C.1
gatagaagaggtacttactccactagctctcggtggttatgtaccatcaggtggatcgcgccacctccaacaacaacgagaacgccaactgagcaaagaaactcaagcctgttccctcgaaagaaccaaatggagctgctgacgatgagagagcacacaaagtcaaatagactacaacagcacccggctagtatgcagctgctaatatgaggtagaagctgggcaccctgttccccgacgctgcaatgaaaaagataatgcaagccaatgaggatgcaggaaaacacgcactaccacctcctgttttagttgcgaggtatcttgaattggttttacaagatttaattgaccgcacttatgaaattac

SEQ ID NO: 97911 - DNA, 392 bp, Zea mays
  Clone ID: MRT4577_20805C.1
cgcgagcgcggggcctctagagcgggcgcgcccccccccttgataattcccccccaaacaaaacaacacccggggggttttttaaagaattttgtccaaaacacccccagggaaataggagaaaaattttttatcccagggacactaaaaaaaaaaaacccgggaaaacaaaaacacgcgcggggcaccagggggagaggaagcagaccctttggccgcccccgggaggaaacagggaaataaaggggcccccccaaacccaaggccccttctatgggtaataacggggggagcggaaaaagaccccgcccactgataggccctttcccttggggggccgacgcagaggttaccgagggggcccctggcaaaccccaaaaaaaaacggggga

SEQ ID NO: 97912 - DNA, 779 bp, Zea mays
  unsure (1)..(779): unsure at all n locations
  Clone ID: MRT4577_20806C.1
gcaaacaacaaacttattcatgatttgtcatagttctgggtagtacataaaatccatcgaagtgattacgaaagaataagttcgaaatatatgctagcgtaagtgaccaccctcaataagaagtatagaagggttacttagacttataagaaggccgagcccaccgggacttaacaccaccatcagcagcacaaaactatgacttagacttataagaaggccgagcccaccggcacttaacaccaccatcagcagcacaaaactatgacctggaagaacactaggttagtgtttgttaggcgaccacttgacgagcatccattggcttggcactcgttcagattatccatcttccggttcgttcatcagcatcatcctgcggattagcccgcgcttggtatcgacttgactcttttccttcgtcttacttgattaattatcgtacctcataagatgcacaatgcacatgtatgagcataaagtaaccggatgatacaaaaaagagaatcaaatatttagcggcaagacatcaacacaatcctacgaaagcactagacatctataattcactaaacacaacaatcatgatttttctagttttaccagatttaactagcgggaataatagatcagcttaccctgatcgaatcgacccgataaccttgnaggcgacgacggttccccgattagacattcttaaaatactaaatttaaacttcattcactaatttaccgtgcgtcacataattagcatctcaaacctacaatagcactcaacg

SEQ ID NO: 97913 - DNA, 164 bp, Zea mays
  Clone ID: MRT4577_20807C.1
tcgctccatctcgtccttccactcgtcctgtctctttctgtccgcccatcgcgtccggtaaatgcgagggcgttacctgatactcgctggttaatgagatttgtggatttgggttgagacatatggtgatttgagataatctaagttctgtgggttcttgatcc

SEQ ID NO: 97914 - DNA, 123 bp, Zea mays
  Clone ID: MRT4577_20808C.1
ccgggccgacccaagcgtccagatcgtccaaccccaacgcgtccgccgcgaccggttctcgatcgatgatcatgtccggttcgtccgccatgaccaccggtgcctcgtccgccgcctcgtcgg

SEQ ID NO: 97915 - DNA, 373 bp, Zea mays
  Clone ID: MRT4577_2080C.1
ggggaaaacaaaaacaacaactgtaccattaataaaaacaacaacaaactgtgaaaaacaaaaaaaacatctaaaaaaaaaaaactaaagaacaatcagcaggacaacaaaggacgaacaaaaaaccacaaacaacagtgaaaattaaacaacaacaggaacgattaaggagcaataaatataaacatgtaagcaatacgaagcgacactaattacaaaaaatgcatcttgctttcaccagcaaaaacctcaagctgaggcatctaaatatatgcctcaacaagctggttctcaacaatgatcatacacgagattgagcatgcggcggaaccggttgacgaaggtgtaggagtcaaccaataaaaagccggag

SEQ ID NO: 97916 - DNA, 267 bp, Zea mays
  Clone ID: MRT4577_20810C.1
acgatgcctctcccctcgaatcatcgtctcgccctaggggatcgtcggagaggaatcgcaacgagggtcgtctcatccgacgttaaggaagccaagcgagcacaaggaagctgggtaccaggcccccgagggacccatcctctgcatcaataactgtggcttcttcggcagcgcggcgaccatgaacatgtgctccaagtgccacaacgagatgataacgaagcaggatcaggccaagctggctggtcctctatcgacagcgtcgtg

SEQ ID NO: 97917 - DNA, 413 bp, Zea mays
  unsure (1)..(413): unsure at all n locations
  Clone ID: MRT4577_20811C.1
gccgatcgccggatctctccctccgcctcgcttccgccgcacgccagggcgcacggcttcttcctccgctccctcgcctcaggtaaacctcgccgctccgctctcctcgtggcgctgcgatccctgaatccatccgggcgcggtttanctgntcggagaggggccttgcttgctcggtcggnatcggaacagcctagctggagtcctgattcacatatgcttctagttcaaaatctagtggatattctcttcagtataagagcagggagcacccgagttgtttcacatctggctggacagcgtgaatatttctgttattcctgatcacgcttcacagnnaggaataggagctggagccgacattgaaaattggaggcactagcagtagtttttgcgagacattcaacggctgg

SEQ ID NO: 97918 - DNA, 715 bp, Zea mays
  Clone ID: MRT4577_20812C.1
ctgaagcagggtctccagatgttagccatcttcaagaaccatgaagccgagacaagcatccttgaggacttcgacttctatgagcaacgagagaaaactatgctagatgacaggcaacaacagaagccagagtgttccgatactggcaagcaggtgcaggccagtgcaccggtggatattgtgactggtatgtcggacgcatttgcacaggcagttcaattgcaagaaaccaatgacaaagaaaataaaccaaggattgaagatgctgatgctgctgataatgctcccgctgctcctgtgaagatcgaagaggacaagctgaaaacagcggaagtgggaggcctcttgaaggaaagcgggtgattgctcgttctccattcatgactaatccagagcagcagctgggcccatttctgaagccatttcagggaggagacaatgagagttatgcaaatatttgcagccacaggttcaaaacagcctctccgcatttgttgctcagacctcttatgtggagtctgacactgggcccttttgtacagcatggtagactagagacataggctttgttttaccttcagttagctttgttttttaccttcagttaaacagactacagctggttacagagattcctaaattgtcaccgtttacctccgctcactgctatatataactttttcccctgaccccctgaagaattgtgctaaatata

SEQ ID NO: 97919 - DNA, 458 bp, Zea mays
  unsure (1)..(458): unsure at all n locations
  Clone ID: MRT4577_20813C.1
ttgggtacctcgaggccggccgggnaaaattccaaaaaaaaaaaaaaaaaaaaaaaaaaaaaaaaaaaaaaaaagcggccctcgagatccatatccctgctcgctttccccggcccaattcgccacctacccaaaaaaacggcaaaaacaactcctaccgcgaagttggaaagggtggcaactcttgatccaccatcacgccgattaatagaggagccatgcaggcgcgctcaatgatcggctttgctccctgcccgccggtggcgctcaatgcccatttttaaaacgctcaatgtatctcggcacaggggttgaagatccttgcagcgcactcttataggcttcctggttacttactgactttattgttatgtacctgaccgacgtcaggttttgcatacgctgctctttgattcgcgctgcctgctatttccaaatatcgatgaccttgttttacc

SEQ ID NO: 97920 - DNA, 440 bp, Zea mays
  Clone ID: MRT4577_20814C.1
gtcacccgagcggagccatacccgtcccgtgctactttatattgcgaggacggtatactaccgccattgtcggcgcagcaacgagggattcgggggagaaaggaagcgcggacaggaattcaatggaggatgtcaagaacattctgaatatggcacaaagggctttccaacgaagagatgttttttacaccaattttcttactacacctataaggaaagagactatgctggcacttgaaaagtttgcagataccaaaccagtagctcacggtggctaccctcatgctgagaggtgccgcatatgtgacgggcacccggacgtcatgacatgtaacccagatgtcgttgctgctttgagcatctcaagaaatttacggatggaatcttagtgtcaaggtgacgttattggcgctattacttggacaggaattacaagggag

SEQ ID NO: 97921 - DNA, 871 bp, Zea mays
  Clone ID: MRT4577_20815C.1
cgggacgtcatgtctgctacggatcactttatctatcattctatcaactgtagttggtcttttaccaatcatggtgcttcattgtacaatatttactgttagcctacaattatcttagtgccacgtcaacttttattttacaaactcttatttaaaatgaaacactatgtttgtttggaaaagatcatctgataacataattaaaaatacataattcaaataaaataaacatttttaaaaaataaaaattacatagttcgtaaaatagcgatacaatactactcattgtcaattttctcatccaccttcatattttttccttatctaattttcttggttaatttttgtaccgccaacttgtaggctctttttatgtcgttgtccatgttgacaatggatcaatccaacaatttagtaaatggcttaaacacatttaattgagatatcctcttcctggctttgtatagcctgttcacgatgctcttctccattacatgagacttaatgctagtcatgctagccacttccctttgtgttgtgctttttccctattacgaccaatagagcgtgttgatttgacattatccagtgatgcagagctataatcactatctaaatttacacgagatcttttgctcccatcattggagctgttgttacttgttaccatgttatgtgcatcatttcggttgatggcgaagagagtgccacatgtgctccagcttgaagtccatttcgtcatacctattgtggaagctctcatttgacgcttcgagaagcatatcaccatctgcttcgctcgatcggaccatgaacaatcatttgtatatgccttgaagaggatgaccttgtggttgtctgtggaccattg

SEQ ID NO: 97922 - DNA, 328 bp, Zea mays
  Clone ID: MRT4577_20816C.1
attggctacgtggaaacatgtctgtgaaaagagtatgtagtggcttctttcaaattggtagatgctgaatatgttcacttttaaatcccaattctgtcccgatcttacagactctactgtacttgaatggttaataaaactgcacagtgctgttaaaaaaaataagaatacctatgatatcataaccgacgagcataaatgtgaacagatgctctgaataactagacttgaacatgacagattctattaaatacattaatataaaagtttgagcagaaccaacaaaatgaaataaaaggggctgccctttttaaggattcaaatttaa

SEQ ID NO: 97923 - DNA, 125 bp, Zea mays
  Clone ID: MRT4577_20817C.1
aaaattgactgacctcataaagcaataatcaaatcgtgccgctagtgagcattatcctagggctcatgagaggagactcagcagccagagcaggggctccctacataggaaggacgagcacctaa

SEQ ID NO: 97924 - DNA, 2763 bp, Zea mays
  Clone ID: MRT4577_20818C.1
atggaccgcagagtagtgaagaaaaagttcagtttctgcagggaactaagaaatgtcagagcagcttgtcttggtccatggataattgcaggggacttcaatctcatatacaaagctgaagacaaaaataattctaatcttaatcgtgcaatgatgggtcgctttagaaggaccattgatgatttatctcttaaggagatcccccttcatggacgcaaatacacatggtccaaccagcaaaacatacctaccttggtgaagcttgatagagtcatgtgttctactgattgggaggacttgttcactaatgttttgctgcagagttcagcttctgaagtgtctgaccactgccctttactgcttggtcttcgggataacaggtcaggaaagcgaagattccattttgaatctttctggccaaagctagatggattccaggaggctgttcaggatgcatggaactcagtccctaccttggagtgtcctttccaagctctagacaggaaacttaaggcgacaacaaaaagattgcaaagctggagcgatagtagagtgggacacgtgaactcccaacttgcccttgctcgtgaggtgttgcataggttggagattgcacaagatgctcgatccttatcgctaagtgaaatttggctcaaaaataaattgaagaagcactcccttggacttgcctcattaaagcgcaccatcgcccgtctaagatctagagtttcttggctcaaagaagatgtgggagttccaacctttgatttggctgctctggacttgcctttcttggagaaagaagtgtgggaaacagttaaattgctgccttcagataaggctccgggtcctgatggtttcacaggaggattttataaggcctgctggtctataattaaaggggatataatggcagcagtttcagcagtttggagcaggagatttgcgcagttcaataggctgaacacagcgtacatcacattgatcccaaagaaggagggggccgatcaagtaaaagacttcagaccaattagcctggtacatagcttcgcaaaactgatcaccaagctgctagctaatcgcctagctggaaggttaaatgagatgatttcacccattcaaagtgcttttataaaaggccgttttattcaggataactacatgttagttcagcaaactgcaaggctcctccatcgacgaagacaggcccatttgcttctgaaattggacatcacaaaagcctttgattctgcctcctggccttttctcatagaggtattacaaaggatgggatttggacagatttggagggatattctatgtgggctgcttgcaacctcttccactcaagtgatggtaaatgggttttcgggccaacatattgttcatcgtcaaggactacgacagggtgaccccctctcaccgatgctcttcattctagtcatggatgtgcttgggcgaatggtcactgcagctgaaggggcaggacttcttcaaccccttgctacaagatctgtgcatcaccgagtctctatgtatgctgatgatgtagtcctcttcttgcgaccagctgccgaagatatagcaaccatagtggatattcttcacctattcggcgaggcttctgggctacataataatgcccagaaatctaatgtatatcccattcgttgcgacgagagtgacattgcagttgtgcaagcaatggcaattgatctcccaacttatatcacaaaagcaatcgataaaatccgaagaggctttctttggagaggtcgcaaagatataaatggggggcattgtcttgtttcttggagcaaagtttgtcggcctcttgatttgggtggtcttggtatttcaagcattaaggagctgagttgggcgctgcggatgcgttggttatggttgcaaaaaacggagcctaaccgaccttggtcatccttgactattcgagttccggacaagcttcaaggacagagggtggcagatattgcgccaagacttcttcaagttgttccgaaaagaaaaatcaatacaaggacagtccaagaagctattactggaagagcatggatgtcggatattcgaggggccctatctgtgggggcaattgttgattatcttcacctttggaacttattgttaactgctgaattaaggccgaatgttgaagataagcacatttttaggctggctgccaatggaaaatattcagcgaaatctgcctacgaggggttattcattggctcgattccttttgaaccgtacgagaggatatggaaaacctgggcgcctcctaaatgtcggttttttatgtggttagttgctcaaaaaaggtgttggacagctgatcgtcttgcaaaaagaggattggatcaccctgatagttgccctctttgtgaacaagaaagtgaaacaatagaccatcttctggtctcttgtgttttctcaagggagtgttggttccttttgttgagacaatttggactacataatctatcccctcaaccagaaaatgatagtttcctggactggtggaggacaataagtgaaatggcagctagacaaatgaagatggggattaactcccttgttttgcttggtgcatggatcttatggaagcaccgcaatcagtgtgtcttcaagagaggcagtccgagtgttgctgctgttctggagcaggttggagaagagcgaaggttgtgggagatggcatggactaaggggtttattttcctagcagctaaccttcctcacggctaa

SEQ ID NO: 97925 - DNA, 1442 bp, Zea mays
  Clone ID: MRT4577_20819C.1
cttggacttccattaacgctgcgaaagataaccaaggatcaggcgcagccaattattgacaaatttgcaaatcagcttcctggatggaaggcagacttgatgacaagggctgggagaacagttcaagtgcggtttgtgcttactgggatgctcatctacttagtaatggcaattgatctcccaacttatatcacaaaagcaatcgataaaatccgaagaggctttctttggagaggtcgcaaagagctaaatggggggcattgtcttgtttcttggagcaaagtttgtcggcctcttgatttgggtggtcttggtatttcaagcattaaggagctgagttgggcgctgcggatgcgttggttatggctgcaaaaaacggagcttaaccgaccttagtcatccttgactattcgagttccggacaaggtccaggccttcttcagtatggcgatgcaaacggaagttgggaatggtgctaatacacttttttggaaggatcgatggcttcaaggacagagggtggcagatattgcgccaagacttcttcaagttgttccgaaaagaaaaatcaatacaaggacagtccaagaagctattactggaagagcatggatgtcggatattcgaggggccctatctgtgggggcaattgttgattatcttcacctttggaacttattgttaactgctgaattaaggccgaatgttgaagataagcacatttttaggatggctgccaatggaaaatattcagcgaaatttgcttacgaggggttattcattagctcgattccttttgaaccgtacgagaggatatggaaaacctgggcgcctcctaaatgtcggttttttatgtggttagttgctcaaaaaaggtgttggacagctgatcgtcttgcaaaaagaggattggatcaccctgatagttgccctctttgtgaacaagaaagtgaaacaatagaccatcttctggtctcttgtgttttctcaagggagtgttggttccttttgttgagacaatttggactgcataatctatcccctcaaccagaaaatgacagtttcctggactggtggaggacaataagtgaaatggcagctggacaaatgaagatgaggattaactcccttgtttttcttggtgcttggatcttatggaagcaccgtaatcagtgtgtcttcgagggcggcagtccgagtgttgctgctgttctggagcaggttggagaagagcgaaggttgtgggagatggcaggggctaaggggcttattttcctagcagctaaccttcctcacggctaatttctgttcaagggttttgttgtttttttatctgttttttgaggagtttaaacctcagtgttatggtttgtaagggcttcggccccgacttttttcttcttcttaaatataatgatatgcagctctcctgcatattcgag

SEQ ID NO: 97926 - DNA, 442 bp, Zea mays
  unsure (1)..(442): unsure at all n locations
  Clone ID: MRT4577_2081C.1
ttcccggcccgacccacgcngtcaaagcggacgcgtgggcggacgccgttgggcggttggtaaggaagccaagcacgaaaggaacccctttccttcgtttgggttctaaacgttgacgaaggaagatccngctgttgccgcaagggcacaagggcgggggcggtagcttaactgggtgcccgatgtctagcgttgtcccnnctgaagatccnacgacatcctcaatctcgccttcacatgattcacctgtacacatatcacggatanacatggataatgttgaagtctctaagtttgtaggggttcaatgttcatcctttgtactaatctgctttgtctccgnaaaacgagaaaaaaaagggcaattggacggtgtaacataatgaaatgctatcttggttgataactaaaattttctaattttgtgaatgttgtcaacaat

SEQ ID NO: 97927 - DNA, 192 bp, Zea mays
  unsure (1)..(192): unsure at all n locations
  Clone ID: MRT4577_20820C.1
attgtagagaatttccttcctactgagaatctacctctattccccctgccctagctcttctntaacttggttaaccataaccataaccagattcccttgcaatcgatttctctttagtcgttggtgttagaagtaccagcacaatttgagcattcccattaacaaaggtgttcacagttgagaaactctcct

SEQ ID NO: 97928 - DNA, 209 bp, Zea mays
  Clone ID: MRT4577_20821C.1
tataaacttttattatccataataattccaggtccaatcctatgtaaactaacactgcctaatcaaaatttatataaattatgaatcttttcgcccaccaatctctaatatgctaatcttcttcagtcgtcactctcccgtctctaatctactgcctctatccaatcatttcacctcttgcagctctccccccttcatctaaatcctca

SEQ ID NO: 97929 - DNA, 159 bp, Zea mays
  Clone ID: MRT4577_20822C.1
cgtagccggacctctagtttgccgcccggggtggtcctttttaagattaatatcccatatatttcatatatctataggggaggccttctctaccaatatattacaagccgacattgcccatggtcatctgaaacacttctatgccctggggatggggcc

SEQ ID NO: 97930 - DNA, 500 bp, Zea mays
  unsure (1)..(500): unsure at all n locations
  Clone ID: MRT4577_20823C.1
ccccnccgccggcccccaagcaggagcgcgcgcgcgcgcgcccagaacaaggggaacgaccgcggcaagaagagcacgcccgcaggggcggncaaagacgaccagagcgagcggcccaagcagggcaagccgcnagccgagcccgaggagagagcgccgngngagaaggcaaaggaggaggggaaggaggaaagcaagggccagccaggaaagagcccggacaccaaaggcggggagaaacacggacaaacgcaggaacccgcagaacccacccgaagcgggggaaangagacagacacgaacaacnngacaaagggagaaaaggcagaccggggggacaacccngacgaaacagacacaccanagggggcgngaaaagggcagaaaccacagaggagcaccaancacagaggaaaccacgaaagcccggcagaaacccaagngnaggggnnccaagacgaaggcgcaaggaagcaaggaaacgcaaacggccggaaaac

SEQ ID NO: 97931 - DNA, 481 bp, Zea mays
  Clone ID: MRT4577_20824C.1
ggccgcaaattttttttttttttttttgcgataaataaataaataaaagggcagcagatgaacagtctggccacgttgcaagcgtgaacgaaatgcttctaatctctaaaccaagcagaggaaactctctctgtctctctctctctctgactgaatccactcgaggaggaaacaaagcaaactcaacaacgcatctctgcagtaggcagtagccattagccgtcggtaaaactctcagcaaaaggacaagccagtctggaaactctggcaaacagcagcatcccgtgcggcggcggccggagccggggaaaacgcagaccgcgacgagattcaggcacaggaggatgcaatgcgatgcagtgcaacggtggataagagactgcgcgcggtcgcctgtcgcgtgtgtgcacgtaccaccatgacgagaggagaggaaaggagtggtttgttgatcgctgatcggcgagggcaccccggccgg

SEQ ID NO: 97932 - DNA, 289 bp, Zea mays
  Clone ID: MRT4577_20825C.1
gaggttaaagagtgaggggatttgattaaaagatcggcgggaacacatagacctgccagattttgacccagtgagggtcagccaaccaataggatacacctaacataaataagggggaagaaatttattttcgtacgcacttttttacgggggggaagaagacaactcgctggtataaccagaccttgaggggtccatgttacctgaagctgttcatgtggcggaacaagccgaccgcgcgggtgctgtgaccccagtcgatgtgggaccaggacacgaaccccacgaa

SEQ ID NO: 97933 - DNA, 472 bp, Zea mays
  Clone ID: MRT4577_20826C.1
gtgaactggctactcggctgcatcatacctgtgaatggcccataacgagatcgcccgggatgttacacactgtgcacgtaatgacttacagttctcggcttagactgaaagctcctccagagcttccaaagatgaatgcaagctggagtcacatattcatgggatcactcagaacacaggctcgactgcgtgctttcaagagcggcggtatctctaagcatcactgatcctgatgctctttgaagacctactcctgaacggcatcgccctgatgatacctggaggaagatggcagccagcccactgccgatgaaggggccgacccacaagatccagcggtctacccacgcatggcgctggttgtaaatcacggcggggccaaagctccaggcggcgttgatgccggggccggtgataaggatggtggccaagtggacgaggaacacggcgcaccctattggaagaggggcga

SEQ ID NO: 97934 - DNA, 414 bp, Zea mays
  Clone ID: MRT4577_20827C.1
atggccatcttgacgcgctacgtagttgttgtcttgagttttgctgcccccaaatggatatctaatcaaaataatttaaggcgctgctttctccccactaacggtgcccctccccaacggctgcgaacgcccttccccaatgtctccttctacgcgcgtcttcctccccacgcgctgctctggccgagatgccgccttctacgacgcgaacgccaacagagccagagcccgagcccatcccgccttcaacgccggatctcgccccaaatcctcgcccgccttcaacgccggcagccgctccccaaattcctccccaccaacgacacccttccccaaacccctccccgccttcaacgcagacagctcacccaaatcctcgcccacttcccatcgatggagcaaataatgcagtga

SEQ ID NO: 97935 - DNA, 399 bp, Zea mays
  Clone ID: MRT4577_20828C.1
atgttgggaagtaacgacatcaacgattcacataggtcgcctatttttgacccattacgaaatggtactatgccaccagtgcaatacactgttaatggtaccacattcaatttcagatacaacttagctgatggcatttatctagactggccaagttttgttaaagctattcgacacccatgggaggaaaaaaagtacactggatccaagagagttgtcgtaaagatatcaagagggcctttagtatactccaagcgagccaaggatgaaggggatggaacatcgaatgttgatttcgttgatgttggtgttcctaccgatctgtctattgtagttcccgagatccgtaatgaatggctcaataaccaactagacatggatacatgtgttcatacctag

SEQ ID NO: 97936 - DNA, 399 bp, Zea mays
  Clone ID: MRT4577_20829C.1
acccccccggggccccgctcgaaagggagattgcccaaacactgggggccggtttttggggggccaaactgggaccccatcccggggccacacaagaaaaaagccggacccggaggaaaaaagtctggggtgcctatccacaaaacaaacccaccggaagcgcaaagggctaaccccggggggcccaagggggaaacccacccacccaaatgggttaaggaatccggcccccctccgagagaggaaacctggggatccggcccctttaaagaacccccccacacccccgggaggggccggttcgttatggggcgcctttccgcttccccccacaaaaaggcggtgacccgggtctccccggtgggggggggggactctagaaacaacaagggggcaaaa

SEQ ID NO: 97937 - DNA, 5199 bp, Zea mays
  Clone ID: MRT4577_2082C.1
atggatcataaggggaagggaatcgtgatcaacgacaaagagaaggaatccttcgtcaacgagccgaaggacgacaagcctaccgactccggctcggggcatagacggaaggaagggaagaagaagaagacaaggcgcatcaaggagatcatctactacgacgatagtgatgagtctacttcttcccaaaaggatgatgacaacgactacaaaaagacggtcaattcgaacttttcatttgattattctcgtattcaacatagttcgaattcgcatttgctttccattcctcttggcaaacctccacacttcgatggggaggactacggattttggagtcacaaaatgcgtagtcacttattctctctccatccaagcatatgggagattgtggagaatggaatgaaatttgatagctcggatagccctatgcttataaatgaacaaattcatagaaatgcacaagctactactgttctcttagcatctttgtgcagggaagagtacaataaggtgagtggcttggacaatgccaagcagatatgggacaccctcaagatctctcacgaggggaacgacatcaccatgctcaccaagatggagttggtggagggcgagcttggacgattcgccatgataaggggagaggagccaactcaaacttacaaccggctcaagacccttatcaacaaaataaggagctacggaagcacgcgttggacggatcacgacgtcgtccgcctaatgctcaggtcatttaccgttcttgatcctcatctcgtgaacaatattcgtgagaatcccaggtacacgatgatgacgcccgaggaagtacttggaaaattcgtgagcgggcggatgatgatcaaggaggcaagatacgtcgacgacgcattgaacggtccactccacgagcctcaacccattgctctaaaggcaacaaggagcaaggagtcgctacctagcaaggtggcgcaagttgaggcggcagggctcaatgatgaagagatggccctcatcattaaaagattcaagacagcactaaaaggtcgaaagggacagccaagcaaggctaagaccaagggaaagcgatcatgcttcaaatgcggtaagcttggtcattttattgctaactgtcccgaaaatgatagtgaccaggagcaagggaaaaatgggaagagagagaacaagaaggtttacaagaaggccaaaggcgaagcacaccttggaaaggagtgggattcggattgctcttcgtccgactccgacgacgaaggactcgccgccactgccttcaacaaatcggctctcttccccaacgagcatcacacttgcctcatggcaagggaaaagaaggtaatcactcgtaatgcttatgattcttctagtgatgatgaatctagtgaggatgaaattgattactctagtttattcaagggattggatagaactaagatagataagattaatgagttgattgatgccttaaatgaaaaggatagaatcttagagaaacaagaagaccttttatatgaagaacatgataaatttgttagtgcacaaaattcacttgctctagaagttaaaagaaatggaatactttcttgtgaactttctacttgtaatgaaaccatttcttctttaaaaggtgaaattaatgttttaactgctaaactagaagtagcaagtaactcttgtgttgaaaatattacaatttgcactaggtgtaaggattttgatgttaatgcctgtagtgaacacttagtttcaatttcaaaactaaatgatgaagtggctagtcttaatgctcaacttaagactagcaagagtgaagttgataaactaaaatttgcaagggatgcctacacgatcggtagacacccctcaattaaggatggacttggcttcaagagggaagccaagaacttaacaagccataagactcccattcccgctaaggagaaagggaaggcccctatggctactagtgttaaaaagaaccatgcctttttgtatcatgatagaaaaaattctagaaatgcttttagaagttatgatgcttatgattcacatgcttatgattcttatgctatgactgcttctagttctcatgttgtgcatgaaagaaatgttggtagaagaaatgttgttaatattcctaggaaagttaatgagccttctacaatatatcatgctttgaatgcttcctttgcaatttatagaaaggatagaaaggtttatgcatccgggggttcaagctggattattgatagcggatgcacaaaccatatgacgggggagaagaagatgttcacctcctacgtcaagaataatgattcccagattcaattatattcggtgatgggaatcaaggcaagaagaagtgatggttcactagcttttaagggtgtattagacgacaaactttatttagttgattttgcaaaagaggaagccggtctagatgcatgcttaatagctaagactagcatgggctggctgtggcatcgccgcttagcacatgtggggatgaagaaccttcacaagcttctaaagggagaacacgtgataggtttgactaacgtgcaattcgaaaaagatagaccttgtgcagcttgtcaagcaggtaaacaagtgggaggagcacatcacagcaagaatgtgatgaccacttcaagacccctggagctgctgcatatggacctcttcggacctgtcgcctatctgagcataggagggagtaagtatggtctagttattgttgatgacttttcccgcttcacttgggtgttctttttgcaggataagtctgaaacccaagggaccctcaagcgcttcctcaggagagctcaaaatgagtttgagctcaaggtgaagaagataagaagcgacaacgggtccgagttcaagaaccttcaagtggaggagttccttgaggaggaaggaatcaagcatgagttctccgctccctacacaccacagcaaaatggtgtggtagagaggaagaacaggacgctaattgatatggcgaggactatgcttggagagttcaagacccccgagcgattttggtcggaagccgtgaacacggcttgccacgccatcaacagggtctaccttcaccgcctcctcaagaagacgtcgtatgagctactaaccggtaacaaacccaatgtatcatactttcgtgtatttgggagcaagtgctacattctagtaaagaagggtagaaattctaaatttgctcccaaagcagtagaagggtttttgttaggttatgactcaaatacaaaggcgtatagagtcttcaacaaatcatcaggtttggttgaagtctctagcgacgttgtatttgttgagactaatggctctccaagagagcaagttgttgattgtgatgatgtagatgaagaagatgttccgacggccgctatacgaactatggcgattggagaagttcatcaacaggaggcgtgtgatcaagggggagcacaagatgatcatgtgatggaggaagatgcgcaaccggcacctccaacccaagttcgagcgatgattcaaagggatcatcccgttgaccaaattctgggtgacattagcaagggagtaactactcgatctagattagttaatttttgtgagcattactcctttgtctcttctattgagcccttcagggtagaggaggccttgctagatccggactgggtgttggccatgcaggaggagctcaacaacttcaagtgcaatgaagtttggacactggtgcctcgtcccaagcaaaatgttgtgggaaccaagtgggtgttccgcgacaaacaggacgagcacggggtggtgacgagaaacaaggctcgacttgtggcaaaaggttatgcccaagtcgcaggtttggatttcgaggagacttttgctcctgtggctaggctagaatcaattcgtatcttgctagcatatgccgctcaccattctttcaggttgtaccaaatggatgtgaagagcgctttcctcaacgggccaatcaaggaggaggtgtacgtggagcaaccccctggcttcgaggatgaacggtactccgaccatgtgtgtaagctctctaaggcgctctatggacttaagcaagccccaagagcatggtatgaatgccttagagactttctaattgttaatgctttcaaggttgggaaagccgatccaactctttttactaagacttgcaatggtgatttgtttgtgtgccaaatttatgtcgatgacataatatttggttctactaaccaaaagtcctgtgaagagtttagcagggtgatgacgcagaaattcgagatgtcgatgatgggcgagttgaactacttccttgggttccaagtgaagcaactcaaggacggcactttcatctcccaaacgaagtacacgcaagacttgctaaagaggtttgggatgaaggacgccaagcccgcaaagacgccaatgggaaccgacggacacacagacctcaacaaaggaggtaagtccgttgatcaaaaagcataccggtccatgataggttctttgctttattcatgtgctagtagaccggatattatgcttagcgtatgcatgtgtgctagatttcaatccaatcctaaagagtgtcacttagtggcggtgaagcgaattcttagatatttagttgctacgccttgcttcgggctctggtatccaaaggggtctacctttgacttagttggatactcagactccgactatgctggatgtaaggtcgataggaagagtacatcggggacgtgccaattcttaggaaggtccctggtgtcatggaattctaagaaacaaacttccgttgccctatccaccgctgaggccgagtatgttgccgcaggacagtgttgcgcgcaactactttggatgaggcaaaccctccgggactttggctacaatctgagcaaagtcccactcctatgtgataatgagagtgctatccgcatggcggaaaatcctgttgaacacagccgcacaaagcacatagacatccggcatcactttttgagagaccaccagcaaaagggagatatcgaagtgtttcatgttagcaccgagaaccagctagccgatatctttaccaagcctctagatgagaagaccttttgcaggctgcgtagtgagctaaatgtcttagattcgcggaacttggattga

SEQ ID NO: 97938 - DNA, 206 bp, Zea mays
  unsure (1)..(206): unsure at all n locations
  Clone ID: MRT4577_20830C.1
cggacgganagggtttgatttttttatccatccacagtgttccaacaacacgtggtgcgctgtcaaccaaacggttcaaacggcggggaacttattggttttttttccaagaaaggggcccagaaagccctttttttctggccgcgtttttaaaagggggacaaaagggggttccctttaccgggggtcaaaaacgggccgggggg

SEQ ID NO: 97939 - DNA, 455 bp, Zea mays
  Clone ID: MRT4577_20831C.1
ctcacatgtgtacttccattgtccgtgacgcattaggttacaacgccttacgcgctctacgtttgggtgaacctacgaacttctagatgcttattcataaactcttcaagcttccactagactgtatccattatgaatgggataaccttaccaagtacgggcatccttctattgtgatgtacttttaaaccaacattgaaattatccgcttaaaattaaggataagtgtgttgtgagtgtctacgcgtagcactttatttcaccaaagatgatgaaagagaatactcacatccatttatgcgctggagagaccaggtcatctttagcgccgactcaatcaattacgcacaatgcaacactggtgaaagcaactagcgtgacttgcataaaactgcaggtccaagccaagaaacagaaatatagctacttttgcaagtgacttctcagttgctatt

SEQ ID NO: 97940 - DNA, 474 bp, Zea mays
  Clone ID: MRT4577_20832C.1
aattatccgggtcgacccacgcgttcgtgattaagcgatgtgcgcttattgacgacaggtagaataaagagtttggtcaggagatgctgatacttttccagatcaaccacaagaacattgtcaagctcgagggctgttgcctttaggtggaagttccattgctggtttacgagtacgttccaaatggacaccttctacgaacgcattcatggcaagaaccaagcgctacagattcccttcagtaccctactgaggatcgtccatgatgcatcagagggcctcagttttttgcactgcgtacgcggtataactccgatcattcatggcgacgtgaagagtgtcacttttctttttgatgggaactacatggcccaagtgtcagattttggggcctccatactatttctcgtcgacaaagagtagtatgtcacgagggttcaaggttcctgtggatacctctaccctgaatacatg

SEQ ID NO: 97941 - DNA, 241 bp, Zea mays
  Clone ID: MRT4577_20833C.1
attatcggtccagaacatcgcaccccactgcccatcatgccctgccaccgaacgagccaagtttccaccacccttcgccaccccctggcattttatttcgagcacaccatctatcgaaattagacctggaacggagcccttacccttatgtaactaaaccttgacctgacaaccttaacacgatgcaatcccaaaccggccacatagtgggcgcaaaagtcccgtctgcggcactatcatc

SEQ ID NO: 97942 - DNA, 588 bp, Zea mays
  Clone ID: MRT4577_20834C.1
cccattcaaacatctacaaaggggggggagcaggcgttcctccatgaatccggtgggcgagcatcttcgcgcgcattctccagcgcagtcggcaaagctagcgggcaaagttgcctggcaagctatcttttattcaatgctttactcagctcgctcgtcaggtccttggccgggggggggggggggttttttcaatggtcaactcactgctaagcctaagacgaagcattgtattaaatagcagcttccatgggctctttgtgctgctgcttgtgatcgcgctactgaacaccgtactgcgcaatgtttagcttaatgtagagtttagttcagtgtgtgcgtctatgtgcatgtcgagcgctttgctgtgctttgagctttctttgctgtgtgctgagctttatgtcggcatggagctcaacatggggaccaactgctatataaactgggacttacgattggcgttgacatatgcggagatctacttggttctctgatgatgtcgctcaaggagtcttgatacgtggtgtcctacttggtgcacacccagatggtgggcaccatgttgtacaagatgtgctaacaatg

SEQ ID NO: 97943 - DNA, 637 bp, Zea mays
  unsure (1)..(637): unsure at all n locations
  Clone ID: MRT4577_20835C.1
cgggaccacgtcggcggcgtcacccgagccgaccgccgcgtccaggaccaggagcgtcgccggcgtcccattcccacctaatcccgtaccaacccaaggggagcgccatgaggaagaccttttgcttcggggctgccgcttggccaacaggacgtcggagcgggcgccgatggtcgattgcccgctgcgcccccacctccaccaccgctctcctctactccgatgacaaggtcgtggccttccgcgacatcaacccgtcggcgttcaggcactatcttgtctacccattgatcatatgccaactgtaaatatcctctgcaaaaccaaagattatcaccagttagatacatggtgaaggtgggggggaacttgctcaatcaagatgctcccaattctgaggaacacaggtattgccaaatcccaaaatggatncatatatggttttttttgttctgcatatcttctccaatgctgtctcttacacgggcagtatttttaatacttcatacattcttccgttccaagttgtaagccgttttggcttttcttggttgtatgcaccaagatatacattatgtctagaattttccatgtatctataaaagctagaacgacttacattttgtaacagagggag

SEQ ID NO: 97944 - DNA, 354 bp, Zea mays
  unsure (1)..(354): unsure at all n locations
  Clone ID: MRT4577_20836C.1
ggttgaagctgntaatctctaaaccagaatggacatcgccgacgcccgtaggctcaaatacactcctaactaagcggaatcattctactagctgattcgaccacaacatattatgaaaaaaaaaccataatttttataatagaaatattttattagacatcattatctatctatacatctctttttcgacgcttctcatcaatcgttgttctcatacacagaataattttctagaacagcatggcgatcaacatacaaatattaatatgcatggacgtatcgatcaatgaacatcaaatcattattccccctctcattaaaaatagatgacagtagaagaaaaggagaggacaa

SEQ ID NO: 97945 - DNA, 361 bp, Zea mays
  Clone ID: MRT4577_20837C.1
agtgaattatctcgtcgccctcgtcttggcgtagttcttgctctccgccgtcgcaggagggcataggaggaagctcgatgacgcatcagaatcaatggagacattggaatccatgcaggaagacgacgaaatggcggttgtggtccacaaaagaattctcagccaggtgaagatgaacgacgtacgcgagatacgacccttcaccgaccatggctaagcctcgctccaaggacataccgaactagtcaggtcagcccttgtattgattgtattgagatatactagtcggttacctgtgcgttgcgacggctcacaacaatatccataaaaagtatccacaaaaagatttcaagttttttat

SEQ ID NO: 97946 - DNA, 265 bp, Zea mays
  Clone ID: MRT4577_20838C.1
attcggctcgagccagaacgaaacttatatttgacgcacacgagcgatgataaaggggaggttttaaacaaacccggcatggaaccagaccgcattaaacaagcgaaggcgggcctaaaaacaagcaaacggctgaacaaaacagaatgacccgagaaagactgggggaggaacaggagactagacaaacacccactgggcgacaaggagtaaagacagaacgtgcaaaagcttaaaacaaccaaccacaagaatccacggacat

SEQ ID NO: 97947 - DNA, 362 bp, Zea mays
  Clone ID: MRT4577_20839C.1
ctaagttaggattttaaacttagttgtacatgggttacgcgagagcacatacacaggccgcaccgtacagacatggactacatcaagcacgcgctgactatattcaccgactttgttagcagctcttggactgatgcttgccattatgatgaagaacgcacaggagaaatcccaagacgagaagaggaagacgcggtagctgctgaatgaataggatgacatatggtgccagggccactacttcatagtaccatgtactcctatcctattgtactcataataataatacgacgaaagatgactggtgggaaatgaatattgggtcctgctaaaaaaaaaaatgggttaattccaatcaaaag

SEQ ID NO: 97948 - DNA, 1830 bp, Zea mays
  Clone ID: MRT4577_2083C.1
atggatcctaagggcaaggggatgatgatcaacgacaaggagaaggagaccttcgtcaacgagcccaatgatgacaagcccaccgactcaggctcgggccacaaaagaaaagacgggaggaagaagaagacaaagcgcatcaaggaaattgtctactacgacagcgacgaatcttcctcctcccaaaaggacgacgacgaccatgatagacgaaagacgatccataaaaatgcacaagctactactgtgttgctagcctctttgtgcagggacgagtatcacaaggtgagcggcttggacaatgccaagcagatctgggacaccctcaagatctctcatgagggaaacgatgtcaccttgctcaccaaaatggagttggtggaaggcgagcttggacggttcgcgatgataaggggcgaggagccgacacaaacatacaaccggctcaagacccttatcaacaaaataaggagctacgggagcacgcgatggacggaccacgacgtcgtccgcctaatgctaaggtcatttaccgttcttgatcctcatttggtgaacaatattcgtgaaaatcccaggtacaccaagatgtcgcccgaagaagttcttggggaatttgttagcgggcgaatgatgattaaggaggcgaggtacgtggacgacgccttgaatggtccgatcaacgagccgcaaccccttgctctcaaggcaacacgaagcaaggaggcgctacctagcaaggtggcacagattgaggcggccggacttaataatgaagagatggctctcatcatcaaaagattcaagacggtgcttaaaggtcgcaagggacagccaagcaagaccaaagccaaggggaagcgctcatgcttcaaatgcggtaagcttggtcattttattgctaactgtcccgacaatgatagtgatcaggatcaagggaacaagagggagaaaaagaagaactataagaaggcaaagggcgaggctcatcttggcaaggagtgggattcagactgctcctcgtccgactccgacaatgagggactcgccgccactgccttcaacaagtcatccctcttccccaacgagcgtcacacttgcctcatggcaagggagaagaaagataagtctaaaacccaagggaccctcaagcgcttcctaaggagagctcaaaatgagtttgagctcaaggtgaagaagataaggagcgacaacgggtccgaattcaagaaccttcaagtggaagagttccttgaggaggaggggatcaagcacgagttctccgctccctacacacctcagcaaaatggtgtggtagagaggaagaacaggacgctcatagatatggcgtggactatgcttggagaattcaagacccccgagtgcttttggtcggaagccgtgaacacggcttgccacgccaccaacagggtctaccttcaccgcctcctcaagaagacgtcgttgtatcaaatggatgtgaagagcgctttcctcaatgggccgatcaaggaggaggtgtacgtggagcaaccccctggcttcgaggatgaacggtaccccgaccattcttgtgaagagtttagcagggtaatgacgcagaaattcgagatgtcaatgatgggcgagttgaactacttccttgggttccaagtgaagcaactcaaggacggcaccttcatctcccaaacgaagtacacgcaagacttgctaaagcggtttgggatgaaggacgccaagcccgcaaagactccgatgggaaccgacggacacatcgacctcaacaaaggagattttggtgaggcaatggggttaaagggccaagattga

SEQ ID NO: 97949 - DNA, 217 bp, Zea mays
  Clone ID: MRT4577_20840C.1
ctcaatttctgtatccctatctaatttcttttactcacccatctaatcatcaaccggacggtttaaaactaacgtgcggcagacacactacactccaaacctttccatctaaatataaattgctacttatcacttcctacacatattacactttttaccataacacttttcctccatcaacatcccctctctatcttcatacctcactaccccttct

SEQ ID NO: 97950 - DNA, 2730 bp, Zea mays
  Clone ID: MRT4577_20841C.1
tttttggccgccctctattatccaaacgggctactccaacggaaaaagcctcgctagtcgctgccatcgatgttacacacactgcaaaagtacatcagttccaacaggcacagcagcagtcgatctacgcaccgccgaccccgtccgtcctggtgttatggcagcgtcagggttccaacttccaacaagtcagtgctcctagtcctagcatagcctggccctccctactcatgcttaactacgtcagcatttagatctgaaacagaaacttgaggtccgcctctgtaagcttcgacatggcatccggcgagtcccccacggtgccttcaaacaccagctgcttcttctgttgcagttgcagtatgcgctcttcaaccgtgtcctttatcacaaacctagtgctcttgattggcttgaactgcccaattcggtggatacggtcctgcgcttggttctcgaccgctggattccaccaagggtccatcaggaacacatgagatgctacagtgagattcagagcgactcctccagcttttaagctcatcaagaagaccctgcagtctgcatcatgggtgaaggtgtctatggctcttcccttttcggtaatgttcatggctccattcaactggacacacttaatgccggacctctccaaggaaaactgaatcaaatccaagaatgatgtgaactggctgaagacaatccctttggcagaaccatcgtgctcaatcatgtttcttatctcctccctcaaggcatcaatttttgtactcgtcttaaaatccacaaggcttggtagtctgctcaatattcctgaacatttgcgacccttgacacttcgagttacttttccaactgaattttgtgctgttaagtccacggtgagaggtattgaacaggatggacatgaaacattccccaaagctgcagagtagtctatcaaacaagtcttgcagaatgcatgatcacaagaggtaaccacaacatcttcagccaaattatgacatataccacattggctctccatggactcgtttccttcattcttcattccttcaggatgtcctgctgttttagaatatgctacaagatagggatgatcaacagcctgtctcaaccttgtgagaagatcgaagatatgagcgtagttattcatcagtgttccagcatctacatatgcatcaaattgtgtgacactctgagtgtacaaagcttcatagaattccatttcgtttttatcaaaagagtcccgcctcaatgtcacaatctttggtggaagagcaagatctgctgctcggcctttctttgtgcgccttaacactatgcctttcagaactttttccttcagaagagtcatggctctttttccttcgaaacttgttgacccatactgtattggtgttgatatgtacttattccaccagcaaaagtgcctaacagatgagtgaccacagtcgcattgtttcttcatactggtatctagtatctcacagctacagtccttgcagaaatagtatgagtaggggaagatttgcaaaaaccgaataagagagtaaagttctccaacacggttctgcaaaggtgttccactcagagcccacttgcattctgactccaatgcaaaaacagcccgtgcagtattacatcgtctatcttttatgaagtgagcctcatccaggataacacgctcccaccgcacagaatgcagaggagattggccccttaactgtctgcccagttcatcagccaactcttgaaaatccttattcacctcatcacccttcttatgaaccctcctcttctccttcaccttttccttgctgctgtcccacttcctcttgctctgctgcttagcctgagcttctgtgcgtttagcattaggcccacagtgatacatcaagtgcaccttcatcttgttggggtagaacaatttattgcagtattggcaccgagtcttgggcggcatgatgtgcttccggtagtccgcctcaatggtagagtaggtggtgataacaaagtcatagctgttgaaatcgaaactctgagtgacacgcttggcaccgtggtagatgagcacgcgcacgctgccactagcagtgtggcgttcgatctcctcagtccactggatgacggccaccacagggcagacgaccagcgtgcacccgacctggggcttggtgcggcccaccgaggagttggacgaggaggcggcggagtgatggtccgggggccggaggcggcgcgcggttaggacgagcgagatagcctggatggtcttccccatccccatctcgtcggcgaggatgccgccccgcgtgacggacgcctcctgcgcgagcgcccaagcgagccactccttctggaaacgcagcaatcggagcaccacctccggggccgggtccgcggtcggcacggccgccaccgtggcgtccgtggcctcgacgcccccgtcggctgcgttccgctcgtcgagccaactgtcgtttgccacctgccactcttcccatggcaggggcggcgcgtccctcctcgccttcttacctcgcctcctcttctccctcctgttccgcgcctgattcttaatccggatcggcaccggcggcggcagggccgcctcgggcaccgcgggcgcgggcggggtgtccttatcgggcgcgaactcctcgtcgctgtcgtcgttctccaccgcgtccccggagtcggcgacgaaatcggtgtcggaggtgtcgt

SEQ ID NO: 97951 - DNA, 198 bp, Zea mays
  unsure (1)..(198): unsure at all n locations
  Clone ID: MRT4577_20842C.1
agnctgaagtctgagcgaatagtgcaccaacgggcatggaatgagagtcgcagaagctggttgagatgggattccagcggataggtgagagtccctgaagacgggatgagacgcacatggctctcgcaagctcgtctgctctggtgaacatctcttgtgcaataatgacactgtacatgcacatgctgtatgctctgt

SEQ ID NO: 97952 - DNA, 372 bp, Zea mays
  Clone ID: MRT4577_20843C.1
ccctacgccctttttttttgacaaaagcgattcattttgaaccccccaaccaccgcaaagctactggaggagggggaaacgaagcgaaacaaggcctgatgacccaccccgcagaagaagaagcctccagaacccctcgtggcggggcataaaacaatggagggaaataccaaactccctgccgcaaagaaggcccagcgagggagctgaggaccagacgaccaggggcagcccaaccataacactgctaggcatgggcaagacgaccacgaagggctacatggcgagcagcaaccgcgcaacggacgcgcggaggagcaccgcactccacacgaccaggcgcgggaagcccacgggcaccgcccaaaaagg

SEQ ID NO: 97953 - DNA, 671 bp, Zea mays
  Clone ID: MRT4577_20844C.1
gtgggcctacattgttccgggctgcagcgaagaatcataaggatgttcttggttgttgtggatcatcatgattaccctgctctattgaaatgtctacaagaaaagcaagcggacccacagttccgcaggatgctggcatggaaagctttccagcatgtggcttcttatgattcagccgtctcagagtggttgtggaagcaatcgagcggtggagaaatatttcccccaagctttactgttcccctctcaatgaagtctacacttcgttatggtgaaaatcctcatcaaaaggccgcattttacggtgacaggagtctttctctagtcaatgccggtggtattgcaacatcatttcagcaccatggaaaggaaatgtcttataacaattacttggatgctgatgctgcatggaattgtgtgtcagagtttgaaaatcctacttgtgttgtggtaaagcacaccaatccgtgcggtgttgcatcccggcaggatgttcttgaggcatacaggttggccgtaagggcagatcctgtgagtgcatttggcggaatcgttgcattcaacaccacaattgacgaggatcttgcaaaggagattcgcgagtttagaagtcctacagatggcgagactcggatgttctatgagatcgtggtggcaccaggatacacaga

SEQ ID NO: 97954 - DNA, 324 bp, Zea mays
  Clone ID: MRT4577_20845C.1
ccgccatgaagagcgggagggcgagccggacctgggagaacatagaactgcaacaaaagatgcaacatgcaaatacgaaacgggccggacgaccaacccactgcaaaagtctgagcccagacatagagtagaatcatcccgccagccgcggaccgctgagaccgcccagtagagagcagacagcgcccgctggggcgaggcgggggagaccgggcccggagggccgaggcgggagccggcgccgacgggccggccaagggagctggccccccacccccggggccccccccagaggaggggggcgggccggggtagaagcccccg

SEQ ID NO: 97955 - DNA, 435 bp, Zea mays
  Clone ID: MRT4577_20846C.1
aaccggtgcccgcacgcgagagcggagcttgcacgaggcaacgcacacataacaccaggtcgccgcggatggcaggaagggctgcggagctagagctggccgcggtgacggacatcggagtgcggcacgtgcaggacgcagacatgaacgtggacaagatggagtgcatggagcaggtggcgtgcctggaggagtgcctgccagcacttgcagggggagggccgcgcgccgccgccagagtgctgcgacgagctgctgccagacgctggagaagagccccgagtgcctgagcgtgatactctaggcacagaacgacccgaagctgcgcatgatgatcaagggcagcactggtgatcgtggtacctaacatctcgaagggtcacccagatcgacgtcatcccacagggctgagctactgcatagtgccccgggcac

SEQ ID NO: 97956 - DNA, 489 bp, Zea mays
  Clone ID: MRT4577_20847C.1
ggggggggggtgtgggggtttaaaaaaatttttttggggggttctaattacaagcgttttacacgtaaaagatttagttgggacttcataactttacaaaggagcccttacccttgtcccgctttgcaccccctttttaccctctaacccacctaccccacaaaacaagggggggggggggggcaaactgggcgtacaatctaaaaaaacacgctactacaacccaaagcctccttccaggcacacctgtaacacaaaaaaaaaaatcagagggacccacccccgggccgaactataaaacggaccggggaaaaaacaaaacacattttttattggggccaccaggggccacgaatttagaaaagccaaaaaaaaaagccccgccaaaaaaaaacagagagggggggggggcaaacaaacaatccccccacaaaatcatggaaaaggggcaactgttaaaaacggggaaaaaaaagttctacatcccga

SEQ ID NO: 97957 - DNA, 418 bp, Zea mays
  Clone ID: MRT4577_20848C.1
aacttggcaatttgggaaggaggaagggtccataacatgactctgaacatgaatattgtctctcttagcaaatacggctagggtaatggtctaactctaaaccacaagattcaccttggttaaatcctccacttactggactagggggaggttatagcctcctaaggagctcacttaaaacataaaaataaatgtgatatgtctttattaaatgttaaaattaaacgtacacttttttttggatataaatgactacatttgactcctagattgaaatggtcttttaaaaggtatttttgttccagtttccatttttggttgtctttctggcatgcctgtactattattagtgtttatattgtaccctgatttggaaaagtattagattcagtctataccaatgtatttataaagtcca

SEQ ID NO: 97958 - DNA, 1357 bp, Zea mays
  Clone ID: MRT4577_20849C.1
gttgatacatactaccttccctttccagcctcggctccgtccgtccccaatctcccctttcgtcttctcttcccgctcccgtcccgaaattagcccaccgattagcttgcttgccctagcagatcgaagccgtagccctagccgaggagcgcccatggccgctgcgatcgtggcctgaggcggcggggctcttcccatggggtgaggggatggaccctagcctgaaggaggaggtgatgaaggcggtggaggaggcgaggtccgcggcggcgccgcggtgccgggtggtgcggatcatcgtgcacgacgaggacgccaccgactcgtcttccagcgacgacgagggagaggaggcgggggagcgcgccgcggcgcacccggccgcggcgccggcggggagcgtgaagcgcagccgcgtgctgctccagtccgctgggtgcggggcggaggaggacggcgagggggccaggttcacgggcgtgcggcggcggccgtggggccggtgggcggcggagattcgcgacccgctgctccgccgccgcgtctggctcggcactttcgacaccgccgaggaggccgcggcggcctacgtcgcagcgcgcctccgcatccgcgggcccagcaactcgctccctccgcccgagcaccgcccggccttgcccccacgtcccccgccgccacctcagcagcgggagaagaagctgccgctgccgccgccgccgccgcctctccttccgcttccgccgaagaagcagcagtatccgccaccgcctctgcttccgccgaagaagcagctgtatccgccaccgcttcccctcctcccaccaaagaagcagcagcagcatcaccatcacccgtcaccgcctctgcccacgcttccgccgaagaagcggctgccgtcgccgcctctgctgcgcgaaagcaagaagcagtgcgtcgcctcctccccagcggagccgcgtttcatgccgctgccggtgtgggcgctgatgtccggctccgggaagcgcaagaagcggtcgggctgtggcgggcgcgtccccgccctccacacccccgccgccgaggagacggggcgcgcctgagaaggctgagacgactgggacctccctgcttctggtatccatcccctaccgcttcttgatcatgccatgccaatctgaattgccgctcaatcggtgctgatgtgaagagcctgtaacctctctgattcatgaactgatgaatttgtgtacatatgctgctgctgctgctgctggaaccgcagcgggtgatgaactgatctgtaaaacccgacgtattattcatatgtaataaataagtatctgttgacaatttcaaaaaaaaaaaagcggcc

SEQ ID NO: 97959 - DNA, 5043 bp, Zea mays
  Clone ID: MRT4577_2084C.1
atgacgacgagaaaaagaaaaacggtcaactcaaacttttcttttgattattctcgcattccgcataattcgaatgctcatttgctttccattcctcttggtaaacccccacactttgatggagaggactatggattttggagtcacaaaatgcgtagccacttgttctctcttcatccaagtatatgggaaatagtagagaatggaatgcaatttgatagtacagatactcccatgtttatcaatgaacaaattcacaaaaatgcacaagctaccactgttctattagcatccttgtgcagggaagagtaccataaggtgagcggcttggacaacgccaagcagatttgggacaccctcaagatctcgcatgaggggaatgatgccaccatgatcaccaagatggagttggtggagggcgagctgggaagattcgcaatgatcagggggaggagccaacccaaacgtacaacaggctcaagaccctggtacaccaagatgacgcccgaggaaatactcggaaagtttgtaagcgggcgaatgatgatcaaggaggcaagatatgttgatgaggtgttgaatggcccaatgccgatccacgagcctcaaaccgttgctctcaaagcgacaagcagcatagaggggctacctagcaaggtgacgcaagttgaggcggccgggctaaatgaggatgaaatggccctcatcatcaagcgcttcaagacggcgctcaaaggtcgcaaggagcatcccaacaagagcaagacaaagggaaagcgctcctgcttcaagtgtgtgaccaggaacaaggaaagaatgggaagagagaacaaaaaggtttacaagaaggctaagggtgaggcacaccttggaaaagagtgggactcggattgttctccgtccgactccgacgacgaaggactcgccgccacagcctttaacaaatcatctctcttccccaacgagcatcacacctgcctcatggcaaaggagaagaaggtaagcattcaaaatactattgcatatgcttcttcaagtgatgatgaatctagtgatgatgaagtagactacgcaagtttattcaaaggcttagatagaactaaaattgacaagatcaaagaattaattgatgcgttgaatgagaagaatagattgctagagaagcaagaggatcttttatatgaagagcatgataaatttgtaaatgtgcaaaagtctcttgctttagaagtcaaaagaaatgaaatgctttcatgtgaattatctacttgtcatgagtctatttctagtttaaagagtgtcaatgatgacttaaatgctaagttagaagtagcaaataaatctagctcatgtattgaacatgtagcaatttgtaataggtgtaaggattttaatgttgatgcatgtgttgagcaccttacttctattgcaaaattaaatggtgaggtggctagtcttaatgcccaacttaagactagcaagagtgattttgataaactaaaatttgcaagggatgcctacaccattggtagacacccctcaattaaggatgggcttggcttcaagagggaagccaagaacttaacaagccaaagagcttccattttcaacaaggaaaagggaaaggctcctatggctaatagtagtcaaaagaatcatgcatttatttatgatagaaaattttctagaaatgcttatcataataggagttgtaatgcttatgattcacatgccatgtttgcttcaagttcttcctttgtgcatggtagagatatgcctaggaaaaatgttgttcatcatatgtctagaaaaatgcataatgaaaatgctactattattcatgattgcaacactgattttgcactccaatgtaaaaataagaaagtggttgctacgaaattaggggcaaaatgcaagggagataaatcttgcatttgggtccctaaggctatttttactaaccttgtaggacccaacaagagttgggtttatgcatccgggggctcaagctggattatcgacagcggatgcacaaaccacatgacaggggagaagaagatgttcacctcctacgtcaagaacaaagattcccaagattcaatcatattcagtgacgggaatcaaggcaaggttaaaggactaggaaagatagttatttcatctgagcattccatatctaatgtgtttttggttgaatcgcttatgtataacttgttgtccgttagtcaattatgtaatatgggttacaattgcttattaacaaatgtagatgtgtctgtctttagaaggagtgatggttcattagcttttaagggtgtactagacgataaactttatttagttgatttttcgaaggaggaggccgatctagatgcatgcttaatcgctaagactagcatgggctggctgtggcatcgccgtctagcacatgtggggatgaagaaccttcacaaacttctaaagggagaacatgtgttaggtctaacaaatgtaactttcgaaaaagatagaccttgtgcagcttgtcaagcaggtaaacaggtgggaagtactcatcatagcaaaaatgtgatgaccacatcaagacctttggagctacttcatatggatctcttcggacccgtcgcctacctcagcatcgtgggaagtaagtatggtcttgttatagttgatgatttttcccgcttcacttgggtattctttttgcaggataaaacagaaacccaagggacccttaagcgcttcctaaggagagctcaaaatgagtttgagctcaaggcgaaaaagataagaagcgacaatgggtccgaattcaagaaccttcaggtggaggagtaccttgaggaggaaggaatcaagcacgagttctccgctccctacacaccacagcaaaacggtgtggtagagaggaagaacagtacgcttttagacatggcaaggacgatgcttggtgaattcaagacgcccgaacggttttggacggaagctatgaacacggcttgccacgccataaaccgggtctatcatcatcgcctcctcaagaagacgtcgtacgaactactaactggtaacaaacccaacgtgtcatactttcgtgtatttgggagtagatgttatattctagtgaagaaaggtagaaattctaaatttgctcccaaagttgtagaagggtttttgttaggttatgactcaaatacaaaggcgtatagagtcttcaacaaatcatcaggtttagttgaagtctctagcgacgttgtatttgatgagactaatggctctccaagagagcaagttgatcttgatgatgtagatgaagaagatgttccaacggccgcaatacgcaccatggcgattggagatgtgcgaccacaggaacaaaaggagcaagatcaaccttcttcctcaatagtggtgcatcccccaactcaaactgatgaacaggttcatcaagaagaggcgtgtgatcaagggggagcacaagatgatcatgctttggaggaagaagcaccacaggcccctccaactcaagtccgagcgacgattcaaaggaatcatcccgtcgaccagatattgggtgatataagcaagggagtaactactcgctctagattagctaatttttgtgagcattactcttttatctcttctattgagcctttcagggaagagctcaataacttcaagagaaatgaagtttggacactggtgccacgtcccaagcaaaacgtggtgggaaccaagtgggtgttccgcaacaaacaggacgagcacggggtggtgacaaggaacaaggctagacttgtggcaaaaggttatgcccaagtcgcaggtttggactttgaggagacttttgctcctgtggctaggctagagtctattcgcatattgttagcctatgcctctcaccattctttcaggttgttccaaatggatgtgaagagtgctttcctcaatgggtcaatcaaggaggaggtgtacgtagagcaaccccctggctttgaggatgaacggtaccccgaccacgttgggaaagccgatccaactcttttcactaagacatgtgatgatgacttatttgtgtgccaaatttatgtcgatgacataatttttggttctactaaccaaaagtcttgtgaagagtttagcagggtgatgactcaaaaatttgagatgtcaatgatgggtgagttgaactacttccttgggttccaagtgaagcaactcaaggacgacaccttcatctcccaaacgaagtacacgcaagatttgatcaagcggtttgggatgaaggacgccaagcccgcaaaaactccaatgggaaccgacatacatgttgacctcaacaaaggaggtaagtccgttgatcaaaaggcataccggtctatgataggttctttgctttatttatgtgctagtagaccggatattatgctaagcgtatgcatgtgtgctagatttcaattcgatccaagggaatgtcaccttgtggccgttaagcgaatacttagatatttagttgctacgccttgcttcgggatctggtatccaaaggggtctacctttgacttaattggatattcagactccgattatgctggatggaaggttgataggaagagtacatcagggacgtgccaattcttaggaaggtccctggtgtcttggagttctaagaaacaaacttccgttgccctatccaccgctgaggccgagtatgttgccgcaggacagtgttgcgcgcaactactttggatgaggcaaaccctcagggactttggctacaatcagagcaaagtcccacttctatgtgacaatgagagtgcaatccgcatggcggataatcctgttgaacacagccgcacaaagcacatagacatccgacatcactttttgagagaccaccagcaaaagggagatatcgaagtgttttatgttagcaccgagaaccagctagctgatatctttaccaagcctttagatgagaagaccttttgcaggctgcgtagtgagctaaatgtcttagattcgcgtaacttggattga

SEQ ID NO: 97960 - DNA, 280 bp, Zea mays
  Clone ID: MRT4577_20850C.1
attgtgcttgctctatgatgacgccgcatctggaactacgctcgagcctcgatgatctagatcacgtggggtcgagtactactgagagcgtctgccctttgcttaagttcggaccgggaccatgcgggacgatccagcgcgctactctacgcgactcgccttagcatcgtgcagtaagcatggagatagctgttcactcggttgagctgtgtacgctcacagcttctcgcaacatacgagcacgccatagatttgcacacgagctcaactctacctacca

SEQ ID NO: 97961 - DNA, 378 bp, Zea mays
  Clone ID: MRT4577_20851C.1
ccgtcgcatcccatccttctaccacccatctcgtcgtccgccgattcgatccggctcttccaaaccaagggccgtgatggccaccaacaggagcgtgggcaccctcgtcgaggcggatctgcaggggaataatgtgttcgtgcgcgccgacctcaacgtcccgctcgacgatgcccagaagatcacacgacgacacccgaatccgagcctccgaccccaccatcaacacccccctcgagaaggtcgccaaggccatcctcgccacccacctgcgccgacctaagggtgtcacccccaagaacccgcttgaagcctcctgttttttttttgtctgagccccttggagtatacagcgcgatggccactgattgcattgcc

SEQ ID NO: 97962 - DNA, 582 bp, Zea mays
  Clone ID: MRT4577_20852C.1
tcgagttttttttttttttttttttttttttttttttttttttttttttttttttttttttttttttttttttgaaaagggccccccccttacaaaatttcaaataaaaaaaaaagggggggttggtttttccctttgggggggagcaatttccccggaattaaacaacaaaacctggtggtaaataaccaaatataaaaaaacccttctcccccataggaagcttgtttttttcatgcccaaataaaaaagtttaaaaaagaaaaaaacattaaaaaccctattggagggggggggttcaaaaaaacggggatcgaaaaaaaaaccaacccaatccttgaaccctttgacgaaaaggctttggggggggggggaaaaatcccccttggagggcccgagggaaccctcgaagtgggccttcccccggggaagaaaggccgtttaaaccttttccaggttttccaccttggcacccaaagccttgagggggctcccctggaggccccgcccaaagaaaaagaacaggccccatggttttttggggctaagcttgttcagggcattgaaaataaggggggcccc

SEQ ID NO: 97963 - DNA, 727 bp, Zea mays
  Clone ID: MRT4577_20853C.1
ctctttcccgtttgttctcctcacccccattcccctcggctcgccgtcgccgacgggaccgcctcctccacctccgcgcatcctcaccaacatctctcccagacctctctctagccacgactaaagcgtaaggaggaagcaagtgcccacctcccgccgcctctaccgccacagctgtagcagcagtagcggacgcaggagattcagagctgtgtgctgaacacgcgcgtggcagggatggacgacggcgacagcgtcgctccgagcgcagacaaggacgatgcccccccgggcgacgacgggagctccacgccgctccctgagacgatccagattggcaattcacctacctacaaacttgacagaaagcttggaaagggaggatttgggcaagtatatgttggtcgccgtatttccactcctagtctcagtgacagggcacctggtgcaaatgctttggaggttgcaatcaaatttgaacaccgaaccagtaaaggctgcaattatggagctccttatgagtggcaggtttacaacactcttagcgggattcatggcgtgccaagagtacactacaaagggaagcaatcggagtactatatcatgattatggacatgttgggaccaagcctgtgggatgtatggaataataattcccactcaatgtctgttgaaatggttgcttgtattgctatagaagccatttccatactggagaagatgcact

SEQ ID NO: 97964 - DNA, 377 bp, Zea mays
  Clone ID: MRT4577_20854C.1
gcatttttgcaaaattaagcaagggttaaggttgtatagaagttcccttctcctgactcccaccttctgttggagcttttagcactagatatgccctcatcggttatcactttggatgatatgaggttattcttgctgagttcaacttgttagatttgtatatctggacaagccttatatgagcatgggaatctgttccattcaccatttctctttgtggttaaggtgggaacgagtcatattggcttttcagcatgatgtttctatggtcattggaaaggcaacaagataccgaaattggtacctccctagttataatggtggcatctcttgttactttctcaaggaggataaaaggcaccttcaactcagtcagt

SEQ ID NO: 97965 - DNA, 262 bp, Zea mays
  Clone ID: MRT4577_20855C.1
ctgcgtgttccctggagatcgctggtccaagaacgtgcgtcatagttacggcgaggtcggatgtggttcaagtgccggcgtcgcagatcttctcggaagggcgggcatggactactctgggcgaactcccaactctggttgcacgcacatgagcatcctgggccatcatgggcgtgccatggtggtgctcatgaggcttcgtcgagggctaccgcgtcggcggcagcccgctcggggaagggctcgacagggtgtaccccgg

SEQ ID NO: 97966 - DNA, 204 bp, Zea mays
  Clone ID: MRT4577_20856C.1
tttatttttttagacgtaaacactctgcattatagggggggacttttaaaacaaacggcggtcgtttagttccttctgatttataagagtatagccgttaagtggaccacacagtttcttactgacatattcaatagccacagcggggtggaacgcatctccaacgagaagcacgttctcgtttaatacaaatctgaggaaagt

SEQ ID NO: 97967 - DNA, 668 bp, Zea mays
  Clone ID: MRT4577_20857C.1
cattgggtacctcgaggccggccggggcggaattcccccctgccctagcttctctctcggcgaagcacatcatacttctcgcgagcaaactcgccgagtcccggcaatggagcgcgtattcggcctggatggccgcgacttcgcgctggcgccggatcgacacctccgccgagcacgagaatcctcgtgcacaagacctcacaaggacgacgtggtggagactccactaccgagagatgactgaccgcttgcaagggagcctggatgccagcgaggaattgacggagccgatacaaaagagacctccacctgtgccaaagcggtaacaccatgccgttctcaaccgccgccaacgccaacttcacacaaggcgaactcgccaaagcccttcgagatagtccatatatggccaatatcattctcgacgattatggtagggatgatgctgctatctcctactactacatttgactactgtgcaagcttgcacaacattgcacaactgagctgctgtatacgcatcatacttcggatcgactctcatggacactctgaacctacccagacgtgactgttgacgaaacatgagaccttgttgcactggcgctttcatgagatccttctgtgatcgactgtgacgtctactgaactttggaaccaacactgat

SEQ ID NO: 97968 - DNA, 285 bp, Zea mays
  Clone ID: MRT4577_20858C.1
ctgctcgatgatcgaggccttggatgagctgaacccggctggccccgcggcagggaaacacaaggccatgtagatgcgagtcgcagggggtgcattcacttccctgctgaactgaaaacaaagtatgattgggtccatcctaggctcccccatagatatagctctttttcagaggtaagatggactaattcagcagcaggttctttttatagattcttcgttgttatgaagcacgcggtactattgtagtagatgaatgcgatctgtcgcgactgtcatctacat

SEQ ID NO: 97969 - DNA, 327 bp, Zea mays
  unsure (1)..(327): unsure at all n locations
  Clone ID: MRT4577_20859C.1
agagtttcctgcatccgcctccgccccccaccttctccaccttctccccccacctcccggcggcacattattaaggattgaagcccctttctccctctactccttctcgccgtaatccgcccccaagcttgccccacgctcccctttgtagcagcatcagtctcccttctatgaaggatattacatggataaaccaacacattttagatttctagtgtctaatactgcagcacgtttcatcattcgcaatggttgatcaaccannnangatttttaatcctagtctttgtcctttattcanttatcacctaccaatgatttttttcc

SEQ ID NO: 97970 - DNA, 612 bp, Zea mays
  Clone ID: MRT4577_2085C.1
cccactcgtccgcccacgcgtccggtgcacagactctggcacggctcaagcggagcaggggagactactgcatgcgattgacgtgttcttccaggagtcgggcaggagacaacatcaacatgctacagctcgacaagagacagtgccaggggattatggaccaagacagggcagcagggcccgtcgccccaaagagaatatatccggtccaggatggatccggatccggcactagtgagcctacgcctacgcctgcgctcgtgaccgatgccggccgtgcccaggttgctgctggcttgtgttcggagctcccacgcttgatttgtggggaattccggcgatcagctccgccgctcccatctcacgagtcacgaactacatccgcttccaaagaaacatgatatcttgaatcctaagtcatgaatcctgagtcagaaactctagtgaagtcgcaactactcgacgtgttttaagtttttaaggagccgtaaatttagctcttgtatttaacgagctcctcgcgaaccggaatgagctgaggaagcccaaaactgagcccacaacaagcacaaagccaacagcccaacactaacaagaccctacgtttatctc

SEQ ID NO: 97971 - DNA, 1912 bp, Zea mays
  unsure (1)..(1912): unsure at all n locations
  Clone ID: MRT4577_20860C.1
ccggccaggatcgccaccagtggccgcgtcctcttcatttccgccatccgtatcgtctccctagggtttggcactttggccgccgccatggcgtcggcgtcgcgtgcgctcctcctcgacggctgcgacttcgagcactggctcgtcatcatggagccgccgcctggtgacgcctccaaccccgacatcacacgcgacgagatcatcgatagctatatcaagactctcgcccaagtcgtcgggagtgaggaagaagctaggcaaaagatatactctgtatcgactcgtcattactttggctttggtgctcttgtatctgaggaactttcttacaaactgaaagaaattcccaaggtccgctgggttcttcctgattcatacttggatgtcaaaaacaaggactatggaggcgaacccttcataaatgggcaagctgttccttatgatcctaaatatcatganggagtgggtgagaaacaatgcccgtgccaatgacagaaaccggcgcaatgataggccccgcaactttgacaggtcaaggaactttgacaggagaagggagaacatgcaaaactaccagaacagagatgggcctcctgcccaaggtttcaatggncctccacctccacctggccagaaccagatgccatcccaccatggtcagggcaacatgcctcccgcaacaccacatgctggtggggcggcaacaaactatcagccccaaatgcaaaaccccacagacgggctacaaccctggcggtgctcctcactaccaagcaaggtgctgctcctggctaccaaggtggacctccggggtatcaaggtggttaccaagggaacccaggccctgcctaccaaggtggtaacactggttatcaaggtggcaaaccccacccctccctaccaaggaagcaacccaccacctccttaccagggaggcagcccaccagggccaccacctccctaccgaggaggcaaccccaacgtaccgccatattcgggtggtggcaatcctggctaccctggtggcagccctggctaccagggtcaaggaggcaactcgaacttccagtgaacatgaccacgagtactaagttggcacccctgtttcagagtagccttctgcaagagatggtgcgccgtagcctagcataaatcgaacccttgttgctatcggatgtcatggattgtcgctgtttgcacttaatgttctatatatagtactcaaaactatgcttggcaagtgagtgatgtacgtggaactatggatcagtcttgtgtgcggttatcaaggtggcaacccaccacctccctaccaaggaagcaacccaccacctccttaccagggaggcagcccaccagggccaccacctccctaccgaggaggcagcccaccagggccaccacctccctaccgaggaggcaaccccaacgtaccgccatattcgggtggtggcaatcctggctaccctggtggcagccctggctaccagggtcaaggaggcaactccaacttccagtgaacatgaccacgagtactaagttggcacccctgtttcagagtagccttctgcaagagatggtgcgccgtagcctagcataaatcgaacccttgttgctatcggattttcatggattgtcgctgtttgcacttaatgttctatatatagtactcaaaactatgcttggtgtctgagtgatgtacgtggaattctgaaactatggatcagctcttgtgtgcacttgctgaaccagatacccagcagtaagcttttgtttgttcgttttgagtggttggttaaccacaaacttgttacagtcgattctgataaacttccatgtaatacttttgctgcattgtccgtgagacctcaacggcccggcactcggaagtcttctgctcttgtcgctg

SEQ ID NO: 97972 - DNA, 627 bp, Zea mays
  Clone ID: MRT4577_20861C.1
aaaaaaacaatgccatattcccttgctttcaatacaactaggcaacctttgccatattttttttgatgaaatctaaaatttgtgtgtagaagaggtaggaccataaagatcacttccaaacagagcttcatcctttgtaattaaaatgtcactccaagcaactatagtattgcataacaaggtaaccaaacaatatctacaagggtcacaacatttgttcctgcttccaaaccacaagagagaatatgactagcattgcagcaccatcctccaatgcataaatggcagaacaaatctgaccttccagtttttatgatatgccaccacgcttgatgatattatcatattagcaatgctttaaaagttgtagtagttgatcctgcaaataactcagcatcttgatgctatatgaatgtgcaagacgtgccatgggacggtaaagagttacagcacttctactttcagcatgactctatgtttcagctaatgcttagggggggtgtttgaatgcactagaactaataattagttggctaaaaattgttagtagaattggctggctaacaaataactacctaactattaactaatttaccaaaaataactaatagctaaactattagctag

SEQ ID NO: 97973 - DNA, 1383 bp, Zea mays
  Clone ID: MRT4577_20862C.1
cattgggtacctcgaggccggccgggccaaactggttgcatcgcccgcccaaggagacgatcctcctcgacggctgcgacttcgagcactggctcgtcatcatggagccgccgcctggtgacgcctccaaccccgacatcacacgcgacgagatcatcgatagctatatcaagactctcgcccaagtcgtcgggagtgaggaagaagctaggcaaaagatatactctgtatcgactcgtcattactttggctttggtgctcttgtatctgaggaactttcttacaaactgaaagaaattcccaaggtccgctgggttcttcctgattcatacttggatgtcaaaaacaaggactatggaggcgaacccttcataaatgggcaagctgttccttatgatcctaaatatcatgaagagtgggtgagaaacaatgcccgtgccaatgacagaaaccggcgcaatgataggcctcgcaactttgacaggtcaaggaactttgacaggagaagggagaacatgcaaaactaccagaacagagatgggcctcctgcccaaggtttcaatggccccccacctccacctggccagaaccagatgccatcccaccatagtcagggcaacatgtctccgcaaccaccacatgctggtggtggccaaccaaactatcagccccaaatgcaaaacccacagacgggctacaaccctggcggtgctcctcactaccagcaaggtgctgctcctggctaccaaggtggacctccggggtatcaaggtggttaccaagggaacccaggccctgcctaccaaggtggtaacactggttatcaaggtggcaacccaccacctccctaccaaggaagcaacccaccacctccttaccagggaggcagcccaccagggccaccacctccctaccgaggaggcagcccaccagggccaccacctccctaccgaggaggcaaccccaacgtaccgccatattcgggtggtggcaatcctggctaccctggtggcagccctggctaccagggtcaaggaggcaactccaacttccagtgaacatgaccacgagtactaagttggcacccctgtttcagagtagccttctgcaagagatggtgcgccgtagcctagcataaatcgaacccttgttgctatcggattttcatggattgtcgctgtttgcacttaatgttctatatatagtactcaaaactatgcttggtgtctgagtgatgtacgtggaattctgaaactatggatcagctcttgtgtgcacttgctgaaccagatacccagcagtaagcttttgtttgttcgttttgagtggttggttaaccacataaaaaaaaaaaaaaaaggacggccgctcgcgatctagaac

SEQ ID NO: 97974 - DNA, 2053 bp, Zea mays
  Clone ID: MRT4577_20863C.1
cactatagaagagctatgacgtcgcatgcacgcgtacgtaagctcggaattcggctcgagcaaaactaccagaacagagatgggcctcctgcccaaggtttcaatggccctccacctccacctggccagaaccagatgccatcccaccatggcaagggagaacatgcctccgcaaccaccacatgctggtggcggccaaccaaactatcagccccaaatgcaaaacccacagacgggctacaaccctggcggtgctcctcactaccagcaaggtgctgctcctggctaccattgggtacctcgaggccggccgggatcgccaccagtggccgcgtcctcttcatttccgccatccgtatcgtctccctagggtttggcactttggccgccgccatggcgtcggcgtcgcgtgcgctcctcatctctcgtgcgctccaggccggcgccgtgtctcgccgcgtccccgccctcctgcgccctgtcgctgctgccgcgagcctcctcccagcggtggcggggccggcaggggccgccctcggcgctagggtgcggtgcttcgcgacccagccggcgacgtcctcgctgcgggactcgtccccgaactggagcaatcgcccgcccaaggagacgatcctcctcgacggctgcgacttcgagcactggctcgtcatcatggagccgccgcctggtgacgcctccaaccccgacatcacacgcgacgagatcatcgatagctatatcaagactctcgcccaagtcgtcgggagtgaggaagaagctaggcaaaagatatactctgtatcgactcgtcattactttggctttggtgctcttgtatctgaggaactttcttacaaactgaaagaaattcccaaggtccgctgggttcttcctgattcatacttggatgtcaaaaacaaggactatggaggcgaacccttcataaatgggcaagctgttccttatgatcctaaatatcatgaggagtgggtgagaaacaatgcccgtgccaatgacagaaaccggcgcaatgataggccccgcaactttgacaggtcaaggaactttgacaggagaagggagaacatgcaaaactaccagaacagagatgggcctcctgcccaaggtttcaatggccccccacctccacctggccagaaccagatgccatcccaccatagtcagggcaacatgcctccgcaaccaccacatgctggtggcggccaaccaaactatcagccccaaatgcaaaacccacagacgggctacaaccctggcggtgctcctcactaccagcaaggtgctgctcctggctaccaaggtggacctccggggtatcaaggtggtaaccaagggaacccaggccctgcctaccaaggtgggtaacactgggttatcaaggtggcaaacccaccacctccctaccaaggaagcaacccacccacctccctaccagggaagcaacccaccacctccttaccagggaggcagcccaccagggccaccacctccctaccgaggaggcagcccaccagggccaccacctccctaccgaggaggccgccccagcgtaccgccatattcgggtggtggcaatcctggctaccctggtggcagccctggctaccagggtcaaggaggcaactcgaacttccagtgaacatgaccacgttggcacccctgtttcagagtagccttctgcaagagatggtgcgccgtagcctagcataaatcgaacccttgttgctatcggattttcatggattgtcgctgtttgcacttaatgttctatatatagtactcaaaactatgcttggtgtctgagtgatgtacgtggaactatggatcagctcttgtgtgcacttgctgaaccagatacccagcagtaagcttttgtttgttcgttttgagtggttggttaaccacatacttgttacagtcgattctgataaacttccatgtgatacttttgctgcaaaaaaaaaaagtccgcggaggcctgggtctggcggcaaaaaaaaaaaaaaaaagcggccccctggcgattagaacc

SEQ ID NO: 97975 - DNA, 352 bp, Zea mays
  Clone ID: MRT4577_20864C.1
ttttggtttttttttatgtggtatttgttcattactcttggatggcatggggtgttctgcatctattctcaacagggcccatgggaatttattgtgggggggggccctgaaccaggcccaaaaaacaaaaggggccaaacaaccatctgaacaaggggtttttcaaaaggggggggggggaaaaaaaacaacagcccacccgcttggcccaaagaaaggcacacctaacaggccgttgaaaaattctttgggacaaccccaccgggagggggggggatcagaccgaggttctttaaaagccccgggaccgccggaaccacaggggtagcaattgcaaaaaggcccttggcga

SEQ ID NO: 97976 - DNA, 829 bp, Zea mays
  Clone ID: MRT4577_20865C.1
gagttctagctgcaccgtctctccttcctccgtcccctcctccctggctctgctccatcaggtttgcttctcctccctcggatttcctcttcttctcctgcattctgcaacgcagcgtgcctggttatgaaatgttgctcttttcgtcagtcgcatgcgattgacagctcgagagttaccgactctctctctctctctctctctctctctctctctctgactatacatgcattgtggtgtactgatgcttgtgtaacttgtcgccgtgttgatacatgatctcgggaacatgagagttttatgtcatctagcacatggtggtggtagttcttcagctttaagtcgaagcgaagatcgtgtaggctagaacatgagagagtgctcgtctaggtagctgtattttttagtaaaggatctaggcggttggttggttcttttcacttttagtgttggcttgagatctgaaagttcctctttttttcttctttgcgccccttttttaaaataagctagcagatccaatgatccatctagcttgtatccgaattaattgacactttttctagcgagtgaatcggttaccaaaatgtataatatatgctcctgagtaatagatcagtaatgacacgattccaattaattactattgatctgaacgcacaaatatcagcataaatttagatactttgatcaagagaaacgaacgaaatgtttttttacaacgagacacaaccaccaaactttttccttttaaatatgaagaactctcagccttgatcgatcaattagatcaaatcggctaactatatatacttcgtgcgtgatctcg

SEQ ID NO: 97977 - DNA, 422 bp, Zea mays
  Clone ID: MRT4577_20866C.1
cacgcgaacggagagctcggaaaacagctcgagcaacacttttcaaaacattttaaaacaaaaaacgcgacaaataagcgttttttgggaatttttccgcccacaacaaaaacaaaatgtagctaccattttacttcaaaattgcaaggcatgtatcactgatcttaaactacctctaacgatactacacaagcgctttatgcatctacttcctcacaactgccaacagatgcccccacaaattctctccagaaacacacaactgcctcatggccaacacaaaccttcaatacctacaacctccccccttaaatagctgcttactcaaaaaagaccctgacatattaccttggcacacataatggcacgatgctaacatagcaaacaaacatcggcacggccgacatcaaaataacattaag

SEQ ID NO: 97978 - DNA, 199 bp, Zea mays
  Clone ID: MRT4577_20867C.1
gccgtcggacccggccgccgccgtcgccgcgaaagcgtcgcggacctgctccgtggtgtaggggaactccggcgcgggtcatggagttgagcagcacggcgactccctggtacgtatctgcatcctagcctaatgtatgtgctttcaccatcataccatgtgctctatagacctatcaaatgttcatttttttaataaa

SEQ ID NO: 97979 - DNA, 317 bp, Zea mays
  Clone ID: MRT4577_20868C.1
gtacgtaagctcggaattcggctcgagggttattgtcgagcatatgtttagcagggcgcccttgaatacagcaaagggggattttcctaccacagtcgccgagaatccgccagcaaagatgaggcacattgacataaacgaccaagtgatgaccagtgagacgggaccgcgcctcgatgcgcaaaaaaggcgacgagctgtgacctacatcagggaaaaggacacccctgcgaatgcccagaagtacgaagatccttccagaacaaggaacaaccacactggaaactcgaacattgattctacaaaaataacgggat

SEQ ID NO: 97980 - DNA, 325 bp, Zea mays
  Clone ID: MRT4577_20869C.1
cgcataactagggaactcactgcattgtatagtctaatagtggttgattttacgctgaaggaagatggcgtgaatactgcaagctatgatccaatacctcatgtcaatgcaagcatgtaacctgataaccctgccttagaactgccagatctactagtactgatactatatgatatcaactgcgtaagtcatcttcaagaacaaagactatagacgcgacctagcgagctacgtgctcagcaatatggaggtgtacatttactaggtctgcaactgacatattacctgcatagctgttattcgatactagctgaaggtacgaatg

SEQ ID NO: 97981 - DNA, 4872 bp, Zea mays
  Clone ID: MRT4577_2086C.1
atggatcctaagggcaaggggattgtaatcaatgataaggagaaggagtccttcgtcaacgagcccaaggatgacaagcctaccgactcaggctcgggccacaaacgcaaagatgggaagaagaagaagacaagacgcatcaaggagattgtctactacgacgacagcgatgagtccacctcttcccaaaaggacaacgacggcaacgactacgacaaaagaaagacggttaattcgaacttttctttcgattactctcgtattccgcatagctcaaatgcacatttgctttccatccctcttggcaaacctccacactttgatggggaggactacggattttggagtaacaaaatgcgtagtcacctgttctctctccatccaagtatatgggagattgttgagaatggaatgaaatttgatagctcggatagtcctatattcattaatgaacagattcataagaatgcacaagctactactgtgttgttagcctctttgtgcagggacgagtatcataaggtgagcggcttcgacaatgccaagcagatctgggacaccctcaagatctctcatgaggggaatgacgtcaccttgctcaccaagatggagttggtagagggcgagctcgggagatttgcaatgataaggggtgaggagccaacccaaacatacaaccggctcaagaccctcatcaacaaaataaggagctacggaagcacgcgatggacggaccacgacgtcgttcgcctaatgctaaggtcctttactgtacttgatccacatctggtgaacaatattcgtgaaaatcctaggtacaccaagatgtcgcccgaggaagttcttgggaagttcgtgagcgggcgaatgatgatcaaggaggcgagatacgtggacgacgcattgaatggtccaatcaatgagcctcaaccctttgctctcaaggcaacaagaagcaaggaggcgctacctagcaaggtggcacaagttgaggcggcagggctaaatgatgaagagatggctctcatcatcaagcgcttcaagacggcgctaaaaggtcacaaggggcagccaagcaagaccaagacaaaggggaagcgctcatgcttcaagtgtggtaagattggttattttatcactaactgccccgataatgatagtgaccaggaacaggggaacaagagggagaagaagaaagcatataaaaaggctaagggcgaggcacaccttggcaaggagtgggactcggattgttcgtcatccgactccgacaatgaaggactcgccgccaccgccttcaacaagtcatccctcttccccaacgagcgtcatgcatgcctcatggcgaaggagaagaaggtatgtaatcgaaacaatgccacttatgagtcttctagtgatgatgagtctagtgatgaagaaatagattactctagtttgttcaagggattggatagaaataaagtagataagattaatgaattgattgatgccttgaatgaaaaggatagacttttagaaaaacaacatgaccttttatatgaagagcatgacaaatttgtagaggcacaaaaatctcatgctttagaagttaaaagaaatgaaatgctttcttgtgaactatcttcttgccatgagacaatttctagcttgaggagcataaatgatggtttgaatgctaagttagaaatagctagtaaatctaactcttgtgtagaacatgttatgatttgcaataggtgtaaagattttgacattgatgcttgtagtgaacacctagtttcaatttccaaactgaatgatgaattggctagtcttaatgcccaacttaagactagcaagagtgattttgataaactaaaatttgcaagggatgcctacacgattggtagacacccctcaattaaggatggacttggcttcaagagggaagccaaggacttaacgagccataaggcacccatctccatcaaggagaaagggaaggcccctatggcaactagtgctaaaaagaaccatgcttttatgtaccatgatagaagacagtcctataggagttgtaatgcttatgatgcttttgactctcatgccatgtttgcttctagttcttcctatatgcatggtagagatatgtctaggagatattttgttcatatgcctaggagaaatgttgttaatgttcctaggaaagttaatgaaccctctataatatatcatgctttaaatgcttcctttgctatttgtagaaaggataggaagatagttgctagaaaattaggggcaaaatgcaagggagacaaaacttgcatttgggtccctaagaatatttgtgctaaccttgtaggacccaacatgagttgggtttatgcatccgggggttcaagctggattatcgacagcggatgcacaaaccatatgacgggggagaagaagatgttcacctcctacgtcaaaaacaaagattcccaagattcaataatattcggtgatgggaatcaaggcaaggtaaaagggttagatgtgtccgtctttagaagaagtgatggttcattagcttttaaaggtgtattagacggcaaactttatttagtcgattttgcaaaagaggaggataaatctgaaacccaagggaccctcaagcgcttcctaaggagagctcaaaacaagtttgagctcaaggtgaaaaagataaggagcgacaatgggtccgagttcaagaaccttcaagtggaggagtaccttgaggaggaagggatcaagcacgagttctccgctccctacacaccacagaaaaatggtgtggtagagaggaagaacaggacgcttatagacatggcaaggacgatgcttggagagtttaagacccccgagcgcttttggtcggaagccgtgaacacggcttgccacgccattaacagggtctaccttcatcgcctcctcaagaagacgtcatatgagctactaaccggtaacaaacccaatgtttcttattttcgagtttttgggagtaaatgctacattctagtgaagaagggtaggaattccaaatttgctcccaaagccgtagaagggtttttcttaggttatgactcgaatacaaaggcgtatagagtcttcaacaaatcatcaggtttggttgaagtccctagcgacgttgtatttgatgagactaatggctctccaagagagcatgttgttgattttgatgatgtagatgaagaagaagttccaacggccgcaatacgcaccatggcgattggagatgtgcggccacaggaacaagatgaacgagatcaaccttcttcctcaacaatggtgcatcccccaactcaagatgatgagcaggaggcggtagaagaggccttgctagatccggactgggtgttggccatgcaggaggagctcaacaacttcaaaagaaatgaagtttggacactggtgcctcgtcccaagcaaaatgttgtgggaaccaagtgggtgttccgcaacaaacaagacgagcacggggtggtgacaaggaacaaggcacgacttgtggcaaaaggttatgcccaagtcgcaggtttggactttgaggagacttttgctcctgtggctaggctagagtccattcgtattttgctagcatatgtcgctcaccattctttcaggttgttccaaatggatgtgaagagcgctttcctcaacgagccaattaaggaggaggtgtacgtggagcaaccccctggcttcgaggatgaacggtaccccgaccacgtgtgtaagctctctaaggcgctctatggacttaagcaagccccaagagcatggtatgaatgccttagagactttttaattgctaatgctttcaaggttgggaaagctgatccaactctgtttactaagacttgtgatggtgatctttttgtgtgccaaatttatgtcgatgacataatatttggttctactaaccaaaagtcttgtgaagagtttagcagggtaatgactcagaaattcgagatgtcgatgatgggcgagttaagctacttccttgggttccaagtgaggcaactcaaggatggaaccttcatctctcaaaccaagtacacgcaagacttgatcaagcggtttgggatgaaggatgccaagcccgcaaagactcctatgggaaccgacggacacaccgacctcaacaaaggaggtaagtccgttgatcaaaaagcataccggtctatgatagggtctttactttatttatgtgctagtagaccggatattatgcttagcgtatgcatgtgtgctagatttcaatctgatccaagggagtgtcacttagtggctgtgaagcgaattcttagatatttagtcgctacgccttgtttcggaatctggtatccaaagggctctacctttgacttgattggatattcagattccgactatcctggatgtaaggtcgataggaagagtacatcggggacgtgccaattcttaggaaggtccctggtgtcatggagttctaagaaacaaacctctgttgccctatccaccgctgaggccgagtacgttgccgcaggacagtgttgcgcgcaactactttggatgaggcaaaccctcagggactttggctacaatttgagcaaagtcccactcctatgtgataatgagagtgctatccgcatggcggataatcctgttgaacacagccgcacaaagcacattgacatccggcatcactttttgagagaccaccagcaaaagggagatatcgaagtgtttcatgttagctccgagaaccagctagccgatatctttaccaagcctttagatgagcagaccttttgcaagttgcgtagtgagctcaatgtcttagattcgcagaacttggattga

SEQ ID NO: 97982 - DNA, 504 bp, Zea mays
  Clone ID: MRT4577_20870C.1
cccaagggggggccccccgccccatggaaaaacacagggggcccaaaccgggacccccaaaaaaaaaaccaaaaccaattttgggaaaacccaggggggggggccgaacccaaaaaacaccctaaaaccaccccagtttttttggaaggcccaaggggggggacaaaaaaccccaccagggcaaaaaggtattgggggaacaacatcttggcaaacgggaggggggaaaaacccgggcccaaaacgggatttctaacttggcccccccccaggacgcccaaaggggctttttggaaaaaaaaccccttaaaaagggccttagttttatggcccccgtaaaaaaaacccaggtggtttttaaaccggggagctgggccccccgtttggtcccgggggaggccggaggggggccccctttcaaggtgggggcccagccaaccccctaaatcgggaaaggggccccattttgggttttgttaaggccaaactttggaaggggggggg

SEQ ID NO: 97983 - DNA, 390 bp, Zea mays
  Clone ID: MRT4577_20871C.1
agctcggagggggggtcgaggccgtacaccctgggcattagcttgtcatgctcggccagctctgtcgccgaaccctggcttggtggccgctgcgcacttgcctgtggtcggggccgactctaggcgcccgggacgcgggtcagcgtgctgcgcaggctgctctctctagtcagactgtctgcagcagcgtcccctaaatttcgtgccgtaacggaatattgtttgttccttacaggacactgtaaaagatactgacctctatatatgatacgcctgcagcagcgctctctaaagtgcgtaccctaaagctacagtgtcaacagattcacattttccatttctttgtcatttttctttcgtttcttctcatttgacactatataaatgata

SEQ ID NO: 97984 - DNA, 338 bp, Zea mays
  Clone ID: MRT4577_20872C.1
gggaaagaaaaacatttttcccacattttggtggggggggcacaaatttacataacagggctgcgttcatattctaaaaaggggggcttcccttttaaaccccccgggggaaaaaaaaaagaggaaactttgtctcaaatatttacagggtggaaaacccccaaaaacctttttggctttgcaattataaaaaaaaatccccaacccttttaaaaattgtgctgatttgcccaaactgccccccctaaatccaaccccaccgggctttgttcccaacttggtcaaagggtgccttttttggtcttcccccccaaggtttgttttggttttttaaaccc

SEQ ID NO: 97985 - DNA, 370 bp, Zea mays
  Clone ID: MRT4577_20873C.1
ggaaaaatggcactctggttggagccattccaaaagaaattaaaggcccactatatcctaccattgcagttcatagttacggtgaagagtaagcttttacttttttagttgtttaggcgacatagaattgctatatggtgtaagttgtgattcaccccaggtcttccaaccttagttgcagaaacatctggcagacttggataataatacctgctccaaaatgcaatttactcatttgtttttttgcgtgttatatgatggttttcctttctagcacgacatagaaagtcacaagttgtgcacctcaatagtaacacaagttaatcactccctgtttaattcttagacataactttagttgtaggttctc

SEQ ID NO: 97986 - DNA, 1069 bp, Zea mays
  unsure (1)..(1069): unsure at all n locations
  Clone ID: MRT4577_20874C.1
caggaagatgggcaccatccggagaatgatcttagtctcctccacctgggttatgctgcagagaatccagccaccggtcttcccggtgtccaccgctgcttgntcaaggcagcgaaatccgtcggttctatgcagaatctcgagggaaccggcgtcgccttgacttatttgctttagctcactggggttggccggtaatgcaacatttcttttcttgaatgcagctacaagaacctgcagtattcttgtgatggggctactagttggcagctggttcctgtataacgggaggccagcaatccatatcagcatcccgaggagcacggacaaggcacagacggcgaagcctacgtcccagcctttactgttctccacccacacgatgaagaccagccccacgaagccacccgtcgagacggagaaggtgtaccagttgaagaagctcgactcctgcctctgctctacgggatccgacctgtcgaactgctccccgccgaaagccgggaggcatgcccgagccgccccatcgccgatggggatcaggtagagacccaggaggagcaggctcaggttcgaaccgctcacggactcacacgtacttgtctcttgtccagggacgcacggtggtgggtgcagggatgggacatgtgcttggaccgcgagcaggatgtagcccagtatttcaattgggccaaagatgaggacagtgtagaaacgcttgatgtaggagtcagcaaggaaggctgctgggatggagaacatttgcagcgcggcaaagaaattgctggccatcgtcgtcgccctcgcgacatccatgtgcatctcctcgcgcagatagcttaccagattcagtatactggcaatgttggctacgttgctgagcagcaccagcgcatgaatgaaaattgaagctctcactcctccatgcttcttggtgttcaccggccgtcctctccagtccacaaggcctgatgaaccgcccattactcactcactcactctctctctctctccctcgcctcagtgtgcccgtgcgcgcaggtcaatgcgtgtcccggccggctcgagg

SEQ ID NO: 97987 - DNA, 438 bp, Zea mays
  Clone ID: MRT4577_20875C.1
gccggccgggcttgggacacatgagctagactcctcctctcttgccctctacctacttacgtatctgaatgtcgctcgaccgaaggaaaagtcaacgcttcctttcagctccttgactgatcacgtatcggaggaaaatgcgtatactggggactacgctgtgcctaacagtgctgtcggctgaagtagacaagataagcacggtactgcgatgtctcacaggcggacaacatcgaagacatgaatgaagacaagaaggacgaacaaaaaccgcctccgcacaataagaagtacaggtgtgtgcctcacccgcatccgctgcccaaccccgtaatgggcccgagatgaccgtggaagtgaccgcctcaggaacatcgctttcgatgacagaagcgtccgactcacgcgcccaagtccatttcctatttgccaccgagc

SEQ ID NO: 97988 - DNA, 571 bp, Zea mays
  Clone ID: MRT4577_20876C.1
ggccggccgggccgggatttcatacgttttctccgcgcatcaacgtagatgttctacttgggcgcccatgtatctcaccgatgacgagactgcgaactccgacgacgcctgcttgttatgctcctccctctgcgacgaatgtctcatctactaccattctgaagcattatccaccgactaaggggcctaatactgaaatcttctgtgccgactgtacatcatagagcttatgatggcgaggatcatttgtacagcaacgacttaggaggcctaggacatgtccgccgagctcaactacgcctgcaggagtgcgatgtgccacagctacaaacattatacctgggactcgagactggctgccctatggagattgactgcgccgctcagcgtcgctgactggatcactgtattgctagagactcccactgaggcgattcgacctgcatgacttgagcatagtacctcaaataaagtcgcttaagcgtcgcatctcgatgacgcagagcgcggaggatgtcactactatgctgcataatatcgctgcatgctgaatccactttacaagacggtt

SEQ ID NO: 97989 - DNA, 860 bp, Zea mays
  unsure (1)..(860): unsure at all n locations
  Clone ID: MRT4577_20877C.1
ttgggaccctcgaggccggccgggacgcgggtatgtacccgatcgtcaacgtcaccgggctcccgtccctcgtgaagccatctccggtctggctgaacgtgcagcaccccaccttctacaagcagcgcggtctggacatgagcagctacatcctctcgacccatcaagacctggtacccaccgtggcatacatctcgtcgccggagctgggcttcctccagaccatatccgccgtcgccggtcgcactcgcacgacgaccaagctcgttttcagcttcctcgacaaggccctcctggaccactccgtcaacaggacgtacggctcgctgctggcgaacctgacgctcgtcaggtccgtcgcgtccgggatcatggtgcccaagagctacatctggccggtgaccggcgacaactacctgctgccgtccacgtccgtcgtcacggacgcccacaaagcggggctggaggtttatgcctctgacttcgccaatgatagggtcatcccctacaactacagctacgacccggtggccgagtacctgagctttgtcggtgatggcggcttctctgtcgacggcgtgctgtccgactaccctatcactgcgtcagaggcaattggtaagccactaaaaattaaagctcttcattagtacttagtagcagtgtgttatgttttttcaatgcatgcatgcatgcatttggaagaatcttctcatatatatctgcaggttgttttgccaaactgaattcagcaagactgatcatggtacgnttcagtctgattgtgctatgagatggttggacgtcttccattcccaacagangttgactagctgctcctagcgctcgtcttccttaat

SEQ ID NO: 97990 - DNA, 628 bp, Zea mays
  Clone ID: MRT4577_20878C.1
ggccgcttttttttttttttttttcaaaatgaactttcttatttgtgggaagccacactcatcatatacaaaaactttattattgaactataactcataagaaatctaaaagagggcaccaccaatgatgggttggtggtagaacactgttgggtttgtcaaagcatgatggttgaatggcagcaattgttgcagttgtaagagggtgccagctttaggcgcaacgagctggtagaacggtaacaactgaggttgtgccaagaaagtagcaggacttacaccagttagctggtgtgaatggtagtagttgttgctgctgcaaataaacaagagagttcaacgctggtagttggttgaacggaataaattgctgggggcactcatgacgtaactgcctgaacggaagctggcggtgttgcaaatacgaagcagcatgtcatggaacctaggggactgaatggaataaactgctgttgctgagatgacgacgccaggtttgctatgacaaggtgacggtcttgtgcgctgatgttgtgacccactaagatgcaccaaaggtaactgtggtaataccgctgacgattgttggaggaacaaggatgataaaggtaagatgccaactgcgatt

SEQ ID NO: 97991 - DNA, 382 bp, Zea mays
  unsure (1)..(382): unsure at all n locations
  Clone ID: MRT4577_20879C.1
gcaacaacatctttctttgggtcangagaggggccccagggtaaccgtaccttatgaatacctttcaacaatactgggaatttttcaacagtttcaatacaaaatctaaaaggggggaaaatgaaagaaagaaagatttttgacgaccaaactagtaaaagataaccgatccgcgcataataatggtgggtgttggcaagccaaattatacccaatcactaagcccggctgtcatgggttgcagtttcaacgcgcattgccaaagcccttgatcatccttatttccgtgaattttatatggggcagcagcctactactgatcaaacacacacattcaggatcagcaatgcttgtaggtaacagcatagccagaggaaggtgg

SEQ ID NO: 97992 - DNA, 374 bp, Zea mays
  Clone ID: MRT4577_2087C.1
tctagatcgcgagtggccgccctttttttttttttttctaaatagtgaagaattattttttactatactaggcttacacatcgatataaaaaataattcttcactatttagaaaaagaaaataaaagtgagaaaatgagagtgtaacacctgaatttgatggatattagagaaaaaaatttatacccccaaattcagggtattatagatctgacccccttaataggaatctcacccccgagattcaagaagaagctagcaagaaaacgaggttggttcataggttgttcacaactttcttgagttgactttgactctacaagcttaacttggggattggtttgctttgactttcagatgcttgagaccgatcga

SEQ ID NO: 97993 - DNA, 454 bp, Zea mays
  Clone ID: MRT4577_20880C.1
ggaccaaggccaggaacaaagggggcattttctcgaaagaaaaaaaaccctttttaatgggttaacaaaaagccgggcaaaatttagcccatgctatgacagggaaattagcgggggctatccaaactctactttaaattaatttttcacaggttccctgacattaaacggaaaatgggaaatccccccggcggggagcgaacgttccattgacctatatgcttttctggaacaaagacttggcatgcctttcttgggggggaaattataaaaaagttttaccccccaaacaaaacccccggtttttcctttgacaaccccacaaaagtggttttctggaaaggcatcattgacccaaaaacccatatttttgaaacaagggggaaactttaaaaaggggttgaacttgacaccaagcttgccttttgaaaacggggacgggaaccgtttatca

SEQ ID NO: 97994 - DNA, 707 bp, Zea mays
  unsure (1)..(707): unsure at all n locations
  Clone ID: MRT4577_20881C.1
cggttctggaaccagatggccacctggccgggctgcagcccccagcgcgcgggcccagctgcgccttgcgctccggctccaggcttgttggccaccctcggaagtgcgctcccagcgtgcgcacctgctccacgctcagccggacgcttccgctcgccgncacgccgccgcggcggacccctcctcgtcgtccgacgcgccgccgccgcagtcctgctggtgctgcttgggctccgcgtgcaggtggccgctgccgtcgtcacacatgccgtcagggtacatgcgcttaatgccggtggccagcattggaggcggcggcgcggtcatggcgccgccgaagtcgtggaggaaggggctgacgagcgccgggggagggggagccaggaggtggtcgtggccctcatggtgctggtgctggtggtgcgcctgctgctcctgctgcatttggaggaggaagttggcggcgaagaaggagggggccatgccattggttgccattggcttcatcgcaggagcgagaggaacatggggagggagtatatcgatcttccttcccacaccacagattgacacggggaaagagagagagaggggatggagctgctagaggttggttgggacttgggagctagcgagagtcttgtgtgtgtgtgacagagaggcagagctggaagaaactgaaagagtcncgggagctgctaatataa

SEQ ID NO: 97995 - DNA, 237 bp, Zea mays
  unsure (1)..(237): unsure at all n locations
  Clone ID: MRT4577_20882C.1
gcacaaaaacaccaaanccccaaatgcctaaacttaccatcttccaatcgagaactacggctaaacggtatacttcctcacgggccggggctatactaacactctcaacttctacataccggactacaaacatctccccatcacccaccccgcaaagtcctacatcactctcttcaactacaaccccattcctaacggcggcctttttatagaacacgatgtctgtgcccacaccac

SEQ ID NO: 97996 - DNA, 232 bp, Zea mays
  Clone ID: MRT4577_20883C.1
gccggaccgacccacgcgtactatggttaccgcacaaaccaatgtcataaggcgatagtgggcgaatggatccaagcgtgtactcggaataccaccaaagacggcgaccaaccaacgttcaagtggccgatcaaaactgacacaaggtctgcttccggtgcttacaccggcgaaatcagtcccgaactgtagcccagacatccgactagacctgggaagaacctttgtacat

SEQ ID NO: 97997 - DNA, 181 bp, Zea mays
  Clone ID: MRT4577_20884C.1
ggaaagctggcgcgattggaggctcgcgctccagctgttccggctcgaccgagacagtccgtgaacatgtatgtagtaggacgcggcggaccacgcggacgtgcccatcacggacgagcagtacctcctggcgagcttgtacagcatgggcgcctggaacgtgaacccgtcccgtgccgtg

SEQ ID NO: 97998 - DNA, 2450 bp, Zea mays
  unsure (1)..(2450): unsure at all n locations
  Clone ID: MRT4577_20885C.1
acgccccgctgtttgtgtccaaaagactctcttgcattcttttttttttaatgctctagatataaaaaagcaagcagcctttctcaacgagttcgaaataagacaagtcaaccgacacacaagcaggcctcacacacaggccaaaacaatgctgggtactgggacctacgattggacctgataaaacacagccgaatcggtttagtaggcctcatctccaagcgaacacgcaaatcacacataagttagatgcctagccgacgggtaaaggagaaaccatggtttcaccacaggtgctagatggacgcacacgcacacacttcagagccagcttcttccctgggttagtgttgttgcagattcaggttccgctgctgccctgcccctttgcgtgggatcgatcggcaaacgttctcgtccaccctggcaagcgccagcctcttcgcttctttcttcttctcggcgttcagcctatccttgagcttggctttaagcttccctaggctaagcgctaacaaatccacgggtttcttggtcgcttttagtcccttatcttttagcaccgccatgggttcagtagtgttcttctcactgctgttcttgcaccctgatgacttgttgctggacagggactctgcgacatctatgctggatgcattctccttccggacacaatcatcttgacacacccattcattgtatgtgcgatacttggggcagtcccgtggtctggtatggcctcagtaatcacagctgcttttctctcaacaccttcatcgccagtcactgtgacttcatctggcacttcagtaactatcacttccttctgtccatctgcatgatcaaagacaacatctccatccattgtaactgatgtcttctcctcaatttcaccggccgtccgtgtgacttctggcacatcagtagcaacaacttccttcttttcatcagcatgagcaacatgggttttgaaatgatcatcctcaatgcctccattcattgtatatgtgctccgttgcagcatgagcaacatgggttttgaaatgatcatcctcaatgcctccattcatggtatatgtgctccgttgcttctcctcaacaacttcgtaatctgcctctgtgaggtctggtacttcatcagtagttgacgcttccatctgttcatcggcatgaacatcatcagttttgaaaaaatgatcatcaactccatctctacccactgtaattgcacttccatctgttcatcaggatgaacatactcggtttcagaatcatccttgacaagatctccatccactgtaaccatgatctgttgcttctcatcaactatcagtgatgcggtctccatggtaatttcacaatctctcacttgttctggtaggttgtcagcagcaactgcatgatcagattgaacaaaaatatcttcaatcagcttgagttctggaactttgtcagtagttaccgcttcaatgtgttcattggaattttcacaatctctcacttgttctggtaggttgtcagcagcaactgcatgatcagattgaacnnnnntatcttcaatcagcttgagttctggaactttgtcagtagttaccgcttcaatgtgttcattggaatgagcaccatcagtttcagagtggtcctctacaacatcctcatccattgcatccgtgctctgttgcctctcaccaactatcagtgtcgtgttctcctccacagtaatttcacgatctgtcacttgttccagcaggttgtcagcagtgactacttgatctcatcatgcattccagctgtcccctgctgcatctcatcagttatcagtacttccctttcctcctgaacaactttatctgtcactgtgtcttggggcatgtcaccgatgaccacttcattcggtttatcaacatcctcatccaatgcagcttggttctcaggcatctcacgtgtgacgtttcctgccttctcaattgagcaatcaataagaatggtgtcatccacagagtcatgcagcactttgtcaacatcaccatcctcctcacagccaagaccatcttcagtattgaccacctcggtctcctctccagcaaccaggttgacaatactcgagcaatccagaaaagctgcctcatccacaatgtcagcctgcaactcagcaatatcagtgtgttccatctccttactgacttcttgtgtatcaacctcactgnnnnnctctctgacagttagtacttcattgaactttctcatttcactttcatggctggcatcacttccgttgcctgtcaatggtacctgcagagcccgaacgccggccaccaattctatctcttcaccagcattcttgtccaacagagccgcactggaacctccaccatcctgaaaattgacacctccatcgtcctcagatggctgctcggttaccattgaaacaagaccaatcggacgcgtgg

SEQ ID NO: 97999 - DNA, 175 bp, Zea mays
  Clone ID: MRT4577_20886C.1
acggacgcgtgggcggacgcgtgggcggacgcgtgggctggagcctgatgtttacagtgttctagaacttaaatgcggtatcgtttggatgttcatgtatcgttgagtcggtgtgtcgtgaggtagtttagcctgtgggtgatacgtctgtatttccgcagctctggcgtgagag

SEQ ID NO: 98000 - DNA, 398 bp, Zea mays
  Clone ID: MRT4577_20887C.1
atgggttttttagtattacattttcgagagttttgaaagaagagaagatgaacgttctcctcatcagtcaagcttcagaaagttcttagaagcactttctgtggacgatggaggggccagactcgtcgtattcctccttggagatccacatttgttggaaagtggagagagaggcgaggatggagccaccgatccagacggagtactttctttctgggggagcgatgatcttgatcttcatggtcgagggggcaagagcggtgagttccttttgcatgcggtcagcaatgcctgagaacatggtggttcctccagagagaacgacgtttccgtaaaggtcctttctgatatcaacatcgcacttcatgatggagttgtaggtggtttcgtggattcca

SEQ ID NO: 98001 - DNA, 1501 bp, Zea mays
  Clone ID: MRT4577_20888C.1
tacaatctgacactactttgttactgcacgagatataaaaaagcaagcaggctttctcaaatctcaacgagttcgaaataagacaagtcaaccgacacacaagcaggcctcacacacaggccaaaacaatgctgggtactgggacctacgattggacctgataaaacacagccgaatcggtttagtaggcctcgtctccaagcgaacacgcaaatcacacataagttagatgcctagccgacgggaaaggaggagaaaccatggtttcaccacaggtgcatgatgctactatgctagatggacgcacaggcacacacttcagagccagcttcttccctgggttagtgttgttgcagattcaggttccgctgctgccctgcccctttgcgtgggatcgatcggcaaacgttctcgtccaccctggcaagcgccagcctcttcgcttctttcttcttctcggcgttcagcctatccttgatcttggctttaagcttccctaggctaagcgcaaacaaatccacgggtttcttggtcgcttttactcccttctcttttagctccgccatgggttcagcagtgttattctcactgctgttcttgcaccctgatgacttgttgctggacagggactctgcgacatctatgctggatgcattctccttccggacacaatcatcttgtggtatcgagattatgtcagcagtgattactttcttctgctcattgccatcaccaaaatgggtttccttgacacacccattcattgtatgtgcgatacttggggcagtcccgtgatctggtatggcctcagtaatcacagctgcttttctctcaacaccttcatcgccagtcactgtgacttcatctggcacttcagtaactatcacttccttctgtccatctgcatgatcaaagacaacatctccatccattgtaactgatgtcttctcctcaatttcaccgaccgtccctgtgacttctggcacatcagtagcaacaacttccttcttttcatcagcatgagcaacatgggttttgaaatgatcatcctcaatgcctccattcattgtatatgtgctctgttgcttctcctcaacaacttcgtaatctgcctctgtgagctctggtacttcatcagtagttgacgcttccatctgttcatcggcatgaacatcatcagttttgaaaaaatgatcatcaacgacatctttatccactgtaactgtgctcttttgcttctcctcaacatcttcaacagttatccctgtgtcctctagcacttcttcagcagttaccacttccatctgttcatcaggatgaacattatcggtttcagaaccatccatgacaagatctccatccactgtaaccatgatctgttgcttctcatcaactatcagtgatgtggtctccccccacagtccgccccctcgtccgccccacggtagggtgtcagcagcaactgcatgatcagattgaacaaaaatatcttcaatcagct

SEQ ID NO: 98002 - DNA, 275 bp, Zea mays
  Clone ID: MRT4577_20889C.1
gacccacgcgtacgaagcgacctaccatcatatacctcactttctcatcaccatcaccatcgcataaactaaagtagtttatacagatctccatacatcttaaacatgattctctatctgccccacccactccctccttccctccttcgtccatactccatctttcctcctcacacctaccatcaatatccaatctcgatatctaatactacatcccccaaccgtaccctcaccaactagctagttcctcatccaacttatcttcattacaccta

SEQ ID NO: 98003 - DNA, 524 bp, Zea mays
  Clone ID: MRT4577_2088C.1
cacaccccgccgaatagtgcggctctgccggtgactctgccacttagtcctccactctggcctgcttaatctcaagctccagccatggctaaagacgaaggctcacgtgaacattgagattatcgtccacgttatcgctcacaagtactctaccaccggccaactgatctacaagcttgtatgcattgacaagcgcgtgaacaagaggttgaacaaggaggccgataaagagaacaatcgatccttcaagcatgcctggatgcttgcacaagctgatggctaagcgtaaggaggggtctcaccatggatattgctatggataaggctgagaccaccaaggactatcagcaccgactttgatgcccctgttacaccccgactttctcaagaacatgatcactaacaccttccatgctgcctgcgatgctctcatcactgactccaccactgactgcaccaatgctggtatctacgatgatgtccacacacatgagcatgctctccttgctgctacacttgcagtg

SEQ ID NO: 98004 - DNA, 232 bp, Zea mays
  Clone ID: MRT4577_20890C.1
gggagaaccaaggttctaaggttggttaaagacaatacatgtacccagaataccaggaacgggctgaaacgaagataaggactcccaccggcctacacaaaagtctacaatacactaacagcattacgcttatataatctagacacgcctcaacaggaccacgggtctccctgtagataccacaacctcaccataccttacccaaatccgaactgcatctttatcattaaca

SEQ ID NO: 98005 - DNA, 479 bp, Zea mays
  Clone ID: MRT4577_20891C.1
cgtgacggagcctggccgcgagcggaaactgtagggtacgatgctgggccgatagtgctgattgctgaaaagagaaggcatagcggttacgcttacgctcctgctaacatgcacacctctggggtcaccgtgcaatcatgattggggcttgctgcaggggtagatcatctgggatacgcggcaggtcaagggcggctgatctctataatcccaggctgctgacacctgcatgctacgtagctgggtgagctattagtgtaccaggcaaacagatgattcggcacccgagtctacacttgcacactgtggataaatcacagctagcacctaacttatgcctctggctgacatgcctctaatatcttgtgtcttcataactgagaggccccaacaacatagagattaatgtctggttggcacctgtaaagctgaacgaaaatcgacttgcttggatgatattaagctgcctcttattggac

SEQ ID NO: 98006 - DNA, 795 bp, Zea mays
  Clone ID: MRT4577_20892C.1
ttcggccgggaatgaaccgtgtgagatctgagtcgtccgatcagatatggacgacccgatttaaaaagtctcgatctaatctacactatccaccgcatgatcgacggctccacacccttgtacgagttgatctaccagaaggggatccttcttggcacaatggaaggaccaccagggctatcccaagcgatcccggtttctggagatgcgtactgcaacagctccactacgcacgtggatgctgccggcagcagctcaccggccgtcgcgaagctccggaagctgctgttccgccggatgctcatcggcgtcaacgacggccgctacttccatggcctgttccactgcatcgacaagcagggcaacatcatcctccaggacgccgtcgagtaccgcagcgcccggcattgcttgcctccgacggagcataggtgcctggggctcatcctgatcccggccgcctgccggtcgtcttgccaggttgattgctccgttgaagagaagatgtcgctcatgtgtttggagtgaatggtgcttctaaatatgtgttactatgctttccaagctactcaggaatcatgatagataaacccttttgtataacattcctagatcttgctgggatttaatttgcatcgattctgctatctgagagagaccctgcatgatttttttcttttttgttgtatcagctaacatcttcgaagaaaattggtgctcctattttaaagaattgcttatttgaaaaaaaaaaaaaaaaaagcggccaaaaaaaaaaaggcccctaagggccgg

SEQ ID NO: 98007 - DNA, 310 bp, Zea mays
  Clone ID: MRT4577_20893C.1
tcaaagggcttactagcacagagatactattaagtgagagctgctacaaggatgcttgaggtagcttaatgatagtgaaaatatcttcgaagggacggctaaactttaagtgaaagtatgctgtgaatttttgccttattcacacactgtatgagtttgacaaagatgtgaacgggttaggagatgcacataggaaggatgcaggtaaaatgaaaatggacttactggttgtggatctttgactcacagaaagttgaataagagaatcaggaggccatgactgaaatgtatgggaaggcttgttattact

SEQ ID NO: 98008 - DNA, 1328 bp, Zea mays
  Clone ID: MRT4577_20894C.1
ggaaccggggccgcggcgtccgccgcccggaggtacacgacgcagcagcagcagcagcagctgcagcaccaccagccgcagctcgggaccgtgccccatctcctcgccggcggcgtcgctggcgcagtcagcaagacctgcaccgccccgctcgcacgcctcaccatcctctttcaggtacaaggaatgcactcagatgtggctacaatgcgcaatactagcatatggcgtgaagcatcccgcattgtctatgaagaaggttttcgagctttctggaaagggaaccttgttaccattgctcaccggttgccttactcttcaattagtttctatgcctatgagagatacaagaatttgcttcagatgctaccgggtcttgagaagaatggtggatttggtgcagatgttggtgttagattgctaggtggtggtttatcaggaatcactgcagcttctgtgacgtatccactggacttggtgcggacacgtcttgctgcccagacaaatactgcctactacaggggcatatctcatgctctttatgcgatctgcagagatgagggtgtccgtggattgtacaagggtcttggtgccactttactgggagtgggccccagcattgcagtaagcttctctgtgtatgaaactttacgttcccattggcaaatagagaggccatgtgattcccctgttctgatcagtttggcttgtggaagtctttcaggaattgcatcgtctacttttacattcccattggatcttgtgagacgtcgcatgcaattggaaggagcagccgggagggctcgcgtctaccagacaggactttttggaaccttcggacatattgtccgtacggagggttttagaggcatgtatagaggaatcttgcctgagtactgcaaagtggttcctggtgtcggcatcgtatttatgacatatgagatgcttaaggccatcctcacaggactggaatctgatgattagatatctgcgaggtcatgctacgcaattttgatacatggtgtcagaacaacatttgaggctgattagactgggagaaatatgagcatgtagcatacgttagggtttaggatgtgctaaggtttgcagtttgtgttatatggttacagatgtttatgtagtgcaccgtgaacgatgccacaggtcttccaaaatgaatatttttttggcatcaccatcattttgtgtatcttcaataacattgtaatggtacatgaagctgttgtctttagcctgatgatctttataactgtgagatatggtctccaattttaccagtgttatagcaaggttgatcaatggtggcc

SEQ ID NO: 98009 - DNA, 164 bp, Zea mays
  Clone ID: MRT4577_20895C.1
agaaagcactggaatatatgtcaatggatattcttaagatctgagcacaaaggggggtggatttttcttttcccatctttaaatctaattgcatgtgctccaaacaatatttttgtcatgttctatgcatatacaagggtattgaacacatcgacactattttt

SEQ ID NO: 98010 - DNA, 783 bp, Zea mays
  Clone ID: MRT4577_20896C.1
acgccatcttccctccgccggatccactgtctactttggtcctcatccccatcctcgcacaccatcagtccccgcaaacatcgcgctgacaaggaacatccaccgcgctcgccgccaacaacttctacaccatccgccggaggtgctggagaacatgcaggcgccggtcaaggaccccacgatcctcgtgatcgcgtcgaccgcgtagctgcaggaggctgacgaagtgttgtttggcttcccgacgaggtacggcgccatggctgcgcaaatgaaggccttcttcgactccaccggctcactctgggaggcgcagaagctcgctgggaagcccgccgggttcttcgtcagcaccgaaacgcagggcgaggggcaagagaccacgacccgtcctactctcctagcatgggcgggcaccgggtggactgccgcgttgttccgtagaatacagcggcgtgcgcgggccgaacacgagaaaacatcgcgacccggacggcagaaacgcatcatcagctgttgcttcctgcggataagctccaaaaccctttcttccatccatggtcctctccgccctaatttattgctttccagcgtaccccaccatagtccacgctggcatggcatggcatgcgcgccccgcggtttctccgtttcaaacccgcgccgccgcccgaccggtccacacgccaggctatacgctccccctgtcatccacctcgactcggggggcaccacgcgcacgcggctccagtccacaccatcgaacgacaacgaccccagcag

SEQ ID NO: 98011 - DNA, 561 bp, Zea mays
  Clone ID: MRT4577_20897C.1
ttgggaccctcgaggccggcctggccgggaactttacttattcgaggagcagtccgagtcccatggccgctcccatactcgcgaagttcgagggttcctccaccgcgacttgagggcgatcaacaaagggatgggaggagagaatcggactggtgcttctagctgagcgcacaacgaagaaccctaagctggaggacaaggacctctcttctcagtacacgaaggcgacacgtgtgctgcccagcgatcgttgtgagatgctctgtgtacgatcctgctggcgcctcggctcgcttccgagatccgatgcacaagaagaggtggatatgcacgtctgacgacatcacggtcctgattctgggcgactaccaccaatactacagtcggacgtcattcctccactacttggacgacgatgcccggcatgctctaggactacaatgacatccctcgactgcgttcgggcctcgacgagggagtctgttatgcactgaggaagcccctgcgcacgatagactatctaccgtatgaccatgattgacatcgactggatctgatgat

SEQ ID NO: 98012 - DNA, 1146 bp, Zea mays
  Clone ID: MRT4577_20898C.1
cgcccgttcgtcttgtctagcgaccagcgcgcccaggccgcccggccatggagaagaagctgctgctgccgctggcggtggcgcacaagcacgcgcacggaggcggcggggagcggccgtgggcgcggccgtggcggtgggccaagaccgccttcttcgtcgcggcgatgctggcatcgctcctgctcgtctgcgcgccgccgctgctcgtcgtgctcctcgacctcgcgctcccgccggcgctcctcctccgcggcggggatggcggcggcggctcgctcgcgctggcggtcgtggcccaggcgcgggcgttcgacttccgctcctcgctcgtcgacctgcccgccgtctccgcggcgcgcgcgctgctcatcctctgcgcgtacgtggcgtgcggcggaggcggcgcgtacctaggggtggtggtggcgtgcgcggcggcgtccgtgtgctacgtgctcgccaaggccgcggccgtgctgccgcgccgcgccgcgggtggcgctcgcgccgtggccgctgccggcggccccgaggccatgctccttctctccctggcgctcgccgccgcgcacctcgccgtagcgtaccggaccagctgccgcgagcgccgccgaatgctcgtgtacaggatcgacgttgaaggcgccgtgaggttaaaaggaggccatcaaacacccaaagggcccaagcagtagtgtagcgtctgacactccgttcccatcatcacacacgtgcgtaggcgcccgaaagattgatttccttttaggagcaaattttggttgagttgtacgctaagatacatttgttactcgtgtaaattactgtcactgccacaagtgaacatactgtaagtacgaaacggtcgtatgctagctcattatcagcattttattgccccggcctccttgcagctgcgacgcagacgcagacgcaggacgagccgtgttggacgcccggtcggcctcctgcagttttttttttttttttttgcgtgtataagtacaatcgcagctgcagtttacatgtgtccttctggaaaaaccagacttggacgtgtgtccgaagatactagtcagtagctgcacataataaaacgatgcaggctgtaccgactccggccggttcagagaaacttcttttttt

SEQ ID NO: 98013 - DNA, 574 bp, Zea mays
  Clone ID: MRT4577_20899C.1
aaaagagggggggggagacaaaattttcaaaggaaaaaaatttccaatttggaatggaataaagtgttggaaaaaaaaaattccctgctaagtgaaaagcctattttaaaaaaaaaaaggggggggggggtattcttataagggggggcccacccccccggaacttaacccccaacggaaaaaacttattttttggggggggattaccccagggggggggggtaacaccccctggggggggggggctcctccgatccgggcccgggaccgggtcaaacaatccccgggtggggggaatttcttctctggggttgggataaatgcggggcttgccccccacggggggggtttacttacccgccccaaattaaatggcccccgaccgggggaaaccaacccccggtgggggggggcccccccaccccgggccgggggggcgttaacttttaaacctgggggtgttggccccccaaaaaagggaagggggcaccccaaggcccgaacccaagggccccgggggggggaatccaattgttgtgggccccccccccgcgggggggagcccggggggggg

SEQ ID NO: 98014 - DNA, 313 bp, Zea mays
  Clone ID: MRT4577_2089C.1
gaagggccgggccgagcgacccgtgcacgggaaccgcacaatacgcaaaacaaattatcttgtgataaaacgcacggcgcgggacacaaggatagttcatatctaagaacccacaagcactgtgtatggaatgccagtaatttcacagtgctagggctgcttctagacttacttgatacctaacattttaccatgaaataccatgcaagcctccccttatgagagtaagatacttaatttatagatattaccgccaataagaactatataacctcttttctataaagctatgtcatcaaggaaactgaacctc

SEQ ID NO: 98015 - DNA, 644 bp, Zea mays
  Clone ID: MRT4577_208C.1
accgagacgaaggcgtcttcgtactcgcctatctccgcgacccacagcgctcccccttctcccattcttctctcatttctcaccaccgccgccgctaccccctttcgacaacaccatgaggcagcgcatctcgatccacatcggccaggccggcatccaggtcggaaacgcgagctgggagctgaactgcctcgagcatggcattcaggctgatggtcagatgcccgccgacaacaccattgcgggaggtgatgatgctttccacaccttcttcagtgagactggtgctgggaagcacgtcccccgagctgtttttgttgaccttgagcccactgtcatccatgacgtgaggactggcacctatcgccagctcttccatcctgagcagctcatccgtggcaaggaggatgcagccaacaacttcgctcgtggtcactacaccattggcaaggagattgttgacctgctgccttgaccgcatcaggaagctcgcagagaattgcactggtctccagggcttcctcgtcttcaccgctgttgacggaggaacggcctcagggcttggcactctcctccagaagcgcctgactgctgactacgggcaaaaactctaagctcgggtttcgccgggtacccatcccccc

SEQ ID NO: 98016 - DNA, 676 bp, Zea mays
  unsure (1)..(676): unsure at all n locations
  Clone ID: MRT4577_20900C.1
gggagcatcaagtcctttcatttgaaattgactcgtacgagggaaaaagcgatatggacgattttccattgagactagttttttaaaagaaatctgatcctccggccaagccgaagttctggaacatatggatcaatcaagtggtaagccgcccggaagaaacctttcccttgcctcccttaccgaaatcaaatcagggcgaccaatcaagctaggaagaaggataccgaccttctccattgatcatatagaaatgaataacgaactggctagatgagaaccggctgaaaagcaaagagactatttcaaccaagcaaccatgggaacacagacccgcacccacgataagaactcttttcggaggaagcttcacctttatatgtatgccatccatttctgagtgaggcaggctattatcgttctccgcaaggaatcaaccttcgagaaaaaaagggagtccatctttaaaatcttatgctgccccaaaatgatggaaccagccactaaaggcaagctacatctcttctaaaagaggaattaggaacgggaagtaggactcatttcacaatgcaaaacacataaatgagagcactttgcttaaagctgaacctacgaatctgtacttgcgctttttcacttgctcccctagnaagaagttagagctgacatttattca

SEQ ID NO: 98017 - DNA, 597 bp, Zea mays
  Clone ID: MRT4577_20901C.1
cgcatcagcgccctcgtccgcgaggagctcgagcggctaggggttaccgcccaaaccgttgccggcaccggcgtcgtcgccgatgtcggcttgggcatgcccccaatcgtcgccctccgcgccgacatggacgcactacccatccaggaattggtggagtgggagcataagagcagagttgatggtgtaatgcacgcctgtggtcatgatgtgcacacagcgatgctactgggagcggcaaagttgcttcatgagcgcaaggatcagcttaagggaacggtgagactcctttttcaacctgctgaggagggtggtgctggtgcatctcatatgataaaagaaggtgttcttgatggtgttgaagctatatttgcaatgcatatcgattatcggatgccaacaggggtaatagctgctcacgcaggaccaacacaagcagctgtatgtttctatgtagtgaaaatagaaggtaaaaccgggaaggctgaaaccccacacttaaatgtggatcctatcgttgctgcagcatttaccgtcctgtccctgcaacagctcacttcaagagaagatgatcctcttcacagccaagtgctctct

SEQ ID NO: 98018 - DNA, 401 bp, Zea mays
  Clone ID: MRT4577_20902C.1
ctgacctgcgctgcgcccatccatccttaaaccctactgcgcgcgaaaggctagttttgatgttacgcagcacagcctatcctactccttcaccaggtgcgtcttcgatctcactacttcgtctatcaagacgagaataactggccgcgctagcacgccggatcacgtaaacaagaagagcggccacccagcgcgcggatacggcctaccacgactgaataactgggcgggctcaacgcagcacgacgcgagaaaaaccgatcctcacgagcgctctggccttgatgcgagcgacccatacagacaaagcttcaccgcatgggccaaagcgctcgctgtatcactggacgctcaagcaggggctccctcccgcgactggaggctcatggaccaaaaggata

SEQ ID NO: 98019 - DNA, 280 bp, Zea mays
  Clone ID: MRT4577_20903C.1
ctcagaagatgaggaagaggaagaaagtgatgaagacaaaccagatgagacaggctttattacccctgcagacagtggccttatcactcctggaggcttttcatcagtgcctgctggaatggagacccctgaactcattgagctgaggaagaagaagattgaggaggcgatggacggaagtgagacacctcagctcttcactgtgttgccagagaagagaacagccactgttggaggggccatgatgggatcaacccacatttatgacatgtccacggtt

SEQ ID NO: 98020 - DNA, 556 bp, Zea mays
  Clone ID: MRT4577_20904C.1
atgttaggacggcagttcccacacatcttccccaacctcgtacgagccggctgcgagatccacgacctccgcacggcagttccattagagatgcctctagggaagagatccacacgactatcctagaaatccgaaggtaattttgtttaactgttcatctttgttcgtcactcactggatctaggcttgaaaggtagcacgcaatcttgctgggccaatcctcaatccttgacacccccgccacacctccagaggccgcaagccatagccgacgaccgcccactgcaccgccggttcggtagccatcgcgccttgtccgcttctccatgcctcacctcctcctcttctctgttgcctgccttgtcctcaccatcacggcgccgcgcgtatgactcgcgagcgcctggcgcttgcttctctcaatcgcttccgatcctggagctggcggctggccacccacctggtgcgcccgtgcgagcttttactgctccctccccttacggcctcataggaaccctcgttatggttgtgtcctgatgctgctcaggcttgccga

SEQ ID NO: 98021 - DNA, 333 bp, Zea mays
  Clone ID: MRT4577_20905C.1
ggtatctgacagaaaaattactctttacaagcggggatttttttttaaaaaaaaagataatggaaacgaggttgcagcctagaagtggggaagtgattcccgcgcgtcccatgaatgaattgatgtctgaaatacttaactgaagatccgttgtcttgaaattgagccaaactatttgtttcatttgaatgtacaagtcataattgatgtcattgagatttatgcctttgcttcaaaaggaacctacaatatttttcgcagctgcatcttttcttgtctgccaacctgatctctttgtggttcggtacaagtttaggacaaagtaatctgatg

SEQ ID NO: 98022 - DNA, 458 bp, Zea mays
  unsure (1)..(458): unsure at all n locations
  Clone ID: MRT4577_20906C.1
tctacaccgtgtgccggcaggagggtccgatctccagtggcgtggtgggggcaccgaacgatgggcgccatcgtcctgtccgagttcgtcgggtgcgcgacgtccctgggcggcgcggttcacatcaacccgtggaacgtggacgccgttgctgaggggatgcacatggcgctgaggtttaatgggcgcgagaagcaggtgcggcaagagaagcactacaggtttgtttccacgcacgacattgcctactgggggcgatcgctcgaccaggacctgcagagggcgagcaaggatcacgcgtccatgaagtttatgagcgttgggctcgccatgagctaccacatcgtcgtgcttggtcccaacttccagaagctctcacctgagcacatcaatccatcgtancagcgggcaagcaaaaggctcatcttactggactatgatgaaaacagtaatgtcca

SEQ ID NO: 98023 - DNA, 848 bp, Zea mays
  Clone ID: MRT4577_20907C.1
aattcatttccatccccatctgaagaactactagtccccttcctcggttcctcctcctgtccccctctcccatggcccaatcctgggccttcttcctcctcgtcgtcctctgcttctgctgtgtgtccgacctcatctgcggcagcaatggggagcgagtcttcctctacccgcagtcccagaaggtctcgtccatcgtcagccagaggtaccggaccgcctaccacttccagccccccaagaactggatcaacgatccaaacgggccaatgtactacaatggcatataccatgagttctaccagtacaaccccaatggctccgtctggggtaacatagtttggggccactcagtttctacagacctcatcaactggattccacttgaaaccgcaatagcgcgggacaccccgagcgacataaacggttgctggaccggctcagccacaatcctccccggtaaccgactggtcatcatatacaccggtgccgacccggaaaagcgtcaggtccaaaacattgtggttccgaaaaacatgtctgacccgtacctgagggaatggaccaaagccggcaataacccggtgatccagccggtcggtccaggcttgaactcgggccagttcagggatccgacaaccggttgggttggacctgatggactgtggaggatagcagttggtgctgagctcaacggcgacagtgctgcacttttgtacaagagcaaagactttctgaactggactagagttgaccacccactgtattcatccaattcctcctctatgtgggagtgcccgaatttcttcgcggtattgcagggcatagcggtggactggactggtctg

SEQ ID NO: 98024 - DNA, 749 bp, Zea mays
  unsure (1)..(749): unsure at all n locations
  Clone ID: MRT4577_20908C.1
gtacgcctgcaggtttcggtccggaattcccgggtcgacccacgcgtccggaggatcacttgtgggagttagttctctgcccaccttgtggtatcccagggatcaaactcagggtatcttacttggctgaaaatgcctttacccattgagctaaattgctggccctgccctgcctgattccagaatgttagggactcacgacaccaccgtgaggccctgagctctgactcttggtcagaaggttctggaagaggggtctttgagccctgcaacctgttttgggtccattcctcctgagggtgcctcatagtaggggtgacacttcttaggatccctgaaagtggcaggtacagagctggccaccgcacactgagcctctggagtcttctagtacaggatcttgtgcatgctaagccgtggacagaaccatgagtttcttgagcaacagctcagggattggggacctcagagcctgtagaggtcgcacccctcactgtcatctgcagtcccaggtccctgtgggccggaggagctcatggatggtgtcatcttcggggcgaaatacctgggctccacccagctgctgtcagagcgcagcccggcgcccagcacacgcatggnngcaggcgcaggaggccatggaccgcgtcaaggtgagccaggggtggagttcctgggctggtggattccatgtcccaaccacctctaacttctgtgtccccttcctaccctgcaggcccctgaaggcg

SEQ ID NO: 98025 - DNA, 161 bp, Zea mays
  Clone ID: MRT4577_20909C.1
ccctcgagccgggccgggcatcatattcccacctcgcgaacgaggacgaactgctaccccctcgcctcgccctcgccggctcctctccagttctccccgagcaaccgtataagccagagcgacactgagaatggccggggcgttgtcgtacctcttgtccg

SEQ ID NO: 98026 - DNA, 2295 bp, Zea mays
  Clone ID: MRT4577_2090C.1
gtttatgcatccgggggatctagctggataatcgacagcggatgcacaaaccacaagacgggggagaagaagatgttcacctcctacgtcaagaacaaagattcccaggatacgattatttttggagatgggaaccaaggcaaggtcaaaggtttgggaaagatagccatcacaagcgagcactctatttcaaatgtatttttagtagagtcattagggtacaacctcctgtctgtaaatcaattgtgccacatgggctacaattgtttgtttacaaatgttgatgtatctgtctttaggagtgatggttcattagcgtttaagggtgtactagacgacccattgcctaacttagcatcgagggaagataaatcagaaacccaagggaccctaaagcgctttctaaggagggctcaaaacaaatttgagctcaaggtgaaaaagataagaagcgacaacgggtccgagttcaagaatatgcaagtggaggagtatcttgaggaagaaggcgtcaagcacgagttctccgctccctacacaccacagcaaaatggtgtggtagagaggaagaacaggacgcttaatgacatggcgaggacgatgcttggagagttcaagacgcccgagcggttttggtcggaagctgtgaacacagcctgccacgccataaaccagctatatctacatcgcctcctcaagaagacctcctacgaacttcttaccggtaacaaacccaatgtctcttactttcgtgtatttgggagcgaatgctacattttgatgaataaaggtagacattctaaatttgctcccaaagatgtagaagggtttttactagggtatgactcaaatacaaaggcgtatagagtcttcaacaaatcatcgggtttggttgaagtctctagcgacgttgtatttgatgagactaatggctctccaagagagcaagttgatcttgatgacatagatgaagatgatgttccaacggccgcaatgcgcacgatggcgataggtgatgtgcgacctcaggaacaacaagagcaagatcagacatcttcctctacaatggtgtatcccccaactcaagatgatggacaggttcatcaagaagaggcgcgtgatcaagggggagcacaagaagaacaagttatggaggaagaggcaccacaggaccctccaactcaagtccgagcgacgatccaaagaaatcaccctgtcgatcagattctgggtgacataagcaagggagtaacaactcgctcacgtttagctaatttttgtgagcattactcgtttgtctcttctattgagcctttcagggtagaagaggccttgcaggatccggactgggtgttgtccatgcaggaagagctcaacaacttcaagaggaatgaagtttggagcctggtgccacgtccaaagcaaaatgttgtgggaaccaagtgggtgttccgcaacaagcaagacgagcacggagtggtaccccgaccatgtgttaagctctctaaggcgctctatggacttaagcaagctccaagagcatggtatgaatgccttagagatttcttaattgctaatgctttcaaggttgggaaagccgatcccactcttttcactaagacttgtgatggtgatctttttgtgtgccaaatttatgtcgatgacataagatttggttctactaaccaaaagtcttgtgaggagtttagcagggtgatgactcaaaagtttgagatgtcgatgatgggcgagttgaactacttccttgggttccaagtgaagcaactcaaggatggcactttcctctcccaaacaaagtacactcaagaacttctcaagaggtttgggatgaaggacgccaagcccgcgaagacacctatggaaaccgacggacatgtcgacctcaacaaaggaggtaagtccgttgatcaaaaggcataccgatctatgatagggtcattgctttatttatgtgctagtagaccggacattatgttaagtgtatgcatgtgtgctagatatcaatctgaccccaaggaatgtcaccttgtggccgttaagcggattcttagatatttagtttctacgccttgcttcgggatctggtatccaaaggggtctacctttgacttgattggatattcagactccgattatgctggatgcaaggttgatagaaagagtacatcagggatgtgccaattcctaggaaggtccccggtgtcttggagttcaaagaaacaaacctccgttgccttatccacagctgaggccgagtatgttgccgcaggatag

SEQ ID NO: 98027 - DNA, 154 bp, Zea mays
  unsure (1)..(154): unsure at all n locations
  Clone ID: MRT4577_20910C.1
gttngttgnnntatttatgtacgggggcattccaaaagatggcaggatccgttaaacccttccaaatgaatgaaagacgggtcagtttacgaattatttgtacagtatgtttgaaactgaaacgaacaatgttaacttaaccaccgtccaccag

SEQ ID NO: 98028 - DNA, 345 bp, Zea mays
  Clone ID: MRT4577_20911C.1
tctctatgcagcgtagtaggtcggaatcggttgaggggtcctttgtgagtgtctcagtctagaggtacatccctccctggggggtctcagctcctggagtcgcgggccttggggcacctctgtgagatctcaatgctgtctggggaccctaagagttttctcacctgttcagtctcatctaaccttccaatgtctgatgttcctgccaaattcctgcctgattctgggtccgtcctgacctccaaaggtcagcttggtgcttgaggtctccctgctcttggtggcagtggtagcagcaacagcagcagcagcagcagcagcagcagcagagacctctccactttc

SEQ ID NO: 98029 - DNA, 252 bp, Zea mays
  Clone ID: MRT4577_20912C.1
atataacatttttttatgctttgcatcttattaatcctggcaaccatacataacatagtaccctgtcagtctggctcaatgcatacggacataccattcataccatctcatatgcttgtaccaaatcaactttgtctggcttcacagtgcctgaaatctaaggcgtccaggcatcactagccgtttatgtcgaagctttatgacaaccattactccaacagccgtcacgaatatttcaacccttaccttttg

SEQ ID NO: 98030 - DNA, 303 bp, Zea mays
  unsure (1)..(303): unsure at all n locations
  Clone ID: MRT4577_20913C.1
ccggccggaanccggggcgcccagcgccgaaagncaaanggacacagagaagaagaacacaggaacgagcnncgcccgggaccgagacccgggcgagcaangaggcnaaacacgggacgggggacggcaagcccgggagggcgaggagggancnaaagcaangccaancgggggagaaccagcgagccagcagcagcagccacgcanncacgccaacaaggcaagggaagggaagnccgaacgggcagaggggaccaggaaaccgaaaaaaaaaaaaagaaaaaaaaaaaaggaaaaaaacaa

SEQ ID NO: 98031 - DNA, 802 bp, Zea mays
  unsure (1)..(802): unsure at all n locations
  Clone ID: MRT4577_20914C.1
agttccactccttttccttcttctcgatcgcgaagagaaaccaaaaagcttcaactgtcatctacccactctccacaaagcatcgccggtcttggaatttttatctcacgagcagcagccatggccgccgcgccggaggccgagggtctcttcggtgaccccgagcccttctccccgtccatcttcctcgacctgcccccgacgccccgccccgatggcaacgacgaagtcccggcctcgtcggacgacctcgtcctccccttcatcacgcggatcctcatggaggaggacatcaacgaccaattcttctaccagttccccgaccaccccgtgctcctccgagcccaggaaccgtacgcgcagatcctctctgagccagctacagctcgcgccgcctcggggtcccccggcaccgtgtcgccggacttcggcgaggaccctgtccagcccctcctgtccccgccgtaccccgatacgggactgcgtgacatcaacgacgacggtgtcggcgccagcccggggttcgagcagagtgatccggggaaattgaggaccgcagccttgggattgcccaccggtgacggtgaccgcgcggcgctggccccggtattcttcaacagcggagacgcggacgcggagatgctcaacaaggcattcctcaagggtatggaggaggccaagaagttcttgcccaccaccagcagcagccttctaatctacccacctgnggcagagnnnaggagtggcattaatggcaggggccgcaaggacagggacgggctcggttgggatgacttggagc

SEQ ID NO: 98032 - DNA, 406 bp, Zea mays
  Clone ID: MRT4577_20915C.1
gccacgcgtgctcactcactcagtcctttttgaatccgcggtctctcaagcaagcgctggagggctctcacaagcgaggaccaagaagatcgtaattctctacctgaaggtgtgctcaacttctcgatctggtactaattcactacaacgtactgtgcttacccaatatctgatttaatcatcatatatcttctctcgttcctggatgacatcgacactgattcctgtttatcatgatcgagcagcagtacgtacgcgcagcgtatgctcatcttattgcgccatgcatgatcatcatcatcatacatcaacaattgcacacacttcgtttgctgcacatgcgatcgccgtgcttcctatcgtatactgcctgattctggctgacaccaatcacaagcagatggga

SEQ ID NO: 98033 - DNA, 734 bp, Zea mays
  Clone ID: MRT4577_20916C.1
ggtaaatgatctttgttaagtgctatttgtcagtcattcggtaaagacttaatcaagtatcgacccgacactcggtaaataaacgacgtcgttctgtatttactagtacttttatttttagataatgaataaatgaatgaaatgacgagttatacatcagatagttggcatgcagtctctcttcgttggcaaccaattaagctaggcttgcagctggatttccactcgagagcagagatgaaggcaaagcatggactcagtcactcagctgatgagctcctgtatggcctgcatggtggcgggcgagaagaggaagctgccgggggagagaaggaaaccagcagcaccgcctggcgaaggcagcggcggcggcggcggaacatgctggtggtgcccgagcgtgagcaccaggaggtcaccagcagccgtctgctgcgacgacgctggcggccgaggcacggcctcctgaccgccgcggcggccggtcaggctctgcacgagggccttgaactcgtcggcgcgcgcgtggatgaccttgggcgtgtgctcgtacaggatcactggccctggcgccgcggccgacgactgcggtgccctgctgacgtcgccgccgccgccgctgacgacgcggcggggtctcttggccggccggggcgtggaagacgacgacgacgacgtggtgccactgcccggaggcaggatcagcggcagcggcctcggcccctgcaagctga

SEQ ID NO: 98034 - DNA, 426 bp, Zea mays
  Clone ID: MRT4577_20917C.1
aaagggggggggggggcctttaaacccggctaaaaactttggccccgaccccccttttgggcccccctaaatggggataaaaagaattttgcctttttttccccggggggggcaaaggtaaaaaaacagaaacaattccgggggacttccatggggaaaattttggtaagggggcccaataaacccctggcccccggtttttttacaaaaaaaatttttttttaaacccctaaaaaaaactttttttttgaaccgggggaggccccggggggattgaagggaccaagttggggggcaaaaaaaaatggggggcggccattgggggaccctggggggttgggggcccatccttaaaaatttttgggaaccaaaacattaaaaaggtttgggccaaggacccttttgggccccatgccgggggggggg

SEQ ID NO: 98035 - DNA, 315 bp, Zea mays
  Clone ID: MRT4577_20918C.1
gagctctttagtcggcggccgccctccttttttttttttttttttttagctgttaacgactggccgggccgctgtggactcccggacaatgcagcaaaagtgtcacatggcagtttatgacaatggactgtaacaagtatgtggttgaccaaccactcaaaacgaacaaacaaaaacttactgctgggtatatggttcagcatgggcacacaatagctgatccataattccacgttcatcacttacacaccaagcatagttctgagtgctatatatagaacattaattgctaactgggacaatccatgataatcc

SEQ ID NO: 98036 - DNA, 475 bp, Zea mays
  unsure (1)..(475): unsure at all n locations
  Clone ID: MRT4577_20919C.1
agtctagggactaaagtttatttaggggactaaagtttagtccctaacatgtttggttctaggggctaaaaatagtaaaaatatactaaatggctcataagaagactaaaatggcctttaatattcttctgctattagtacaattgaactaaataaggggtagctatgacgcaattgccgtaccctgtagctgtagctccgctccgcctatagtcggggtagcaagacgtcacggctgattcgatcaagagaaccgcccatgaagcgacgggcgcgcagctggtggtgcctactcgcgttccctcttttttttcctgtcgacagaagaggccggcgaagcactcttttttttcctgtcgagagaagaggccggcgaagcatctgtccagactccagagcactngcgcgtcgcatcacgggtcgttacgcattgaatgtttcgtcaaacaaagggatatccgatcgaacgatgtaa

SEQ ID NO: 98037 - DNA, 306 bp, Zea mays
  Clone ID: MRT4577_2091C.1
acgaaaaagctgtgacattgtcatgagggggcatgacacgcctgttgtatgggtccttgcaagccagacttattgatagagcacccttctccaacatagtagagcccggacgaaaactaggatcagtcaaaaacctattgttaataagagccaaaggtgaaaaaaactcaggggcaaaacgtacctaaagtaacaaaggagcggaatctggacgccccgcttggggtaccaatggaggtctggacccccaggaatcttaaagactggcagcttttctttataagggaaccaaggaaggtgacccta

SEQ ID NO: 98038 - DNA, 216 bp, Zea mays
  Clone ID: MRT4577_20920C.1
cccacgcgtgcgctaaatacaaacagcatttaaatatacatgtccaaagtattaacactaggggcgggctttaagcacaactgcaactaggattgatcactcatcatcataagtaaggtgtaatgaatgagacgaagttattggtttaccaaccaagatgtaatgatgttgctgtgaaatcaattggcttagattcgactgatgatttcgaagata

SEQ ID NO: 98039 - DNA, 452 bp, Zea mays
  Clone ID: MRT4577_20921C.1
atgcgttcgctagcagcatagacagcacaatactgtaccaacaatgacagccaaaatattgagcttcctgatgcgcctcggactatccgcaagtgatgctaccgcaaccattctcccacaatgctcacaagctactataacttcccttatttccccatacctcttaccaaccgagtcttcaatgtgtgaaaacccaattgttcaaccctacaggatccaacaggcaatcgcaacatgcatcttaccattatcacccttggtccttcaacaaccgttagccctattaaagccggtacctttggaccaattggtggcaccaaacaatctggcccaacaactaccaccacttgtgctatcaaaccttggtgcataccctcatccacaataaggtctttcatttgacccactggctgtaatgaactctgctgattatttgcaacaaccattaccct

SEQ ID NO: 98040 - DNA, 340 bp, Zea mays
  Clone ID: MRT4577_20922C.1
ggcgcggctaggcgccgaggacctctggtgcatcaagcggctcgcggacggctacggcgccggcccgctcggcgactggaccaaggcgccggccagacgctccatattcatcgacccgagggagttttaggctgataagtagtaaatacacttaggcctagctttagggtttttttttggttctccccgggtcgtcgtccgttggatcccgtatccgacggctcctagtagctagctctagagaaggtcccacccttttgggtttcgtttcaaaacatgtggtaacgcgcgcttgcttaggcgtaatttctgctagagaaccggaataggtaaccttttc

SEQ ID NO: 98041 - DNA, 1097 bp, Zea mays
  Clone ID: MRT4577_20923C.1
cttgctctgtgaaattgatagtttgaagacacagcaacttctcgataggccttgcagtggcatcaatggcttagtttcatcctttgtttcacggctaagggaagagaactcttctcgagagcataccattttaagaactgctcaaaagcttaagtcattctcgtttaacaagttctcagcaaacggctaccatgatttcctgccatcgcggcttcgtcccaagtttcagaacattgatgccaacgagtgtactttctctgagattctttgcctaatatgtggaagcccgttcagtgaatcagagctcctgaatttggaaaacacaaagctcaaggctcagaagaaaattgatctttatactgcccattgttgtcaaagttgccatttccagattctcccagcagctacagatatgtatggacatttcttttcgctactaccgaagttttggactgagaaagtggacgctgcatctgccagccatagctcactaagagatcagatagcggactacctgctggatgaagatgatggaaactgactttattctctggtttcgtgacataatttcatggagtcaaatgtttaactcacatggaattcccgaatgcctgtctgtactgacatgttttgtttgttgtactataagacatcgcattctaattgggcctcacacaggcatatgccaaacttatggataacagtgtttcttctttttttgtttctgacaaaaccagtatcactagcatgacactgctactggtattcttcaactcatctgggatctgtatagtggtgaggcaaaccatcactagccagcaagtttccactgattttacagagacagcacgggttggagagctgaacgtttcccacttaaaatgtgatttcatatgaactggtctcatctcctgtgctgtgcgagctattctgccagcaaacattgtaacaagatgaatttatccggtggtttggacaattcgttttctctacaaattctgtacgaactgtggttacactcagttaccctgttgtattcgactcgaagatctttggggatgttgtgcaaacaaacgctgcatctttcaacctgttcg

SEQ ID NO: 98042 - DNA, 321 bp, Zea mays
  Clone ID: MRT4577_20924C.1
caatgctaactgcaccttaaactgttttgctccccttgctaaagacaggcacaacgtccatttcataatggatccctcgatcacaactgttcatgccatcactgccacccaaaagactgttgatagaccctcaaccaaagactggacaagtggcacctctgtcagctttaacatcatacccagcatcacccttactgccaacgctttcattaaagatcttcctcaaatgaatgccaaactcactggcatgttcttccggaatcccaccccagatgtatcaactgtatacctcactgccagaatctagaaactgtccttcta

SEQ ID NO: 98043 - DNA, 517 bp, Zea mays
  unsure (1)..(517): unsure at all n locations
  Clone ID: MRT4577_20925C.1
ccggccgggatgtgtattaaaatattgggtatacaaataccttccaagattatcacccagtgtgggaaacgttttggatgaaataaagcgccattagagaactttttttagtttccttattgggaaattgcttgagaatttgtcgccttccaggtagtcaatggcttggcatataaagttttaaaatctgaacgatgtcttcgtctgaaaggccttgcctagaatgtctgtctggtgatcaatcagtctcaggctgttcgagaagactgggaatttggagaagtaacctaggtagtccttattctgaaagaaaggttccatgactcggaatcaacgtcaggcaaaaatctcttctctcttatttacatggtgttatatacttgtaaaataagaaatcgaatgattttgtgcgaaatgagacagccgtgctgacggaaatctgttctgccccnnnnnnnnnnnnnnnnnnnnnnnnnnnnnnnnnnnnnnnnnnnnnnnnnnnnnnnnnnnnnnnnnn

SEQ ID NO: 98044 - DNA, 970 bp, Zea mays
  Clone ID: MRT4577_20926C.1
atggcggagcgctggaagagcgtctcctccgtgccgaaggccgagaacgcgcggccgacgggacgatggccggcggcgaagcccaaggcgtcggacctgctcgcccatagccttgactgcagcctcgaccgcaaggactccatcctcgccgccatccacctcctccgccgctctatggccttcgactccacgacatctctctcgtcgtccgacccagccgctccagacctctacgcgtcctctgacaccgacatcgtctcctctggtagcaactcggtagccagtgatccgccgcgtcagggcatcagcgtgccggcgaggttctggcagaaaaccaatagccgcatgctacatgcaagctcaagaattgcaataagcggtaggtctgattttggaagcaggagtcgttgcatcacattggatgcacctggctcatcgtcattactcttcacctggcacagtggcacctaacacttgtgcattatgttgagtcttcaagaagaacgtcatcagcaccgaggtggatgtcctgcaagtgcagtgcaacatggcgctctggactattcaagattcaagtcaaattaggctaagatgtttacaatgccgagacgattggaagctgaaatttgtgaatctatggtccataacttctatagttgtttacaagcacaaaagagcaaataatttattgttcccttatgccatatcacactttgatgtttccatgtcacagggggagttctgcttacttcaaaagaacactgacaagctagatttaagacgacgagttcacatggctatagacattatgagtactgtttatctttctataaagttctttgaaattgcaggccaaatcaatgattgatattgttttttgtaattaacaatgattagcagagaattggataaacattctgtgttgtcaagaagcataatgaataaaacagagaagcattaccgtgtcatc

SEQ ID NO: 98045 - DNA, 180 bp, Zea mays
  Clone ID: MRT4577_20927C.1
aatataattgggggtcacaaaacaaacatctaccatcccaacctgtttactatataataccttttaccgagaatctaacttgagtcacaaccacattttaattcctaacacaaaaatttaaaaatccacatatgataccttttttcaaactttttctgccctaaataatttctcacccca

SEQ ID NO: 98046 - DNA, 1123 bp, Zea mays
  Clone ID: MRT4577_20928C.1
gcaatgcgtaccctgcccccatcctcgggcctcgacgccccctccccttcaccacctcgtcctcggcgcaggcacgcagccccacctcgctgcctcttggtgtctctccagccgtcggcgtacctgcagtccagccgcctccaaccgcagtggcgcagacgccccaccccgtcgcggaggaagaacaagaagggcatcatcggcaaccccagggcgctctggtggttgaggaccgcctgtgagagggccaaaagaacactctcctccaccgcccagaccaccgccgcacacgcaggcgtgtcttcggtgccgccgccaagaatcagatcgccatgaatcccatcaacactgtcttcggtgttgcatattggtgacacagatcaaaagctgcagagatgatacgtctgaaattgatgtcaaacctgatggttccaggagagttaaggatagagctgaactaaagaaccttacacagtggcatctaccagatggtactctctcagtgtccagtagtgttcaccatttcgctcgagaaacaccggtttcagagtaacaattaacgacgatgacgacgacgatgactccgatgatggtgttctccttgcgccgatgttgtaaggggtacagattctgaagagatcagcagcgatgatggtgatgaaggtggagcaatgatagtgatgaagatggtggtgacgatgacatacctagatcggatggcattgaagatgacccatagttcattgatgatggtggcagctttgaagagggtggggcttgatggatatttttggtaacgatgaaggggagggcgatgagagttatacggtggaatcctctagcattggcgacgaggtagttggaccttgtaggtttgttggcggttccctgttgtagaacatagagcatgaccctatatagttcaatgtttatatactcacatcacattatgactggaattattttcctgtgttctctaggagggtagcacaactcatgcttgctagggaatgtggaacataatgaagtgttgaggtgttagatgatgtaagttaaggggttgggtaaagcttgtgcgttctttttgtcgaagaaagatcagatatatatcgattgatgggtt

SEQ ID NO: 98047 - DNA, 290 bp, Zea mays
  Clone ID: MRT4577_20929C.1
gacttaacagtggatgctcgccaagcgagtgtcatctagaaaacactatctagtgttgaattccaggtactacttggatgatttgattgctggtgtgacttggccttcatccctgccaccgggatacatggttgagaggggtactgcttccgcaggagaggaccaggaggagtagcgtggctaggcttcgccatgttactcaattttctccgttagttatttccgctgcattaaaaactatggttactgcttttgaaactccgataatgtaatcacttttgatacttctt

SEQ ID NO: 98048 - DNA, 2370 bp, Zea mays
  Clone ID: MRT4577_2092C.1
atgacgggggagaagaagatgttcacctcctacgtcaagaacaaagattcccaggattcaatcatgtttggggatgagaaccaaggcaaggttaaaggattggggaagatagccatttcatctgagcactctatttcaaatgtattcttagtagagtctttaagatataatctcctatctgtaagtcaattgagccacatgggctacaattgtttgtttacaaatgttgatgtttctgtctttagaaggagtgatggttcattagcatttaagggtgtattagatgacaaactctacttagttgatttttcgaaagaggaggccgatctagatgcatgcttaatagctaagactagcatgggctggctgtggcatcatcgtctagcacatgttgggatgaagaaccttcataaacttctaaagggagaacatgtgttaggactaaccaatgtctgcttcgaaaaagatagaccttgtgcagcttgtaaggtagggaaacaggtgggaagcactcatcacaacaagaatgtgatgacatcatcaagaccgctggagctactacatatggacctcttcggacccgtcgcctatcttagcctggggggaaataaatcagaaacccaagggacccttaagcgctttctaagacaggctcaaaacaaatttgacaaggtgaaaaagataagaagcgacaatgggtctaagttcaagaatctgcaagtggaggagtaccttgaggaggaaggaagcaagcacgagttctcctctccctacacaccacaacaaaatggtgtggtagagaggaagaataggacactcatcgacatggcgaggacaatgcttggagagttcaagacgcctgagcggttttggtcggaagctgtgaacacagcttgccacgccataaaccggctctatttgcatcgtctcctcaagaagacctgctacgaactccttaccggtaacaaacccaatgtttcttactttcgtgtatttgggagaaaatgctacattttggtgaagaaaggtagacattcaaagtttgctcccaaagatgtagaagggttttttactaggatgtgcaaccacaggaactacaagagcaagatcaaccttcttcctcaacgatggtgcatcccccaaatcaagatgatggacaggttcatcaagaagaggcgtgtgatcaagggggagcataagaagaacaagttatggaggaagaaggtagaagaggccttgcaagatccggactgggtgttgaccatgcaagaagagttcaacaacttcaagagaaatgaagtttggagcctggtgcctcgtccaaagcaaaacgttgtgggaaccaagtgtgtgttccgcaataagcaagacgagcacggggtggtgacaagaaacaaggctcgacttgtggcaaaaggttatgcccaagtcgcaggtttggatttcgaggagacttttgctcctatggctaggctagagtctattcgcattctattagcctatgccgctcaccactctttcaggttgtttcaaatggatgtgaagagcgctttcctcaacgggccaataaaggagaaggtgtacatggaacaaccccctgactttgaggatgacaggtatcccgaccacgtttctaagctctctaaggcgctctatggacttaagcaagccccaagagcatggtatgaatgccttagagatttcttaattgctaatgctttcaaggttgggaaagccgatcccactcttttcactaagacttgtaacggtgacctttttgtatgccaaatttatgtcgatgacataatatttggttctactaatcaaaagtcttgtgaggagtttagcatggtgacgactcaaaagtttgagatgtcgatgatgggcgagttgaactacttccttgggttccaagtgaagcaactcaaggacagcacattcctctcccaaacgaagttcactcaagatcttctcaagcggtttgggatgaaggacgccaagcccgcgaagacaccaatgggaaccaacggacatgtcgacctcaacaaaggaggacagtgttgcacgcaactactttggatgaggcaaaccctccgggactttggctacaatctgagcaaagtcccactcctatgtgacaatgagagtgcaatccgcatggcggaaaatcctgatgaacatagccgcactaagcacatagacatccagcatcactttttgagggaccaccagcaaaagggagatatcgaagtgtatcatgttagcaccgagaaccagctagccgatatctttaccaagcctctagatgagaaaaccttttgcaggctgtgcagtgagctaaatgtcttagattcgcgtaacttggattga

SEQ ID NO: 98049 - DNA, 851 bp, Zea mays
  Clone ID: MRT4577_20930C.1
atattgagaaaattgagcacactgtagctagtactttgatggattgcagaactgcatcaaaaagcagatgaaattgcaatttcatgtgcaaaaaaatctcagcccactctacgagctgaattttgtacagtgatagagcagctattgaaagtaagagtaagtttaccttaatataataaaagagtaagaacatatagtgtttagatggctctaatgttctcgcaatgattggaactcgttgcatgagccgcccttttctttccaatagcttatgttgatagagaaaaataagcaattcactttatatcgcaacacatatgataatcccaagtggttgcccgatcaccaaaagtccttgtaggaacagtttccatccttaaagtggtggaaacagtttgcatcatgcaccacaatctccctatcagctaactttgaaataaatttagttactgtgtggcaatcaatacagactcggagattcttcatcacacgaatttttgttccagcaggcgtgcttataataccaaacactatagcaagtttctcactgtgaacacataacacatatgacttgtgctcttcttcaatatcctggaaaacatcctctgtattgggtacatgaccttcgcgtgccatctgctctgagaaaggattcagtgcatcaataatcctgtcataccaagggtgggacctatcatgagctacaaagacatgcagtttgctcttcacttcaatccaactacaagctggatccttctccataccctttttctcatggattctcgtaggtgtgttgcttcattccatctcccagaagctgaatacatattgacacccggccggcctcgagg

SEQ ID NO: 98050 - DNA, 403 bp, Zea mays
  unsure (1)..(403): unsure at all n locations
  Clone ID: MRT4577_20931C.1
agggggggggggggggtnnnnnnnccccaaaaaaccatgggatcgttttgaaacttttaaaaacattttacttccaaatttaccttaccctgaggctttagctttctttttttttttttgagtttctacgggttaggggctggagtctaagttttcatgccaatataattgttgatataggggtccaattcttgtttgttttttaaagaaacaagaaatacatttttgttttgatcccatgaagccttccatgcccgtcgttgtccaaatttccagttgcccctttaccgtttccttattgttttgggaagagcctcgttgttcttccagggcacgacggccccggggccagcaaactgggctggttttttaagccccatgaagccatttggcgctgaagcct

SEQ ID NO: 98051 - DNA, 277 bp, Zea mays
  Clone ID: MRT4577_20932C.1
gctgtgtctactctgcgggccgagctcacccctcagccagttgtatccacaggctgctgctcctccacctgggactgaagcgctgcctcttcaccgtggagcccttgggggataaagagccttcaccagaacagcgccggcgcctcctccgaaacttctataccctggtcacctccacgcacttcccaccagaaacagggccaccagagaagacagaagatgaggtctaccaggcccagctgcccagagcttgctacctggtgttggggactgagga

SEQ ID NO: 98052 - DNA, 300 bp, Zea mays
  unsure (1)..(300): unsure at all n locations
  Clone ID: MRT4577_20933C.1
cacgccttctcttgctacatctaccctactttctattttctnctaaaatagaatccggaaccgcttacattaatctcactcctcaacacaccatatctgaaccgtcacacacatcacaccacattcttacatgcttaacaacccccctcttcaactttacactatcctctatttcccaactccattcaccccaacaaaaacaataacatatagcctcccactctccttggcagctttcacgtccctcactatgtcaatagaaccccttgtcgtcaaaatacgaaaaagcgcatcctccat

SEQ ID NO: 98053 - DNA, 440 bp, Zea mays
  Clone ID: MRT4577_20934C.1
ggacctttgggctgcattatgtgcttgtttatgtgcttgaataccccgcggcgtcagcggtacagacgctaatagaaacaaacggggcaagggactcacttaagaaaacgaggtctaagtcgggggtcatcctcgaattcgcgaaattaccggagaagttcctagccggatccgcgaaggacgattccgcgaaattactagagaagttcctactcggattcgcgatgggggaattcgcaaagttattggagaagttcctagtcggattcgcgaaggatgagttcacgaaattactggagaagttcctcgtcgaattcgcgaagaatgaatttagcgagttagtctcagtcggagaaaataactgagtctttagggcaagttagatcataagcctcttaaacaacgtaggcaccgacgtattagcagctaagtacgacaat

SEQ ID NO: 98054 - DNA, 189 bp, Zea mays
  Clone ID: MRT4577_20935C.1
atccgttcatccaccgacggcgaccgttgcttactcagtgtcacatcttgacacggtgggaaaaataggcacgaaaaaaaaagagctcccttaattgaatcgacgcacgttgttttggtgttcggtttgcgcaacctacggatctgggctcccttttagcttgcgatcgactggtatgggaagatcctc

SEQ ID NO: 98055 - DNA, 116 bp, Zea mays
  Clone ID: MRT4577_20936C.1
gggaggatcaagaataccgtttgcctgtttttaaccaaaggtgtaacatccgtccaattttacagggcttgaaatctaaactttgcccaaaaccattttgttttattaaacatcct

SEQ ID NO: 98056 - DNA, 146 bp, Zea mays
  Clone ID: MRT4577_20937C.1
ttaccaactcactttaaccgacggctgaccaacaaaagggatggggacagtttaacgcacgaaagcaaccgttatatatggtcggattaataattgcatgtagcatagccatagccgattcacgtttgaaattcgtagtcacatac

SEQ ID NO: 98057 - DNA, 597 bp, Zea mays
  Clone ID: MRT4577_20938C.1
atgacgggcactgtgtcaactactacagtatgggcaaccccacgccaggagggttcgggtccacgggtccaaacaccgacagttggtgtaccaggtaggggaagtcatgtgcaacacctccagttcccatcagcactacagacgacaggttttcatcaccccctgaggcttagtacggtgatcaggtttgggagtctagagttcatgtcgctcggaatcgagtacgacatggtgctcctcccacctggtgcgctgactgacactcaggagcgtttaagtgctcgtacatgtccctctcgtcacaggaggcatagatggagcaatcctaatcgtggcacctatggcactccttgccctggtggggctcctgggctgactaatgacaagaactcccttgcgagggatctggccaacatcagtgtcacgcttgggacacccacgatggaacacgcatccccagcatcatctctgttgactcctcctcccgcagcgtggggagtttcagctccaccaacccctcatgccatggatcaggatgcgccagtctcatcggacctcccacttacgggtcgggaggaaccagtcgcttcttggtag

SEQ ID NO: 98058 - DNA, 300 bp, Zea mays
  Clone ID: MRT4577_20939C.1
gtcgatataagaaactgaaagggcatgtgcgctttaatgagatgcttgatatacaaccattcatggacccaaggtgtaaggtgaacaactccagcacttatcgtctagttggcgttgtcgagcacttgggaaccatgacgtcaggtcattatattgcatacgcgagagcttgcaagattggaggtcggcagcagcagagcagtggctcaaagtcttggttttacgcaagcgatgggcaagtcagagaagcctctctggaggaggtgctaaactgcgaggcctacattctcttttacgaga

SEQ ID NO: 98059 - DNA, 1981 bp, Zea mays
  Clone ID: MRT4577_2093C.1
atggatcctaaggggaagggaatcgtgatcaacgacaaggagaaggagtccttcatcaacgagccaaaggatgataagcctactgactcgggctcgggccacaagcgcaaagatgggaagaagaagaagacaaggcgcatcaaggagatcgtctactacgacgatagcgatgagtctacttcttcccaaaaggacgactacaggaagacggtcaattcgaacttctcatttgattattctcgtattccacatagttcgaattctcatttgctttccattcctcttggcaaacctccacacttcgatggggaggactacggattttggagtcacaaaatgcgtagtcacttattctcactccatccaagcatatgggagattgtagagaatggaatgaaatttgatagctcggatagccctatgcttataaatgaacaaatccataaaaatgcacaagctactactgttctattagcatctttgtgcagggaagagtacaataaggtgagcggcttggacaacgccaagcagatatgggacaccctcaagatctctcacgaggggaacgacatcaccatgctcactaaaatggagttggtggagggcgagcttggacgattcgcaatgataaggggagaggagccaacccaaacctacaatcggctcaagactcttatcaacaaaataaggagctacggaagcacgcgatggacggaccacgacgtcgtccgtctaatgctaaggtcctttaccgttcttgatcctcatctcgtaaacaatattcgtgagaatcctaggtacatgatgatgacgcccgaggaggtactcggaaaattcgtaagtgggcggatgatgatcaaggaggcgagatatgtcgacgacgctctaaacggtccaatcaatgagcctcaacctcttgctctcaaggcaacaagaagcaaggagatgctacctagcaaggtggcacaaattgaggcggccggacttaatgatgaagagatggctctcatcatcaagagattcaagacgacgctaaaaggccgcaagggacagccaagcaagaccaagacaaaggggaagcgctcatgcttcaaatgtggtaagcttggtcattttattgctaactgtcccgacaatgatagtgatcaggatcaagggaacaagagggagaagaagaagaactataagaaggcaaagggcgaggcgcatctaggcaaggagtgggactcagactgcttcctttccgactccgacaatgaaggactcgccgccaccgccttcaacaagtcatccttcttccccaacgagcatcacacatgccttatggcaagggaaaagaaggtgagtactcgagaccccacttatgcttcttctagtgataatgagtctagtgatgatgatgacatagactattcatgcttattcaagggcttagatagatctaagatagataagataaatgaactcattgatgccttaaatgataagaataggctattagagaaacaagaggatttgttgtatgaagaacatgataaatttgtagaggcacaaaaatcctatgccttagaagttaaaagaaatgaaatgctttcttatgaactgtctacttgtcatgaaaccatttctactttgcaaggtgttaacaatgatttaaatgcaaaattagaagtagcaaataaatctaattcttgtgaagaacacgttataatctgcactaggtgtaaggattttgatattgatgcctgtagtgaacacctagtttcaatttcgagattgaatgatgaagtagctagtcttaatgcccaacttaagactagcaaaagtgatttcgataagctaaaatttgctagggatgcctacacggttggtagacacccctcaattaaggatggacttggcttcaagagggaagccaagaacttaacaagccataaggctcccatctccgccaaggagaaagggaaggcccctatggcaa

SEQ ID NO: 98060 - DNA, 344 bp, Zea mays
  unsure (1)..(344): unsure at all n locations
  Clone ID: MRT4577_20940C.1
ttctacgagtgcaaatgatgagaatgcaagccgccggatcggaggagaccgccgccacaggatgctcgaggcacgctggattggaggatgtcatgtggcctccggcacggagggcgaacccctcgtgcacctctagggagccgtcgttgtcgtcatctagatcggngagccgatgttgtcgcgcctccggatcgaaaaaactgccaccatcgcgctgctggattggagagccaccaccatcgcgccgctggatcagggaaacgtcgccgtcgcgccgctggatcagggaaacgttgccgtcgcgccgctggatcagggaaacgttgccgtcgcgccttcggatt

SEQ ID NO: 98061 - DNA, 275 bp, Zea mays
  Clone ID: MRT4577_20941C.1
ggacgtactccgtccgtccgctacggttctcactatttcctctcgaggctacgagaccgggtactctttgggtcatcccacgatggtacgctactctgggctcggaggaccggagagaaacgctcgccgacatggtgtgcagcgcctatctggacatgaagtgtatgactcttctcgactgcgtcatcggctataacagtgtgcccatattctacatcagtgacatgatcaccacagactacatacctacgatgtgctacaatatcagcgccaat

SEQ ID NO: 98062 - DNA, 300 bp, Zea mays
  Clone ID: MRT4577_20942C.1
caaaacaaaattcccaagtttttttttggggggggttccgggttccggtgtccaggggtttaaaaaaaatggcgtccttttagcaggaaaaaaccagggggtaccaaacccggggttctttatttcttaaaacctttccggggggccgggggggcataaacttttattgggcgggtgggtccctaaatcccgcgggggggtccaccccccaacctgccctggttaagggccttaatgttagcatcctctaattgggcaccaatacggacccttttatttttttttttttgctggcaaacc

SEQ ID NO: 98063 - DNA, 486 bp, Zea mays
  unsure (1)..(486): unsure at all n locations
  Clone ID: MRT4577_20943C.1
ctccctggccgcggccacctccaccccatgctgagccaaaccccccaactagtttcagtgtccgcccagcagtcagcagaggaggagcgcgacagatcctcggcgccggcgcgccctccgggtcccccgccccaccaccactcacatcacatcacatggcggactccacgcaccacaccatccgccgcgccgcggcgcgcccgcgcggctggtgctgctcgttcgcgggcgtcccggagagccccgagcaccgccgcgcgctcccggcgcccgcctccgccgccgacgccgtcccgaagcctccgcctccgccgccgncaaagtccccgctggcgccgtcgtcgcacggctcgccctcgtccaagctcgcggggctcatcgacacgcggaggatcctctcgccgggccgcgtgtccccgatcgactccgaggggtcaccggcggcggcgccgagggagcaggccgcgcctttcgtggcggtgcggg

SEQ ID NO: 98064 - DNA, 786 bp, Zea mays
  unsure (1)..(786): unsure at all n locations
  Clone ID: MRT4577_20944C.1
ccggccgggaactaacctccgccgcatgcgcttcccaccccgcgctccacgcatgcactcctcgcttcttctcttcagttctgcgtttctctctctcccgccctagatctgctgggatcggagatagtaagtctttgtttgatggtgctttccaagcccgtaaaccctcattgctgtcttttctcctctctcgattaatcgtttcctccaccgaggcgagcggcgatctcaccagctccgagcagcagcagccatcttatattccaccaaatcaaaaagcccaggcgtggatccgatcctgatcggcgggattatattggcaaggcaaggtccgctcgccgggtggaggctccgaggtcgagggaggcgtcaggttgttggagaaaagcttctgaaccacatcagggaacctcgatttgtgaaagcggtcagctttggtagtctacttccactagtaatttgtgaatgggaggccgttcttaacgacggtgcaactttctaagttgtcgactccggagattagaatgcatgagtggtacatggtggctagcaacaaatacaaactcgaggaattcacatttgttgtgccagaagatgcattttggagcaatgatcatataaatcctgtacggcatttattctttgacgatctctggtcgttgtaccaccgacanaggatggaaacgaactacttaaccctcttctgcttgatgcaatacatggatgataagaagaaacaaacttagacagggtttcttgaccccgtgatgatatcccaagctcgct

SEQ ID NO: 98065 - DNA, 762 bp, Zea mays
  unsure (1)..(762): unsure at all n locations
  Clone ID: MRT4577_20945C.1
tgaaggaattgggaargagggtttytggcctcaaggsggagacaaatacagamaccgmmaaytttttgkmtggnctctsrgattggagggaaggatggagtgcgtgaccgatatgcrcctggmgaggctggaaagnggacggggaaagcggcaggggttggggtgggabgtggttncggcrgagatgtatcaggttaggsggcsgcggyttggttgggaggtgggccnggmrgagatgaatmagtttgcattttgtggaaaagaagttgtgaatgccttaagtgctgmagtgttgggnctatcttaaggttgtgtttcttytaaagtsaacaaagagvagcctnatgatggttccnctcytwtgagagaagatgaaaagaatggaaattatgtttttgytgttggagataatttaamacctsgytataagataaatgaaaaaatgggagaaggtacctttggtcaggtgttggagtgttgggataaggaaaaaaaaagaaatggtggcmataaagatcatraggggmattaagaagtaaagggatgctgmaatgatrgaaattggcatgyttgagaagyttggtaaatatggtgatgaaaaatgtggaccaggctgsgggagattttattggtkttttgaaagggytyytgaagtatgasccagmaagcygtttaaaagrargagaggradtgaggyatcctttyttcamggaagggtttgggggaagaagatgatacgtcyttgaagcagaccttgtttgt

SEQ ID NO: 98066 - DNA, 1298 bp, Zea mays
  Clone ID: MRT4577_20946C.1
ctctgtaaagtctttgcacctcagtaatcttagctattgatgaagggttaccagtcattttgcttgctctttaatcttctaaaattcctagaaatgcttatggatgcaggactttgcacagctgataagttagcctttggaagaatgccatttacatttttcataaagaccatcgatatcctgatacatttcacttattcaaaccaaccaatgactactttgtgttcctcgaggccggccactctcgaccggccggcattggcaagggtttagggcgcagcagagtctggtgtctcttgctccgaccccgttggcgactgagacgcgatccccttctcctgcactgccgtcctccgtcgctgcgatgcctcggtattactgtgactactgcgacacctacctgacccatgactcgccatctgtccggaaacaacataatgctggatacaaacacaaggcgaatgttcgaacctactatcagcaatttgaggagcagcaaactcaaagtttaattgatcaaagaatcaaggagcatcttggacaagctgcagctttccaagcaggtgcccctttcaaccaacatctgcttgcattcccaggagctatggcccgccctcgtcttccaattctgccaacccctggcatgcctcatgggtttcctcaagcacctggcgcaccattgatgccaggaattaggcccccgattttaccagctccaggttatcctggtcctccaccaaccatgcagcaaccaggcgccccacctgggtccatgccacaaccgggcgctccacctggttccatgccacaaccaggcgctccacctggttccatgccaatgcagatggccccactcccaaggcctccaacgctaccgcctccaacatctggagtcccaggtgctcccattcctaacagtggagcacctccagccatttaccaagcaaatccacaagcatctgcaggtccaacttctggtgctcctccagctccaccgactgctccacagcctgcgttctcctatgctcccccatcagaggggaaccactgattctgttccttaggcatgacttgggaggccatatgaagtatgtgcagaaaggctgttcctttggaggttgatgttgtcatcttttaactaaggccatttctatcatcctgaattcaagagattattgagaaaatcttccaatttgtgtggctgggtctctgttgttcgatgcatgttaactatgttagtttttatataaatttcaataaaaaggacgcttgaaaaaaaaaaaaaaaaaaaaaaaaga

SEQ ID NO: 98067 - DNA, 223 bp, Zea mays
  Clone ID: MRT4577_20947C.1
ttagtatgctgcagctcacttgaagggtggggccaataaggatgacatctctgctcctaacaaggatgcccccatgtttgtcgtcgatgtcaacgagaaggagtccaagtttgacattaacattgtctccaatgctagctgcacaaccaactgccttgctcctcttgctaacgccatcaatgacaagtaccgtatcgttgatggtcttgaagaccactgtcca

SEQ ID NO: 98068 - DNA, 207 bp, Zea mays
  Clone ID: MRT4577_20948C.1
aattcggcacgaggcgggcatcgggcagtgggggcctccataccttgggggggtgactacccctccttgtgccagcgttggcatgccctctcttacctttacgacaagcactttaggtctgcggtctctgctccgggtttcccgtctgctttctttcggcgggtcttttggggcgggggtgcttcctcgcggtcacgacgccggtcg

SEQ ID NO: 98069 - DNA, 200 bp, Zea mays
  Clone ID: MRT4577_20949C.1
tttatttatgggaacggatcttccatcggcgctggtgccggtgggttgacagaggcggtgggtgtattaaccttaaaagaaatggaaattaataataaaggaaaaaagagactttaaaggatagaaaggtaccaatataacgaagcgctgcaaaacaaggatgataagcttatcaacataaaaaatggatggataaacaa

SEQ ID NO: 98070 - DNA, 3034 bp, Zea mays
  Clone ID: MRT4577_2094C.1
gtgtaaggattttaatgttgatgcttgtagtgaacacttaatttccatctcaaaattaaatggtgaagtggctagtcttaatgcccaacttaagactagcaaaaatgattttgataaactaaaatttgcaagggatgcctacaccattggtagacacccctcaattaaggatgggcttggcttcaagagagaagccaagaacttaacaagccaaagagctcccatttccaacaaggaaaaggggaaggctcctatggctaatagtagtcaaaagaatcatgcatttatttatgatagaaaaatttctagaaatgttcatcattataggagttgtaatgcttatgattcaaatgccatgtttgcttcaagttcttcctttgtgcatggtagagatatgcctaggataaatgttgttcatgtttatgcatccgggggctcaagctggattatggacagtggatgcacaaaccacatgacgggggagaagaagatgttcacctcctacgtcaagaacaaagattcccaagattcaatcatattcggtgacgggaatcaaggcaaggttaaaggactaggaaagattgccatttcattcgagcactccatttcaaatgtgtttttagttgattcgctcgggatagaccttgtgcaacttgttaagcaggataaatctgaaacccaagggacccttaaacgctttctaaggagagctcaaaatgaatttgagctcaaggtgaagaagataaggagcgacaatgggtctgagttcaagaaccttcaagtggaggagtaccttgaggaggaaggaatcaagcacgagttctccgctccctacacaccacaacaaaacggtgtggtagagaggaagaacaagacgcttttagacatggcgaggacgatgcttggagagttcaagacgcccgagcgattttggtcggaagccgtgaacacggcttgccacgccataaaccgggtctaccttcatcgcctcctcaagaagacttcgtatgagcttctaaccggtaacaaacccaacgtttcatatttttgtgtatttgggagtaaatgctacattctagtgaagaaaggtaggaattctaaatttgctcccaaagctgtagaagggtttttgttaggttatgattccaatacaaaggcgtatagagtcttcaacaaatcatcgggtttagttgaagtctctagcgacgttgtatttgatgagactaatggctctccaagagagcaagttgatcttaatgatgtagatgaagatgatgttccaacggtcgcaatacgcaacatggcgattgtagatgtgcgaccacaggaacaaacggagcaagatcaaccttcttcctcaacaatggtgcatcccccgactcaatctgatgaacaggttcatcaagaggcgtgcgatcaagggggagcacaagatgatcatgttatggaggaagaagcacctcaagtccctccaactcaagttcgagcgacgattcaaaggaatcatcccgtcgaccagattttgggtgatataagcaagggagtaactactcgctctagattagttaatttttgtgaacactactcgtttgtctcttctattgagcctttcaggcaaaacgttgtgggaaccaagtgggtgttctgcaacaaacaagacgagcacggagtggtgacaaggaacaaggctagacttgtggcaaaaggttatgcccaagtcgcaggtttggactttgaggagacttttgctcctgtggctaggctagagtctattcatattttgttagcctatgccgctcaccattctttcaggttgttccaaatggatgtgaagagcgctttcctcaacgatccaatcaagaaggaggtgtacgtagagcaaccccatggctttgaggatgaacggtaccccgaccacgtgtgtaagctctctaaggcgctctatggacttaagcaagccccaagagcatggtatgaatgccttagagactttttaattgctaatgctttcaaggttgggaaagccgatccaattttattcactaagacttgtgatggtgacttattcgtgtgccaaatttatgtcgatgacataatatttggttctactaatcaaaagtcttgtgaagagtttagtagggtgatgactcaaaaatttgagatgtcaatgatgggcgagttgaactacttccttgggttccaagtgaagcaactcaaggacgggactttcatctcccaaacgaagtacatgcaagatttgatcaagcagtttgggatgaaggacgccaagcccgcaaaggctccaatgggaaccgacggacacgtcgacctcaacaaaggaggtaagtccgttgatcaaaaggcataccggtctataataggttccttgctttacttatgtgctagtagaccggatattatgctaagtgtatgcatgtgtgctagatttcaatccgatccaagggagtatcaccttgtggccattaagcgaattcttagatatttagttgctacgccttgctttgggatctggtatccaaaggggtctacctttgacttgattggatactcagactccgattatgctggatgcaagattgataggaagagtacatcagggacgtgccaattcttaggaaggtccctggtgtcgtggagttctaagaaacaaacttatgttgccctaaccaccgctgaggccgagtatgttgccgcaggacagtgttgcacgcaactactttggatgaggcaaaccctcagggactttggctacaatctgagcaaagtcccactcctatgtgacaatgagagtgcaattcgcatggcggataatcctgttgaacatagccgcacaaagcacatagacatccggcatcactttttgagaaaccaccagcaaaagggagatatcaaagtattttatgttagcaccgagaaccagctagctgatatctttaccaagcctctagatgagaagaccttttgcaggctgcgtagtgagctaaatgtcttagattcacgtaacttggattga

SEQ ID NO: 98071 - DNA, 148 bp, Zea mays
  Clone ID: MRT4577_20950C.1
gactattgctgatgcaggcccggaatttattgcttgtgaaacgatccctaacagatggggatcttactcatgtggggagagcttttaggactgctatattactataaggacatgggttttctttatgtcatattatgcagcgcttgtt

SEQ ID NO: 98072 - DNA, 618 bp, Zea mays
  unsure (1)..(618): unsure at all n locations
  Clone ID: MRT4577_20951C.1
tggncacctattttcattgcaattgtcgattatatgtctaaaatcttcatctatgcttccttttttttttggcagaggcctcgaccacggaggctgtggggtccattggtcccactcgatcacttgcatccttttgcgaaacctagcaaaccatatgctggtaaattgatcttaaacttgcacctactttattagtacttttagtgtgacatcttttgttcaactagtcgtttggttactttagacacagagtgaaaaactataggcgcatttgtatttctttttgaacaaaccatttgtgtataagaaatgtctcaaaagatacatgcatatagtagtgatatgcatttcttttgtatgtgcagtgatcatttttctacaagtttgcatattctatgacgtggtttattgattggtagatgagatagcaaatagatctgcgactcgccctcccttggaggctctgactctgagctgcacttctttgatctattttctgcttaatctctactgatacaagggtgtcccttttatagagacaacttgacccctaagcaaatatcctaaccgaatctatcttatctctaaactctaccctaatctagttctagatcgcga

SEQ ID NO: 98073 - DNA, 481 bp, Zea mays
  Clone ID: MRT4577_20952C.1
atatggggacacaagggaaggccttggttcaacactgggggggtcattttttacaaaccaccaaggcccaggggggggttccctaattaacgagacccccattaaaaaagggacgatcttggaatcctttttttcccactcatcacaaaacgagaccccccccgagggggtgatccatccccaggctcatagggagcgggtttaaataaaccaaaaacaccttccggtccatggacggggcggaccaatggcgggcttaaaaggacccccccaacctttccaaaatgggaggggggagcgggtccctcaaggggggggcccactttttgaacggccccttgcccggggggggggcctccacggggaaaccctagaaggcgaccctggcgaggggcgcgtgctttatttcccccaattgcaaccgctccttttttttagggtcggccgccaagcccaacgggtcaaaataagaacccccggg

SEQ ID NO: 98074 - DNA, 297 bp, Zea mays
  Clone ID: MRT4577_20953C.1
ttcatgctcaccgcacaaaatctgcagttatgccacgtaccctgtcgttgacggaatcgggagaattggtcttgcccacgagctctctatatgagcgaattctacaaaacgcactggcccctactgtgacgacgccaaccagaagctatgagtgatgctacacgtgtttcagatctgggtgaccaacatcaatcttaacctctggatcaccaaaccagctataaactagaaaggtacaaattcacacccatctacacacggacatcaggcacgtgtatagcatgaaaagatactaac

SEQ ID NO: 98075 - DNA, 217 bp, Zea mays
  Clone ID: MRT4577_20954C.1
cggacgcgtggacgaaaccgagttccattgagcagacgcagactctagaagccagggttcagcgagcggagcagggaaccaagcgctcagaattctgtgcggaggaggcgtatggcaatgagaggcggcggcggaaagggagcggtcgcagggacgccgaggcagagctcaaccagccggcagggtaacagttccacccaacggatgaagagctcga

SEQ ID NO: 98076 - DNA, 276 bp, Zea mays
  unsure (1)..(276): unsure at all n locations
  Clone ID: MRT4577_20955C.1
attcggctcgagggcgcggngagaacctttattaggattgggctgtcacacttaaatatgtgggggtcatccgtgggcgcttcacacactcccgtcaagggaacctcactcgcggcccgctcccagaattggacgggcttcaccctgcgccagagcttatggatgaccagttggggaatattaaccagaaggggtttcttacacttaacagccaacctgctgtaactgtagtgaaatgcgactccgctattgctggtcggggaggtcctggaggct

SEQ ID NO: 98077 - DNA, 390 bp, Zea mays
  Clone ID: MRT4577_20956C.1
agaaatgttccttttttaaaaaagggactttcttaattttgggaaacccacgacatttttcaaaaaacttttttaaggaactttttttttgtcgccctctaaaagggggccccccctataacgggtgttaggggaaaaaacccttggggttttaaaaaaaaaattttttaaaaggggaaaatggtgccacttttaagaggggccccccttttaccccccctactcctgttaaacggcaaaaaatggtcttggggtcaaaagggcacaggggtctaaaaaagaaaactgttaataagggaaaaatttttctctttgcaaaaaccccacaaagttaaatggccacaaatttttggaggaaaaaaatttttggggggaggaaaaggatccttc

SEQ ID NO: 98078 - DNA, 380 bp, Zea mays
  Clone ID: MRT4577_20957C.1
gaaaataagttttattaccatgtcgggttcacgattaaccgatccatgtatcggacccatggctagatcacacatagctgttgtctcaacacatcaaacaggtctacagatgccattaaagtacgaagcataacagtaacaggtcaaggttccgcctggaatcatcaggtcaagagtcttgaaagctgggcgatgcctgtcctgtcttcgacagaatcagttcttagagagcttttgcagtatgatcgaattcgtcacactgttgcctcacatgaagtcctcctctagttcctgcagggtcttgctaccagacgcaacctgcttgttcgaagtcatcttgtcttggaccatcaagcccttgtaactccttatttcagcct

SEQ ID NO: 98079 - DNA, 365 bp, Zea mays
  Clone ID: MRT4577_20958C.1
acatatcaaataatcttccgcccgatttataaaaaaattcagacctccccactaatatcactctataacctatcctccacaatataaacctcattatatcacacaaacacccatatcaatcaatctctcacatcctctattttctactattatatatcacattttcctttccttaaaaatccaacccttctctacatcacaaccatcaatcacactaccactcacatatttaatcatcatcatatctctcatactctatttacatcctcttactcaacacatcttctaactccaatttttaccattaactaccaattctatacttttacataaacataattcaaccccctcccaaacatattcta

SEQ ID NO: 98080 - DNA, 2142 bp, Zea mays
  Clone ID: MRT4577_20959C.1
caccttgcaagcaggcttttctctttgggaccaaccaatacagcctaagatctggtgatttcgaggcctttagctatggcccactcccaccgtatacacagaagtagaaagcactttaaggtttttggttccacaacaaagattctggcgctaaatttgacaagagagagtgcacttgatactttagtgcctactacaacactagtattagagaagggaaatcaaaggctctagcaacgtggctcactcaaactcaactcgctacagactcctaccacaccgcaccagcaaatgaaacatgacagaccggacacaaccaaccaacaaacaaactcggatatgtacagcacaggaggccaaacaaacttaattattgcaaacctaaaattacgacctaagcttgctacactgaagcggggatttttgcgaggaacggtaacgttttcgattccggttactcagatgctgatgagatctggaggcggtggcgacgacggagagcttgtctgctgctgctgcggcggctgctggtggtctctcgtttcgacggctagtgcttcgttggtcccaactggtgctgagtgtagagggctgggcgcagagccgtcgccggaattcggaacctcctctccttgcttggtagaattctcctctccctgcttggtagatggcggttttggaagctcgctcaggatctgcaccacctccctcatcgtcgggcgctgcacgctttgctcctcggtgcacagcaacgcgacgtagaagacgtgcgtcacctcgtgcagcgggacggtcgagagccttgggtccaggaccttcatcacctgttccttgtttgagttcgtcgtcatcttcgcccactggacgatgtcgacgccgtcgccgaactcgcctacgggcttccttccggtgacaagctccagaagcaccacgccgaagctgtagacatcactcttctcgtccaccttcaatgtgtatgcgtattctggcgctatgtagccatatgagccagcgatggcagacatgcattcagatgcccccgagtcctgcaagaattttgctagcccaaagtcggccacatgagcttcaaagttggagtcaagaagtatattatttgacttgacatcccggtgaagtatcaaaggtgaacagtcatggtgcaagtagcaaagccccttggctgcctcaatagcaatgctgtatcgggtatcccagtgcaggtgccctcccttcttgccatggagcatctccccaaggctgccattgggcatatactcataaaccaacaggttagtctcattgtttgagcagaagcctagcaggcgcacaatatgacggtgtcgcaacctaccgagtgtttgactcggtgccgagaacccatgatcatgtgatgagccccggcccattgctgacctacacttcacagccacaagttcaccattcggcatcgcccccttatacacaatcccagcaccacctttgccaataatgtgctcctctttcaagcaatccagcacatcatcgctggtgaagtctaggcgctggaatgcagtgagtttccatactcgagcttcactagctttcttcaatgaccgagccttcagaatcgccgccacagcgaatgcaatggagcagatcaacaagccaaggacaatgagcagcttgaccgtattggtcaaccagccatggccatggacagtgtggtcggcgccacctatgcctgcaccacatggaccgaggtatggtccacacaggcctggattgccaacaaaagatgtggcattgaagtagctgaactggccagtccctggcacaagcccagacaagttgttatacgagaagtccaccgccgtcaagctctgcatggttgcaatggatggaggtatctctccatcaagatggttcctggacaggttgaggtagttcagtattcggattccagagatggccggaggtatcttcccagagaggtttctcatcgaccttcagtgtgtatgcgtattctggtttcctgcagcgtggagactcaccaaactgtggcatgcaatgtgaggcttggagatctgctgaaaacgcccaatcaccggaggtatggaaacgaagaacgcgttctgatcaagcagcagcttctgaacaccagag

SEQ ID NO: 98081 - DNA, 259 bp, Zea mays
  Clone ID: MRT4577_2095C.1
aaagcacttacgttgtgccaggttccactcaagtaaattatatctgccttcaaggagcttgcagtatagtgagaaaagcctgccaagtaaatgagcaggtatagtagataggtatgtcatttaggcactcaataaatgttgactaatttttacagtttcctattactgaggaaaacctccatacactgaggcagaaacttgtgtcagttggaggaaaatagacttgagtagtctttggttcaggtaaattgggtcattg

SEQ ID NO: 98082 - DNA, 256 bp, Zea mays
  Clone ID: MRT4577_20960C.1
ccgtccgagaacaccaactacctgcccctcaaaaacccaacaattttatttatactaaaaacacaaaactcaaaggggcgggggagaattatactaactgtaaccaacactcccttgtcaaaatgaaaaaacacatcaatgctcaagtccccaacgatcaatcatgacaaacccaacattctacccatctacaccaatgccaacctttgactactccagcaaacccttgtctcagctaatcaaaaatctcctatct

SEQ ID NO: 98083 - DNA, 782 bp, Zea mays
  Clone ID: MRT4577_20961C.1
agtaaaaagatgatagactagctcattaatcgaccccaacaccctattcatactatgatacaacagccatacattcctttggcctctttttttttttttttttttttgacaagagagagtgcactagtattagagaagggaaatcaaaggctctagcaacgtggctcactcaaactcaactcgctacagactcctaccacaccgcaccagcaaatgaaacatgacagaccggacacaaccaaccaacaaacaaactcggatatgtacagcacaggaggccaaataaacttattgcaaacctaaaattacgacctaagcttgctacactgaagcggggatttttgcgaggaacggtaacgttttcgattccggttactcagatgctgatgagatctggaggcggtggcgacgacggagagcttgtctgctgctggtggtctctcgcttcgacggctggtgcttcgttggtcccaactggtgctgagtgtagagggctgggcgcagagccgtcgccggaattcggaacctcctctccttgcttggtagaattctcctctccctgcttggtagatggcggttttggaagctcgctcaggatctgcaccacctccctcatcgtcgggcgctgcacgctttgctcctcggtgcacagcaacgcgacgtagaagacgtgcgtcacctcgtgcagcgggacggtcgagagccttgggtccaggaccttcatcacttgttccctgtttgagttcgtcgccagggtcgcccaccccgaccgccctggagcg

SEQ ID NO: 98084 - DNA, 268 bp, Zea mays
  Clone ID: MRT4577_20962C.1
cccacgcgtccgaccacgcgtactccggatatgatcaacgaggtcgatgctgatggcaggggcaccattgatggcccagagtgtctcaaccttatggatctcaatatgaacgacaccgcctctgatgaagatcatcacggaggccttccgtgtgtcagacacggaccagaacggcttcatctcggccgacgagctccgccatgtcattacaaatcttggctaaaagctatctgattaacaagtgaccgatatgaaccaataggctcat

SEQ ID NO: 98085 - DNA, 381 bp, Zea mays
  Clone ID: MRT4577_20963C.1
ggcaaagagagaacgaagcaaccaactcctggtttgtaaccatatccaaatcccaaatgggtagacgctagaaacaagagcatacacagtgaaacacaattcagggtgcataaaggattgccatatccagcacactatgtatgtcggcgggctaaaaggtgcacgtcatgtacgagacatcaactgaaaaaaagagagacagcagagaacggccctccggtccaaggcaaggagaaaatggtatggatgactcggggcatagcggagagaaaggcctgaccatgctacaccagtccggaccctgggaaagaccaaagatccaccatcatgatggagccaaaacacttattgtgtgattaaaacgaaccaacaccacttaca

SEQ ID NO: 98086 - DNA, 572 bp, Zea mays
  unsure (1)..(572): unsure at all n locations
  Clone ID: MRT4577_20964C.1
gtgttttttttttttttttttaacagcaataaatctttattggaatttttctaacaaaataatttttaaaaacaaaagcccccacatgtaaacaagaaagtaaataaagttaattggcatcatcatgtacatccaagaatcaacacaagttctgggttaacattctgtaatccaggaacatgttatgacttatcaatgatgaggaaactgtttaatgctatcgacagtgcaacctcatctttcatcgtatggtggctcaggaatacgtaggtgtatgctatacgtgccacgtgtatgctagtcctaacatgcatttatgttgtcgatatcagaacgaatgtgtccatcatcggaagctggttatacctatctgatctcctgcatggtttttatgttgacatatgctagaactcatgtattatgatgtaactttttaaaactaacctaatcctaaattctatctctgactaatctgccatttcattntttctcacttnctatacatacattaaataccgtagcaacttcaccttaaagaatactgctaatacattaatacacatttaagcagt

SEQ ID NO: 98087 - DNA, 692 bp, Zea mays
  Clone ID: MRT4577_20965C.1
gccggccgggtcgaacccaaaccgagcgcagccacagaacaacacagcacaacatcgtcgcgatgcatgagccctagggcagcgcggatgctgtcgccggggcgagctccggtgactggcttccccgccggagtccctgccgcctcctccgagcgcgcctccggcctgttgaactgcttcgacggactgcggcctctgcatgcctgacgtggtgcggcccgtgcatcatctgtcggccagcgtggcgaaaatcatcgcaccccaccgcgacgccgagatgcacaacgggaacgttgtacacctcgttgtcctacttcacgtcatgccagcgaatctactcatgcacgtaccgtaccaagatgtgctgtcccagctggcgcttcccgagaccccctgctgcgactgccacgcccacttctgctgcgaaacgagatcgctctgccaggagtacaacgagatcaagggccgcgacgttcgacccctacctcaggtggtaacggaacgccacctatgatgtctccgtgcgcacaggacgagacgctggtgacctatgacagcaaagccgcgctgactcaacacattatgtaatgctgacatatgaatgcgctgataatcagccatatgaccctgacatatgtcccgtcacgaggccagggcaaggtggtccgtgcaccagggcctctgtcgctgta

SEQ ID NO: 98088 - DNA, 751 bp, Zea mays
  unsure (1)..(751): unsure at all n locations
  Clone ID: MRT4577_20966C.1
gggtacctcgaggccggccgggatcgcctactcgtctctgctccatccgtcgccgacgcgtctcctcctgtaaggaaaagagacggatacggatcaaatggctaagatcaacaacgacttctccacgtgcacttgcaagactgactgacatatctatgtacagatttgcctccaccagcctgcctgcatccataggcgcctcatccctcgtcaaaagatggctgataatatattcccccgaccgactgctggtcctctacatcccattgctcaatgacacattttaaagcacacacttgaggcctcgtgcttgtgaagatgctttacccttgaggagatgaatgctgatgatcttccaaacaaacttgctccaagcattgacatttctgatgatcaccgccgaaagaactaatcccttgtatgactgctttgcattgtgcacaatcttaagacttacctagtcttgctggctatctatcccgaggcgagaacacaaagctaatgctgactactctactcccaaagatcttgactccgctacccaagtccagggagactacatgtcatttactctcggtgacatgacctcagttgtagtgtgcgataagttacacatgatatgaagacatgttgctgcctatgttgagctcctaccttgagcgctgaacaattacatcttggtgacgcacagaatatgcatgtgatgcagagaacgatcactgnaagtgaatcgtttgaatatagtaccctg

SEQ ID NO: 98089 - DNA, 216 bp, Zea mays
  unsure (1)..(216): unsure at all n locations
  Clone ID: MRT4577_20967C.1
gcggggacacattttcaaacgcacancatcggcaggcatctttgcgtccgtgccagcgacagaccacacagcagctgcttcttttacaatgccgaggccatgattcatcttgacttctccgccgtccatccactgctgccattaccatctcccaattccagacatgctcgccctcatcttctcgttacacgacttccacttctctgcctcaaccgc

SEQ ID NO: 98090 - DNA, 415 bp, Zea mays
  Clone ID: MRT4577_20968C.1
gagctctcttgtcggcggccgcccttcttttttttttttttggtctggcaggagtgaaaaatgcattttaggggattcaaataaagaacatgctcgggcacattctgagggctgggcaagctggccatatgcgtaattgtatccttccgggctactaatgcaacacaagttgtagttgaacagagcatatggctctgcgacaataagtacacatcagctcccaacgcttttaagggtactaatcagagaccacaacctggggcttcaaaggctacgaccaacatggtgcgtcaggcgcttatagagggaaaatcatgatactcagggggagcagccagttgcataggacgatacttgcaaccgccctgtgtgggagaaggctctagaactgttggttgtggttgctcacttgaat

SEQ ID NO: 98091 - DNA, 750 bp, Zea mays
  Clone ID: MRT4577_20969C.1
ccggccgggagtctagactatttaaatacatctcgaagcttccagttcccgacgaatcaccatggccgacgtccgatcgatgctgcgtcagcaacgagctgcgagacagcaggcgcagaaaccccagaagccatcggccgctcccgcagctgcaccgccatcgaagaagcgtaaggctacggatgaggatatagctgagaggaaacggacacgcacagaggaggaggcgggcgttcctgcgggtttcttcgatgcgggagccgcagagacacaggaggatgaagcaacagagccgcccaccacagtgcaagaacatgcaaatccagcagcacacgcagtaccagaagcttcgatccctcaaccagccccgttagacgccgccgccgaagctgagcttgatgctttcatgaaggagatggcgaaagagccggctcgacctgctgcaaactactcggctggcgcagtaatcgaagcaaagcccatgacagctgccgagattgccgcgcaagctcgagaagagcaaagtgcacagcgtgcgcgcaaggacgaggagatggagggcgagaaggaggatgctgcacgggcgcttgaggacgaattcgacgagatggagggcttggaagagagagtcaagcggttgcgagaacagagggaggcattgcgcgcaaagcgtgaacaagcagcaagcacagatatcgttgcgccagttactccgctggctgatgagaacgatggcagcgagtctgagga

SEQ ID NO: 98092 - DNA, 5127 bp, Zea mays
  Clone ID: MRT4577_2096C.1
atggatcctaagggaaaggggatggtggtcaatgataaggagaaggagaccatcttcaacgagccgagggacaacaaagctactgactccggctcgagtcaaaagaagaaggaaggaaagaagaagaggtgcatcaagaagatcgtctactacgacgacaacgacgagtcctcttcttcccaaaagtacaacgacgacaacgactacgagaaaaagaagacgattaactctaatttttctttcgattactctcgtattcctaaaagtaccaatggtcatttactctccattccacttggtaaacctcctcactttgatggagaggactacggattttggagtcacaaaatgcgtagtcacttgttctctctccatccaagcatatgggagatagtagaaagtggaatgcaattttatagtactgatagtcccatatttatcaatgagcaaattcacaaaaatgcacaagctactactgttcttctagcatcattgtgcagggatgaataccataaggtgagcggcttggataacaccaagcagatctgggacaccctcaagatctcgcatgaggggaacgacgtcaccatgctcaccaagatggagttggtggaaggcgaactaggaaggttcacgatgatcaggggagaggagccaacccaaacgtacaacaggatcaagaccctcgtcaacaaaataaggagctatggaagcatgcgatggacggaccacgacgtcgtccgcctaatgctaaggtccttcactgtccttgatccacatcttgtaaacaatattcgtgagaatcctaggtacaccaagattacgcccgaggaaatacttgggaagtttgtaagcgagcggatgatgatcaaggaggcaagatacgttgatgatgcgttgaatggcccaatccacgagcctcaaaccgttgctctcaaagcaactaggagcaaggaagtgctacctagcaaggtggcacaagttgaggcggcggggctcaatgaggaagagatggccctcatcttcaagcgtttcaaaacggcgctaaggggtcgcaaggagcatcccaacaagaacaagacgaaggggaagcgctcatgcttcaaatgtggtaagattggtcattttatcgctaattgtcccgataatgatagtgaccaggaacaagagaagaagagggaaaagaagaaggcctacaagaaggctaagggcgaggcacaccttggcaaggagtgggactcagattgttcgtcatccgactccgacaacgaaggacttgccgcctcagccttcaacaaatcgtccctcttccccaacgagcatcacacttgcctcatggcaaaggagaagaaggtaaacactcgaaagactacttatgcttcttctagtgatgatgaatctagcgatgatgaaatagattatgctagtttgttcaagggcttagaaagaactaagattgataagattaatgaattaatcgatgccttgaatgacaagaatagattgttagaaaagcaagaggatcttctgtatgaagaacatgataaagttgtagaggcacaaaaatctcttgctttagaagtcaaaaggaatgaaatgctttcttgtgaactatctacttgccatgagaccatttcaagtttaaaaagtgttaatgatgatttaaatgctaaaatagaagtagcaaatagatctaactcttgtgtagaacatgttgtaatttgcaataggtgtaaagattttgatgttgatgcttgtagtgaacacctagtttctattgcaaagttaaatgatgaagtggctagtcttaatgcccaacttaagactagcaaaaatgaatttgacaaactaaaatttgcaagggatgcctacactattggtagacacccctcaattaaggatgggcttggctttaagagagaagccaagaacttaacaagtcataaggctcccatctccgcaaaggagaaagggaaggcccctatggctaatagtgctcaaaagaaccatgctttcatgtaccatgataggagatattctaggaatgttcattatgatagaagttacaatgatgttgtttcacatgccatgattgcttcaagttcttctattatgcatgatagaagtttggctaggaaaaatgtcatttatcatgtgcctaggagaaatgttcatgtacctaggaaaattaatgaaccttctacaatttatcatgcttgcaatgcttcctttgcaatttgtagaaaggataagaaggtttatgcatccgggggatcaagctggattatcgacatcggatgcacaaaccacatgacgggggagaagaagatgttcacctcctacgtcaagaacaaagattcccaagactcaatcatattcggtgacgggaatcaaggcaaggttaaagggttaggaaagattgctatttcatccgagcactccatttctaatgtgtttttagttgagtcgcttgggtataatttgttgtccgttagtcaattatgcaatatgggatataattgcttattcacaaatgtagatgtgtctgtctttagaaggagtgatggttcattagcttttaagggtgtattagatgacaaactctacttagttgattttgcaaaagaggaggccggtctagatgcatgcctaattgctaagactagcatgggctggctatggcatcgccgtttagcacatgtggggatgaagaacctccacaaacttctaaagggagaacatgtgataggtctaacaaacgataaatctgaaacccaagggaccctcaagcgcttcctaaggagagctcaaaatgagtttgagctcaagcaaaatggtgtagtagagaggaagaacaggacactcattgacatggcgaggacgatgcttggagagttcaagacccccgagcggttttggtcggaagccgtgaacacggcttgccacgccataaaccgggtctaccttcatcgcctcctcaagaagacttcgtatgagcttctaaccggtaacaaacccaatgtttcatactttcgtgtatttgggagtaaatgctacattctagtgaagaaaggtaggaattctaaattttctcccaaagctatagaagggtttttgttaggttatgactcaaatacaaaggcgtatagagtcttcaacaaatcatcgggtttggttgaggtctctagcgacgttgtatttgatgagactaatggctctccaagagagcaagttgttgatcttgatgatgtagatgaagaagacgttccaacggccgcaatacgcaccatggcgattggagatgtgcgaccacaggaacaaacggagcaagatcaaccttcttcctcaacaatggtgcaacccccaactcaagatgacgaacaggttcatcaagaagaggcatgtgatcaagggggagcgcaagatgatcatgtcatagaagaagaagcacctcaagcccctccaacccaagttcgagcgacgattcaacggaattatcccgtcgaccaaatattgggtgatataagcaagggagtaactactcgctcgagaatagttaatttttgtgagcattactcttttgtctcttctattgagcctttcagggtagaagaagccttgctagttccggactgggtgttggccatgcaggaggagctcaataatttcaagagaaatgaagtttggacactggtgccacgtcccaagcaaaacgttgtgggaaccaagtgggtgtttcacaacaaacaggacaagcacagagtggtgacaaggaataaggctagacttgtggcaaaaggttatgcccaagtcgcaggtttggactttgaggagacttttgctcctgtggctaggctagagtcaattcgcatattgttagcctatgccgctcaccattctttcaggctgttccaaatggacgtgaagagcgctttcctcaacgggccaatcaaggaggaggtgtacgtggagcaaccccctggctttgaggatgaacggtaccccgaccacgtgtgcaagctctctaaggcgctctatggacttaagcaagccccaagagcatggtatgaatgccttagagactttctaattgctaattctttcaaggttgggaaagccgatccaaccttattcactaagacttgtgacggtgacttattcgtgtgccaaatttatgtcgatgacataatatttggctctactaaccaaaagtattgtgaagagtttagtagggtgatgactcaaaaatttgaaatgtcgatgatggacgagttggactacttcctagggttccaagtgaagcaactcaaggacgacaccttcatctcccaaacgaagtacacacaagacttgctaaagcggtttgggatgaaggacgccaagcccgcaaagactccaatgggaactgacggacacgtcgacctcaacaaaggaggtaagtctgttgatcaaaaagcataccggtctatgataggttccttgctttacttatgtgctagtagaccggatattatgcttagtgtatgcatgtgtgctagatttcaatccgatccaagggagtgtcacttagtggccgtgaatcgaattcttagatatttagtcgctacgccttgcttcgggatctggtatccaaaggtgtctacctttgacttaattggatattcagactccgattacgctggatgcaaggtcgataggaagagtacatcagggacgtgccaattcttaggaaggtctctggtgtcttggagttctaagaaacaaactttcgttgccctatccaccgctgagaccgagtatgttgccgccggacagtgttgcgcgcaactactttggatgaggcaaaccctccgggactttggctacaatctgagcaaagtcccactcctatgtgataatgagagtgccatccgcatggcggataatcctgttgaacacagccgcacaaagcacatagacatccgacatcactttttgagagaccaccagcaaaagggagatatcgaagtgttttatgttagcaccgagaaccagctagacgatatctttaccaagcctctagatgagaagaccttttgcaggctgcgtagtgagctaaatgtcttagattcgcggaacttggattga

SEQ ID NO: 98093 - DNA, 483 bp, Zea mays
  Clone ID: MRT4577_20970C.1
actgtatccctaacttccggctttgggcatcatctcttcctcctgctccgcgaaacaggccgttcccaaattctctcagcctactaaaaacccgcatatccgcggaggctccgtacctcggatccgatcctcctagggaggctactctctctgatcgacggagtggggcgcccagccaacatcgagcacgtactcgtgcctgtcgtcctgctgctccgagtgcgcgtgctaggcgtgagggatcgtgttctacagcatcgaccgccgctcggaccgtatagtgtaacgtggactccctgtgcttcttcctcttaggatcctgggggctccgagaggtcttcggcgacactcctccaggcgatccgatggattatccacttgcacaagacccacagaccgagagagaaccaaggacgacatggacgctcagggatcagactcggcaagttcgtctttctgcaccatcgtcgatcgtcatcatgg

SEQ ID NO: 98094 - DNA, 192 bp, Zea mays
  Clone ID: MRT4577_20971C.1
cttcagtgatgtacaggccaggctacaaacctttggggtgtttttttacgataatggggctgaacccacccgacttctacatctacgaattgcaatcctatcttatagcactcttaagagcactatcccccaagacattgaccccatactgagacaaaatccatgttaacaacgctaacaaagaaagcaccg

SEQ ID NO: 98095 - DNA, 159 bp, Zea mays
  Clone ID: MRT4577_20972C.1
gctgggtctctccaacacctaccaaatcattttccttttgctgctactgtcgtccctgcgtgactaatgcatcagcgccgatgcgcaagctcctgagcaaaccacccaataacatcctgaagcaaccccgccgcgcccacggcgtctgacgacgacgac

SEQ ID NO: 98096 - DNA, 1028 bp, Zea mays
  Clone ID: MRT4577_20973C.1
cctgccgggaacaccacctagatacgatatagtcatcgcaaaatgcaggctctcctgctccccgcgcgggccgcgccgccgacgccggcgatgcttcggcagcgtgcggtttctgcctccgcgtgtgcgtcgcaggtctgccgccccctattcggtgccgccagttgcatctcctgtggggtccacggaagcgttcggcggcacctcacagtggcggtggcggcggccccgccctcgccttcgtcctcaccttcgtcgggaccgctctacccgacgcctccacccaccgagcaggaggtggagagggtcaagctcgagcaggttatgaggagactagagaaaacagcaaggtatttcaagaatttgggtaccctggggttctggtcccaattggtgtgcacaattatttctgctggaattttggcattctctacagttgtaacggggaaggtgacatcaccctttacattctatgcaactgctgctggtattgctgctgcttttatttcagtcttctggtcatttggttacatccgtctctctgaaaggcttagaaaaacatccaaagaacctgctaaggcttcagcgaacaccatcctgtcgcatttccttggggtggcgagctccctggagctgctgcgctcggtgtcactgcctccagcagaagccgccgtcccggccccggcccctgcacgggcctgagccatggcccgttgggcaggtcaagaaaaaccttcaatccttggctttggctctagacagttgctatttcttgattgcatgtacaacttgcatcaagaatacatacacatcgatgccttccagttcacctggacgcaacatgttcgcgtaattcccgccgagtgtgagctcttgcatgagcactcgcgaaccacatgtggcgcttgtttgctgtgcaagtgcaagtgagtgcagtgaccggctctcgctcgttcttaataaaaaaaaaaaaaaagcggccctcaaaaaataaaaaaaaattattatattattatttatataaatat

SEQ ID NO: 98097 - DNA, 247 bp, Zea mays
  unsure (1)..(247): unsure at all n locations
  Clone ID: MRT4577_20974C.1
cggcgagctgtatgcggagctgacctcggaattggggtcgagcaagtcccgtcggggcgctcggttcttctgccgcctccacacgcgtgccgggcgatagctggcggtgtctgccttttgttcctcctcggcgcgggagtgcagggatccgcgccgcaccgtctcgtgaggagccaacgcttgcgactgngttaacgcagacgtcttggcggcatgaacaatgcggtccctattatcgggggaagta

SEQ ID NO: 98098 - DNA, 1442 bp, Zea mays
  Clone ID: MRT4577_20975C.1
cattgggtacctcgaggccggccgggacgaagcccgccgcttcggagttctacaatcccaaatagcatcgtcatcgcaaaatgcaggcgctcctactccccgcgcgggccgcgccgccggcggcggcgatccttcggcagcgtgcggtttccgcgtccacgtgtgcgtcgcagggctgccgcctcctactcggtgcctctggttgcctcagctgtggggtaagatctcggctgcgcctcacagttgtggcggcggcctcgtcctcgtcgggaccgctatacccgacgcctctacccaccgaggaggaggtggagcgggtcaagctcgagcaggttatgaggagactagagaaaacagcaaggtatttcaagaatttgggtaccctggggttctggtcccagttggtgtgcacaattgtctctgctggaattttggcattctctacagttgtaacggggaaggtgacagcaccctttacattctatgcgactgctgctggtattgctgctgcttttatctcatccttctggtcatttggttacatccgtctctctgaaaggcttagaagaacatcaaaggaacctgctaaggctcctccacgcgccgatgttgttaatagcctgaaaaatggcattgtgctgaatattctcgggatgggcgccgctgttctgggcatgcaagccaccgttggtgctttggtagcaaaagctctcacaacctctgcagttccctattatcaggctgctgctccaggccaaagccctgtgttggccttagatgttttcctagttcaggcttcagcgaacaccatcctgtcgcatttcctcgggctggcgagctccctggagctgctgcgctcggtgtcgctgcctccagcagaagctgccgcccctgccggggcctgagccatggcccgtgggcggcagggtcaaggaagaaccttcgttccctcggcggcggcggctctggtagacgtagacgctctcgctgttgctgctccggattgtgtgtacagctcgcatcaagcttggtacatactacacacacatcgatgccttgcccttcggttcagctggaaccaacgtgtctgtctgcctagttcccgccgggcgtgaggcgagctcttgcatgagcacttgcgagttgcgaatcacatgatgtgtgtggcgcatgtttgctgtacaagtgagcgactgggttccctcctagtcattgtacccgcttcgctggtcgggtataaaaaacggacagtataaatatccattttttatacggattcgggcccctttaagtctagtttgggaacaccatttttctaacggagtgtttggatcccttcattttagaagaattggaatttactaaataaagtaacttatttagtttggaatttgacattccaccgaaaaaaaaaaaaaaaaaaaaaaaaaaagcttgtttgt

SEQ ID NO: 98099 - DNA, 1527 bp, Zea mays
  Clone ID: MRT4577_20976C.1
ttgggtacctcgaggccggccggggccttgaaaatcacaaattgagcaggggagaagggggtgggcgttacgtaacacggcgattcaggaggggatagcatcgtcatcgcaaaatgcaggctctcctgctccccgcgcgggccgcgccgccgacgccggcgatgcttcggcagcgtgcggtttctgcctccgcgtgtgcgtcgcaggtctgccgccccctattcggtgccgccagttgcatctcctgtggggtccacggaagcgttcggcggcacctcacagtggcggtggcggcggccccgccctcgccttcgtcctcaccttcgtcgggaccgctctacccgacgcctccacccaccgagcaggaggtggagagggtcaagctcgagcaggttatgaggagactagagaaaacagcaaggtatttcaagaatttgggtaccctggggttctggtcccaattggtgtgcacaattatttctgctggaattttggcattctctacagttgtaacggggaaggtgacatcaccctttacattctatgcaactgctgctggtattgctgctgcttttatttcagtcttctggtcatttggttacatccgtctctctgaaaggcttagaaaaacatccaaagaacctgctaaggctcctccacgtgctgatgttgttaagagccttaaaaatggcatcgtggttaatattcttgggatgggcgctgctgttctcggcatgcaagctactgttggtgctttggtagcaaaagctctcacaacctctgcagtaccctattatcaggctgctggccaaagccctgtcttggctttagatgttttcctagttcaggcttcagcgaacaccatcctgtcgcatttccttggggtggcgagctccctggagctgctgcgctcggtgtcactgcctccagcagaagccgccgtcccggccccggcccctgcacgggcctgagccatggcccgttgggcaggtcaagaaaaaccttcaatccttggctttggctctagacagttgctatttcttgattgcatgtacaacttgcatcaagaatacatacacatcgatgccttccagttcacctggacgcaacatgttcgcgtaattcccgccgagtgtgagctcttgcatgagcactcgcgaaccacatgtggcgcttgtttgctgtgcaagtgcaagtgagtgcagtgaccggctctcgctcgttcttaatcattgtacccgtttcgctaaaaaaaaaaaaaaaaaaaaaaaaaaaaaaaaactctgttctcggctgctgattgcggatgtcaagtctgacaagttgtctatcccggacagtataaatatccattttttatacggattcgggcccctttaagtctagtttgggaacaccatttttctaacggagtgtttggatcccttcattttagaagaattggaatttactaaataaagtaacttatttagtttggaatttgacattccaccgaaaaaaaaaaaaaaaaaaaaaaaaaaagcttgt

SEQ ID NO: 98100 - DNA, 489 bp, Zea mays
  Clone ID: MRT4577_20977C.1
aaactaaaaatatctgctttgttaaaaatagcgaaccaatttatgacatgtttgggacaaaggattacgggggccaattttttttccacacaacatgcaatttgcacaaggggatctactacccccccccaagttttatttgggagaagggggtaaaaaacagaaaaaaaaagggcccaaaaacataccccggcggcgaaaaaaggggggttctacttatgttcttgggaatcaaaaggaaaactccccaaaccccccgtaaacaacctgatcaagcgaccgatctgaaccagtttaactagccgattaatcaccccccgacgtcgaactggaggatctgggtatttttttttaggaaacagcgccgaaatcacaggcgcccttgtttgaagggataaacttgagcttgaccgcttggcccccctaaagctaaaaggggtaatccaggggggcggaataaaacaagctggccctttggacaaaatgggg

SEQ ID NO: 98101 - DNA, 268 bp, Zea mays
  Clone ID: MRT4577_20978C.1
tgatcaagaacaatgcctccactgactatgacctatctgacaagagcatcaaccctctgggtggctttgtccactatggtgaagtgaccaatgactttgtcatgctgaaaggctgtgtggtgggaaccaagaagcgggtgctcaccctccgcaagtccttgctggtgcagacgaagcggcgggctctggagaagattgaccttaagttcattgacaccacctccaagtttggccatggccgcttccagaccatggaggagaagaaagc

SEQ ID NO: 98102 - DNA, 379 bp, Zea mays
  Clone ID: MRT4577_20979C.1
ggccggtggacatgctgggcgctgcggtcggtatggggcagccgttctccatggtcacgaagctcaacccgctcggatggtgcctgtccctctatgatatcgccgcgacccccggcggcgcgggcgacgtgtcccacatgaactcccccggcctggcgaaggggtccatgggggacgaccagctccgggaggcgctcgagggctgctacggcgctatcattccaaccggggcgcccaggacgcccggcatgactagggacgacctctttaccattaactcctgaatggttgaggcgctctcgactgccatcgccaagcactgaccgaacgcatcttagtgatatgaccagcaactctgtcaactgcactgtccccattg

SEQ ID NO: 98103 - DNA, 353 bp, Zea mays
  Clone ID: MRT4577_2097C.1
aaaaaagccttccttttttttccattggcccgggggtttacaggttataatttacccaatctataacggggggggtacaaaaattggttttaccccttttaaccacacccttgggaaaaaagaatggtttcatggtgccccacaaaaaaatatttgcccccctttaaaaaaaaaggccttttttaactggagggggggaatcccatcccaaccctaaaaaaaacctatgggaatttttacaaaagcctgctccaaggggtaagtttccctaaaaaagggccctgtgggaaaaagggtcccaaaaatttccccccaactaataaagggtctggccagatatttcccccccaaaa

SEQ ID NO: 98104 - DNA, 354 bp, Zea mays
  Clone ID: MRT4577_20980C.1
ccgtgatgcccaagagaaagctcttccgtaagtactgcactggatctggatgtgtaacttctcttttctagagtgcagatgtatcattgtagtaataggagaaagaagtttttttaaatcctaaaagattgtagttgcgactttgatgtgtaatgctgctttattttctgacatttatgtgaacatgcttagtttgtggtgtaaaacttgtttcaaccatggagcatgttatgttttccaactgtttctgtactatgtaaaaccttattacgttgaaacataggtacgtggattacatctttggaaatgaaactgaggcgaggacctttgctaaagttcgcggttgggagaccg

SEQ ID NO: 98105 - DNA, 503 bp, Zea mays
  unsure (1)..(503): unsure at all n locations
  Clone ID: MRT4577_20981C.1
ccgaaaccaaaagaaacagnngcaggcganncngagcgggggaggggggccggggacgganaccagagccggcggacgggangacaggccctcacgaccgaaaagcnaggccaagcnnngaagggnnngnacanaacgangaaaggaaagagagcagancngangcagacaacncagaaggagnaaagaagactaaggagggggncgnncaagaaaaaagcaannaangcngggaacaaanncaggcannccnggagaaggagaagcaaaaagaagaccgaaaggggggaaaccancaaggacanaagggacgnnaaagagcnncaagaagnngagacannccgacaangcnnaanggangaggannngcngccaccacagcacgaagannancacangangnnaaggnnccnaaaagcacggaaaaaagaagnngagaaaagcaagagcangnggncagacangaacaannggaggaaggaanacggggncgacaaaaaaga

SEQ ID NO: 98106 - DNA, 298 bp, Zea mays
  Clone ID: MRT4577_20982C.1
caattcggaagggccaccttttattcaaaacgtatcaaataatcaggaaaaggggtcccaaaaatgggggaaattaacggcaatctccaatgggtaagggcaccggtaatgaaaatgattgggaatactgctgcggcctgaaaatgttcgcctagctaaggcctttttaattaagggggggggcccagggaaggaaaatggcaacataaaaaaaccggttcaaaagcttttcgcaggaaagccccacaacttgggcagggattaaaagggttcgggtgggccgccagccttaatcctg

SEQ ID NO: 98107 - DNA, 160 bp, Zea mays
  unsure (1)..(160): unsure at all n locations
  Clone ID: MRT4577_20983C.1
aataattaaactgnggaggggaatggaaataacagggaaatattttttcacaaaagaggtgtggtcttaaaatagttcggtccttcataacaaacatatgtacatttataatttcacatttttgtatgatcacccccaattcgaaacaaagaaaccccca

SEQ ID NO: 98108 - DNA, 690 bp, Zea mays
  Clone ID: MRT4577_20984C.1
cctttctcgagttttttttttttttttttttttttttttttttttttttttttttttttttggcttctatcggcttttttttcatttccctaatacatcattcaaagtaaacacaagaaaaactgttttgctaaatccaaattgcaaaacggccccgccagaaaaaccataacttttttcaaaaaaattgaaaccctaccaaagcggtctttatatatcactcgaaaatagaaaggaaaaatagcgctcgcgaatctcgctttcgtctgggagtttcctcgggtgcagcacggcctcgcttccatccgggagcaggcaacgacggagtccgacgagcagccaagcaccagttaccgaggatcacggccggccgcgaggaaatagacgaaaagatgcagcgaacttcaccggcagctaaaagcgacggctccaatgggtatatgcctttcaaatcctgtttgggcgaatgttaaactgaaatcgaatatgcagctgtgtagcggggaggatttgacaaatcggggacaggctggtattcttcagcggctatcctatttcaaactttactggatataaaggggaatttatattataaattctctattttatatgatctgctgcggataattttaaaaaagtctatgttttatagctctacaatcttagcttaagcgtatggatctaaatctc

SEQ ID NO: 98109 - DNA, 234 bp, Zea mays
  Clone ID: MRT4577_20985C.1
ctattaccatcatttgtgtgtcttgcttgtaagattgtatcacctgtctagctactgcgcctttgcccacccgcgctatgctgtttggttgtgtgaagcgcgatgccgaaaccccgttttttttttcctcttttccattcacccctgcaccatcacgatttttttttctttgccaagcgagaccaagccaaactggcttgtggtcgttgcccgttgtccccggaagcccggact

SEQ ID NO: 98110 - DNA, 2138 bp, Zea mays
  Clone ID: MRT4577_20986C.1
cctcgtttcaaattgacaccccgtccaacgcaaacgagagtgaaagccgaagcgagtgcgagtgcggccctcagctgctgcagttgctcctgcacgttgcctgctcgtttctgcggcggcggcggcggcggcggcctagcacctgagcggggcggcgagaggggacggagatggatatcgcgcgggcggctgctggcgtggcctgctgcaaggagcaccagaggatctacgccgagtggttcgccctcgccgacccagatggcgacggccgcgtcacgggcgccgatgccaccagcttcttcgccatgtccgcgctttcacgcgccgatctcaagcaggtgtgggcgatcgcggattccaggcggcaggggtacctcggattcgccgagttcgtcacagcaatgcagctcgtgtctctggcccaagcagggaacgagatcacacaggacagtctgaaacgtgaagacctgagcaccttggatccgcctgtgatggaaggtgttgatgagctactggctagatccaaggctgttgtgaagagagttcacccagatgacaatggcaccactcaggcccaagcaccttccatatatcactggtttggttcaaaatcagcacagaaggtgcagatgcctctgactgctgttacctctgtaattgatggcttgaaaagactctatgttgaaaaactgaagcctttggaagtcgcctacagatacaatgatttttctcacccattattgacaaacagtgactttgaagcaaagccaatggttatgctcttgggtcagtattcaacaggcaaaacaacattcattaagcatctgctaaagacaagctacccaggagctcacgtcggaccagagccaacaactgatagattcgtagttgtcatgtcaggatctgatggaaggaccattcctggcaatactattgccgttcaagccgacatgccattcactggtcttacaacctttgggggagcgtttctgtcgaagtttgaatgctctcagatgccacatcccctgctagagcatatcacctttgtggacactcctggtgttctctctggggaaaagcaacggacccaacgtagctatgatttcactggtgtgacctcatggtttgctgccaagtgtgaccttatccttcttctgtttgaccctcacaagcttgatataagtgatgagttcaaacgtgtcatttcatctttacgtgggcatgatgacaaaatacgcgtagtgttgaacaaggccgaccaagttgacacacaacagcttatgagagtgtatggtgcattgatgtggtctcttgggaaagtgctaaatactcctgaggttgtgcgtgtgtatatcggatcatttaatgataagccagtgaatgattcagctgttgggccaattggaaaagacttgtttgagagggagcaagatgacctcctctgtgacctgaaggacattcctaagaaggcttgtgatcgacgggtcaatgagtttgttaagcgtgcccgagctgccaagatccatgcttacataattggccatctgaagaaggagatgcctgcaatgatgggaaaagccaaggctcagcagcgactcatagacaacttagacgaggagtttgcaaaggtgcagagggaataccatctccccgccggagacttccccgacgtcgagcacttcaagcaggtgctgggcgggtacagcatcgacaagttcgagaagctgaagccgaagatggtgcaggcggtggacgacatgctcgctcacgacatcccggagctcctcaagaacttgcggaacccgtacgagtgaaactgacctgacctctcgcgtccgtcggttgtaaaaagattatcttagctgtcacgtccggtgatggcggacggacgaggcagacgttcctgggagggagatgcctagacggttacgggtcactactcctagctgtccgcagctgtgccaaaaccgagaggacacatgagggttcagatcggacagccacagcgcatagcctgtgttggtttcggcgtcagtgctctctgcacgcgaaggagctgctgcggcaccgttgccgtgccgtctcgctgtgatacattttccctcgtgacgagatgaaaagagagttgcaggcggcag

SEQ ID NO: 98111 - DNA, 234 bp, Zea mays
  Clone ID: MRT4577_20987C.1
actacgcgtccgataacgcgtgtccagccaaatgctgaaatcacatccgacaccgacatccagcaaccaggcctctcagccaggacgtctatggcctagatccgcgctccagcagccgacgacgcagatacagatgccagtcgctccaggcatcagcacacgtcgaacgcgcaggcaaaccgacatgccgtgcccatgctcgaggccaatgcaatccttggccgtccatacatc

SEQ ID NO: 98112 - DNA, 435 bp, Zea mays
  Clone ID: MRT4577_20988C.1
cctgggtcgctcttgttttcttcccctctcttgggctctgcgcgcggggggggcgcgctttggtccctttttcgcttcccggcggccctggttgactgcggacgcccgcggggcgcggattgggctccatgcggctctccctcggcgccctattctttggggctcttttcggagctgccgcgctgagaccttggggggggggcttgttgcttctttctctgagcgtgctggcgcatgcagcagcttgccttggcgtctcccaccttgctgcactgcctggtcgtcgtttccctcctgtcctgtgtcgcccacgctcagctctcgtccacgttctatgcgtccttctgccccaccctgcggagcctcgctcgggcgttggtgacccgttccgtctgctgtgagccgatgtattgtcgcctctttgctctggctgtt

SEQ ID NO: 98113 - DNA, 301 bp, Zea mays
  Clone ID: MRT4577_20989C.1
aagaattttgtctactggtgatctttttttgggtctaatgagcctattaccgtgaaaaaaaaaaaaaaaaaaaaaaaaaaaaaaaaaaaaaaaaaaaaaaaaaaaaaaaaaaaaaaaaaaaaaaaaaaaggggggacgatttagagtatcacaagattacttaagcatgtattctaaaaaaataaattatatataaattaaacttgggttcaatttaatggaggtttttttaaaaagtccttactgggaaaaaaatggttttatcctaatttaaacgtattttaaaaaaaattccgcttta

SEQ ID NO: 98114 - DNA, 5277 bp, Zea mays
  Clone ID: MRT4577_2098C.1
atggatcctaagggcaaggggattgtgatcaacgacaaggagaaggagaccttcgtcaacgagcccaaagatgacaggcccaccgactcaggctcgggccacaaaagaaaagacgggaggaagaagaagacaaggcgcatcaaggaaattgtctactacgacagcgacgaatcttcctcctcccaaaaggacgacgacgactacgatagacgaaagacggttaactcaaacttttctttcgattattcgcgcatcccgcatagttcaaatgctcaattgctccccattccacttggcaagccccctcactttgatggagaggactacggattttggagccacaaaatgcgtactcacctgttttctctccatccaagcatttgggagattgtggaaagtggaatgaaatttgatagctcggatagccctgtgtttattaatgaacagattcataaaaatgcacaagctactactgtgttgctagcctctttgtgcagggacgagtatcacaaggtgagcggcttggacaatgccaagcagatctgggacaccctcaagatctctcatgagggaaacgacgtcaccttgctcaccaaaatggagttggtggagggcgagcttggacggttcgcgatgataaggggcgaggagccgacacaaacatacaacaggctcaagacccttatcaacaaaataaggagctacgggagcacgcgatggacggaccacgacgtcgtccgcctaatgctaaggtcatttaccgttcttgatcctcatttggtgaacaatattcgtgaaaatcccaggtacaccaagatgtcgcccgaagaagttcttgggaaattcgttagcgggcgaatgatgatcaaggaggcaaggtacgtggacgacgccttgaatggtccgatcaacgagccgcaaccccttgctctcaaggcaacacgaagcaaggaggcgctacctagcaaggtggcacagattgaggcggccggacttaatgatgaagagatggctctcatcatcaaaagattcaagacggtgcttaaaggtcgcaagggacagccaagcaagaccaaagccaaggggaagcgctcattcttcaaatgcggtaagcttggtcattttattgctaactgtcccgacaatgatagtgatcaggatcaagggaacaagagggagaaaaagaagaactataagaaggcaaagggcgaggctcatcttggcaaggagtgggattcagactgctcttcgtccgactccgacaatgaaggactcgccgccactgccttcaacaagtcatccctcttccccaacgaacgtcacacttgcctcatggcaagggagaagaaagtaagcactcataatactagtacttatgcttcttcaagtgaggatgagtctagtgatgatgatgagatagattactcatgcttattcaagggattagatagaaccaagcaagaggatttgttgtatgaagagcatgataaatttgtagaagctcagaaatctcttgctctagaaattaagaggaatgaaatgctctctagtgaattatcttcttgtcatgaaactattgctaagttaaaaagttttaatgatgatttaaatgctaaactagaagtagctagtaaatctaattcttgtgtagaaattgttgaaacttgtaataggtgtaaagattttgacattgatgcttgtagtgatcatttagtttcaatttccaaattaaatgatgaattagctagtcttaatgcccaacttaagactagcaagaatgaatttgacaagctaaaatttgcaagggatgcctacacgattggtagacacccctcaattaaggatggacttggctacaagagggaagccaagaacttgacaagccataaggctcccatctccgccaaggagaaagggaaggcccctatggctagtagtatgcaaaagaaccatgcctttatgtactatgatagaagacaacctagaaatgcttataggagttgtaatgcctttgattctcatgcaatgtttgcttctagttcttcttatgtgcatgatagaaatgttggtaggagaaatgttattcataatatgcctaggaaaaatgtcgttaatgttactagaaaagttaatgaaccttctacaatatatcatgctttaaatgcttcttttgctatttgtagaaagaataagaagatagttgctagaaaattaggggcaagatgcaagggagacaaaacttgcatttgggtccctaaggatatttgtgctaaccttgcaggacccaacatgagttgggtttatgcatccgggggttcaagctggattattgacagcggatgcacaaaccatatgacgggggagaagaagatgttcacctcctacgtcaagagtaaagattcccaagactcaataatattcggtgatgggaatcaaggcaaggtaaaagggttagatgtgtctgtctttagaagatgtgatggttcactagcctttaagggtgtactagacgacaaactttacttagttgattttgcaaaagaagaggtcggtctagatgcatgcttcatggctaagacttgcatgggctggttgtggcatcgccgcttagcacatgtggggatgaagaacctccacaagcttctaaagggagaacatgtaataggtctaacaaatgttcatttcgaaaaagagagaccttgtgcagcttgtcaagcaggtaaacaagtgggaggagcacatcacagcaagaatgtgatgaccacgtcaagacctctggagctgctgcatatggacctcttcggacccgtcgcctatctgagcataggaggaagtaagtatggtctagttatcgttgatgacttttcccgcttcacttgggtgttctttttgcaggataagtctgaaacccaagggaccctcaagcgcttcctaaggagagctcaaaatgagtttgagctcaaggtgaagaagataaggagcgacaacgggtccgaattcaagaaccttcaagtggaggagtttcttgaggaggaggggatcaagcacgagttctccgctccctacacacctcagcaaaatggtgtggtagagaggaagaacaggacgctcatagatatggcgaggactatgcttggagaattcaagacccccgagtgcttttggtcggaagccgtgaacacggcttgccacgccatcaacagggtctaccttcaccgcctcctcaagaagacgtcgtatgagctgctaaccggtaacaaacctaatgtatcgtattttcatgtttttgggagtaaatgctacattctagtgaagaagggtaggaattccaaatttgctcccaaagccgtagaagggtttttattaggttatgattcaaatacaaaggcgtatagggtcttcaacaaatcatctggtttggttgaagtctctagcgacgttgtatttgatgagactaatggctctccaagagagcaagctgttgatcttgatgatgtagatgaagaagacgttccaacggccgcgatacgcaccatggcgattggagatgtacggcctcaggaacatttggagcaagatcaaccctcttcctcaacaatggtgcatcccccaacccaaggtgacgaacaggtatctcaagtggaggcgaatgatcaagggggagcacaggatgttcaagttgaagaggaagaagcacctcaggcacctccaacccaagttcgagcgacgattcaaagggatcatcccgtcgaccagatattgggtgatattagcaagggagtaactactcgctcgagattagttaatttttgtgagcattactcttttgtcgcttctattgagcctttcagggtagaagaggccttgctagatccggactgggtgttggccatgcaggaggaacttaacaacttcaagcgcaatgaagtttggacactggtgcctcgtcccaagcaaaatgttgtgggaaccaagtgggtgttccgcaacaaacaggacgagcacggggtggtgacgaggaacaaggctcgacttgtggcaaaaggttatgcccaagtcgcaggtttggactttgaggagacttttgctcctgtggctaggctagagtcaattcgcatcttgctagcatatggcgctcaccattctttcagattgtaccaaatggatgtgaagagcgctttcctcaatgggccgatcaaggaggaggtgtacgtggagcaaccccctggcttcgaggatgaacggtaccccgaccatgttgggaaagccgatccaactctttttactaagacttgcgatggtgatctttttgtgtgccaaatttatgtcgacgacataatatttggttctactaaccaaaagtcttgtgaagagtttagcagggtgatgacgcagaaattcgagatgtcgatgatgggcgagttgacttacttccttgggttccaagtgaagcaactcaaggacggcaccttcatctcccaaacgaagtacacacaagatttgctaaagaggtttgggatgaaggacgccaagcccgcagagactccgatgggaaccgacggacacaccgacctcaacaaaggaggtaagtccgttgatcaaaaagcataccagtccatgataggttctttgctttatttatgtgctagtagaccggatattatgcttagcgtatgcatgtgtgctagatttcaatccgatccgaaggagtgtcacttagtggctgtgaagcgaattcttcgatatttagtcgctacgccttgcttcgggatctggtatccaaaggggtccaactttgacttgatcgggtactcagattccgactatgctggatgtaaggtcgataggaagagtacatcgggaacgtgccaattcttaggaaggtccctggtgtcatggaactctaagaaacaaacctccgttgccctatccaccgctgaggccgagtacgttgccgcaggacagtgttgcgcgcaactactttggatgaggcaaaccctcagggactttggctacaatctgagcaaagtcccactcctatgtgataatgagagtgctatccgaatagcggaaaatcctgttgagcacagccgcacaaagcacattgacatccggcatcactttttgagagaccaccagcaaaagggggatatcgaagtgtttcatgttagcaccgagaaccagctagccgatatctttaccaagcctctagatgagaagaccttttgtaggctgcgtagtgagctcaatatcttagattcgcggaacttggattga

SEQ ID NO: 98115 - DNA, 378 bp, Zea mays
  Clone ID: MRT4577_20990C.1
accactccattactcggtggccagaaacctctgtgatcggcccaatctggggggggggcggaggccaattgatcaccatcgtagggaggagtaaccgcttcaatggcctcggcaatcctcttatcgaaagcataaacgatgatcaaatggatattccagagaaaaacagaaggaagaactgatcctcatacatagaggcctggatttggtggtgggagggtgcatatattgattctggaaactctgagacggatctacaggctggagcacagcacaaatatgagctactttggatcatacttgatgaatactgcgctgatattatgattcaatcacttgcagccaggctaggggttcccacagggggggggggggcat

SEQ ID NO: 98116 - DNA, 265 bp, Zea mays
  unsure (1)..(265): unsure at all n locations
  Clone ID: MRT4577_20991C.1
gtgtaattcnncaccaagcacggggggcggggggggggttcctaacccaccaaccctttccgggctcaatgggcgctggaacttccaccctccccccgaccaggtcnggcgggcgagctccgggccaacctccagggtgggctcctccccatggggcttggcaacctctcngggggggggggggggtccccccatatctcctcaccatgggctccttgggatggggggggcctcgctctgccctctggccccaaattcccctccc

SEQ ID NO: 98117 - DNA, 291 bp, Zea mays
  Clone ID: MRT4577_20992C.1
gagccgtgcaagttccaggggctggccatcgccgtctgtgtccagcagggcgctaaaccgatgtagctggcagtactcatctagcaggggaagaatgacggcgaagtggtggacgcgtgcatcatgcagagcaagtcggagccaatggtagtccatgcagtagtcctggtgctcgatgttgatgatcgattctagcagctcggttggtgagcacgttgagcatgggcatcatcagcgagtccggcaggctgctggtggacaagaacgtcatcctggtgaaatagatcgccg

SEQ ID NO: 98118 - DNA, 237 bp, Zea mays
  unsure (1)..(237): unsure at all n locations
  Clone ID: MRT4577_20993C.1
cgacccacgcgnccgcaagggcttatcaatgaacccgctcgctttttttccttaaccgaccagcccatgaaaaggaaggttcttaacactgctttgggttacaagataccattcactacaacgagatcacacctatctcctagccccccataatggataactgactgcataacatcgactaccccctccttcatctaaagatcaccggcttcttcaccggtgactgctccacactat

SEQ ID NO: 98119 - DNA, 539 bp, Zea mays
  Clone ID: MRT4577_20994C.1
accgggcccccccctcgagttgttttttttttttttttttttttttttttttttttttttttttttttttttttttgttttttttttttttttaaaccgaaaccggggggggggtcttcaaagcaaagctttcaggaaacggccccccaccccaagctttagccgggaaaaccctttcggggcaataaaaacctctttaaaaaaaaaacccccttttaaagcccccatttagggggggggggccacaaatttttttttttaaacaatcgcttttcccccccaaaaaaacctggcccaaaaatcacccccctcctttccgagggccccagggagggaaaaccctttcatttctcccttggggggcacaacccccccacgtttgctttaaaagaccttgaaaaccccatcctttcggccccgggggttgccccccctcacaaaaacggggggcacccctttttttttaagggagaggctcccttttttcccgggccccaaaacctttgcccccacccagggaaaagaaaccctttaaaggc

SEQ ID NO: 98120 - DNA, 586 bp, Zea mays
  Clone ID: MRT4577_20995C.1
ttgggtacctcgaggccggccgggatatattctccagagcctccccggctaccgcgagcggccgtccgcttgcgggtcattaggataaccattatctctgctggcatgaaaaacgcaggcgagcactaccgagctatggagaaagctatcaataggcagcagggacacctggcgcacgtcctcctgtccctcttcgtcgcctcactagcagcctgagattgcggaagcttagtgtgctacccgagacagagccgtctaccagaggaatgcctccctcatggacaatgcctccgaagtcgctgactagaacaggccctatatctgacgctcaccttaggaggcttcaaggacacctacccagaggacctgcgtcacggaatgatatataaggatggtcgagaacaacattagaactcttccagctgacatctgcggcatcgatactgggcacggagcattgcacacgttgcaccgcgattcataccatatgtacatgactgccttgagatcgggattccataagaccatgcatgtataaactgtctatctcccctgttcctcaatactaccggaaggaactgaagaa

SEQ ID NO: 98121 - DNA, 369 bp, Zea mays
  unsure (1)..(369): unsure at all n locations
  Clone ID: MRT4577_20996C.1
tcggagatacctcaccgtcttctaacttttatgtacaccgctacatgggccatggtagccttattgatggttggttaaccacctgntcatcctctacagttgacaattgatagtgttgattcacttgttgctaactgttatactactcaatttctagacatcataacactctcattattacaacttcatcttggacatattattttatactccacctttccttttgtatacgatattacaatattataaaaccgcatggtgtacttaccatttaaagtggccacttccgcaaatattttctggatctagataccagctgcggctctacagaatttgttctttgaaagttgttcaattccttccattttt

SEQ ID NO: 98122 - DNA, 1357 bp, Zea mays
  Clone ID: MRT4577_20997C.1
gcacgagcccacagttcggatcccggaggaggtgcaccgcggccggggcggcaccgcggcacacgagccggctagccgcgactgtctagtacgactgtacgagacacggcggtagtggcagctggcaggaagggagatgattaaaaataccgtggccacgctgatggtgcgcctccaccacctgcccctgccccgcgccgcgcccgctcccacctaccgttgccgccgccacctcgccctcgcgccccctctccctcggctgcgggcatcggccgccgtcatgtcaacggcggcggaacagacgatcgccgaccagaagcgcacgctgcgcgccgaggtgcgcagggcgctgaaggccctctctgccgaccagcgcgccagcgaagatctggctattcaaactacaatactggattcctcttggttcaaagcaagcaaacggttgtgcgcttatataagctgtcagcagttgcgagaagttgatacatcaaaaatactagcagagtgtctaccgtcgaatcctggacaagaggaactggcaaaggatctttatgttcctcgagtggaggataagaaccgtaatatgaggatgctcaaaatcaccaccatggatgatttagttaagaattcaatgaacattctggaaccatcgcctgtggatgctactgggaacaatcgtgaagatgtattgtcatcattgtctcctgttgatctttttttattgccgggacaagcttttgatagaactggtcgaagactggggcgtggtggagggtactatgacacattcttgctgaagtaccaagaacttgcaaaagagaaagggtggaaccagcctctcttagttgctctttcgtactcggtgcaaattatggacgagggcatcatcccagtcaattcaactgatgttcctattgatgctctggtctcatcctctggtgttattccaataagtgctgcggcgttgcagaggatgcaatgaagttgattggcctctgtagccatgctttgacaagaagcaccttcttctgatccctggttgcactagcaaatacaccagcagatcagggaaactgtctcttttttccccctcgtggctcctctcttgtattgtatcatcttttacgttttaacagggtgaactggacgtctacatcttattccagccacttcagatttatagattttataatgtaaaccgtcgagctgaccaaaacagtcagtagacttgacatggtattcggagtttggtcgtcttgtatcttgaaagcttacgtcttcaggggactagccagtcgcctcaaaaggagataaataacaaaacttcatccgattttttaaagaaaacccccaaacc

SEQ ID NO: 98123 - DNA, 235 bp, Zea mays
  Clone ID: MRT4577_20998C.1
ggcatatgaattatggttttcaaggcttgggtgctcttcatccccattctcttcctgaagttcacgatggagcaaataatggcaccccgtacaatctaaacaccatggtaccaattggtgtgaatagcaactcaagaacagccgaagcagttgactgcagacatcttcataaagtgggttctagcaacctcaatggacattcatttgatcgtgtcggtgtaagagctatgggatt

SEQ ID NO: 98124 - DNA, 1069 bp, Zea mays
  Clone ID: MRT4577_20999C.1
ggtaccctcgcccacgccgggacccgattgtcacaggacctcacctccctactcgcgtagtagtcgtcgtcgtcgtcgtcctcctcccgacgtctggtggtatcggacttgcgtggcgtggaggtgcttccgaacttgggatcgatttgcttgtcagcgccgaaccctagctttgcttcgacggcacccacctacggtacgcccgcggccccaagcagtcaggcgacaccgaataatttggttacagagacgagcgggtgcgccggcgagagggcccgattctcaccgcgccggcgatggcgagcagctcgtctccgtcacaggtcatctgcgcctccttcaatcaggacaacagcatgttttctgtcgggaccaaggatgggttcaagatctttgacgctcgtaatgggaggctctgctacgaaaagagtcttgggggattcaacattgtggaaatgctatttggcacaaacctacttgccattgtcggaaccggtgaacagcctgcaatgtctcctcgtcgtttgtgcctgttcaataccaaaacaggagcatcaaagagagatctgaactttaagacttcaattttggctgttcggttaagtaggaagaggcttgttgttgtattgcaggataggacttttgtttatgatctaaatagcactactatattggacgaaattgaaacggtacccaatacaaaaggtctatgcgcatttgctcctaattctgaagagtgttatttggctctcccagcaagcacatccaaaggatctgctttagtatacaaagcatcaaaaccggaattaatatgccagatagatgctcatctggctccgttagctgcaatggttttttctttgaacggcatgtacctggcaacggcttctgaaaagggtaccatgattagggtgcatcttgttgcacaagcaaccaagtcacatagctttcggcgaggaacatacccatcgacaatctattcactggcatttagtccctctgttgatctgcctgacgttcttgttgccacaagttcatcaggatctttgcacatgtttttccttgatgc

SEQ ID NO: 98125 - DNA, 662 bp, Zea mays
  Clone ID: MRT4577_2099C.1
gtcgacccagcgtccggtacctctcgccggagctggggtgagagaaacctgctgccgccacgattcctcgaaccggttggagttcgaggcatgggagcatgcccagggtgcttgtttgagctggtaggaataacgcgtggaagaatcctggtcagtggaggagaagacgcaggactggttcaagcgcgtcctcgtagacaactcctgcttcccgttcgaacagagcgctgccgtggttggtagagaagaggaagaaggtcctacggccgtctgatccggagagtgtggatcagattagatcatgtattgcttgttcatccatctaaatctacactgtccggttctgtctggacggaggagattcgacctccatatacctgttcgtccattatatcggggacatcagattcggatccaacgacccacatagcataccagttcacataatgatatatctaatctggcccttcgatccctaattggacgactcatattaggtgatacctcttcggctgtccagagttaatccaacggctgacgcgcatccataccccttcggtcatttgcttttataaaacagacaatgtgcttttatgaaattaacacaccgtccatgtaccactgtgaatcatttaaagtaggtccccatattttgcaaaaat

SEQ ID NO: 98126 - DNA, 252 bp, Zea mays
  Clone ID: MRT4577_209C.1
agccttctggccgcggccggaattggccgcttgcgaggacaactttgcccggtaaacgcgttccgcttaccttgaccctttttactgggacccccggtttgggaaggaagagccctacagtgggtcaagggcttttcgcactttcgccacctcttctcgcgccttttctctccccgcccctttggggcctctagaggtggggcgcggaaactcgggttggggagagtctcctgcgggagggggcgtcccgcg

SEQ ID NO: 98127 - DNA, 347 bp, Zea mays
  Clone ID: MRT4577_20C.1
atggcttctaacagcgctcgaaagctgcagtctgacaagaaacggaaggcacgtgatgacaccgtcgacgacgacgacgaccatgattttgtagcttctaaagcaaagaccaataggcacaaggcctacttaggtcctagcatcttattatactagtaatgagacgtgttcttcagacaatttctagctagggatgaccttggatgattgttccttacattggattgctcatttggggcgcgcacaactaaattctgtgaagcaacgtgttgtgttgggtcaagaagtctctgcaaactatcacttgtgtagcatttgactccagtgaaacatatgattggatgact

SEQ ID NO: 98128 - DNA, 421 bp, Zea mays
  Clone ID: MRT4577_21000C.1
agctgcatcagctcattcaattctagttccagccctggaaggttgggtcccgactgcgttccataattcaccagcggggtcctaccaatatctcctatggtcttctccctggcgcgatcaggttccagaagacaggggcgaccatgatctccctggacactcatccgcacggacatcggtgtcatcggcagtgggactgcactcgcgctgttgctctccacagcgcctacgtacatccgtatgtgtaagaaggtggtctgtggagcagttcttgtccatcccctacgtggcgactctggtgaactgcatgatgtgggtgctgtacgctctcggcgtgggtgcgccaccacagtgtggtggagatcaccatctactggaccggcgtggagaaccagatgaactacgggccgctcttcctcct

SEQ ID NO: 98129 - DNA, 298 bp, Zea mays
  Clone ID: MRT4577_21001C.1
gccaactgaactcaacatcaacggtgaatagtgggtaggacttgacacccgcaacctgaagattgtcacactactgcgacgccaggtggtgtacggtgctgtcgataatcggatatctagaagctgaaagctgccgccgcgacttcgacgtcttgtacgggaccacttcgacggtatggagtcagatgatgaattcaatcagtttgtaatgaacgacctgattgatccgtcatcttcggatgatgagaatgatctgttttttgatgccgcgcacgtgatcgttgatgatttagttaat

SEQ ID NO: 98130 - DNA, 375 bp, Zea mays
  Clone ID: MRT4577_21002C.1
atggcgtcgcctccggcgctgcctccagctgtttggttggggcatggctgcccgtccaccgtacgggcgacggtcgcgccatgcgtaggtccgccacatccatggcttctcccgcgccggcggccgcatggggggtacaagacatcgtacgccgtgggggcggcgtccatgttcttggatggtcttgtcctcactcccgcagtgaggacgggagcgaggacctcttcgcgcgtgctggggcgaccgccattcgtcggtacggcactggtgcgcaggtggccgctgtcgtcggtgctgaggtggtcgccgccgctggtgaggctccccactgcagaggtggttgcctccgctggcgagaccgtcagtgccacctga

SEQ ID NO: 98131 - DNA, 363 bp, Zea mays
  Clone ID: MRT4577_21003C.1
cccacgcgtccgcccacgcgtccgcccactcgtccgtccacgcgtccgcgcacgcttgggcaatctgaccaccactggacagtgcactgtactctacagcaacgacagaaaagtgagcagcacacagcagcagctgctgccatgcacgcttggagatctctcctaccgagcttcgtgctcgccgtgctggccgctcaagccttgctagctgtggtccaatccaagaccggccccgtggagcatgcgagccaagcatgtgacgacgtgaacaagccctactgcgtgcccgtgatagacccgcgctcgctcccagcgaccggcggctggcacggcatcactcccgtgacgccattgcacggaagc

SEQ ID NO: 98132 - DNA, 108 bp, Zea mays
  Clone ID: MRT4577_21004C.1
tgatcaccgtactagtcggaatcgactcacatggacgttttacgcgctcaacgtcaggaacgcacctctacggtttcggcggctaggtcgccctctctcccagtggcg

SEQ ID NO: 98133 - DNA, 230 bp, Zea mays
  Clone ID: MRT4577_21005C.1
gagctcactacttactcataaaatctgagcttcattcagacatccacaaactccagcgcgagatacttaataagaggtgcatctataaaacctaccacctattcgaaacccaagctttcgaacgatagaacatgcactctcagacacagaagtccattataccaccccaatagaacagccgcacgcaccacttaaatcatatccaagacgtccaactcatcatcgccagc

SEQ ID NO: 98134 - DNA, 215 bp, Zea mays
  Clone ID: MRT4577_21006C.1
ctctctctctggtactgctagagctacctaggtagccagagccagcctctctctgtatctggtcagggatgaatactgccgccgcccacaaattccacctttcaagaacagcgctgcatggcggggtcgctgtacttagcagtgccctgacgttcatgctatataattaagctacgctgctaggagccatcgggagagagatgagaccgagagat

SEQ ID NO: 98135 - DNA, 341 bp, Zea mays
  Clone ID: MRT4577_21007C.1
gggagatgaaacacccggatccataattgatcccacgcacaggttgtccaggacaaaccgcactctgggatacatggacacacacacaaaaaaggggggaggaaacatacagaagcgcaccgaaagagaaaggggatagctccacgctggataaaacggcagttgttgccacccacccggggggggacgtttttgccggttatggcgggggagggcctttccaggttaccacctgtctgtttattgacgcccattatggtttggcggaaaaaggggaacaagaccagctggagtgaaaccagaaagctcccacaccccctgggaattgcgaagaagggggc

SEQ ID NO: 98136 - DNA, 648 bp, Zea mays
  Clone ID: MRT4577_21008C.1
aaagcagtttctaatgctttcatgaaaaccttggaagcaaacccatcaggtcaggctatcttaggctcacctgctgctgctgctgtaatagacgcttgcaacagccttttggaataatcttcctagcagctttggcctatcaaccttttcagattctgtatcttgcgaaagacggtctcgtgtattctctatagtttaggtgtcaaggaattgaggaacagacaattttgagctgtataattttgcgagatcagatgagtgttgattgttattgtttcggccaagaaggaaagaaagaagccatgaattttggtcttgggcgaccagcttaatttgcaggagtcctagatgaacaaggctaaatatgctgttactatgtccacctaaaatgttgttagttatttttctgcgactacacatttttgtaacttgtactatggttttggaatgttttattgggtacaatatattgtgttatttaggagtcaaaactatctctaggtcctggtttaccctgttgctgccgtgatgttggctccctaattcctttgggcgacttagcgtatgttggctccaattcgtttgggctttgtatttccatgctgtttgactggatatttgatgggtctctttgtttgggtttgttcc

SEQ ID NO: 98137 - DNA, 1016 bp, Zea mays
  Clone ID: MRT4577_21009C.1
aggctactggagcatctgtacccggccgggattttcaagactcaagacctggaatccggttgcttgttatacggtgctctgttggatgacattgggattgaccttcctaaagctccaacgcaatttggtgagattattgctcgcctgactttgttaggtgccttgagatttgaagttatggaggagattttaaagaaaatggaggataccatgtaccgcaaagcagtttttgatgctgtcaagaaaaccttggaagcaaacccatcgggccagacaatcttaggctcacatgctgctgtaatagacgcttgcaacagccttttggaataatcctcttagcagctttggccaaccaactttttcagatgctgtctcttgcgaaagacagtgtcgtgtattccctgtagcttagggccttgtttgggagtaagggtaatagaggggattggaggggttagaatcccccactattcaattttaaatagtagaggattatagccccctcaatccccttcatttcacttgctcccaaacaagccctagatgtccaaggaacgcagtaccaaagatgcgaggaacagccagttttgggctgtataattttgcgagatcagatgagtgttaatttattattattattattgtttggaccaggatggaaagaaagaagccatggattttacccttgggcgaccagcttattttgctggaggccccagatgaacaaggctaaatatatgatgttttcgtgtccacttaaaatgttgttagttattttcctgtgactacacatttttgtaacgttgtactatgattttggaatgttttattgggtacaatatattgtgttatttaggagtcaaaactatctctaggtcctggtttaccctgttgctgccgtgatgttggctccctaattcctttgggcgacttagcgtatgttggctccaattcgtttgggctttgtatttccatgctgtttgactggatatttgatgggtctctttgtttgggtt

SEQ ID NO: 98138 - DNA, 403 bp, Zea mays
  Clone ID: MRT4577_2100C.1
acgggcaaaaaacttttgcttaaaacaacatttaaaggggccttttgcgacaaaaaaaacatccaaaacccccccctagagaggggttcccgacccccctacccaaacaagggttcccttgcaagaagcctcttcaacaaaaaaagagcctggggtgggatggcataccaaaacctgggggggaaaaaggaacccccccatatttgacttgccccggagacaagatggatttttaacaaaaacactaaaacttcctacccaagcccatccttttagttcccaccccccaattgcttgttatttttttggccttttttccccttccaaaccctttttctttttgcctccccataaacccaaccttcctttttttaaataacccgggggagctttggtttttttt

SEQ ID NO: 98139 - DNA, 1065 bp, Zea mays
  Clone ID: MRT4577_21010C.1
cggacgcgtgggcggacgcgtgggcggacgcgtgggcggcatacgtattttagatgaagcccatcaatgtatcgtggagctgcagagtcctgattactacccagaaattgttaaagaagctgtcaatcttgccctagataaaggcaccaattttgttgatcctcttgttaggctactggagcatctgtacacaaagaaaattttcaagactcaagacctggaatccggttgcttgttatacggtgctctgttggatgacattgggattgaccttcctaaagctccaacgcaatttggtgagattattgctcgcctgactttgttaggtgccttgagatttgaagttatggaggagattttaaagaaaatggaggataccatgtaccgcaaagcagtttttgatgctgtcaagaaaaccttggaagcaaacccatcgggccagacaatcttaggctcacatgctgctgtaatagacgcttgcaacagccttttggaataatcctcttagcagctttggccaaccaactttttcagatgctgtctcttgcgaaagacagtgtcgtgtattctctgtagcttagatgtccaaggaacgcagtaccaaagatgcgaggaacagccagttttgggctgtataattttgcgagatcagatgagtgttaatttattattattattattattattgtttggaccaggatggaaagaaagaagccatggattttacccttgggcgaccagcttattttgctggaggccccagatgaacaaggctaaatatatgatgttttcgtgtccacttaaaatgttgctagttcttttcctgtcgactacacacttttgtaacgttgtactatggttttggaccgttttatctgttacagtatattttgttatttaggagtcaaaactatctctaggtcctggtttaccctgttgctgccgtgatgttggctccctaattcctttgggcgacttagcgtatgttggctccaattcgtttgggctttgtatttccatgctgtttgactggatatttgatgggtctctttgtttgggtttgtc

SEQ ID NO: 98140 - DNA, 110 bp, Zea mays
  unsure (1)..(110): unsure at all n locations
  Clone ID: MRT4577_21011C.1
tcccgcctggttctcccagatccctcggtccaggtgacganctaagcaaccgtcagttccagctcagnaagttctttgctgggtgttgccgttggcaacttggcgatgga

SEQ ID NO: 98141 - DNA, 278 bp, Zea mays
  Clone ID: MRT4577_21012C.1
cttgttccaccaacaactttttttgttttttgccccaagacgcccccccaaatacagcccggtgggtattgtaaaaaataaaaagcaaatgctaaaccccccgccggggaggggtttagggggaaaatcctgtgatccaaacccaaccgggggggttaaagggccaatgggccggagctgaacacccacatgaaaacctttcgcccgggggggccaaaagggggaccccatctttttataaagacggccacaggggaagggaccgaatctcggggggg

SEQ ID NO: 98142 - DNA, 131 bp, Zea mays
  Clone ID: MRT4577_21013C.1
cggtttattggtcgtgaaagcaggctcgcgtacttgtgcgtagagttcggctcgagcgctgcgtgacagacacccagtgccaggaagggtgctgcttatccatgctggtccgactgatgatcgtcgtcggc

SEQ ID NO: 98143 - DNA, 222 bp, Zea mays
  Clone ID: MRT4577_21014C.1
gcgcccacgcgtccgaagaataagataagaccattttaagaggaaacaaacaaaaataagaaatagctaatgaggtcaaaggcgtaggtgctgaatagacattgatgatcttgcgtgcgtttagacacaaaggctgatatctacagtcgtttgaattgatttcattttgcttgagcctcattttaatacatttgaaatggcgatgctctaggatgaactcta

SEQ ID NO: 98144 - DNA, 706 bp, Zea mays
  Clone ID: MRT4577_21015C.1
ggtacccctcgaggtccggccggcaaacgcaccaccgcgtgcctccgtgattcccagcccaattaacccgaaacagaagagaagagctcgccacgccaccggtgggatcgccggacacctacgcgggcctggccttggaatccccgaaacgcggggcgtgggaaaccgaggaggaacatgtcgcgggtggcgtcgctgtcgccgtccttgtcgggcgatgaggtggaggtggaggaggaagaggaggacgagggcgtcgacggctaccgcaagggcggctaccacgccgtccgccccggggaccagttcgccgccggccgctacgtcgcccagcggaagctcggctggggcaacttctccaccgtctggctcgccttcgacgtccagtcacagagatacgtggccctgaagatccaaaagagtgcgcctgagtttgcgcaagctgctcttcatgaaatcgagttcctgtcagagatcaccaagaaggacccattgaactgcaaatgcattattcagctgatagatcacttcaagcacacggggcctaacggacagcatatctgcctcgtctttgagttactgggagatagcttgcttaagctggtacagtacaaccggtacaaaggcatcgggcttgatagggtgaggcaaatatgcaagtcgatcttggtaggtcttgactacttgcacaatgagcttggcatca

SEQ ID NO: 98145 - DNA, 473 bp, Zea mays
  Clone ID: MRT4577_21016C.1
gccgtagccgccccggcataagcatgtcagcctgcggctgccgctctccacgatctgagacctacatcttgaggcgaatgccctagccgccccgcggccccgcgcctcctccttgctgatcggcggcgtcgggggcatcttatgtcgcgtggagatggaggacacagcggaggccgtgaaggccgacgacagggggtccattctcatgtacagggtgcggtaggccaccgacgacgccgtcccaatctccgtcaccgacaagctcgacacctctgcgctcggtaacggcaacccgccgcacgtcggcttcttccgtatttacgccgagacatggtacgaagacatcctcaactaatcggccaataggggactgaagggttagccgggctctttacgttcattggccctccctacagggaaggcatagactgtctaagtgtccaactgctcaggcgacccagttcatgccattg

SEQ ID NO: 98146 - DNA, 883 bp, Zea mays
  Clone ID: MRT4577_21017C.1
gggtatctattgaacctgtacccctcgcaataaataacaaggaaacagtctccctacattttgtctcttgtgcttgcaccgccacgaaagggaagagaacaggtcttctacatcttcatgcccggatctgggatctgggatctgggacaataccgcttctcaacaatctgatcggcacatgaaaacgaccaaaaatatatagcatggaagccttagcgcatgtaagatcaagaactcaagatctattatgcacctttcaaaggaaaaaaatgtagcaggtaaaactcagtaatgtctgaaaccaggatgtttccaggtgttactaccagatcccgaccagttttgggtccacactttattggtttgggactagctacctggatgacagggtactcaaaaagtgcaatatatcgctcacattcctctaacaactacagtggagggtatttattgttggaacaaatagatgacaaatcacccactttttgaggtctaccaccaccctcctcgctgtccactttgtcttcaggaatcaggaggaagaatcgatcaatcacttgctctgtgcttgctccttctcatgggaattttggtttgtgttgctgcaagctcggcctgcaagctctaatcctgcagattgacgatgtctgttttgatggttggaagagggtagaatccttgatcgatttccaaatctgaagaggtctcaactctattataatcctaggagcttggacaatttggaaacaccggaattgctgtttcttatgaggcgtttctaaatttagctggagttctattgctcgctaaagagagctgctggaatggtctttggcaggggctaaagaattgcccaacttcttgccattgtgccggtgggcac

SEQ ID NO: 98147 - DNA, 468 bp, Zea mays
  Clone ID: MRT4577_21018C.1
tcgcgatctagaactccgccctttttttttttttttcagaacaacagtttaattactaaaaataaaaactacatgaaaagagcttaatcttgttacctagattcaactcttatcttatgaggctaaaaaattattagaggtaaataacaatactactaaactattaatattttgcttgattttattaagttaagtgacctttcttctaaatcaagttaagcaacatttcgtctaattactaactaaatcaattttacattttttagaaacacttagcaaacagtaataaaacaattttcaatttttacacaacccttctctcagtttaaataacttacatgaatatttttagaattttctgaggacttcaaatttgtatgcaactacgtgtactaccactctcttcggttcgcggagcaacacggcatcaaatccctgttcgtgcatgttcccctcttcttgacgatc

SEQ ID NO: 98148 - DNA, 366 bp, Zea mays
  Clone ID: MRT4577_21019C.1
gggaataaaaccacatatcattttaacttcaatcaagacacaacacaaatgccaattattacaaattcacatgaaacaacaattctgaaaacacactatagggaaaatcaaaacggggagttcgttgcctttttaaccaactccaactagcaaaattttaaacttgaagtcgatggaataaaaaaatgcatttctaccaatatgcaacgcataatcttttgtggccacaaattaaggcactaaggctcaattcgccatcatgaccttaacaaacacctccatagtgatctggccattaccatccacatcaaccttaccgatcatgtctttcacctgccaattagacaccttctcaccaacatttaa

SEQ ID NO: 98149 - DNA, 511 bp, Zea mays
  Clone ID: MRT4577_2101C.1
attgaaatggtggttaaagctatctcgaacagtctctctatcttactctttattttactctttatttcaaactatactctataaatagtatagttttaatataaaacaatgttttggacgtctatatacacgctattgctggagatggtagatcagatcgacgccacgccagtacaggcagcaggagctcaatgaaaggcagtcttgcggcggccggtactctcgcttgatgtgaagagaaagggacgtgctggtcccgagtccctaccgcccggtggtgggtgcctcgccttgcaagccaagctgcatggaaaagctgtgctgttgactgttgctcgctcaatcactagtggcagagccttgttcaagtccgatgacagcttttccatagcatcaggccatcagcatgtatgtgtaaagtattattaaggccgtcgggtccatgactattgcatttcttcacgtacaagtttcatttcatttaatgtcctgataaaaaaaaaaaaaaaaa

SEQ ID NO: 98150 - DNA, 431 bp, Zea mays
  Clone ID: MRT4577_21020C.1
gagggactaccactcaagggccgaccgcataaggaccacagcgtcgagtctggcgcggttcttatggatctagaagaatgtgccccgctctatgcttcggctgggatgggactccgcactcaccttctatgtggccaccaaaaccgggggacccttgggaaccatgaacaacccccacgatcaggcgaacggaaccaacgccggactggaaattgccataaggctggtacagcccatcaaggactagctgccgatgctatactacgctgacttctaccagatagctggagtcagagcagaataggctaccagagaacctgacgtacacttgcaccatggtaggcaggacacgtctgagcctgaatagtgaggcccccttcctgatgctacccaaagttatgataaacttaggcagggattatccacacata

SEQ ID NO: 98151 - DNA, 256 bp, Zea mays
  Clone ID: MRT4577_21021C.1
ccagccggggccctcctggcgccttcttggggtgttctggctgggaacccgacacgcaccagtgccctgccatgcctggtgccctcctggaccgcctgcacgtgccagcctcccacctgcttcctcgcccaaaccctggcccacacccgcatgcgcccggtgcagcctgccacgggccagtcggggggtgctgcgtcctgccagtgtccaccacagctctgcctgcccttcagcccagcacggtttaatcaaaatg

SEQ ID NO: 98152 - DNA, 697 bp, Zea mays
  Clone ID: MRT4577_21022C.1
ggcggcgcacggggcgaggcgggggttcagcgtccaggttcccgtccccgtcgagcggcaggggcccgggcccgtgctggtgccctgcccgcagggggacggcggcgtgcagggttttaggtggtatacaaggaggcttaggatcgatgaagatggcgacgtggctgatgagttcttggatgaaattatcccagaagactcggtcaacaacaacacaagcccagtcggaaggttccaagtgaaatataacacgaaaccgactccagcgctgaggaagcatgtcattgctgtcgacggtgacatccgccatagcttggaacaccaagggcaactgcggtgggtgtgagagtctgagcccatatgcaatcctgagctctgatccatcaatgcgcgctgggcagacgtgtggttgcgtgcgcacaggagcggagcgaatgacccaggttcccccatctttgaggtggacctagaggtagttcattgctgatgtgtgtatccatcattcttcgttcagtgtgttggtatgcctgatctcgaggcgattcagacccctctgtaccactactagtagctgtacattattgaagaccgaacgtttacagaagtgaatgagccaccgctggacatgttgaatgtgcttgccattgctaatggagccactgaaatactgaatccatgcatgggatgattttgattg

SEQ ID NO: 98153 - DNA, 303 bp, Zea mays
  Clone ID: MRT4577_21023C.1
ggccttggtgattctggttccatactctacaaaacagggcctattattggtcctggagggcatagcaatggggggagtccatataactcccaaattcaagatatggaccctgcggacaaatccgcatcaaataaaaaaccaaggttgctttatacatcagcagaactagccgctatggaggtgaacgcaatggagtgtcttaggcggttgcttaggagatctggtgaagcactctttctgcttcaacttatttgccagcataatgttgcccgcttggctcagacactgggcaatgatttacac

SEQ ID NO: 98154 - DNA, 327 bp, Zea mays
  unsure (1)..(327): unsure at all n locations
  Clone ID: MRT4577_21024C.1
acaggcctccaagnaaccatatactcccaagtctacccgtacgacaacttgagagctgaacttggtgacagaccattttagattattcatctgtttgatgacaaggcactttgatgaatttagctctatatctccttccatcagnagaaaagcaggngaaaacttgtttaccatggttgtttttattttgttgtgattgccttgttgtaaactaccgttgtgtgatttgctgtgaagcatgggtttgccctacaataatgcaaccagctccttatgctacggattcgagtattaacaatccatccggtgccagaatttcttttgttc

SEQ ID NO: 98155 - DNA, 939 bp, Zea mays
  Clone ID: MRT4577_21025C.1
tcgaggcggccggggccttcacgcggccaccggcttattcaagagcagcaaaaggggtttcggcatggatggatagcgctagctagacatcacacagcgagcgagcgagcgagagcggtgagcccggccaccagcggcggaggccgtcgtcgtcttactagccggcgcgccgacgctcgacttgggcatgaattgctagccgggtgagagattgctaggtagccagctaggtacggtgtggggagttgaatcggaggtctgccgccgggtaggatgaagaagctccactggctggtgcggttcctgttcgggccggtgccggtctacttctcggcgctggccatcctcatcgtgctcaccaacgcgcagtacttcgggctggtgggcgtcggcgtggcgccgcgcaccgcgaagctggcctcctcggcgcccgtggtcagcgtcatgaagtactgcgacatcttccgcggcgagtgggtgccggacgcggaggcgccctactacaaccacaagacgtgccacatgatccaggagcaccagaactgcctcaagtacggccgccccgacctgggcttcctcaagtggcggtggcggccctccggatgcgagctgccgcgcttcgacccgctgcagttcctgcagttcgcccgcgggaagtcgctggccttcgtcggggactcgctggcgcggaaccacatgcagtcgctgctctgccttctgtcccaggtggcgtatcccaaggacctgtcggcgaacccgtcggaccagaacaaggtgtaccactaccgggcgtacaacttcaccatcagcatgttctggtcgccgttcctggtgcgcgcccgggagcccgacacgacggccccgcgcacacgggccactggagcctctacctggacgagccgacgaccagtgggtggtccagatgccccgcttcgacta

SEQ ID NO: 98156 - DNA, 435 bp, Zea mays
  unsure (1)..(435): unsure at all n locations
  Clone ID: MRT4577_21026C.1
tactgttgcagcttggtaggatatgcctcgacattctcaaggacaaatggagccgagcacgtagattcgaacagttcttttgaggtctctatatttgtctatgtgtgtcagtatacatactttatgtttttgccaacaaaaacgttgttcttcttttttaacctaataaaccaaatgtacaaagggaagctgntctctttcatcttggcagcaccgaaatacgactttataaaccttgttagttactatgcctgttatatccatgaacatgcttgctattctgacactattctggctttcagtatacaggctctactgagtgcaccaaatccagatgaccctctctccgataacattgcaaagcactggaaatccaatgaggtagaagcttgtgaaacaaccaaggagtggactcgcctgtatgcgagcggtgca

SEQ ID NO: 98157 - DNA, 316 bp, Zea mays
  Clone ID: MRT4577_21029C.1
atggaatttattttttttcacttatttagatctttggtgggcaaacactcatttattttaataaacattggctctttaaacagaccaaaccgaggcaatctattaacaacagctcaaagcgcgaagtacaccttgagcttctcaaatccacttccgtatgtctagaacacaacagcagcagctaccacatcgcctcctatggcgacaaaacttatggcggaggcagatgcggctgtactctttttccaacaaacacgacggccatagtcaaaacataggcatcccccagagccatcccgttcccaaatcccccacc

SEQ ID NO: 98158 - DNA, 438 bp, Zea mays
  Clone ID: MRT4577_2102C.1
ggggaaaaaaaaaggaaaaaaacaaaacaggggggcccaaaaaaaaaagggggacaggagaggcaatcgggccaaccaaaagggggggagacccccggccggacaagggcccaaagacgggccccaaacaggggaagagggaaagcaaacggaaaaaccttggttttttttttttaacacacaccaaaaaaaacctatgggggggagccagcccggccccgcttattatgggccaaccccccccccaagccagaaagaaaaaaatcatatccaggggcgccgaacgaagggaacaaaagtggcagggggcccacttgcagttgccacccaaattggagccgggggggggctcgccggacccccccggggcctcaaagaactggggcgcgggctttttttccggggccaccccaaggaacacaggggcccgcgcggggg

SEQ ID NO: 98159 - DNA, 476 bp, Zea mays
  Clone ID: MRT4577_21030C.1
attttgtttcactgcaaatcaactagcgtctggcggggggactcataagaatcgcgctggaaatgacattattatcaaaaagctgacattaacttacgccatttgacgcatgaagatgcacttttcaaacgtcaatatactgccactttattttgactggactgttgagcaaattaaccacacacttggaacggggaggcaatttacatggagaaccatattgtctcttggatatctatgggtttgagcgtttcaatactaatggttttgagcaattttgttattaattatgccaaagagaggctgcagccagactttaaccgacaacttttaaactacaacaggagtgaattcttgtaagaccgtatttgattgtacccccatgggattcgtggcaacacctaatggtccttttttttttgaaaagaaccttttgggctattgtcattatttggacgaagaagttacttttccaa

SEQ ID NO: 98160 - DNA, 211 bp, Zea mays
  unsure (1)..(211): unsure at all n locations
  Clone ID: MRT4577_21031C.1
gnaattatgagtgnaacagggcacactgtacgagtcactaacctctcgagcngngtnnctgaaagtgatcttncatgngtcgtttgcgttcnctggncctantgagcntanagnaacttatncgancagaaggtacggtgcccactgcctatgngacatttcnagggaacgctttgncctttggnnactgcagatngctncagngggggct

SEQ ID NO: 98161 - DNA, 556 bp, Zea mays
  Clone ID: MRT4577_21032C.1
tatcagattcagatagagagagatatactatcatgaaggctggcaagaaggaagtggacggagcggcggcgtgcatactgctggatctgcagctcatggcacgtcctgcgacggacatggacgcccgctcgccgcatgtattcgtgccggatggctccctcgacacgacctccaagcgacgatgctgacgtacacgctgtgctacacgagatgagacatgcaaatacactccctgcttcaatcctgcttgctactgcagctttagtgatcgcctctgctacgatatatttactcctgatgcttgatgtgaggacaatccgccaaatcaccactcttacatgcatgcgccggccgacgacgacgactctgcctctcgtgagcttctggtcaagtgatgcatgtatcaaggcatccatgaatgctttacatatatgctccattaatctaaccgagtcatgtaaccagacagaacgaccggctggtccattaacaccttctgatgatcaaattcccgccaacacatatgttgcgatgtgtgctacaaaaagaactctag

SEQ ID NO: 98162 - DNA, 543 bp, Zea mays
  Clone ID: MRT4577_21033C.1
gggccttccgttcttttttatttatcgattttagttaaatataaatagtcggcgacaaatattcgaaaatggaagtagtgttacatatgtgcatcgtttcagaaattttaagattttctaactatacttttaaggaaggggaaacaacaccgaagtaattcttcctcgatgtaactaaggaaatgggactatatatatatgtattaatctgctgacaaattagtaaattaccatgaattaaatacacacttctatagttttttttaatgcataaaacatgttaaaatttatctcgagataattgcacctctagtttttgtatataccatatttacctactctctttctaaaatacaatgattacatctttacaagggcatatgtaatatgatttcttactaacatcaatatttgcaccgagtttatgaacatatatttatttctagaacatgagtacgacttttgtaactgtcgaattacgcgtccttccatatgatagaaaaggtggggcctgattttctataacatttttcttatgtacgt

SEQ ID NO: 98163 - DNA, 839 bp, Zea mays
  unsure (1)..(839): unsure at all n locations
  Clone ID: MRT4577_21034C.1
ccgggaaaaattccgtaaaaccattntttacctaaaattccatatttgtatgtaaatatttactttttccccttcttttagcaaaaatggcctttcggccactcgaggtgtggaaccgttgggccatccagatcctgctgctgctgagcctcggcatgcacgtcctcctcctacccctcgccggaatccgtcggcgtcgagcccctatgctgcttcgggttcctctgtggctggcgtaccacctggccgacaccgtcgggatctacgcgatcgggctcctgtccctgagcagcgcggtgcgcgaccaccggctgatgccgttctgggcgcccttcctcctcctgcaccgcggcggcccggacagcatcggcgcctacgcgttccacgacaaccagctctggctgcgccacctgcaggtcttcgtcgtcaaggtgctagcggtcacctacgtcctctacatacatctcccgaggccgccggccgctagaggcgacaccttccttgttctggccgccctcctgatgtgggccgtcggcgtcgccaagtacggggagaaggtggcggcgatcaggggcggcaacaagagcagcatccgtagctctctcacgaaggaaccgcccgccgccaggcaccaccacgtccaccactgggaccacggcctgccgagcaaggccgncgccgtcgacgacgaagaagcttacctgcgccaggcacatcacatgttccacatctnncaagcgcgccgccgtggattcctggctggagaaagaccccgagcacacaccctggagatgctcagggcgctcaggaagcaggacggcaggggcatgtggggcgtt

SEQ ID NO: 98164 - DNA, 628 bp, Zea mays
  Clone ID: MRT4577_21035C.1
ggccgcttttttttttttttttttctttttttttttttttttttttttttttttttttttttttttttttgggtttttttttttttttttttttttttttttttttttttttttgggaacaaaactttttttttttaatttcaaagggtcattcagggaatgggtcacactgaccctgccccccagggggaggcgggacccaatattacccaaacatcgccgctaaaggacccaactaggtagctagccagggggtatcccacagcccaaaattttttcagggggggacccccccggcagcagcgaaggggcatggggccgggtggtgcaggccccacaacgccgccaggtggtgggctatttgggccgccaaaagccccgggaccgggcccttttgggggtgctgctgcaggagggaccggaggaccaaccccaaaaacgcctggaaccggggctgggggtccacccgcctggggggggggaaaaactggtgccgaaacaacgggcactggggcgagcaatagggggtccccctcgggctgcactgatgcccaaggaacccgacccactggcccagaaacggggggctgccaacgccccaggttccctgcagctggcacgggcttgg

SEQ ID NO: 98165 - DNA, 413 bp, Zea mays
  Clone ID: MRT4577_21036C.1
gtctaattgtgcacgaaaaaaagaaaaaaacatggacacgggagggaaacacctccgtgaagtatccaaggcgtgtccgttttggatacgggatacgacctcagggtggagtatccgtactacataggttctaagtagattcatagatgcaatccagtttgttttcattcaaatgccctcccacctgcagtggtagtttatttttttgcaaatgtcctatccacctgcattaatagtttttctcttgcaaatatcgcacccacctgcagtagtttattttcttgcaaatgtttgaccaactcacaggttgccaaattgattaccaaattttggaagggttttgtgtgtctaatagggatcaaagctggttcttgtgatcttgtcatccaatataacagcttcttggaaaaata

SEQ ID NO: 98166 - DNA, 224 bp, Zea mays
  unsure (1)..(224): unsure at all n locations
  Clone ID: MRT4577_21037C.1
attggcagggtgcattaatccctcatgatgagttttacactagttatgggaagannaattgtacattagaggagcgatcacaaacagaattgttattaaatgataaaatgctgtaggtataaaggaagtattagacaaaagattcagggtcgtttaagggacaattgtaaatataaaaggtaaagatgggatgcaatgatatgaggagggagagaacaccggta

SEQ ID NO: 98167 - DNA, 568 bp, Zea mays
  Clone ID: MRT4577_21038C.1
ctcggagaacattccgattccaacgcaccattcttttttatcgctttcggccagcctctcagtcgaacgaaaaaactgcccacggctagctgccacgcgctttctcggagagatcgacaagctgcaccctcatatcattcatcgatggcgagccttgggctggtcctgcttgtcgccgtcgtcgtgtccgcggcgctcatgccaccgtccgccgtcgcgcagcagctgacgccggactactacgccagcacctgccccaacctcgaggccatcgtccggcgctccgtccagcagtccatggcgcagtcccagatcgccgcggtcgactcctacgcgtccaaccagggcgccttcttcaccgacttcgtggcggcgatcaccaagctcgggagaatcggggccaagacggcggctactggtgagatacgccgtgtctgcaacttcccaaactagcgagcgagtatctgagcttaattgattagccttactggccggccgttttcacgtcagaatatttaacagggtatactacatctacataaaattggaggcgggcgaattcttgggc

SEQ ID NO: 98168 - DNA, 1484 bp, Zea mays
  Clone ID: MRT4577_21039C.1
tccggggttccattccgattccaacgcaccattcttttttatcgctttcggccagcctctcggtcgaaccaaaaaactgcccacggctagctgccacgcgctttctcggagagatcgacaagctgcaccctcatatcattcatcgatggcgagccttgggctggtcctgcttgtcgccgtcgtcgtgtccgcggcgctcatgccaccgtccgccgtcgcgcagcagctgacgccggactactacgccagcacctgccccaacctcgaggccatcgtccggcgctccgtccagcagtccatggtgcagtcccagatcgccgcgcccgccgcgctcaggctcttcttccacgactgcgccgtcatgggctgcgacgcgtcgatcatgatcgtgaactcgaacggcgacgacgagtggcggaacaccgccaaccagtcgctcaagccggaagggttccaggccattctcagcgccaaggccgccgtggacagcatccagcagtgccagtacaaggtgtcgtgcgcggacatcatggccctcgtcgccagagaagccgtcttcctgagtggcgggccgtactaccaggtggagctcggccggttcgacggcagggtgtcgaccagggacagcgtccggctgccgggcgtcaacttcaccctggaccagctcaacgccttcttctccggcctcggcttctcccagaacgaaatggtcgccctcttaggcgcgcacaccctcggcgcggcggactgccctttcttccagtacaggatcggcgacccgagcatggacccgagcctcgcgtcccagctgcgcggcacctgcggctccaaccccagcggtggcttcgcgttcttcgacccctcgccggtgaggttcgacaacgccttctaccggaacctgcaaggaggcagggggctcctgggcaccgaccaggtgctgtacagcgatcagagatcacgcagcgcggtcgactcctacgcgtccaaccagggcgccttcttcaccgacttcgtggcggcgatcaccaagctcgggaggatcggggccaagacggcggctactggtgagatacgccgcgtctgcaacttcccaaactagcgagcgagtatctgagcttagtttattggcaacgactgctatgcatgcaagcagtccttctttataagcatgcaagcaaactatctgttccattagattacgatccaaccacagatataaccatgatttgttagaggagttttttataaagattattgagctggtggtgaaaaggtttaagtgttaaatgtgacctacggttagattacgatctaatgaaccagatggtttgcttgaacgcttgcaaaaaaagactgtttgcataaccgtcgttgcctttagtagccttactggccggccgttttcacgtcagaatatttaacagtgtacactacatctacacgtaattcagggcggcgactctgtacaatcaaagtttatatac

SEQ ID NO: 98169 - DNA, 219 bp, Zea mays
  Clone ID: MRT4577_2103C.1
atgtatggcgcgattcactgcgacgtggtacagcgctttagcatgtggcgcacagcggtcataattgaagtaaagcatactgaggttgaagctgaagatgctgctattgaggccaaagcaatagctgctagggccgcaaagaaagctgcagacgatgttatcttcaaaatttgtgaacaaatctatgatgagatgatgcagggatgcaatgaaaactga

SEQ ID NO: 98170 - DNA, 739 bp, Zea mays
  unsure (1)..(739): unsure at all n locations
  Clone ID: MRT4577_21040C.1
gagtccaactcgagagtcgagaccctctcccagcatcaacccgccccgcgctgccctcgtcccgatctccgacccaaatacccgatccaccatggccggaataaggcttacgcccgaggaacccgagatgcccgttggcacgccaccccgcccccagctcccacccttcgtcgccgcggaaggcggtggcgagctccggcaggccgtggtactggcccgaccgggtgctctacctgggcccgttggctggagcgcccgcgagttacctgacgggcgagttcccgagcgactacaggtgggacaccgcggcgttgtcgacggacccggagacattcgccgagaaccgggagctggaggcttccactccctgtggaccatgctggtagcgcctggggtgcgagttcccggagctgctcgtccgcatcggcgacaaggtcggagaggccgagtgaatcaaggtcgcgtggcagatcttcagcgaggatgggctggactacctcggaaacccgagcctgatccacgcgacagagcatcctcgccatctgggactgccaggtcgtgctcatgggcgccatcgaggggcagcgcgtcgacggcggaccgctcggagaggtcgtcgacccgctctaccccggtggcagcttcgacccgctcggtctcgccgacgaccctgaggacttcgcggagctcaagtgagagagctcaagaacgnccgcctcgccatgttctccatgttcgg

SEQ ID NO: 98171 - DNA, 573 bp, Zea mays
  Clone ID: MRT4577_21041C.1
caaacgcccaaaaaaaccgcccagacaccagagcgaaaaaacaaaagcaccgcggcaacgaaagaaaaaagcaaaaaaaaacacaatattgggtaataaaagtgacaaacgacacaacttgcctgtggcttgagattccagttcccaggatgatcttcaggtgactcgtgacctcactgctagtcgtagcaatacaaacaaacatggtataggcataattaacatcacaccaaacataagaacaactgcataatagtaatctacacttcgctaagagatcgtgggttcacgaaccactaaaatcagagttacaatgaaaaaattaagatttatggtagatctatgtgatttaaatattaaactatattataaattgattagtatacatcatatgagagaatattttataaatagttaactcaactttaacctaagtcattatttgattataaatcatcttttaggccaaagataaccataagatcagaatactatattaatattagaataagctaatgcaaaaaaaaaaaaaaaaaaaaaaaaaaaaaagtactctgcgttgttaccactgct

SEQ ID NO: 98172 - DNA, 284 bp, Zea mays
  Clone ID: MRT4577_21042C.1
ggaccagcttgcgacattgaaaatgggaacgacagagctccagtctgtttacaaaccatgctggaacagttttttaaacccattttgggcaggaatcgttttagcttaggaacattggaatacacttgtacagctacaagaaagacatgcttcttcaaaaaaaattgttgtaagtgtaaagggttgctgcaatggaaactattcaaatcacaagagggggcaaaagagtgacattgaaaaggagggccgggcctaaataaccggttgcaatattgggggggttt

SEQ ID NO: 98173 - DNA, 323 bp, Zea mays
  Clone ID: MRT4577_21043C.1
tcttgagcctctggtccgtgggcatggcgtcgtccatgctctccgctaccaccgtgccactccagcaggggggcggcctgtccgaggtcaccgggctcaggagctcggcggcgctgcccatgcggcggaatcgccacctccgacgaagttgcatgtccggcgtctcctacagggcccaccgtggccggcacgagcgctgggtagggcctggctaccgacggaggcgtagctgaaggtgcacatcaccgggttcggccggcatcgggggcaacttcctgcggagctggcgacggcgacggcgacgcctcggccccgtcgacggc

SEQ ID NO: 98174 - DNA, 263 bp, Zea mays
  Clone ID: MRT4577_21044C.1
gtaccctcgagctcggccgggtagtttcctgttctgggctgagtcgtctacctgtttcctacatttcgttgtagccttttaaattaaggggctaagaaattgaactaagagtttggtactgttttgtgggagtgtggcgatgtattcgctccaatatttgatatctatccgtgacacttgctataaactgtacttttctttgtgttaaaaaaaaaaaaaaaaaaaaaaaaaaaaaaaacaaaaaaaaaaaaaaaaaagcggcc

SEQ ID NO: 98175 - DNA, 271 bp, Zea mays
  Clone ID: MRT4577_21045C.1
acgctgaaggaggacattgctgacatgcaatacatttatcacacactctgaaagggggggtggtgatgaaaataaggcattaaaaaatattgataaaaagatgcgagaatacacatttgtcaatgaaaataacaatttgcttttgacacatcattctataagaaagatgctacataagcatacaattactctctgtatagaatagacactttgatgaaataatgtaattctatgtcatcatatatatcctactctttctaaattaatatct

SEQ ID NO: 98176 - DNA, 544 bp, Zea mays
  Clone ID: MRT4577_21046C.1
aaaaaaaaaccaaaggcccccgacccggggggtttttaactttaaaccctccccacaaaaaaggggggttttttttaaaagaaaaaaacctcccccggacctcccaaaaaccaaaaagggtttttaaaaaaattaaaaaaattaaaaaacatttgcccgccccctggtggaattaaaaaaaaaccccacggggggggaaaaaagccccttttgtttttttttttggaaaggccggctcgggtaaattttttaaaccatttggccaaaccctttatggggggtttggaaccctttttacgggccacgaaaaaaaagcccaaaccctccgggaaacccccccacccctcaaagttgcccaacaaaaaccaggggaaggggccccccccccccccccccaagtttattgggtttttaaacactaaaaaggggccctggaggaaaacaaaccttgggggggcattaaacccattttttacggggagagggttttccttgggggaaaaatccccgattcccttttaaaggatggaaaaaggggggttcc

SEQ ID NO: 98177 - DNA, 776 bp, Zea mays
  unsure (1)..(776): unsure at all n locations
  Clone ID: MRT4577_21047C.1
gtacgcctgcaggttccggtccggaattcccgggtcgacccacgcgtccgcctgggtctgcgttcatctctgtcttcttggattaatttcgagggggattttgcaatcttctttttacccctacttttttcttgggaagggaagtcccaccgcctccggaaggcctccgacacttctggtcgcacgggaaggtttttttgcctcttgggttcgtatctggacttgtactttgctcttggggatcttccgtgggggtccgctgtggagtgtgactgcatcatgaccctggaagagctggtggcgagcgacaacgcggttcagaagatgcaggcggtgactgccgcggtggagcagctgctggtggccgcgcagcgtcaggatcgcctcaccgtgggggtgtacgaggcggccaaactgatgaatgtgtgagtcagcacccccctttctcgggcgtgggtgggggcgcccctctgatgcacgcgcgctccaacatccctatagggctcggggctttgggggactttcccagcgctctcggttttggggagtggagggcgacatttctcagagaattttttttggggaggaggaaagagagtcgctgcagaaccctgacttcgcaagtttgaggttntgtgttttttgttttgacaaggcaaccccagtaactttggactatgtgcttcctccccaccgccatcagtatttgcatagtcggccaccccagcacccgtgcagtactgcggctggggggctgttcttattacactcctgag

SEQ ID NO: 98178 - DNA, 381 bp, Zea mays
  Clone ID: MRT4577_21048C.1
tgtcgatccaaagcttcctcccgatccctcttccttgtcgccgtcccatccatcctcctggtcgatcgacatcttactgcctggccctaatcaagatgccccctggaaggttggttggcacaaggacacgcacagaccttgatggtaagggactctttcgattattctctcagtaactacccccgtcgcgtcacccagcacagcataggctgccgctgccatcgtgccttgttgcacgctccttttccatccgcaacaaccaaccttgcatcgaaaggtgtaaatgacggcagcaatctccaatccgctttccctctaatctctaatctgctagcatcgacctccaatggaaatggtggcgctggtgctagagtgggctac

SEQ ID NO: 98179 - DNA, 839 bp, Zea mays
  Clone ID: MRT4577_21049C.1
gcgcacctgttcaagaacagctcgggctccaaggtcttgagctggagccagaggtttggcatcgcagttggcgtggccagggggctgtcttacttgcacgagaagtgccgggagtgcatcatacactgcgacatcaagccagagaacatcctccttgatgaggagatgggcgccaaggtcgcggacttcggcatggccaagcttgtcggccacgacttcagccgcgttctgaccaccatgcggggaacgatgggctatctggcgccagagtggctcgcgggcgcgccggtcaccgccaaggccgacgtgtacagcttcggcctgctcctgttcgagctcatctcgggacgccggaacaacggctcctcggaggcagggtccaactccgctgtgtacttcccggtgcacgccgccgtcaggctgcacgcgggggacgtggccgggctgctagacgacaagatcgccggggatgccaacgcgaaggagcttgagagggtctgcatggtcgcgtgctggtgcatccaggatgaagaaggcgaccggccgaccatggggctcgtcgtgcagcagctggaaggtgttgctgatgtcggcctgccaccgatcccgtcacggcttcacatgctggcgatgatgaataaatgtgccgtcggtggggaagcagaggttgaaccctgttcaaatagcggtagcaaaatagacacagaagtttgaaggtactacgcaggtccgataggtaattgtagtttcagcatgcgagtcccattgttcatatgcctgtttgccgtagctgctaaactgtgattcttcgcaaaaaaaaaaaaaaaaaatttgcggcc

SEQ ID NO: 98180 - DNA, 200 bp, Zea mays
  Clone ID: MRT4577_2104C.1
gttcatcataaaatcataaggggggagggggattattctttgacgtgtaccccaaagaccacaatgaaaggacgcaatagcccaagattaggcttggtgaacagtcccaaattcattttgtctaaaagaaaccatcaaagggtcccattgaaacggggagtatatatcttttgctgaccgggaggaaaagaagattttca

SEQ ID NO: 98181 - DNA, 684 bp, Zea mays
  Clone ID: MRT4577_21050C.1
cattgggtacctcgaggccggccgggaggcatctttcctctcaatggaccgaggcggcacccacattccgaatccctagcacacgcacgatggtgggataacaaaagtagccggcggggggtagctgccaggaggactatggggcggacctccacttccgtcctcccgccccgcgtaggagtcggacgcggcgagaaccccctccacaaggacgtccagtaccgcttctaccaccaccgcaaccaaggccgggtcaataccacccccctcgagcgcaaactcgctcgcgagggactcctgcgaactgccatcgagcgacgccagcgacctaaccatggtgacgccctccaggacgacctcggctccagggtcaccatggactccagcgaggagatcctcctcgaactacctcgcctcccaggaagcaaagatgaggagtcagctgcatgtggggatccgctgcctatggcaagtaagggaggtgctgttctcatggtttgcataacctgaggtgaagaagggccagcacagcatctcacatccgtggtagaacgacactggtatcaccgactgagactttcacggacaagtctccaacgtcagatgcccctcatgtaccaaaggtacctgctaaggtgacatatgatcctccaaccatgaaaggaagggctgatatgactgaag

SEQ ID NO: 98182 - DNA, 344 bp, Zea mays
  Clone ID: MRT4577_21051C.1
acgcccacagcggataaaaccctaattctcacttacatggtcgcttttgctcttatgctgcaaatggaatcctcgggagtcgtggtcaagcctggtacccctgtaaagggtgacccttgatttggctctgtgctccacctttcccagtctgctcttggggaatcgtataggagagattatcccttgatgtatgtgaaaattgatgatctgaaaccggccttgggaaccccctgtgttgacatgaactcacacatacaatttgatctcaatctccagaaaaagtttgagctgtcgctcacatcaaagactaccatcgttttctgcactgtcttccaggtttagct

SEQ ID NO: 98183 - DNA, 641 bp, Zea mays
  Clone ID: MRT4577_21052C.1
ggcgccatcgcttccgctccgttgctcgcctcaagcttccgtggccacctccaccatgggcccgaagaaagacaaggcccctcctccatcatgcaaaccgcgcaaacccgcacgcggcaatatgaagaagaagacactgcatgaaggtgaagctcaaggagaaggacatccacgctgtgctcttccatcaggccacctacgataagctgctctccgacgtgaccaagcacgagcagatcatcccatccatcactatctgagcgcctcaagactactcgcatccttggcacgtcatgggacatcaaggtactctgatggctcctgcggctcataatgcatggtctctgatcattctagccaggagatgatacaccaatgcaaccaacacatgaggcgtggtttgcgtcttgcgatcgttatcaggctagactacttgtatcgtctgctattatatcaagtttaatttcatcgtgcctcgtatcaatcttactgttgtgtgtgaatgatcaatatttttgagattattgaactattttaacatcatggtttctatagcatatatcaccatgtagccatcctacttctaatcttggacgaatgatatcaatcaatctctgctctgcaagttcatttgacaactt

SEQ ID NO: 98184 - DNA, 551 bp, Zea mays
  unsure (1)..(551): unsure at all n locations
  Clone ID: MRT4577_21053C.1
gtctattcatgttcttttgatgtgcaatacaggnaatgagaatctcttgtccttgagaacctcttgacttcagaatatttgcaatgccacagttatgagcctgggaagcctaactgggcagaggctaaccaattcattgctttcaccatgattcagacataacacctatcaccatcaacactacaccttgcttcttccatttactatagtcatttcaaaaacaatttggtacaccagcagcaatctgtagattcgaagcttgatttggttgcttttgaaggccctgcacgtcttgcactttgatgggacatgttgcttggaaacacaaggatataacattatgagagaacaaagtttaaatcttagttgaattgttcattaccaagttgagattgttggtgtcacttattactatgttgggtgtattgtgtttctgtgccgatttcaggataactgtccggacaggaactccttgcaccttctcactgtccccgtccccatggagaggagcgagaggagcaggagggcgaggaaggacacaagtggcgccc

SEQ ID NO: 98185 - DNA, 270 bp, Zea mays
  unsure (1)..(270): unsure at all n locations
  Clone ID: MRT4577_21054C.1
tgttgtggatatacacctggaagagttggtggtagcattttaatnacgtatggaatgtctgggatgcctagctaggtagttgatgcgaacaggtgcatatgaccactattaattattttgatgtgttcatgcttcaagaaaacatgcactcgtaatcggtttccattagtttaacatgtcacatgcacagacgcaaacannanccagcatttcttcttagtttgccattatcacatctgtantcatcatgcacatgcacattttggttat

SEQ ID NO: 98186 - DNA, 1616 bp, Zea mays
  Clone ID: MRT4577_21055C.1
cccacgcgtccggggtcctttccttcttccttggtttcatgctgacaactagggctgatcttcaggacggcctgttcttggttcggttcctgagagcgattgatagcgccagacggagtttcttctttaggagtcgtgcactatgggtaattgctggtttaaggggaatccatactttaacagggtttcttccaatgcaaccaaagcagaatctcccaaaattcagagcccctcggagagaactgaaaaggaggattgccagctaccatccaacccgaaagaggtggaggcgctgagaaaggatacagctcgcaatcctttgatagcgttcacatttgaggagctcaagagaatgacaaaaaatttcaggcaagattcgttactaggcggtggtggatttggcagagtctacaaaggttttatcaccaaggatctccgcgaagggttagagatagaagagcccacaagagttgccgttaaggtccatgatggtgacaatagcttccagggccatagggagtggctggctgaggttatatttcttggacagctctctcacccgaatttagtgaagttgatcggctattgttgtgaagatgaccacagggtccttgtttacgagttcatgcctctaggaagtgtggagtctcatttgttttcaagggttatggtgccacttacgtggtcgatcagaatgaaaattgcgctcggtgctgcgaaaggacttgcttttctgcatgaagctgagaagcccgtcatctatcgggacttcaagacatcaaatatattactagatgaggaatataatgcaaaactatctgactttgggcttgcaaaagatggaccagttggcgataagtcccatgtttcaactcgtattatgggtacctacggttatgctgcaccagagtacattatgacagggcatctaacggcgatgagcgatgtctacagctatggtgttgtactactggagctcctcacgggccggaagtcactggacaagtcccggccagtcagggagcagatgctggcagactgggcactcccgttgtggcacagaagaagaaggtgcttggtatagtagacccaaggcttgccgaggactacccggtgaaggcagtgcagaagacggcgatgctggcgtaccattgcctcagccgcaacccaaaggctaggccgctgatgcgcgacatcgtcgcgactttggagcctcttcaacagctggaggagacccctggagacagcgtggcagtgacacttgaagggacttgaagcagtgttccattcacagctcacatcacagtcacacacagctctggaaaacacgggtgccacgtacttaactatgcatgataagtagctagctagtgttcttgatatgcaggatgatttcttgattgtttaattaatccatggagacagtagctttgttcagcagaaagttggtgtgtatctcagtaggacggttcatgtgtgaactccctggcatttcgggtgcgggcaagtctgtgcgatctgtatttgcaatgcttgttgcccgcagaggaagcttgcttaccagtgtttgtaacctagtactgtgcagttcatgatctatgcatgttgaataatgt

SEQ ID NO: 98187 - DNA, 568 bp, Zea mays
  Clone ID: MRT4577_21056C.1
ctgttcttggtgttcttggtgagacacagcgccagacggagtttcttctataggagtcgtgcactatgggtaattgctggtttaaggggaatccatactttaacagggtttcttccaatgcaaccaaagcagaatctcccaaaattcagagcccctcggagagaactgaaaaggaggattgccagctaccatccaacccgaaagaggtggaggcgctgagaaaggatacagctcgcaatcctttgatagcgttcacatttgaggagctcaagagaatgacaaaaaatttcaggctgaggttatatttcttggacagctctctcacccgaatttagtgaagttgatcggctattgttgtgaagatgaccacagggtccttgtttacgagttcatgcctctaggaagtgtggagtctcatttgttttcaagggttatggtgccacttacgtggtcgatcagaatgaaaattgcgctcggtgctgcgaaaggacttgcttttctgcatgaagctgagaagcccgtcatctatcgggacttcaagacatcaaatatattactagatgaggaa

SEQ ID NO: 98188 - DNA, 180 bp, Zea mays
  Clone ID: MRT4577_21057C.1
ggtacctcgagccggcgggccggattctcaaagtagttccctgctctattcttagccagctacaataaggttcccgagaatggtaaccgttgacgtgtgatgacatagatgcacgctgaagggccatgctgccgctttatcagccacctatctacgacacaacaaagtacatgctctcac

SEQ ID NO: 98189 - DNA, 264 bp, Zea mays
  unsure (1)..(264): unsure at all n locations
  Clone ID: MRT4577_21058C.1
gctctggaaacacgggtgccacgtacttaactatgcatgataagtagctagctagtgttcttgatatgcaggatgatttcttgattgtttaattaatccatggagacagtagctttgttcagcagaaagttggtgtgtatctcagtaggacggttcatgtgtgaactccctggcatttcgggtgcgggcaagtctgtgcgatctgtatttgcnaaaaaaaaaaaaaaaaaaaaaaaaaaaaaaaaaaagggcgaacagatttaa

SEQ ID NO: 98190 - DNA, 967 bp, Zea mays
  Clone ID: MRT4577_21059C.1
cagccacggcgagcaagcgatgatgagcggcggcgcggtgaaggtgatcggcgccctggacagcccgttcagccaccgcgcggaggcggcgctgcgcctcaagggagtcccctacgagcttgtcctggagaaggacctgcgcgacaaaagcgagctgctgctgcggcacaaccccgtccacaagaaggtgcccgtgctccttcacggcggccgccgcgccgtctgcgagtcgctcgtcatcgtcgagtacgttgacgaggcattccgcggcccgccactcctccccgccgacccctccgcccgcgccgccgcccgcttctgggcccgcttcatcgacgacaagtgctcgacgcccttctggctggcgatgtggacggagggcgaggcgcagagggggttcgtgaaggagatcaaggagaacctgaagctgctggaggggcaggtgaagggcaagcggttcttcggcggcggcgacgtgggctacctcgacgtcgccgccagcgtgttcgcgcactggcttccggtctgcgaggaggtcgcgggcgtcagcctggtcacggccgaggagtacccggacctgtgccggtgggcgagggagtacacctcccacgacgccgtcaagcggtgcctgcctggcagggaggagctgctcgcccgtttcagcgccaggaaggactcgtttgtggccgcggcgaggtcaatggcgccggcgccggagaagtaatctatgggaattcaactgggtgcatggatagcataaatttaagtattgtgacaagtggtcaggactgctgtcacgtaccgtcgagcccgggagatatgtactctccggctcaggcaaatgccatctgtcctgatgcatgtgttttgttcctactttgtttgactgcttgttgaataaaaaaagatatccggttgtgttcaaaaaaaaaaaaaaaaaaaaaaaaaaaaaaaaaaaaaaaaaaaa

SEQ ID NO: 98191 - DNA, 368 bp, Zea mays
  Clone ID: MRT4577_2105C.1
actcgtggcaggacaccatgccccccaccaagatcactacccagcccaacaccaacttcacgaagcagggttataccaaggaccacatcgacacccccatctactaccccaacaccgccatgcaacagtacgtgcacacctacgggcagatcaacgaccacagccgtgacctcatccacacgcccttcgacacgctggccgacgacatccccgagctcatcagcaagtggtacaccaaggaccacaccaatctggacaacaacctggacaccggccagggcgatcgggcaactgatcacgctgcagatcaacaaaaagaactagaaggacgcggggaacccatccatgttcaacatgaaatcccccat

SEQ ID NO: 98192 - DNA, 2452 bp, Zea mays
  Clone ID: MRT4577_21060C.1
gccggccgggcttcgcacaagccaaaccactagaaatgcgtagaggaaaatataaataaatgcagaaaaaggagaaaccttccatacgcttcttaaatgcaatatttattccatccatataaggatgcatgtagaggaaacggactgccagcgctgagccgttccgtttcttttcaatcttggcgttttgtctccattcaatagggaaagggatgtttcgcttgaggctttcctttgtgcctgtgtcttctctgtagctttcaagagaataaaaatttggagcttctctcgcaccagcgtcctttccttcttccttggtttcatgctgacaactagggctgatcttcaggacggcctgttcttggttcggttcctgagagcgattgataggtctgagattatatattggtgtcgttgttgtttgttttttttcgtgctcatccgttgctaaataagcaaaccatcagcccatcagcttactacaagcactcttttgcctccttttctgttcttggtgttcttggtgagacacagcgccagacggagtttcttctttaggagtcgtgcactatgggtaattgctggtttaaggggaatccatactttaacagggtttcttccaatgcaaccaaagcagaatctcccaaaattcagagcccctcggagagaactgaaaaggaggattgccagctaccatccaacccgaaagaggtggaggcgctgagaaaggatacagctcgcaatcctttgatagcgttcacatttgaggagctcaagagaatgacaaaaaatttcaggcaagattcgttactaggcggtggtggatttggcagagtctacaaaggttttatcaccaaggatctccgcgaagggttagagatagaagagcctctgagagttgccgttaaggtccatgatggtgacaatagcttccagggccatagggagtggctggctgaggttatatttcttggacagctctctcacccgaatttagtgaagttgatcggctattgttgtgaagatgaccacagggtccttgtttacgagttcatgcctctaggaagtgtggagtctcatttgttttcaagggattcttatcctattcttgacagattgttgattggttttatatagtttcttgtcattttgtcataacactgactatggtatatccacacatggcattcatgcaaattctcatactcataactgaaaagaatcgattgaaaacgagcataaacctgtccctcactcctatcctgaaccagtataatttaacttgcttcgagtggcagcattataaatttctgcatgacctatgtggtcagttctgcattattatttgtccatttgagatccaccagtgtatattatcagatcagtggagtatttgttttcataatgcaggggttatggtgccacttacgtggtcgatcagaatgaaaattgcgctcggtgctgcgaaaggacttgcttttctgcatgaagctgagaagcccgtcatctatcgggacttcaagacatcaaatatattactagatgaggaatataatgcaaaactatctgactttgggcttgcaaaagatggaccagttggcgataagtcccatgtttcaactcgtattatgggtacctacggttatgctgcaccagagtacattatgacagggcatctaacggcgatgagtgatgtctacagctatggtgttgtactactggagctcctcacgggccggaagtcactggacaagtcccggccagtcagggagcagatgctggcagactgggcactcccattgttggcacagaagaagaaggtgcttggcatagtagacccaaggcttgccgaggactacccagtgaaggcagtgcagaagacggcgatgctggcgtaccattgcctcagccgcaacccaaaggctaggccgctgatgcgcgacatcgtcgcgactttggagcctcttcaacagctggaggagacccctggagacagcgtggcagtgacacttgaagggacttgaagcagtgttccattcacagctcacatcacagtcacacacagctctggaaaactcgggtgccacgtacttaactatgcatgataatagtagctagctagtgttcttgatatgcaggatgatttcttgattgtttaattaatccatggagacagtagctttgttcagcagaaagttagtgtgtatctcagtaggacggttcatgtgtgtgtatccaggtgttcagtcctggcgtagcgaactccctggcatttcggatgcgggcaagtctgtgcaatctgtatttgcaatgcttgttgcccgcagaggaagcttgcttaccagtgtttgtaacctagtattgtgcagttcatgatctatgcatgttgaataatgtgtgtgtgtatattatatataacaggtataacgggagcactgagcttccattagtt

SEQ ID NO: 98193 - DNA, 607 bp, Zea mays
  unsure (1)..(607): unsure at all n locations
  Clone ID: MRT4577_21061C.1
aattcggcacgaggcgcgaatggccgatgtgcttgacccggcctccgacgcgccgcgcgcgcgccgtccgccgccacctcccccggatagcccggaggaccgctcgccgcagctgcccccgcctccacccgggggccccccggcggcgagccggaagcggagtcgctctccgccgccgccgccgccgcctccgctgggttcgtcccggccccaaaggtatcgggaccaccgcagcggcggagggcggggcgggagcagccccagcccgccgccgtaccggggcagccgccgccactcgccgtccaggagatccccgtcgccgccattcaagcggtcgcggagggacgacgggtacgaccgccgcgggggccgcgggagcccgccgcgttacgggtacgatgataggaggcgaggttatgaccatgagcgaggtggcggcagaggtgggtatgaagatgacaggaaccagggcagatatctgaaccgtgctccaggagtccaagcaactagcactggtgatttaacacacataccatttttgaagcangcgttacatgtggccttgagtccttgacggataggaaggcgccagctcactggttattac

SEQ ID NO: 98194 - DNA, 278 bp, Zea mays
  Clone ID: MRT4577_21062C.1
gtttttctcttccttcgctaacgcctcccggctctcgtcagcctcccgccggccgtctccttaacaccgaacaccatgccttcaattaagttgcagagttctgatggagagatatttgaagttgatgtggaaattgccaaacaatctgtgactattaagaccatgttggaagatttgggaatggatgatgaaggagatgatgacccagttcctctaccaaatgtgaatgcagcaatattaaaaaaggtcattcagtggtgcacccaccacaaggatga

SEQ ID NO: 98195 - DNA, 627 bp, Zea mays
  Clone ID: MRT4577_21063C.1
atgattaccactagatttatagatgggctaagggatgatgtcaagagtgttgtaattatccaacgccccactaatcttgatactgcttatgctctcaccattttgcaggaggaggggttgatgcacacggggcgtcgagacatgagaagagctgatttcagtaactttgctcgcccatcactcaagtcagcaccaatgttgttgtcgttaccacctgctatcaaccacaaggtcgctagcaatattgaagaccgtcgagggaatgtgcagggtactagtaaaagtgatgatggcaaacttacggccctcaggtcatatcacagagcaaaagggttgtgtttaaaatgcggagaaaggtggggtcatacacatagatgttccaccagtgccccgttacatctggtcgaggagatgtgggaactgacaatcgaaggcgaggaagtggtggaagaaactgaaggtaacacagaaggaccagcacatgaaaatgttttggccatatctttggatgcattctgcgagtttccttggaagtcacctgctaggagttatgccaggaatccaacttttgacaacaccattacaagtgaaagtagcggatggaaggacactatggagtcgatatga

SEQ ID NO: 98196 - DNA, 400 bp, Zea mays
  Clone ID: MRT4577_21064C.1
gcgctaacggtaagcctaacggggggggaattcaagtgtgcacactttcgcaaccaccaaatttgaatcccattctatggtctcctgcacaacatataggagaaaactagaaatggcatgcaaaaatctgcaagcagcacgactatgacgcttaagctgcccttgtgcttctcccagttcttgatcactccaacaggcacacagttccctccaccggtcaccatgtccacatttccaaattcaaacttgaaaaagtccatgatcttgatagtctctaaaccgatcctgcaagagagagaatgaagctaacgacggtgctggcgaatgcactgacatatggcccaatggggctaccgggatcataggagtgctcacttgatgtgccatcggacggggggct

SEQ ID NO: 98197 - DNA, 382 bp, Zea mays
  Clone ID: MRT4577_21065C.1
aattgccgggacgacgagtacactagtcgggggccgccctttttttttttttttttttacaaagaagaacccgtctgcacttataaccacggcggaccacaaggaattttagccaagggctggggtaagcacacaactaagcaacaacgactatgtggcacaaatacaactgtacactggaaaggcaaaaaacaatggctaaacaaactaacgcaataacatgacgccagtgaatactacggaaagaaaaaccgcagccactacaaggcaaggacgtggatatgactaacttaaaagaagagtgtaacaggcagcttagatacgaactcgggcgataatgcgagtaacaactccggtagcaaagcaacggccagaccactta

SEQ ID NO: 98198 - DNA, 595 bp, Zea mays
  Clone ID: MRT4577_21066C.1
gccggccgggttcgggataactacccaaactatcacctacaccacactactactcagaatcttcgacccgcatcttacatgcgcagtagatgacatgggagcgagagaggcggtaagggaatgcctcaggggggggcctagctcctactggaaggtgctccgggactactgctggggatcaccaagctgacgatccacaagttggctaagaagagtggcgtgaagcgcatcatcctgtgtcatctacgaggagaccctgacggtgctcaagatgtttctcagagaaggcgatgcgcgacggcgtctactacatcgagcacgcgagccacaacaacgtgaccgtgatgtacggcatctacgcgctgaagcgcgcacgaccgcaccctctacggattccaagggtaggctaagcgcctcttcttatacctggactgcataggggacatgtctctttgcgatgctttctgcggcaccacttgctgcttagctgtgtaatccatctcttctgccatgaagttatgcagcgactgtcgctgattggatttctggtagtaacagtgattctgcctgaatgttgaataatacaagatcattc

SEQ ID NO: 98199 - DNA, 478 bp, Zea mays
  Clone ID: MRT4577_21067C.1
cctatgctgttcgttcgttttttttgtttcatttttttgaggggttccttaccatttatttattcctggaccaacccgggtcaaaccgggggtcaatttctgtcaatttgtattgggtgagaaatggacgatggagagccagctgcaatcagccgcagcatggggggaggggggaattcaagatgcatgcgatgattcttgtagcatatgtctagaggctttctgcgaaagtgatcctccaactgtaacacagcgtgctagcatgagccttcacgcttcagggcattctctgaatggcgccaaaggagttctcaatgggctatgtgttggcaacccagtaggtagaaagatcccacaagccaagagttatttgaaggcacacagaatgaaagaaaaatcaggtccaatcagatccgaaaccctacaatgtttcaccaccctgcattaggcgaaagggagctaccacattcacaagata

SEQ ID NO: 98200 - DNA, 349 bp, Zea mays
  Clone ID: MRT4577_21068C.1
cgggcggccttcctttttttttttttttttttttttttttttttttttattgtttttttttttaaaaaacggggtggggaccctttctaataatggcttgagaggcggacaacttccagcatccaaacgatacttcagaggggggaccggctaaaaaaaactatgctgtagtctattacaagggcgggaaaaaaaagacttgaaaagcctacaaataatattgagtgcaccggaacgttttcgaaggtcaggaaaatactactttccctgaccgttttagttgtatacattggcgacagcctagaaaatcctttggcttttaattggcagggaagaaactgccttgatt

SEQ ID NO: 98201 - DNA, 508 bp, Zea mays
  Clone ID: MRT4577_21069C.1
ctcgagtttttttttttttttttttttttttttttttttttttttttttttttttttttttttttttttttttttttttttttttttaaaaaaaccccaaattggggggatgttttggaaaaacaaatttttaacccttgggccatttggaaatttttccttgccggggaaaaaaagggccaggggattggactttttatgacccctgttcctaaaaaggtccacaaagcagggttttttattaaaccgggggacccccacatcccccagcggggggcattccggttgccaaggggggggcaccctaaaacaaccccctgggctgaagttggcctaaaaatgggacccctgaagggggggcaaaaaacttatcccccccccccctttggaaaaaaggccccaagggaaggttttccaccggtttctccaaaaagcccccccttaaagttaggcctatttttgggccccctttttgtaaaaaatttaaccagttgccccactccctttt

SEQ ID NO: 98202 - DNA, 309 bp, Zea mays
  unsure (1)..(309): unsure at all n locations
  Clone ID: MRT4577_2106C.1
gcgagctttcccaatcgccgctgccggcgcgcatggcatacgcagccagattgcctccacctccaaccatgggtaaagagaagtccgagagtcaacattgtggctattggccatgtcgactatgtcaagttcacgcgctttttctaccggtgccgcacatcctcctcaaggcgctcgaggtcagcaggaactgccaaatctggatcaccgtgctcatgtgcctgctcatactctccgagttcggcgtcaacgcgtgcggagcggactnaccgctgatggcaggcctcgttgacagcctggagctggacc

SEQ ID NO: 98203 - DNA, 390 bp, Zea mays
  unsure (1)..(390): unsure at all n locations
  Clone ID: MRT4577_21070C.1
ccggccgggagcaatcctagcgccagtannanncanccactttccccagccggctccgccgagcgtacaagcaggtggagacaggatgccgggtggacacgggctgagttcgcggacgcgcgacctcttctcgcgccccttccgcaagaagggctacatcccgctcaccatctacctccgaacctacaagatcggggattacgtctatgtcaaggtgaacggcgccgcccaccaggggatgccgcacaagttccaccacggacgcaccggttgcgtctggaacgtcatcaagcgcgccatcggcgcccaggccaccaagcaggccactgggcgccatcctccggcaccgcatccatgtccgcgtggagcacgtgcagccgccccgctgca

SEQ ID NO: 98204 - DNA, 261 bp, Zea mays
  Clone ID: MRT4577_21071C.1
ctgaaaatgacccttttaaggcggtcaagttgcctgaaagatgtgggggcgggcaaagattcttaaagttttgccaattggatggtcagggttcttaaatgacatgacctacacatgcctggtttattttgcctgacaaaacagcattccccacaccacaaaaattgcaatggtttttggaaaaagaattcttaagaatgtgattacctttcaagtaaacagggaaagtttctggttttggcaaaaaaaccaaactttttg

SEQ ID NO: 98205 - DNA, 792 bp, Zea mays
  unsure (1)..(792): unsure at all n locations
  Clone ID: MRT4577_21072C.1
cctgcaggttccggtccggaattcccgggtcgacccacgcgtccgcgggagctgcagtgtttgactcctcgcggtcgatacgatatccggatctaccctacctttctacacctgcatggcaagacctttgactacaagatcccctatactacagttctccgtctcttcctgctaccacacaaggatcagagacagatgttctttgtgatcagcttggatcctcccatcaagcagggccaaactcgttaccacttcctgatcctcctcttctccaaggatgaggacatctccttgactctcaacatgaatgaggaagaagtagaaaagcgctttgaggggcgactcaccaagaacatgtcaggatccctctatgaaatggtcagtcgggtcatgaaagcacttgtcaaccgtaaaatcacagtcccaggcaacttccaagggcactcaggggcccagtgtattacctgctcctataaggccagctcaggactcctgtacccactggagcggggcttcatctacgtgcataagccccctgtgcacatccgctttgatgagatctcttttgtcaactttgcccgtggcaccacgaccactcgttccttcgactttgagattgagaccaagcaaggcactcagtataccttcagcagcattgaaagggaggagtatggaaagcttttcgattntgtcaatgcgaaaaagctcaacatcaagaacagaggactgaaagagggcattaaacccagctatgacgattatgctgactctgatgaagacagcatgatgcct

SEQ ID NO: 98206 - DNA, 2272 bp, Zea mays
  Clone ID: MRT4577_21073C.1
gccggccgggttcgagcccggccggccgggaccgaacctctaaaccccgctctaataaatcttcctcccatctctctcgctcccaaccctcaagtccccaccaacccaaccctggtggcaccggccgcacacaccaaagcaagctagctagtcactattagagctatttggttgggagcagtttagctcagcaagatcgaactggcattgtcacacacatctcagctccttgggttttccctctccatgagcagcagccacacattgccgtcttccttgctgcacttgtagttacagctagatccatctccccgccacttgattttttggcaagaacaagagcaggagctactgagcaagaagtaagtgcgtacgtgcttagtgagttatacttatactagcttgcgggcgggcgggcgcggctgcgatggagctggtgactatcgtgacgctgacgctactggcgtactcggcggcgatgctggcgcgggtgctggtggcgcgcgcgcagcggcgtcggtgctacctgctggactacgtgtgctacaaggctacggacgaccggaagctgccgacggacctgtgcggcgagatcatccagcggaacaagctgctggggctggaggagtacaagttcctgctgaaggtgatcgtgaactcgggcatcggcgaggagacgtacggcccgcgcaacatgatcgagggcggggaggcccggccggaccgcctccgcgagggcatggaggagatggacgagaccttccacgccgtcctcgacgagctcttcgcccggtcggcggcgcccggcggcgtcggcatccgccccgccgacgtcgacgtgctcgtcgtcaacgtgtccatgttctcgccggcgccgtccctgtcggcgcgcgtcgtgcggcgctacggcctccgcgaggacgccaaggtgtacaacctcacgggcatgggctgcagcgccacgctcatcgcgctcgacctcgtcaacggctacttcaggacgcacgccgggcaggtggctctggtgatgacgtcggagtcgatcgcgcccaactggtacgcgggcaacaagcgcaccttcatgctgggcaactgcctgttccgctccggcggctgcgcctacttcctgaccaacgacccgcggctccggccgcacgccaagctccgtctccgccacgtggtgcgcacccacacgggcgcctccgacgaggcctacaactgcgcgctccagatggaggacgaggccggccgcccggggttccacctgggcaaggagctgccgcgcgccgcggtgcacgccttcgtgcacaacctccgcgtgctggcgccccgcgtgctgccgctcccggagctgctccgcctcgcctgcgccaccctctcggcgcgcctggcgcgcaagaagcggcagcgcggcgcgggccatggccatggccacctcaccatccgcatgaaggccggcgtcgaccacttctgcgtgcacacgggcggcgccgccgtcatcgacggcgtcggcaagggactcacgctcacggagcacgacctggagccctcccgcatgacgctgcaccgcttcggcaacacctccgccagcagcgtctggtacgtgctcgcctacatggaggccaagggccgcctgcgccagggcgaccgcgtcctcatgctcaccttcggcgccggattcaagtgcaacagctgcgtctggaccgtcgagaggcccgccaccgacgccggcgtctggaaggaccgcatccaccactacccgctcaaggacgtctccaacccattcatggacaagtacggattcgtcaaggacctcatagacttgtgatcgcccctagctgctctgctcaactcaaccccaccaacgcacatactttttatttacaccattattattgtattcattgtcatgttagtactactctgttctagtattcagcaactactagttaattaaggtgagcacaacaatgctagctgaggattcatagtagcttatgattcttttggtggtggcgggaagatccacttttacgtagcaacggatatggcttcgctctttgttctttcttcagttctgtcatttcgtgtctgtcaatttagatgccccatgtcgtccgtcagtcagtcagtcagtgtcgtcctgttcctatttactatatcaaatgattatggtgcaatcattttttaaactaagttatttattatttattgtgtaatggtaaatggtgctgtaataaagagcatactctcactccaaaaaaaaaagaaa

SEQ ID NO: 98207 - DNA, 708 bp, Zea mays
  Clone ID: MRT4577_21074C.1
agccctcccgcatgacgctgcaccgcttcggcaacacctccgccagcagcgtctggtacgtgctcgcctacatggaggccaagggccgcctgcgccagggcgaccgcgtcctcatgctcaccttcggcgccggattcaagtgcaacagctgcgtctggaccgtcgagaggcccgccaccgacgccggcgtctggaaggaccgcatccaccactacccgctcaaggacgtctccaacccattcatggacaagtacggattcgtcaaggacctcatagacttgtgatcgcccctagctgctcaactcaaccccacctgcaacgcacatactttttatttacaccattattattgtattcattgtcatgttagtactactctgttctagtattgagcaactactagttaattaaggtgagcacaacaatgctagctgaggattcatagtagcttatgattcttttggtggtggcgggaagatcgacttttacgtagcaacggatatggattcgctctttctttcttcagttctgtcatttcgtgtctgtcaatttagatgccccatgtcgtcagtcagtcagtcagtgtcgtcctgttcctatttactatatcaaatgatgattaaaatcaagttatttattgtgtaatggtaaatggtgctgtaataaagagcatactctcactccaaagaaaaatgttttatgaaaaaa

SEQ ID NO: 98208 - DNA, 1771 bp, Zea mays
  Clone ID: MRT4577_21075C.1
cgcttataagcagggctaagcattttttgaaaatcatattttgatacttcaccagaagtatctataaaaggtatggatttcaaggtaggcaatgcaccaaagggtttccaagcaactcctatgaacctaatgcacagtcactagacttaaagtgtgtaaaaataatttaaaaacacaatgaaggggttgcatgcaccggggcttgcctgagtaacactaggttagtgtttgttaggcaaccacttggcgagcatcctttggcttgacactcgttcagattatccatcttccggttcgtccatcagcatcatcctgcggattagcccacgcttggggtcgacttggctcttttcctccgcatcacgtgattaattattgtacctaaatgatttgcataatgcacatgaatgcatagtactgacttcactccacaactaaaatttctcgcataaaatgccgatagcgcctaccggcaaagccctaaaattactaagcaaataaattgcttaccagcattcaaacgtgactcaatacttgtgagaatattgataaattctggtttgggcttgtcgtcgaacatcatacagggtaagtccgatgcagcgctgcgtggtggagattgacagccgggtgccgatgagtgcgcggagtcttatagaaccatgatgctgaagatggcgtggtaacgagcgaacacgtggtcgagtgtcgacaaggtgtccaaatcctgtgaggcaatgacgtggtcgaagaagacaaccaatatcatgcgatatcgatggcagggcttccaccgacggtagttggctagagaatagtgtcccggcgagcacgaccagggaggtgagcaagggacatagagtattgatgtccctcgaccagagaccacagcacatagcacggcggatggacttagccgcggcgaggttgaccgacgagggaagcagagaacacgacgacgacggtcagccgatcgacgaccggagcatgacgcgatagactggggatgtcgtgacggccgttgaacgctgatggccaagcacacgaaacaacggcacccgcgagctgaggaacgacgacgaggtcgcggccggggtgagcgcaggatccgatggtctggagcgcagcagaatgcagagtaccatggtggacaagctccacagcgagctgagcgacagcacaggggcgagcagagccgagccaggggcgcgacggctaggtaccatgaccaagcaggggatggcggctgtcggaccggcgtgtcgagcttgaggaagacgacggaaccaccccgagcgagagactagagccgacggcgttgggcacatgagccagggagagcgcgcaccacgcgcggctagaggaggaccaactgacggtcgtcggtgcgagctccatggcgcagacagcgaggaactcggcgtactggagctggaacaggcgctggagcagggaccgagcagggaggtgggcggtcgagctcgaggaagcctccgagctgaggatccactccgaccagggaacggccgccatggcagggaccaggggcgcggccaggaacgggaagatccgggctggggcttgagggcgagctggaggagagccgcggccatggtctgggcgccaggcgggcggacagcgggagagctgggcggccaagcgccatcggaggtggagcgcggcttgggaagaagctgcgccacgatgggagctcctggacgcgcagccaggcgagcaggaagaccaccgtgtgtgcgcatataaaaagaac

SEQ ID NO: 98209 - DNA, 547 bp, Zea mays
  Clone ID: MRT4577_21076C.1
catagcaattccagaaaaaaaaaaaaaaaaaaaaaaaaaaaaaaaaaaaaaaaaaaaaaaaaaaaaaaaaaaaaaaaaaaaaaaaaaaaaaaagggaaaaaaaaaaaaaaaaaaaaaaaaaaaaaaaaaaaaaaaaaaaaaaaaaaaggggggggcctttttaggggttcaaattttccttcccgttccttccaatttattattttttttttggggccccttaatttaatttcattggccgggttttaaaaacttggggattggaaaacccttgggtttcccaaatttattcgctttgaaaaaattccctttttcgcaagttgggttaataccaaaagggcccgacccattcccttttccaaaaatttgcccaccttaattggcaattggccccccccttttaccggccttttaagcgggggggttgtggggtttccccccaggttaccctttacttttgccaggcccttaggcccggtttttttggtttttttcctttcttttttcgaaattttcccggtttttccccgtaagtttttaaatgggg

SEQ ID NO: 98210 - DNA, 386 bp, Zea mays
  Clone ID: MRT4577_21077C.1
ggaattccgacctacgacgtatcgcccacgccgttcgcccacgccgtccgaaaaatgaattgtgacacagaggagctctactaagggcaatggtaacatcaagcaatcgagttgcataagatggaatgtgcagatcgagccaaatcaaaaagaggaacatcattactggagctccaattcatactacccgtcgactatatatgaacgaagcctgcctagagctcaacatgaagctgaatcagcagcatgtcaaatcgaaatagatggaaacgacttcacacaacaatagagcacgctgtactggctacaaatatgtttctccaactgctcggagaaagacctactgaacaatactagatactaataccattgcctacacattacag

SEQ ID NO: 98211 - DNA, 222 bp, Zea mays
  Clone ID: MRT4577_21078C.1
aaatagtcatgacaagaaaagacaatttggttacgacacgggcatgctcaaatagtcatgacgagaggagacgcttcagcagagagctggtgtattgaaaaggtgctcgcttatgtgagcctgtcctgggatgtagccttaactcctgtcttaatatgtggccctgcttgtgcttctcataccatgtctgctctttcagactgaaataactattaataagag

SEQ ID NO: 98212 - DNA, 2711 bp, Zea mays
  unsure (1)..(2711): unsure at all n locations
  Clone ID: MRT4577_21079C.1
atgacatgcaattgctcagttttcacttgcgcagattcgcacgttgacagcagcaagtgaatcgtaaggaggcgtgaaaagacagtcacatgccatgtcactgccgctgaggtgttcattcagttcagcctcagtgccgcatgcatttcgctgtccccctcaccgaccccgaaactccacgtcacatgaaaggtcgctaatccgccaccacgtcacatgaaaggtcgctaatccgccacctgcctgttttaagtttaatacccccactaatccaccacctttttagcgtttttttttataaaatttattaagcgccgcgccgctgcgaaaacaagcagaacgaagagaaaaggagcagcggcaggcaacaggcaggcaggcaggagcacagcccagcccgcccggcaccaacacctgctcctgctgcttctgctcgccctcgccccctgctgcgttttgtgccatcgccatttgcgatttctttcgaggaaaaagggaagcaagcgcggaaatactccacagataccactcacctaccgctccgatccggccaccaagcgcaaccaatatctcgctccctttctctttctccgtctccctcctccgcacagcgcacgcgcaggaggccgctgccgggaggcccatctctatctctctctgctggatcctccggcctctcgcggtccggtggagcggagatccggccgctcgggcgtcggctgcttcctcgttctgccggagcaagaagctggcatcccgccatgtcgtcaccgatgccctcccctactctgaaggaccatctctccacgcctacaggccccttgcatctcaaagtatgggaggtcatatgcattgccttgggagctttcatggtgctcgtcttgtttgccaccgtgtggctcacgctcaggagcaagaagagggtaaggcggcgggcatccgcaaatatcccaatcacccaaatccctgcaatttccaaggaaatcaaggaggtgagggtggagcaagtgccagcgagcgactttgtggcgcatgatggcgtcctcctcacgttccaggacaagaccagcgaccgggattcagacaaggtcatggcccatttgggtgttagcaaatcgaagcgtggtgatgagagccattcggggtcatttcgctacatggacaaggatgcaggattccagtcagctgaggaaggtggctctggaacgtttcggcaggcttcagctaatgccatagttgctccttcacctctggttggcctgcccgagttttcataccttggttggggtcactggtttacgctgagggatctggagcttgctaccaatcgcttttcaaaggacaacattattggtgagggtggatacggtgtagtttatcgcgggcagctaatcaatggctcccctgttgctgtcaaaaagcttctcaataacctaggtcaagctgagaaggaatttagagtagaagttgaggctattggtcatgttcgacacaagaacttggtccggcttcttggttattgcgtggagggtacccaaaggatgcttgtctatgagtatgtgaacaatggaaacctagaacaatggcttcatggagctatgagtcaacatggctctcttacatgggaggcccgcataaagattcttcttgggactgctaaagcgcttgcttacttgcatgaggcgattgaacccaaagttgtgcaccgtgacatcaaatccagcaatattttgattgatgatgagttcgagtccaaagtatcagattttggtttagccaagcttcttggtgctggaaagagtcatgtcaccactagggttatgggtacctttgggtatgtggcaccagagtatgcaaatactggactcttgaacgaaaagagtgacatttacagctttggagtcgttctccttgaagcaattaccggaaggaatcctgttgactatggacgcccaccaaacgaggtgaatctagttgactggctaaaaatgatggttgccagcaggcggtcagaagaagtagtggatcccaccatagagacacgaccttcgacgagagctctaaagcgtgcacttttgacagctctgaggtgtgtggatccagattcagagaagagaccgaagatgggtcaagttgtccggatgctggaatcggatgatccaattcctcgaggggacagaagatctaagcaccaccgtggagggagcacagaaatggattcgcaaaaggacaacaactccgacacggagaagagtgataatgcagattcgaaacctagcaggaccagagcatcgtcgtccaaatgagcaaaccagcatttcacctattacagtcttcggcacattgcatggactgggggctacgtctattttacattgctgacgaattggtaactgaaagctctgaagaaagacctatttttcttttcttttcttttcttttctttttgttgcaacaatttatgatttatttgtagagaaggtattggtttttgtacttatcaatgtgtacgtaccggtgctcttgacaattgctgctgtaagtttttaacattgtgtacaggcgtagcatcatgaatactggcggaatgcccacaatatttgaaatgattatgtttaaatgaaagcctccttccctttgggccnnnnnnnnnnnnnnaaaaaaaaaaaaaaaaaaaaaaaaaaaaagtactctgcgttgttaccactgct

SEQ ID NO: 98213 - DNA, 859 bp, Zea mays
  Clone ID: MRT4577_2107C.1
atctcttttcctccccggtacccggaatattctgggggagaaaacggaaaaacagtctcaagcagctccccgactccctccatcagttttcggtctccccggttccgagctcatccactggtcctgcgacgtcgccgaccgccgctccggaacccccctccttcccgccggcaagcagccgctccgtctctcacagaatggcgctcaacaaggagtacacttacgcggacttggagaaggagccatactggccattcgagaagctgcggatctcgatcactggagctggtgggttcatagcctcccacattgcaaagcgcctcaagggcgaggggcactacatcatcgcctctgactggaagaagaacgaacacatggaagaggatatgttctgccatgagtttcaccttgctgatctgagggtcatggacaactgcctcaaggtaaccactggggttgaccatgttttcaatctcgcagctgatatgggagggatgggcttcatccagtccaaccattctgtcatcatgtacaacaacaccatgatcagctttaacatgcttgaggctggtagaatcaatggtgtcaagaggttcttttatgcctcgagtgcttgcatctaccctgaatttaagcagttggaaactgtagttagcttgaaggaggcagatgcttggcctgcagagcctcaagatgcctatggcttggagaaacttgctaccgaggaattgtgcaagcactacacaaaggacttcgacattgagtgccggattggtcgctttcacaatatatatggtccatatgggacagggaagggtgggaagggagaaggcaccgctgctttctgcagaaagctcta

SEQ ID NO: 98214 - DNA, 1348 bp, Zea mays
  Clone ID: MRT4577_21081C.1
cgctcttcgcccctccccacgccctgtgctgccttcctggcaacctgtctcagcaattaagctaattccttggcccggcaatggctagggttgagctcctcgcgctgctgtgcctcgcgggcaccctgggcgcgcaggccaccgccggcccccgccccgatgcgagggtcggcgtgtacgagctcaagctgggggatttctccgtcaaggtcaccaactggggcgcccgattaatgtccgtcgtccttcccgactgcaaagggaacttggctgatatcgtcctgggcagagataccgtcgctgaatactttaacgacacttcttactttggaccgataaccggccgcgtggctcagcggatatcgaggggccggttcgtcctcgacgggaaagtctaccacctgcaacgaaacgacggcaggaacacgattcacggtggtggcacagcgttcagcaaaagcgtctggacggtgaaggagtatgtcggcggcggcgactccccatacgtcaccctgtactaccacagcttcgacggagagcaaggtttccccgggaacctcgacgcgtacgtgacgtaccgggtgtcgggcccgtacacgctgggcgtgcacatgagcgcgacggcgctggacagggcgacgccggtgaacctgctgctgcacgcgtactggaacctgggcgggcagggcagcggggacgtcctgggccacgagctccggctgcacgcgtcgcggtacgccgtgctggacgaggagctcctgccttcgtcggggcgcgtcgcgcccgtcgccggcacgccgctggacttccggacgcccacgcccatcggcgcgcgcatccgccaggtcacgggcgggaaggtcgtcgggtacgacgccaactacgtcgtcgacggggaagggatgcggcccgtggcgcaggtccgggacggcgcgtccggcagggcggtggagctgtgggcgaaccaggccaccgtgcagctctacaccgggaactggctcaaccacacccaggggaagggcggcggggtgtacgaccagtacgccgggttcacgctggagaccatggggtacgtggacgcagtgaaccaccccgagttcccgtctcagaccctgttgcccggacaggagtacaagcacgacatggtcttcaagttctcgttctagcaggtgcatggtttggtttgatgtacaacgttcgttattggtgtttgagacgtacctaggcgaatactgagggtttgatcagctgccctgcaacaacagagtcagtggatttttttaaaacacacaaactatgcattaatcaatgacgcaacaaaaaaaaaaaaaaaatatttttcgtttcc

SEQ ID NO: 98215 - DNA, 868 bp, Zea mays
  unsure (1)..(868): unsure at all n locations
  Clone ID: MRT4577_21082C.1
cattgggtacctcgaggccggcccgaccgcgaccccggcatggtggagcgcctccacgccgaggtgcgcctcctccgctcgctcagccacgaccacatcatcggcttccacaaggtgtggctggaccgcgacgccggcgtcctcaacttcatcaccgaggtctgcacctccgggagcctccgcgagtaccgccaccgacaccgccacgtctccgtcaaggcgctcaagaagtgggcgcgccagatcctcgaggggctcaaccacctccacacccacgacccctgcatcatccaccgcgacctcaactgcagcaacgtcttcatcaatggcaacaacggccaggtaacatacatacgatacgatcgcctgttgcccggcccccacccaatcgacccgtccccctttctcgatacatcctttatttcgtcaattctagagattttcgtcgtgttccagccgatcctgttctattcattcaattcaatcaggacgcggtaaggccaaaattttagggttttctaattaatagcgaaataggacagattagatacatataaaatttgaattgggttcgtctggtgctggtcgttggcgctgcttgctggagatgtacaatacaacgacccgcgcattagggcactaggggattggtggcgggaccctattgtcgccctttttcgcttcttttctgtgacgagctgtacctctctctctctctccctccgcgtanagccagcgagacagagagatctcacgagctggatggggcctgagatatgctctttcctgtgcgggctgctcctttggaataaaggagaagcctcccaagggatgcacgctggcggggaggcgcgctttaattttgcta

SEQ ID NO: 98216 - DNA, 602 bp, Zea mays
  Clone ID: MRT4577_21083C.1
gaaaaaaaaaaaaaaaaaaaaaaaaaaaaaaaaaaaaaaaaaaaaaaaaaaaaaaaaaaaaaaaaaaaaaaaaaaaaaaaaaaaaaaaagaaatacaaaaataggggcgcccttttttatggaccggccgttgtttcacattgcttgcgtctgtgtaagccccttgtttcggcccaccttgatccgccttggctgggcccgcggtaattccccggctggccgtggtggaaaacccggcccttccccgatcgccctgcccttcggtccacaccccctgtttggcgcctggggccctccctgtgggggcccattaagccccctttccgtggtgttgccccgccgcatgacctttgggctcgccctttgtatcgggccctttacctgggccgtttccccttgccccctccagtggcccggttcctttcccggcgccttttcccccgggctttccctttttggccctgtttttggggtttacggggcgggttttccccgggggtttttttttggggggccccctttagggtcccatgcccctttttcccggacctttcgccctcggacattggcttcgccgtagggattagggcggggtccttccc

SEQ ID NO: 98217 - DNA, 433 bp, Zea mays
  Clone ID: MRT4577_21084C.1
gggaaaaagggggcttcctttggaaccatcaacgggaaaccgggccccgggcggacaggcccaaaacggggcttttttgcaaacaaaaaaaataggggggcggtttgggaacaagaaaggccttttcaaaacagagggcaaacccagttcggggtaaattttttcccagcttcacgggggacccttagtggccccaacaaaggggggggcttccccagggccccccccgggccccctgggggacccttttcgggaaagccagaggggccctttttttgcgccagggcattcgggaactttggaaacccatttttttttttttttagctttccacggtcaggggcggcttttaaagcccctgggggcggaggggacccaaacaagtctttgttgacaacagccgtcgcccaacgggttggagttccataatttt

SEQ ID NO: 98218 - DNA, 524 bp, Zea mays
  Clone ID: MRT4577_21085C.1
ctccatgagccctgaatttgagctgaaaagcccatataggtgccccattgctacccctctctgctctgaattcaccgaggacgcacataccgcctaatcgtacccgtctgacgacgagactggatgcggcacccatgtctatgctcccagagcccccttacggcacgcgtcactgatctggcggattaggacaggcactgccgtgatgacccatgaaggaacgacctccaatggccgtactaccaatgaaccttccgccagccggttacctgccctggattcctagaccctcaggctgtgccatcagtggagatcacggaatagtcaacggaggtcacctctccaagtcatgtggtcgatgctgctgcaaccgtgtgtaaccgcatgttatgtttgttacaccataggtcaaactttacaggggtatcttaacattcacacttgtacaccgaattgaattgtatatgtaagaaagaggatgtgacatgactgcactgtctgcgatatatatactccatagtctt

SEQ ID NO: 98219 - DNA, 631 bp, Zea mays
  unsure (1)..(631): unsure at all n locations
  Clone ID: MRT4577_21086C.1
cattgccagtcagccaccatgcagcactcctcgcccttcctctcgctcctcctcctcctcgccgcctcgccactccttgccgccgcagaaacgatctactgcttcggtggagtacacaacaccaacagcacctacggggccaacctccgccgcctggccgccgtcctgccgtccaagaccgcctcctcccaaggcctccgggcgtccggtgacgtggggtactggcctaaccgggtgcgagcctcctccagctgcgagcctcctagcgtcaactcctcgtcctgtgccgcctgcgtcgccgccgccttccgggaggcggagagcgcgtgcccgtacggcaggaaggtgctcgtcttggccggcaactgcactctccgactcggccttggccatttttctagatctctcggcttgggtngagggtgggttctctggcatctcttctcaagaagatggaagcactatctatttatatgccacaggcgacaacagttggtttcgcctcttgggtccgacgacactgatatttcaagcaattggatttgcatggcttttcttcatgcttctgcaagaatggcgtgataanagaagagcctccatgatgcattgtagctctcttccatctggagat

SEQ ID NO: 98220 - DNA, 439 bp, Zea mays
  Clone ID: MRT4577_21087C.1
gtaggcgcgtagctattgtgctgactgccgaccggacggctgacagttcaggcgcgcgatggccggcggtgtccacgaagtgcgcgccggcggcaggaggccacggtggcgtcggccgcggcgcgtgctgatgttcctgctgccgctccagggccacatcaacccgatgctgcatctggtcgacgcgctgcacgcgcgggggctcaccgtgaccgtgctccacgcgcgcctgaacgcgcccgaccccgctcgccacccggagttccggtatcgcgccggtgcccgacggagtccagtgccacgtcatcggcgcgcgggaacgtaatacacatcatcaaggccatgaccgcggccatagaggcggactgctcgtggcccgtcagggcattcctcagagtcgttagacgcgcacggcgagcagcccctgcctcgtgcattg

SEQ ID NO: 98221 - DNA, 348 bp, Zea mays
  Clone ID: MRT4577_21088C.1
ggaacctcaacctggccatggtcccgtgggcgcctcccaaggtcgatgcccatgccgcctccagctccacagcggcggtggtggaaatggtggacgctgatcaggacggcgacggcgcatccatggaggtcgagcacgacgtggagggccaggccacgccaccagctggcggtgcgctgcaggtggaggcgttcaaccaccattaccagcagcagcaccagtggccagcgcacactggttgcgtcgccgcagctacaagctccggtccggagctaccatgcaagccctgtcacgtggtcgtggtgatggctgcagggggagacataattgtagtagtagtgattagta

SEQ ID NO: 98222 - DNA, 1942 bp, Zea mays
  Clone ID: MRT4577_21089C.1
cgggcttgaaagatagagctgttaggtacatagcctgtggtgcaaacttcactgctgctatttgtcaatataaatgggtttctggagctgaccaatcacagtgctcctcatgtcgacaaccatttgggtttacacgaaagaggcgcaactgctataattgtggacttgtccattgtaattcctgcacctcgcggaaggctttgagagcatcactggctcctagtcctgggaaaccctaccgtgtttgtgattcatgtttcttgaagttgaataatgcctcagatcctaatgcagctaaccggaggaaagatcctgttccctatcaacctgttgaaagcaatggcgatgctaaagtaggaaaggctagtttgcctagcaatatggaaatgattcgaaatttggatatcaaagcagcatggcaagggaagaaaactgatgggctatcgtttctccggaatcctcaagttagttcgctcctgcagctgagtgatattgctttatctggtggcttgggcatgaacagatcagctccgagagcggtacacatatctgcagctcgctcggttactacttcaagagctgtttcccctttctctcgcaagcccagtccaccgcgttctactacaccagttccaacagcccatggtctttctttctcaaaaagtgctactgataatattgtgaaagcaaatgagctcttaaatcaggaagttgaaagactgcgtgcacaggttgataacctgagaaatcgctgtgagcttcaagaacttgagcttcaaaaatcagcaaaaaaagtactagaggccatgacactggttgccgaagaatctgcaaaatccaaagctgcaaaagaagttataaaatctttaaccgctcagctcaaggatatggctgagagattaccaccagaccacggggcctataatgtcaatgagacaaagcaatcacataatccgaatggcattgactcacatgctgctagctactctagcatgaatggaattcaccagacacggaatgagttgctcaatgcttcaattgcacatagtctgaactctggacgaccatcgtcgcattgcaatggaatctcaggacaacataaattactgggcaatgtgagtgaacacagtgactgcagcactcacagcctaagaattaccgctcctcacgattcagagcttcctagtcgaagagcacgcagcagcagtgatgagatgctgacagcaggcagtagagtggatgacaatctgaacgttgatgctgtgtcccttcaaagcggcgaggatggctacaagcctcgaggcacaataccattgccaagcaaccaagttcaggctgaatggatcgaacaatacgaacctggcgtatacataacactcacaacccttcgtgatggaacccgggatctgaagagggttcgcttcagccgaagacgttttggcgaacatcaggcggaaaattggtggaatgagaaccgggaaaaagtgtatgagcgatacaacgtgaagagctctgagcgtgtgtcgtcggcagcctcaacccggtctgcgtattaacttgaggagacctgtgtcatcttggaacttgtagaaaaactgcaaaggctgcagcatcactactcaacagcagcaaactattcaggtcatacatactgggagatgacaaaaggccagcggccattattattttgttggcactacacaatgctggatacaatgctaggctatgtatgttatcggtctgttttggtgtaatgcacatagtcacatagacgatgatacacgagaagtgaaaccatgttttaggtcagcaaacatcactaggcaaggtaggttaggttctttgactgcctatttttcctctttcctttccacggatatgcttacttatgtatgttgacatttatatatggtaaaagttatcatgcagcaatgtaaaagtt

SEQ ID NO: 98223 - DNA, 3285 bp, Zea mays
  Clone ID: MRT4577_2108C.1
atggatcctaaggggaagggaattgtgatcaacgacaaggagaaggagtccttcgtcaacgagccaagggatgacaagtccaatgactcgggctcgggccacaagcgaagagatgggaagaagaagaagacaagacgcatcaaggagatcgtctactacgacagcgataagtcctcttcttcccaaaaggacgacgaccacgacaaacaaaggaaaccggttaattctaacttttcttttgactactctcgtattccgcaaagttcaaattcacatttgctttctattccactcggcaagcccccacactttgatggggaggactacggattttggagccacaaaatgcgtagtcacctattctctctccatcctagcatatgggagattgtagatagtggaatgcactttaatagttcggatagtcctatattcattaatgagcaaatccataagaatgcacaagctactactgttcttctagcctcattgtgcagggatgaatataataaagtgagtggcttggataacgccaagcaaatctgggataccctcaagatctctcatgagggaaatgacgctaccttgctcaccaaaatggagttggtggagggcgagcttggacggttcgcgatgataaggggcgaggagccaactcagacatacaaccggctcaagacccttatcaacaaaataaggagctacggaagcacgcgatggacggaccacgacgtcgtccgactaatgctcaggtcctttaccgttcttgatcctcatttggtgaataatattcgtgagaatcccaggtacaccaaaatgtcgcccgaagaagtcctaggaaaattcgtcagcgggcgaatgatgatcaaggaggcaaggtatgtggacgacgccttgaatggaccgatcaacgagccgcaaccttttgctctcaaagccacagggaacaaggaggcgctacccagcaaggtggcgcaaattgaggcggccggtcttaatgaagaagaaatggccctcattatcaagagattcaagacggtgctaaagggtcgcaatggacagccgagcaagactaagaccaaggggaagcgatcatgcttcaaatgcggtaagcttggtcattttattgctaactgtcccgataatgatagtgaccaggaaaagggaaacaagagggaaaagaagaagcattacaagaaggcaaagggcgaggcgcatctaggcaaggagtgggactcggattgctcctcgtccgactccgacaatgaaggactcgccgccaccgccttcaacaaatcaaccctcttccccaacgagcgtcacacatgccttatggcaagggagaagaaggtatgtactcgcaactctacctatgcttcttcaagtgaggacgaatctagtgatgaggatgaagtagattattcatgtttgttcaagggcttagatagatctaagatagacaaaattaatgaattaattgatgccttgaatgaaaagaatatacttttagaaaagcaagaggatttgttgtatgaagagcatgataaatttgttgaggcacaaaaatcctatactttagaagttaaaagaaatgaaatgctttcttttgaactatctacttgtcatgaaaccatttctactttgaaaggtgtcaacaatgatttaaatgctaaattagaagtagcaaataaatccaattcttgtgtagaacatgttgaaatttgtactaggtgtaaagattttgacattgatgcttgtagtgaacacctagtttcaatttccaagcttaatgatgaactggctagtcttaatgctcaacttaagactagcaagaatgattttgataagctaaaatttgcaagggatgcctacacaattggcagacacccctcaattaaggatggacttggcttcaagagagaagctaagaacttaacaagccataaggctcccattctcgccaaggagaaagggaaggcccctatggctagtaatgtgcaaaagaaccatgcttttatgtactatgataggagatattctagaaatgcttttagaggtcatgatgtgtttgattcacatgcttatgactcttatgctatgactgcttctagttctcatgttatgcatggtagaaatatgtctaggagaaatgctattcatcatgtgcctagaaagaatgttattcatgctcctaggaaagtagtgaatgaaccttctacaatttattgtgctttgaatacttcatttgcaatttgtagaaaggatagaaaagtaattgctaggaagttaggggcaaaatgcaaaggtgataaaacttgcatttgggtccctaaggaaattgtgactaaccttgtaggacccaacaagagttgggtttatgcatccgggggttcaagctggattatcgacagcggatgcacaaaccatatgacgggggagaagaagatgttcacctcctacgtcaagaataaagattcccaagattcaattatattcggtgatgggaatcaaggcaaggataagtctgaaacacaagggaccctcaagcgcttcctcaggagagctcaaaatgagtttgagctcaaagtaaagaagataaggagcgacaacgggtccgagttcaagaaccttcaagtggaggagttccttgaagaggaagggatcaagcacgagttctccgctccctacacaccacagcaaaacggtgtggtagagaggaagaacaggatgctcatcgatatggcgaggacgatgctaggagagttcaagacccccgagagcttttggacggaagccgtgaacacggcttgccacaccatcaacagggtctaccttcatcgcctcctcaagaagacgtcgtatgagctactaaccggtaacaaacccaatgtatcttactttcgtgtatttgggagcaagtgctacattctagtgaagaagggtataaattctaagtttgctcccaaagctgtagaagggtttttgttaggttatgactcaaatacaaaggcatatagagtcttcaacaaatcatcgggtttggttgaagtctctagcgacgttgtatttgacgagactaatggctctccaagagagaaagttgttgatcttgatgatgtagatgaagaagatgttcctacggccgctatacgaaccatggcgattggagaagttcggccacaggaacaagataaacgagatcaaccttctccctcaaccgaagatgatgaaaaggtacctcaagtggaggcgcttgatcaaggggagcacaagatgatcaagtga

SEQ ID NO: 98224 - DNA, 783 bp, Zea mays
  Clone ID: MRT4577_21090C.1
ccccgacaaaagcccaaccaagaccagcccaaagaagaagcctcgggcccaatcggcccaagtcgccgctcccgggcctacccatcttcacggtggtcatcggcaacaccgagagccgccagattgctcgtgccccaatcaacttcagcgtcccaaacatcgtcgtcgaggtcatcagtgcgtatggcaacgtgggattcagcaccgggtacagctgcagcaggcaggtgacgcccggcggcggctgctgcaaggacgcgtgggttagcttgtccggcaagtggagtgtggaagggaagctcacgctcatggccatcatgttctatggcaggctcaagaagttcagcatgcttgggggtcaggcatggaggctgaactgaaccgaagtactatttcgaaactcgctcgatcaacctgatctccaggactccaagactagtacttgaattctcagtctattcagacggaaccggatcatatgacaaatccatctgcgaggagtttggctgcattctgtaaagtcggtaggggcaaggggttgttcatatcctttttatttaaaaataaaaaatagttttatatctcgacttttgaaaattatattttgaggtgtctgtcacccaggggacggcagggagttaaatgtaatttttaataaataggttctcgtcgctcactcactcattacgggcttattcggttattttcaatctatatggattgtacgagattgatacggattggaaaaaattttgatttactagggattatgaaactaccctc

SEQ ID NO: 98225 - DNA, 941 bp, Zea mays
  Clone ID: MRT4577_21091C.1
caagaagtgatctgccatgattctatcttatgcatgctaaacacagcattgtgtaccatttcggcgtcctcgtccccctgctcggggcctcccccctagttcgccgcccgatttggtgttcttccagaatggactgctggatccatggtttaagagcaagggcctagtgggtgcaaaccaggtgttggcctacttcgctgtatcaaaggttggagagccaccagtcgatgggattactgataccaacccagaggggttgactgctgcatttggcagctgggctcctgcagtggctgcccgcctgcaaaatggtggacttacctgcaaggtgcttgaaaaggaagcctttcagaagcagatgctagagaagttgatatggatttcagctttcatgcttgttggtgctcggcatccaggggctactgttggtgtggtggaaaagaattaccgatctgaggttgcgagcctgatagctgaattagcatcggctgcggctgcagaggagcagctcacattcgccgaaggcataggaggatcggctctgtgcttactccagggctgtggcacacttccctacagctgtgatagagttcaagtggaggaatggctggttttactccctcaccgagaaggcgcttgcagcaggaaagccagatccttgcccactacacacagcttggctcaaggagattagggtcatataaattgttttcatgtacatgagcttcgttagaagcatgaaacagttgcatgttgcctatatagagaaaattgcttttgccacgttaaccttttggtatcgtgtgtcaaaacaaaatgcctgaaaggtttgctgccatccgtgtcgaaaggtcgaatcaaactgggactacacatgtattaaaccacatcatagaggccatgtaagagtatctccatgtaacacctcgttcaatctcgga

SEQ ID NO: 98226 - DNA, 283 bp, Zea mays
  Clone ID: MRT4577_21092C.1
gggcggggaaacaaggatcccctacccaccggtttttggttcaacctttaaacccttgctggatacaaggggatcggaaagtacaagcgatgggcaagcctcccccttgtgtcaaaacaacatgccttttaaaggtggtttatttttcagggggaacaaacagggttaagtagccccggggttttattggcactattggtcgggttccctgggtaggaaacagggaccgggggaaattccttaatccattcatgcccctcactaattaaaaaaccccggcccc

SEQ ID NO: 98227 - DNA, 596 bp, Zea mays
  Clone ID: MRT4577_21093C.1
ccactgccggctgcacctgcacagcgcatcgaacccatcggcacccggcgcgacggccatcgtcccgtccgttcatccccatactgctcagacctgtcagttcgccacaacatctgctggtcccagcggcagcgcgatgaagcaaaagatcgtgatcaaggtgtgcatgccatgcgacaagtgccggtccaaggccatggggctggccgccaaagcaggggtgagcaagatggggatcaccggcgacggcagggaccagctggaggtggagggcgacgacatcgacaccgtctgcctcgtcaactgcctgcgcaagaaggtcggccgcgccgacatcgtcaaggtggaggaggtgaagcccgcggagaagaagccgcccgaggagaaggagaaggagaagcccgccgaggccgtgccgctgccctactgctggtaccccaatcccaattactactggtagctgcccattcagtttcagtcagccgccctacaagaaactgttctgctgtggcctcatcagtaattgtatttgtattcgcaactatttttcggcagaggatagtgttctagccgtttgcaactatcatgattaagct

SEQ ID NO: 98228 - DNA, 698 bp, Zea mays
  Clone ID: MRT4577_21094C.1
gacaagccagctgccggctgcacctgcacagcgcatcgaacccatcggcacccggcgcgacggccatcgtcccgtccgttcatccccatactgctcagacctgtcagttcgccacaacatctgctggtcccagcggcagcgcgatgaagcaaaagatcgtgatcaaggtgtgcatgccatgcgacaagtgccggtccaaggccatggggctggccgccaaagcaggggtgagcaagatggggatcaccggcgacggcagggaccagctggaggtggagggcgacgacatcgacaccgtctgcctcgtcaactgcctgcgcaagaaggtcggccgcgccgacatcgtcaaggtggaggaggtgaagcccgcggagaagaagccgcccgaggagaaggagaaggagaagcccgccgaggccgtgccgctgccctactgctggtaccccaatcccaattactaccactactaccactaccagtggtagctagcggtgctggtgaccagctaagttgttcatgcatgctagtttgtaacaaccgttttgaaggactggattggtagctgcccattcagtttcagtcagccgccctacaagaaactgttctgctgtggcctcatcagtaattgtatttgtattcgcaactatttttcggcagaggatagtgttctagccgtttgcaactatcatgattaagct

SEQ ID NO: 98229 - DNA, 142 bp, Zea mays
  Clone ID: MRT4577_21095C.1
gcgagaacaagcctcattcatggaacgctggtacagaaaactaagctatacatgtgtgcttgttgtggcagaggcggttgcccacctatcggtatatgacaaaagatggacgtaccttgtgcgacagcgagaacaaaagatt

SEQ ID NO: 98230 - DNA, 1709 bp, Zea mays
  Clone ID: MRT4577_21096C.1
cattgggaccctcgaggccgggccgggatccaagccagctgccggctgcacctgcacagcgcatcgaacccatcggcacccggcgcgacggccatcgtcccgtccgttcatcgtcccctactgctcagacctgttgtcgttcgccacaacatctgctggtcctaatccccagcggcagcgcgatgaagcaaaagatcgtgatcaaggtgtgcatgccatgcgacaagtgccggtccaaggccatggggctggccgccaaagcaggggcgaacaagatggggatcaccggcgacggcagggaccagctggaggtggagggcgacgacatcgacaccgtctgcctcgtcaactgcctgcgcaagaaggtcggccgcgccgacatcgtcaaggtggaggaggtgaagcccgcggagaagaagccgcccgaggagaaggagaaggagaagcccgccgaggccgtgccgctgccctactgctggtaccccaaccccaattactatcactactaccactaccagtggtagctaccggtgtgctggtgaccagctaagttgttcatgcttgttagtaacaaccgttttgaaggattggtagctgcccattcagtttcagtcagccgccctactagaaactgttgtgctgtggcctcatcagtaattgtattcgcaactatttttcggcagaagatagtgttctagccgtttgcaactatcatgattaaagctaaaacgtaaagaatgttcaacccctaaattatggcctcaccattgattttcagagaaccagtcagtgttttctggagtcggtagctgacttttgacgtgagagggctgcaggtgacaggaagaatgagtcagcaaaaggttcaaggtgttagcaattcgaggttttttttttttttttttttttttttttttttttttttttttttttttttttttgtagcgaaatttctttattacaaaaagttacaagttacattaagattatactatacaagatcagagtgattataaagtaaatccaaagtatttcactttgaagcatgtataattttcataagtttgaaatacatgctagcttaagtgatcatcctcataaagaagtatagaagagctactttaacctataagaacgccgagcccaccgacacttagcaccatcaacagcagcatagatctagtacctttgttgcagtgaagaggttctagatccctctacccaagcatcaattagatagctccatcctcttgatgagaagacactggagtagactcctctttagcaaccacttcatcttgaatcttcactctttcttttgggagctctgagatgattacggaacaagcttcatacaggccagcaactccctagaatgttctggctatggtggggtaaagaattgtgagcatggtcaccactggcacttgatgctctggacagagcagacttggtggctgtgggagagggtcatcactagcagggatacaagaaccccaacacccatgcagtggtatgcgagtagagctcgaggtagagaggagatttccactgctccctgccctttaaatacctgaaatgggataggtgttctctgaacttggcaaacatgcagaggggatgtgttttccagtgtgccagcacaacatggactcaaagacgtggctcccatgcactactatcatgcagattcacagcaccccggccgg

SEQ ID NO: 98231 - DNA, 909 bp, Zea mays
  Clone ID: MRT4577_21097C.1
ataacgagaagaagcaacagctgagctgcctcgagcagcggcaacaaacacgcgcggcacggcacggcagcctgactcggaagctacacgcaggccgctagcgagatgaagtcgagggtggcgctggagccgctggcggaggagcccgggtgcggggaggaggacgcggcgcggcggcgctcgggcctccacgcggcgctgcaccggtgggcgcgcctcctctccggtggcgtggcaggggacgacgcccgaccggccgccgacctgcgcgtgctcctctccgtgctcgcctgcccgctctcccccgtgcccctcctcccgcgccttccacgccacgtcgcgtcgtcggcgcagtacatcatcgagcagttcagggccacgacggggtgcgggaagctggaggacggcgccgtcaagagcatgtacgcgtccggccgggtgcgcctctccatgctgcaggagcccggcggtgggggaggcggcgggcgcggccacgaggggagcttcgtgctgtggcagctcgcgcccagcatgtggctcgtagagatgtccgtggccgggcagagcgtcgccgcgggcagcgacggccgcgtcgcctggcgccgcacgccctggctcggcgcccacgccgcgcgcggcggctcccgcccgctccgacgcgcgctccagggcctggaccctgtgacgatcgcgtccatcttctcgacggccgagcacgccggcgagaaggaggtggacggcgaggactgcttcgtgctgcgcctggacgtggggccgtcggtgctgtcgagctggagcgacggaaccgcggaggtgatccggcacgggctgacgggcttcttcagccagcgcagcgggctcctggcgcggctggaggactcgcagctgacccggatccagtcccccggc

SEQ ID NO: 98232 - DNA, 219 bp, Zea mays
  unsure (1)..(219): unsure at all n locations
  Clone ID: MRT4577_21098C.1
gtccgcattcccggtcacccccgtccgcccacgcgtccgccccatctgtgccctccagctctgaggaggtcttcagtccttcccttggagacgttgcttgaactgcatttctgacaccatggcacaggatatatatggtgccacatgaggaagagaagaacatgccttgtctgcacttgggggggggggggnnttnnttgctcggccttgtccctccct

SEQ ID NO: 98233 - DNA, 881 bp, Zea mays
  Clone ID: MRT4577_21099C.1
atggccgggattctccttttaacctacggtgcacgatttctaggcatactaagtgtgaaatggaattgggaagggggcgatggtggggagtgggtccttacattgaatccggcggtgtccagttctgttcacagcgcacggcgaatccacggctacggtgaggaatcgtggtcgccgcggtcgccggttttcccagccaacgcacccgaagcggcgaagaagctcaatagaagcccccccccccgaccgcgcaccaaccccaaaggagcaataccagtggtgtttccacacggcggcgcaccacaatctctccctcctccgattggtaagtttgcacgggagcggtggtcttcggttcctaggcgcggaaactatgcaagcgaggcggctaggtttacgccgcgaggattcgacacccttataggcgcgcaggagcccagtcacgcggtcttccatgccgaagagctcggcatccgttgcgcgaggaaaggggaaggtggtgggacccattttcaccatggagctgacaaatacatatcaaatattgcaaatatgctaaatttcaaagataacaatataaacaatgaggggatgcttcgtacagtccttgatgttggttgtggagttgttagtttcggaggataccttatttcttctaatgtgatagcaatgtctttggcaccaaacgacgtgcatcagaatcagattcagtttgcactcgaaagaggaatccctgcatatcttggtgttttgggaacaaaaaggcttccatacccgagtagatcatttgaactagcccattgttcacgttgtaggatcgactggcttcaaagagatgggattcttctgctcggactagacagatggaggttgggagcctg

SEQ ID NO: 98234 - DNA, 765 bp, Zea mays
  Clone ID: MRT4577_2109C.1
atggatcctaagggaaaggggatggtggtcaatgacaaggaaaaggagtccttcctcaacgagccaagggacgacaagcccactgactctggctcgagtcataagaagaaggacgggaagaagaagaggcgcatcaagaaaatcgtctactacgacagcgatgaatcttcttcttcaccaagagacgacaatgacgagaaaaagaaaccggtgagcggcttggacaacgccaagcaaatatgggacaccctcaaaatatcacatgaggcaaacgacgccaccatgatcaccaaaatggagttggtggaaggcgagctgggaaggttcgccatgatcaggggagaggagccaacacagacgtacaacacgctgaagaccctggtcaacaagattaggagctatgggagcacgagatggacggaccacgacgtcgtccgacttatgctcaggtcttttactgttattgaccctcatcttgtgaacctcatccatgaaaatcccaagtacacaaagatgacacccgaggagatactcggaaagtttgttagcgggcgcatgatggtgaaagaagctcgatatgtagacgacacgcttaatggtccattacccgtctacgagcctcaacacgttgctctcaaagcaacaagcagcagggaggcgctaccaagcaaggtggcacaagttgaggcggctgggctaaacgaagatgagatggctctcatcatcaagcgcttcaagaccgcattaaaaggacgtaaggagtag

SEQ ID NO: 98235 - DNA, 296 bp, Zea mays
  Clone ID: MRT4577_210C.1
ggaaaggaaaaatgagggcatattgggatatattggggcgggataaagaagattaacaaactgaaccagctgggggagaaacggtctctgcatagatatacatgtacctatgctccaccgcctgcgatgaacctccagatcaccaatcatgtgggtatgcagagcgaaacggatggcatccacaaagggacttccaaagaatatgtacacgagctcttcacagcccatagcttctgcgttccaggaatactaagtgacagcatatagaactgtttttccacagaaggatgagaagg

SEQ ID NO: 98236 - DNA, 346 bp, Zea mays
  Clone ID: MRT4577_21100C.1
ctaaccgcgagcaggaactttttgagttacacaaggacgaacagaggaaggagcataaacgcatatggctgtaagcacttaatcagtgggatgaaatggcaccgtgcaaaggaagactcggagaggctggtatggctacaaagaggctgaaggagatataacaagctatgaaatcttgcgaccgcgacagtgctgctggacacaatgagacatatgatggctataataatgatgagagatcgcttcaaaaacgggtggatcaacagccagaggttatggtgcatagtgcatgaagtccgaaaggagtacgaaaaacaagaccaacttgatgctgcgctggctgagg

SEQ ID NO: 98237 - DNA, 237 bp, Zea mays
  Clone ID: MRT4577_21101C.1
actgcctacaccacttgatagacagtgttgggcttccattcggcggggatgacgtgcgtcgtagacagtcttagtgcctccctcggtggtgagtcggacggtgatggaagcccaacactgcctacaccacttgatagaccttttttatttttttattcaataaaaggatataaggtgtgtgacaacaacacaaatattgtattatctatgtatctcctatgcaatcccaattttatc

SEQ ID NO: 98238 - DNA, 695 bp, Zea mays
  Clone ID: MRT4577_21102C.1
ggggggggggggggggggtccggccacgtgtggacgattcgcccaccaggattaccgtcctctgaggctaccggcactggagaccccggggcccggtaccgggggactcccaagattactaaccagggggtggggacgtgccaccccggcttgaaagccaccccatccttctagctacgacacgtcgacagaggaagaggatgatgacaataagaacaactcctaaggaggggttggagggagaggacaaaggaacttggagaacaacaacctgtttagttgcctatctcctgatcgtgtaggagagtctgaccagagacaacgtccgtctttccgtggtcacctggtaagaaaccagagccgtgttatggtaagtcgtctacacatctacgtcgtccgttcaggataacgtaacggaggtcctcaccgttgagtccttattatagtactccctggagaccattgtctgtacctacacgctgacctaggtggagttaaagacaatctcctcaacgctattggacgtattatacttctgtaagataaagaccctcgcatcatttttggaggagacgacctttgtctactagaaaggtactacgggattcgtattagtctttacgcagtacacataacactagacataggtacaagactaacgcggacaaacagccggaccagactacgacctatag

SEQ ID NO: 98239 - DNA, 289 bp, Zea mays
  Clone ID: MRT4577_21103C.1
gtgtaaataaactaccttatcagggctggattgaactgctggttaaagagcgagacatgcaagagactaaatgattaaagcaggttgaccacgcatgaattcaaattgctcgactgggagtaagaacctgatttgtggacctgtatatgcacgctatcacaagccggcccccaaaaaactcacatactgttgtacttcacagggccactgtctttgcaagacagccaatgttgtgcctcatgatctacacccatggacctctttggtgatggtctcgatagaaccgact

SEQ ID NO: 98240 - DNA, 2506 bp, Zea mays
  Clone ID: MRT4577_21104C.1
aggccggccgggccgggatacgactctcggcaacggatatctcggctctcgcatcgatgaagaacgtagcaaaatgcgatacctggtgtgaattgcagaatcccgcgaaccatcgagtttttgaacgcaagttgcgcccgaagccttctggcggagggcacgtctgcctgggcgccgcgccgggtaaacccgcgctcattcctttttctctcacctaattcccgtcctcgtgtgttcgcgttgctcgcttgggtttggatccgatcgagggctcggcccggcggatgctgtagaggaatggcggaggctgtcgcgtctgcgggcaggctcgccatggactcctcgacctccgtctcgcccggccaggtttctgctattctgggctttctgtgggttttcgcagcatgggcgtatgctgaggttctcttccataggaagaatactgcttctattaaaactagacattcagatgtcaatctagcagtgatggatgacagttcagtcaaagcagaagaccagacaatgttattggaggagggtggccaagcaatggctgcaaagccagcttatacttccctcacatcacaaatactcagacttatattcatggaccagttgcttcttctggagaatcgtttaacactgagggcattatctgaatttggagggtatctactttatttttacatatgtgatcgtacaaacttgcttggagagtctgccaagaattacagccgagatctgttccttttcctctactttcttcttatcattgtagcagctatgacttcctttaaggtccatcaagacaagtcatcattcacaggaaaatctgtactgtacttgaataggcatcaaactgaagaatggaagggttggatgcaggtgctattcttgatgtaccattacttcaatgctaaagaaatctacaatgcaatccgtgtgttcattgctgcatatgtctggatgactggatttggcaatttctcttattattatgtgaggaaggatttcagtcttggaagatttgctcagatgatgtggcgcctcaatttctttgttatattctgctgcattgtcctgaacaatgattatacactctattatatttgtcctatgcacacccttttcaccctcatggtttatggtgctcttggaattctaaacaaatacaacgagattagatcagtgatggcaatgaaatttgttgcttgcttcttggtagttgtcctggtttgggaagttccaggtgtctttgacatagtatggagcccattcacattccttctaggctataccgatccttctaaaccagatcttccccggttgcatgaatggcaattccgatctggactggatcgctacatttggattgtggggatgatatatgcatattaccatccaactgttgagaagtggttggagaagctggaagaaactgaaatgagaaccaaactctatattaagacctcaatagttacagtgtcaatgatggctggttatttgtggtatgaatacatttataagctggataagattacttacaacaagttgcatccatatacatcctggatccccataactgtctacatatgcctacgcaacttcactcaagaattcaggggcttctccctcacactatttgcctggcttggaaagattacactagaaacatacatatctcagttccatatctggctcagatcaagtgtgcccaatggccaaccaaaatggctattgtcaataatcccaaattatccactgctcaatttcatgctgactactgctatatatgttgcggtttcccataggctcttcgaattgactaataccttgaagatggtatttgtaccaaatcgtgacaacaagcgcctctcatacaattttgtggcaggaacagccatttctgctgccctgtactttgtatcgtttgttctaattggcattgcaggatactaggaagtctagttattgcctttttcttttgttcgattagttacaacaaggcctgatctactgatcaagtttaaggcgacacagcacgcagccacgcactgctaaggaacctgcaatttcattcactggagtcaggttttatctgggtttcacggtgaagaaaaaaaattgctgtgcaaggcagaagatctcgaagagtgtaacatatgagtgaaccccaatcccaagaggggatatgataaaaatatctctgtataggcgttggaacacataccgacttaccgagtggtcacgtcgtctgtgaaaatcagattttgttccttgttttgtttaaaagcttgaaatagacagaattgttcctttttttgtttaaagcgtaaaatagacataatggtctcatgcgtttccttctgttagattgaaggtctttgttcgattatttctgtaataatcgttccatgtggtggattggatgagattgaaagaaaatatgaaaaaaaaacttaggctctgttcgttttaaaaaaaaaaaaaaaaacccccccccccc

SEQ ID NO: 98241 - DNA, 843 bp, Zea mays
  unsure (1)..(843): unsure at all n locations
  Clone ID: MRT4577_21105C.1
cattgggacctcgagccggcctaaacccgcgctcattccttttctctcacctaattcccgtcctcgtgtgttcgcgttgctcgcttgggtttggatccgatcgagggctcggcccggcggatgctgtagaggaatggcggaggctgtcgcgtctgcgggcaggctcgccatggactcctcgacctccgtctcgcccggccaggtttctgctattctgggctttctgtgggtttttgcagcatgggcgtatgccgaggttctcttccataggaagaatactgcttctattaaaactgcttaagtcctgggatgcctattgcaatgcactcttgcatattgctttgacggagactgcagtatatatagtaacatcacaataatcatatataactataagagtcttatttgattgagttctggctcttcatctttgtcagtagacattcagatgtcaatctagcagtgatggatgacagttcagtcaaagcagaagaccagacaatgttattnggaggagggtggccaagcaatggctgcaaagccagcttatacttccctcacatcacaaatactcagacttatattcatggaccagttgcttcttctggagaaccgtttaacactgagggcaatatctgaatttggagggtatctactttatttttacatatgtgatcgtacaaacttgctttggagagtctgccaagaattacagncgagatctgttccttttcctctactnntctcntatcnatgtagcagctatgacttnccttttaaaggtcatcaagacagtcatcattcacaggaaaaatctgtactgtactttgatangcatcaact

SEQ ID NO: 98242 - DNA, 1017 bp, Zea mays
  Clone ID: MRT4577_21106C.1
gggaaaaaaaaaaaaaaaaaaaaaaaaaaaaaaaaaaactggatcgcaaaatttggatcgtggggatgatatatgcatattaccatccaactgttgagaagtggttggagaagctggaagaaactgaaatgagaaccaaactctatattaagacctcaatagttacagtgtcaatgatggctggttatttgtggtatgaatacatttataagctggataagattacttacaacaagttgcatccatatacatcctggatccccataactgtctacatatgtctacgcaacttcactcaagaattcaggggcttctccctcacactatttgcctggctgggaaagattacactagaaactgatattgtctcagttgctttgttaactcctgcagatcaagtgtgcccaatggccaaccaaaatggctattgtcaataatcccaaattatccactgctcaatttcatgctgactactgctatatatgttgcggtttcccataggctcttcgaattgactaataccttgaagatggtatttgtaccaaatcgtgacaacaagcgcctctcatacaattttgtggcaggaacagccatctctgctgccctgtactttgtatcgtttgttctaattggcattgcaggatactaggaagtctagttattgcctttttcttttgttcgattagttacaacaaggcctgatctactgatcaagtttaaggcgacacagcacgcagccacgcactgctaaggaacctgcaatttcattcactggagtcaggttttatctgggtttcacggtgaagaaaaaaaattgctgtgcaaggcagaagatctcgaagagtgtaacatatgagtgaaccccaatcccaagaggggatatgataaaaatatctctgtataggcgttggaacacataccgacttaccgagtggtcacgtcgtctgtgaaaatcagattttgttccttgttttgtttaaaagcttgaaatagacagaattgttcctttttttgtcc

SEQ ID NO: 98243 - DNA, 1821 bp, Zea mays
  Clone ID: MRT4577_21107C.1
gccggttctagaacatggagatcttttgctctcacgcaagacgcaacaaaaggtttggacagaacactctgcttccccgtccttcggtctagcccgagtggacgtaggaagggacgaggggtcttgacgccggcgagccatggcgggggctctcctctcctctccgcacactctcccgagccccacatctcagtccccgttccgccccaggagcaggggaccactccacgctggggcagcgcgtgttctgccaccgaggaggagggcctttgtgctcgcttcgtgctctcgcgagcctgccgctaggaaccgcgggttggaggtggagaggaggcgccttctcatgtccgggctcgtgtcttctttcgcaatcatgctccccatttcagaagcatatgctgtcatggagactgatgaagacgtgaagatgaacacacaaattgatgagatcaatgcatactcttttctttacccggtggaactgccagggaagaaatttaccttcaaatgggtagagtccagaaaaccagagcgatattcctctgcagcgccactatcgcctgatgcaaggcaacgtatcgtatcagagcgagttgacatgatacacaatgttgtcatctcggtctcgattgggccaccgaattcacgttttttgccttcaaaagacaagagctcgtgggatccaaaagatgttgctgattgcattttatctgatagatctaccatgaaggtgacaactggccagcgcatgacagagagttctgtccttgacgcacacgttgcagaggttgatggagaaccatactggtattatgagtatcttgttcggaaatcaccaacaaaatctgcaccagaaccaaatttgtttcggcacaatgtagcctgcactgctgagcgtgatgggtacctgtactcactgaatgcttccactcttagcaaacagtgggaatctatggggccctttctacaaaagaccgtggcatcctttcgccttctccccggtacagaaaactatgttcctccctacaaggatccttggagattttggtgaatggagattcttcttgtagtcatcatttttatcccttcagatgactttatagcttcaggttttagaccatatttttcacgtcagatgtttagtgagtgtctgtcctttcagcttgacagataaaattcagagacccagtttggtatcagattcacgacgggtactgccggtcagcgctggactacctggagctgcagccggacctgtcggcgctggtccgcggggcgcacacgttccggtgccccaacctggggctcaccagctgggtgcgcctgcccatccacgacgcggacttcgggtgggggcggcccgtgttcatgggccccggcggcatcgcctacgaggggctcgcgttcgtgctccccagcgccaaccgcgacggcagcctgtccgtggccatctcgctgcaggcggagcacatggagaagttccggaagctcatctacgacttctgatctccaactcctccccacaagtcatcagtaccagtacgcgcaacacaaagaagcaagagaccgttgggagtaggttgcagcaatattctttgatttcacacatagttcctgcacacttttccgttcctgcctgccccctttgggcagggcgcataccttttgtgccgaattatttacgagcccctgcaattgtatgatgaatgaacaatgaatgatacagattaataagattaattaacttaaaaaaaaaaaaaaaaaaaaaaaaaaaaaaaaaaaaaaaaaaaaaaaaaaaaaaaaaaaaaaagaaaaatcgag

SEQ ID NO: 98244 - DNA, 612 bp, Zea mays
  Clone ID: MRT4577_21108C.1
gccccctctcgagtttttttttttttttttttttttttttttttttttttttttttttttttttttgggggggggggcgggggctttcctctgtgtacgggggggggggggggccgaccacggaccacgacccagaacaaggcccgccaaccaccacacaaaaaagaaccgggcaaaaaaacacaaacaaaaaaaccccagaacccaaaacgccccccccccccccccgggaggacagaaccgggagaggggggaggaaccccccaaaccccgaaagggggggggccgggcgccggaaacggaaaagaacgcccaaggggggcagaggacgggggcgggcgggcggggggcaagggacggggccccgggggacgatatcggggaaaaacgggaacccgccgcgggcctcggcgaaaaaaagcccggggagggggttgaccccgccccccctcccaaaactggggagggggggcccggggaggcccaacgcggggacaggcggcaccctggggcgggggttggggccagactcgcccaaaccctgcccccccttgacgcgggcaaacaaaaaacagcctcgtggcgaatggcggaatcccgggggacccagga

SEQ ID NO: 98245 - DNA, 984 bp, Zea mays
  unsure (1)..(984): unsure at all n locations
  Clone ID: MRT4577_21109C.1
cgggcttgtaacccaggtgggggcattaaggtggtgcggatgtttggtaccgagtcttggtctgggcacatgctgttccttggttggcctgcccgttccaagttggtagtggccgttggaggcttgggcgaaggccctgggcttccttggacctagagtggcaggaacggcgtgaggctgtcttcacagaacagccagatcgttgctcgttactatcggtcggaggctgatcgggtatggcagcatggggtcgccgacggcccagactcatactactcagaccagcccgcgacaaaaagcgggtaggattttgtacccgtgcccgtacccatcgnggtatcgggcgggtatcggatacccgtggatataattacaatccacacanaataaaacacatgattcacaaacaaatgacaaggtagaaaaaacaaaacattaattaatctaattactgttacagaagcaaacaaaaaacaccatggttagctttgctcagtacctgtgctcggcttgatgcctactacagtactggctgggcaggacgccgcccgacccacctccttgagcttctcgctcagcttcacgttcctgctctgcatgatgaccgagccatcgacgagagaggaccgtcctaggccttctgcaccaacaaggagacacagcggcggcgggtggcgtccacggccaccggcaccgtggccagcacaacgcgccccaggaagcccaagcggtggagggacaaggaagcagcagcacaggagcgacgagcatggatgtggcgagttattgcgcggccgagggggagggggacattgcgattgccgccatggttgctttccttctttcttccttgatttcgacggaggatgccttatgcctactgcagtactggctggggcaggacgccagggatgcagggtcgctctcgctcgtcttgatgcctactgctggcggccgggtgggacttggtcacttcccggccgg

SEQ ID NO: 98246 - DNA, 4290 bp, Zea mays
  Clone ID: MRT4577_2110C.1
atggatcctaagggaatggggatggtggtcaacgacaagacaaaggagtccatcgtcaacgagccaagagatgataagccttcggactctggctcgagtcataagaagaaggacaggaagaagaagaggcgcatcaagaagatcgtctactacgacagcgacgagtcttcttcttccccaagagacgacaaatacgaagagaaaaagaaaacagtcaactcaaacttttcttttgattattctcgtattccattcaattctaatgctcatttactttcaattccactcgggaaacctctgcactttgatggagaagactacccattttggagtcacaaaatgcgtagtcacctattctctctccatccaagcattttggagattgttgaaaacggaatgctttttgatagtactgacaaccccgttttcattaatgagcaaatccataagaatgcacaagctacctctattttgttagcatccttgtgcagggacgagtacaataaggtgagcggcttggacaacgccaagcaaatctgggacaccctcaaaatctctcatgaggggaacgacgccaccatgatcaccaagatagagttggtggaaggtgaactagggaggttcgcaatgatcaggggagaggagccaacgcaaacgtacaattggctcaagaccctggtcaacaaaatcagaagctatggaagcacgagatggaccgatcacgacgtcgtccggcttatgctcaggttcttcactgttctcaatcctcatcttatgaattcaatttgtgagaatccctggtacacaaggattacgcccgaggaaatactcggaaagtttgtaagcgggcatatgatgatcaaggaggcaagatacgttgatgaggcattgaatggcccaatgcctatctatgagcctcaacccgttgctctcaaagcaacaagcagcagggaggcgctacctagcaaggtggcacaagtagaggcagccgggctaaacgaggatgaaatggccctcatcatcaagcgcttcaagacggcgctaaaaggtcgcaaggagcatcccaataagagcaagacgaagggaaagcgctcctgcttcaagtgtggtaagactggtcactttattgctaactgtcccgataatgatagtaaccagggacaagaaaagagcgggaagagggagaaaaagaaatcctacaagaaggcgaagggcgaggcgcaccttggcaaggagtgggattcggattgctcttcgtccaactccaacgacgaaggactcaccgcctcggccttcaacaagtcgtccctcttccccagcgagtgtcacacctgcctcatggcaaaggagaggaaggtaagcgctcgaaataactctatgtatgattcttctagcgatgaagagtctagtgatgatgaagtagactattctagcttgtttaaaggtctagatagagccaaggtagaaaagatcaatgaattgattgatgcattaaatgaaaagaataaactcctagaaaagcaagaggatttattgtatgaagaacatgataagtttattagagtacaaaaatctcttgttttggcaactaaaagaaatgagattctatcttctgaaatttctgcttgccatgaatctatttctagtttgaggagtgttaatgatgatttaattgctaagttagaggtagctaacaaatctagttcaagtgtagaacgtgttgtaatttgtaataggtgcaagaattttgatgttaatgcttgtaatgaacatcttgcatccattactaaactaaatggtgaagtggctagtcttaatgcccaacttaagactagcaaaaatgattttgacaaactaaaatttgcaagggatgcctacactgttggtagacacccctctattaaggatgggcttggctttcgaagggaagccaagaacttaacaagtcaaagggctcccatctccgctaaggagaaagggaaggcccctatgactagtaatgctcaaaggaatcatgcttttatctatagtgataggaaattttctagaaatgctcataggagttatgcttatgattcacatgctatgattgcttcaagttcttcttttgtgcatggtagaaataggcctaggaaaaatgttgttcatgtgcctaggaaagtttatgcatccgggggctcaagctggattatcgacagcggatgcacaaaccacatgacgggggagaagaagatgttcacctcctatgtcaagaataaggattcccaagatacaataatatttggagatgggaatcaaggcaaggtcaaaggcttaggcaagatagctatcactaatgagcactttatatctaatgtatttctagtagagtcgctaggatataatctgttgtctattagtcaattatgccacatgggttataattgtctatttacaaatgtagatgtgtctgtgtttagaaggagtgatggttcactagcttttaagggtgtactagatgacaaactctatttagtggatttttcgaaagaggaggccgatctagatgcatgcttaattgctaagactagcatgggctggctgtggcatcaccgtctagcacatgttgggatgaagaaccttcacagacttctaaagggagaacatgtgttaggtctaacaaatgtgtttttcgaaaaagatagaccttgtgcagcttgtcaagtaggcaaacaggtgggaagcgctcatcacagcaagaatgtgatgaccacatcaagacctttggagctacttcacatggacctcttcggacccgtcgcctacctcagcttagggggaagtaagtatgatcttgttgttgttgatgatttttcccacttcacttgggtattctttttgcaggataaatcagaaacccaagggaccctcaagcgctttctaaggcgagctcaaaacgaatttgagctcaaggtgaaaaagattagaagcgacaacaggtccgagttcaagaacctgcaagtggaggagttctttgaggaggaaggaattaagcacaagttctccgctccctacacaccacagcaaaatggtgtggtagagaggaagaacagaacacttatagacatggcaaggacgattcttggagaattcaagatgcccgagcgatttaggtcagaagctgtgaacacagcttgccacgccataaaccaggcctaccttcatcgcctcctcaagaagacgtcgtatgaactcctaaccggtaacaaacccaatgtttcatgttttcgtgtatttgggagtaaatgttacattctagtgaagaaaggtaggaattcaaaatttgctcccaaagctgtagaagggtttttgttaggttatgactcaaatacaaaggcgtatagagtcttcaacaaatcatcgggtttggttgaagtctctagcgacgttgtatttgatgaaactaatggctctccaagagagcaagttgatcttgataatatagatgaatacgatgttccaacggacgcaattcgcaccatggcgattggagatgtttctcaaaagaaggcgtgtgatcaagggggagcacaagaagatcaagttatggaggaagaagcaccacggccccctccaactcaagttcgagcgacgattcaaaggaatcatcccgtcgaccagatattgtgtgatataagcaagggagtaaccactcgctctagattagctaatttttgtgagcattactcttttgtctcttctattgagcctttcagggtagaagaggccttgctagatcccgactgggtgctggccatgcaggaagagctcaacaacttcaagcgaaacgaagtttggacactggtgccatgtcccaagcaaaacattgtgggaaccaagtgggtgttccgcaacaagcaagacgagcacggggtggtgacacgaaacaaggctcgacttgtggcaaaaggttatgcccaagtcacaggtttggatttcgaggagacttttgctcctgtggctaggctagagtcgattcgcattttgttagcctatgccgctcagcattctttcaggttgttccaaatggacgtgaagagcgcttttctcaacgggccaatcaaggaggaggtgtacgtggagcaacccctggctttgaggatgaacggtaccccgaccacgtgtgttgggaaagctgatccaactcttttcactaagacttgtgatggtgatctatttgtgtgccaaatttatgtcgatgacataatatttgcccttcctttcatcacatgcaaaagcatatggtcttga

SEQ ID NO: 98247 - DNA, 144 bp, Zea mays
  Clone ID: MRT4577_21110C.1
caagactgctgatcttggtggaaagtcatctacatgaccatgtacaaattccctctggggtgacatattacaatcgggtggcggtcttttcttcctattgttccgccatcccaatatcattttgtcgcatatggggacggactt

SEQ ID NO: 98248 - DNA, 357 bp, Zea mays
  Clone ID: MRT4577_21111C.1
tcgacgcacgcgtcacgccacccgcaaaacacactcgaacggagactgaaggagctccctatcatatgcctcgaccgggtctacggctgatgcataacttcattcatgccttcgatcatttcaactgctttctgcacttctatatctttcattataaggtgatcaactgattctgacgtcatgcggcattgaaccttgctgtcgcacaccttcagttagcctctaccactgctccatcgctcggaggcactttcttgtacttctttctgtgttgcaatgtgcatatgcacgagctgacctatcatacttactatttaatggttaactcgtaatgctcacttgtgattacagactgac

SEQ ID NO: 98249 - DNA, 356 bp, Zea mays
  unsure (1)..(356): unsure at all n locations
  Clone ID: MRT4577_21112C.1
tgtgaggatcggacaggtgctcgcgtggctatggacccattaaatggaccgcgtgtacactcactgncacctgatgctgacgctgactcctacccgggctgaagaagacgggcgagctggactctggccacgcggctgacctgaatgggcggggccaacatgatgggcaagcccggcaaggcggtgccgccgaacaagcactagctccaccgtatttaggagatgcactgtggactacgttgggggtcgggcgataccgaaagtggctgctcagctggagagggctctgacggctgtgatgctataggtgggggctgacattctggacgtggacgctggcaagaagggtctgttgt

SEQ ID NO: 98250 - DNA, 741 bp, Zea mays
  unsure (1)..(741): unsure at all n locations
  Clone ID: MRT4577_21113C.1
acggccgccagggacagaaattttgccggncgagcggccgcccgggcgggggcgcggggancacccaaaanannnggagcaggcagaaacacaccaagcgaagccaccgagcaacgacnnaacaacaangggctaccaagaaannagcccnccnggcgctncnggccctnnntgtgagcgcaacaaaggcgnncattattccagagggcgcacttttgggtagcttttanaccacagnnccncccaccagaaacgagaggggggggcgaacacccccccgcgcaagccnacaggcgacaacaagcgcnngcggcaagcgccnnacaacaaccaaaaaaccaaangcaacaacaanccngggcacancnaaccanacaaaccancgcaacgcaacagcaacaacagggccnaccagcacngagccaacnagagggggngaacccnggcgccnacccgcaacagcagcggcnggcanccaacccacgggcncnggcaaacgnagcggcggaccaacaacaacaacaagggcagcanggggcgggcagcgcncaaggaaccagccagggggaacccnggcgccngccgacaacagcaacaacgggggggaggnagccccgggggcggggggggagggaccnacangccnagagcaacagggggcgggggggggaagggaccggggggggggacaccgggaaggggggagaggggggggggaggggggggcgagggcgcggccgc

SEQ ID NO: 98251 - DNA, 326 bp, Zea mays
  Clone ID: MRT4577_21114C.1
gccggccggtccgggagaggacacagtggctcacgcactgtgctactgctcctccatttacccgtatgtgtctacctacctacctcatatatgagcccgcttaacgatatgagggtgattcaccaactcacaagctgccgcagagctgccgtatctccgccgcgcgggatcacctgcgaagcagcttatcctggatcctccctcttcatagcctgtgatttccgtgcaggccggagtcgattggaggaacaactacgggtgcgccgatctcgtcgcctgcggcgctaagacatctgtctctggggtggtcacgccggagaagaaac

SEQ ID NO: 98252 - DNA, 333 bp, Zea mays
  unsure (1)..(333): unsure at all n locations
  Clone ID: MRT4577_21115C.1
gccgggcccaccggccgggacccggngcgcgggggggggcggcagacncccaccaaggcgngcgacgngggggacgcagccaccaacnncaccgcgggccaggaggccgccccagccagcggccggaaagacaagcagccgccgggaaggcagaaggaagacacccccgaggcgngcgnccagcggggcccgacgaagaagacgaggaggaacgcgcangcgaaacgcaacaccggcgacacagagcgcggcgggggggccgagcgccagacnccggggagaccccccgggggggccaacgggggcggcgagagcccagggaggcgggccccc

SEQ ID NO: 98253 - DNA, 121 bp, Zea mays
  Clone ID: MRT4577_21116C.1
cccggattgaccgacgcgcccgattgtacctttattgctagaggtggactcctaggagtttgttgcggtggtggacgccgtccacacaatgctcacattaagcaaggttggaggattgtaa

SEQ ID NO: 98254 - DNA, 366 bp, Zea mays
  Clone ID: MRT4577_21117C.1
ggtcgacagcgacggcagaccactttttttttgagcgagaagaacacccagaggctgaacgcaagcaagaccacatgacgagcgaccacaaacctcaaggaagtgcagcccacctacgtgcgctcacagcgctataatcccagtataactggaccgggaacaaaaaggaaccacaagaccattgggaatgaacctacacaactgaagcagcgatatcagagaaagcttgcagccaacagatacaggctcggcgtgacttccaggagccaactaaaaggcaaagccaaaggtcacagatggcaggaaacacagaagcgaaaacgcaaacggagctcaagacgcaccgaagagaaatgcaaaaggcac

SEQ ID NO: 98255 - DNA, 588 bp, Zea mays
  Clone ID: MRT4577_21118C.1
ccggccggaacgagatcgttgtcatgtcattccatggacagcgtccgcgcacctggtggtcgagcggacgatgcatctagcatagacgactccatagcgtgtatgtggacttcctcctacgcacactaccactcgtcgtgaccgcaggaaattagccccgaaatccatgatgccttcggcacgagcacgaccagccctgcacaggagatggggcggagaggatagccctactacgtcgaggcggggtcgccggtgccagcgaacaacaacacaaaatgcttcatggaccggacggtctggaccacctacatcctcatgctcttcttcgcctggtttctcgtgctctccgtgtctgattgctccccgagagtagcctggaccgtcgacaacctcacgcacttcggcatcacttaccacttcttccattggaagaaatgaaccccttttgccgctgatgaccaaggcatctacagcacattgacatggtgggagcaaattgacaatggtcagcagtttactcggaacaggaagtttttaactgggtgacctgagatgctgtatctgattgcttcgtacttgaccgactac

SEQ ID NO: 98256 - DNA, 342 bp, Zea mays
  Clone ID: MRT4577_21119C.1
gggggggggaacattttaaggggttaacaggggaacattatttaaaaaaaaaattttttttattaaaggttaaaaaaaaaaaccaacggggggaaggggagtctgggaacaattttaaaacaatctaattttaaaaggcaaggcgttgaaaaagaagacaaaatttgaataatttttctaggggggtggccactaaaaaaacctttgcttggaaactccatcgggggacaaaatttaaaccttggcccccggaacccattcttccatgcagggtgtgggccattgacaacatttttaaaggaggggggtgtcctcaaagggagggggtggtccgcggggccc

SEQ ID NO: 98257 - DNA, 2031 bp, Zea mays
  Clone ID: MRT4577_2111C.1
atgacgggggagaagaagatgttcacctcctacgtcaagaacaaggattcccaggatacgattatctttggagatgggaaccaaggcaaggtcaagggcttgggcaagatagcatcaccaacgagcacttcatatcgaataaggagtgatggttcactagcttttaagggtgtactagacggcaaactctacttagttgatttttcgaaagaggaggccaatctagatgcatgcttaatagctaagactagtatgggctggttgtggcatcgctgtctagcacatgttgggatgaagaaccttcataaacttctaaagggagaacatatgttaggactaaccaatgtttgtttcgagaaagataggccttgtgcagcatgtcaagcagggaaacatgtgggaaacactcatcatagcaagaatgtgatgacaacatcaagaccactagagcttcttcacatggacctcttcggacctgttgcctacctaagcatcaggggaagtaagtatggtcttgtaattgttgatgatttttcccgcttcacttgggtgttctttttgcaggataaattagaaacccaagggaccctaaagctcttcctaaggagggctcaaaacaaatttgagctcaaggtggaaaagataagaaacgacaatgggtccgagttcaagaatctgcaagtggaggagtttcttgaggaggaaggcatcaaacacgagttctccgctccctacacaccacagcaaaacggtgtggtagagaggaagaacatgacgcttatcgacatggcgagaacgatgcttggagaattcaagacgcccgagcggttttggtcggaagctgtgaacacagcttgccacgccataaaccagctctacctacatcaccttctcaagaagacctcgtatgaacttcttaccggtaacaaacccaacgtctcttactttcgtgtttttgggagcaaatgttacattctagtgaagaaagtctctagcgacgttgtatttgatgagactaatgtctctccaagagagcaagttgatcttgatgacatagatgaagatgatgttccgacggccacaatgcgcacgatggcgataggtgatgtgcgaccacaggaacaacaagagcaagatcaaccatcttcctccacaatggtgcatcctccaactgaagacggtgaacaggtacctcaagaagagggacaggatcaagggggagcacaggaggaacaagtgatggaagaagaagcaccatgggtccctccaactcaagtccgagcgacgatccaaagaaatcaccctgtcgatcagattctgggtgacataagaaaggtagaagaggccttgcaggatccggattgggtgttggccatgcaggaagagctcaacaacttcaagagaaatgaagtttggagcctggtgccacgtcccaagcaaaatgttgtgggaaccaagtgggtgttccgcaacaagcaagacgagcacggggtggtgacaagaaacaatgctcgacttgtggaaaaaggttatgcccaagtcgcaggtttggatttcgaggagacttttgctcctgtggctaggctagagtctattcgaatattattagcctatgccgctcaccactctttcaggttgtttcaaatggatgtgaagagcgctttcctcaacgggccaatcaaggaggaggtgtatgtggaacaaccccctagctttgaggatgacaggtaccccgaccatgtgttcaagctctctaaggcgctctatggacttaagcaagccccaagagcatggtatgaatgccttagagatttattaattgctaacacttttaaggttgggaaagtcgatcccactatttttaccaagacttgtgatggtcatctttttgtgtgccaaatttatgtcgatgacataatatttggttctactcaccaaaagtcttgtgagaagtttagcagggtgataactcaaaagtttgagatgtcaatgatgggtgagttgaactacttccttggtgtaacaccctaa

SEQ ID NO: 98258 - DNA, 1308 bp, Zea mays
  Clone ID: MRT4577_21120C.1
cattgggtacctcgagtccggccggggtgaggcagcctgctagctgagaggatcggatcgcatggaacttgccgggacatggaggaaggtgatgccttacatggccatggtgtttcttcagttcggcttcgccggaatgttcctcatctccgtcgcgtccctgcggcagggaatgagccactatgtccttgttgtctaccggaacgtagtggcagccattgtcatggctccattcgcgctatggtttgagaggaaaacaaggcctaaaatgagcctaccggtgttcatcaagatccttgctttgggattactcgaacccgtgcttgaccaaaacttcatctacatgggagtgaatagcacatcagcaagcttctcctctgcgttaaccaacatattgccagctctaacttttgtaaatgccatcatactcaggatggagaggatagtgattaaggagcgacgaagccaggctaagattgcaggcacagccataacagtctgtggtgccttgcttatgatacttttcaagggccccatcatcaacttcccatggagcaagcacgccagccacgccgtatctgacagcggcgtccacaacagcggacactggctcatgggcacgttcatgatcctgttaagctgcttctgctggtctgccttcttcatactccagtcatatacgttgaggagttacccatctgagctctctttaaccactctgatatgcgcaatgggcgccacggagagcggcgcggtcgccctagtcatggagcgtgacaccaaggcttggtccatcgggtttgacatgagactcttcacggccatatactcgggaataatgtgctctggagtagcttactacgtgcaagggatagtgattaaggacaggggcccagtgttcgtgactgcgtttagcccgctctgcatgattttagtgactgtgctaggctccttcattctttctgaggtcgtcactttaggaaggctcattggtgcgacagtcattgttgttggactctatgcgctcatctggggcaagaacaaggaccatgtgaagtcgcaaaacagttttgacaagcacgacacatttgagctgccgttctctacttctgccgttaacaatacaaccggtcccgtcctggcaacatctatttaaggctcgtgtccatgtgacttcctgtatcccgcacccatcgatttaaggctagctagcggcctagcatgtaatcgccaaatttccattaaaaaagaattctaggatttgcataacacagtttttctcggaaaaaaaaaaaaaaaaaagcggcc

SEQ ID NO: 98259 - DNA, 207 bp, Zea mays
  Clone ID: MRT4577_21121C.1
gtgggcgggggcctttcgggggggaaacaggcctaaactgcttggcaaaagattgatcccccacagttagaggggcacattcaccaactttttttcaaggtctcacactgaccacaagggggtagatgggggttttttttttcaaagccgggaaaaacggggccagaatggctcaaggcgcccagggcgggggcctcccattttacc

SEQ ID NO: 98260 - DNA, 101 bp, Zea mays
  Clone ID: MRT4577_21122C.1
ggttggagcctagcttcgagctgagcatacccaccaccagttggagctttcttgagagagcatttgagagttcgagcactagctagcttgtaggggatgaa

SEQ ID NO: 98261 - DNA, 117 bp, Zea mays
  Clone ID: MRT4577_21123C.1
cagacgcgtgggcggacacgtgggctcccgtcttgttcctagaccgctaaccttaccggccctcaaatgacgcctatcctgatgctgcttctcacgcacctactacacaaggccact

SEQ ID NO: 98262 - DNA, 353 bp, Zea mays
  Clone ID: MRT4577_21124C.1
ccggaattgaagggtcggcgccacgcgaccggtctcggatgctatttgtcaacttatcccgcttaagactcaaggggcataaatcatggatggagagaaacctacaaacgctccaaaactaccaaagaaagcaaactctaagaacaaaggggccgaagagccacttattggtcggatcatgcagacacgggaaggatgaaaactccgaatcagttgcctcaagtatggcatagcaaaggacaggaagaagattattaaaaggctgacggcccatattatgaaccttgctctaagggattggggatgaaaccctcttatctgcagtgttgctattgaaggtgacacatagaccg

SEQ ID NO: 98263 - DNA, 1402 bp, Zea mays
  Clone ID: MRT4577_21125C.1
cccacgcgtccggcaagcctcctctccaagcttcgaatcgtagagaaaagcaagcccgcggggccgacccggtcggcatccgaacccaacgcctctgagagccttaaaccccgacccgagcctgtcagactgacatcgctcgaccattttcccatttccattcccatcccaattcccagcggtttcatttccacctcctccttttccaatttcgactcgattcgaaacaggataccaaatgcatgatcgatcccacaagccgcagccggcggaggccggcaacggcgggccggctggcgagggcggcggcgggaacgtggatcgggtgctcttcaagaacctcgtcgagatggtgccgctcgtcgagtcgctcatggaccggagggtcaacccggcatactcgcgtcgcgcttcgctggtctacacgccggcgccgcccaagaaggcaagcgatttgaaaagtgtcaaattgccacagagcgtatcagccaaaaagcggagagaccctggtgatatagccaagaagagcaccccagattctaacggcgacaacggttcagttgtgccattatctctgtcaggtgctgaaaatatgcccaaggatgaggttgctgtgctaagcgagcagatcaatgacctacaaaagaagctgcttgagaaggaggaggcactgaggtctgcggagagctctgtgactgagatgaatgcagcatatgcaactatcgatgaactcagacgcctggtggctgacaaagaagctttgatcagatctaccaattctcagttgcatgatgcaaagattatgcttgcagacaagcaagcgtctttagagaaacttgaatgggaggtgaagatgtcaaataaaaaggtcgaagatcttcaaggagatatgtcgaatatgggattcgagataagctcattgatggtatttttcgaaaaaatttcagagaatgtttcaggtgactcttatgatgatataataccatcatcatatgaattagagacacttcaatcaatgagtgaaattgacaagattgaggtcgacaagctagacaaggaaagggttacatatgctgaagctctggcggcagcgagagagaaccctgacgaggagcacttgaatatagctgcggaggcgaggtcaaggctgcaggtccttgtactttagtgtccccttctgattatagcgtttgtatgataatgttgaactgctgatgtaattgtatgtgttggcttgagttgaggtgctcgtggaatccttccggtgattgattcagcactgtaaactgacagctgtttcatgttgtaaccatatttaaggcatgtttgatttctttagtcaccctccataaattttaggaactaaatttagtccctaaaatttcctaaaaaaaaaaaaaaa

SEQ ID NO: 98264 - DNA, 377 bp, Zea mays
  Clone ID: MRT4577_21126C.1
gcacgagggacgtcaattccccggtgggcgatggggggatcaacagtattattcgcactttgttcgggcctttccaagcgaggagatccaccagcgatacccccaattgctcgttggagtactttcaacaccgtgatgtcgcgggtcgttgtgggccggctccagagaactcgattaccggtcaagaacaggtaccgcaggatgaggcgcatggaggatgatgtgacgagttcgtgagaggtctaggccatcgccttctagtcaactttgggttcctggatcgttatctccatatgatgtaattatttatttattttgtacagaactcctattatatagtaaagatgtgacattcgtttaaaaaaaaaaaaaaaaaa

SEQ ID NO: 98265 - DNA, 665 bp, Zea mays
  unsure (1)..(665): unsure at all n locations
  Clone ID: MRT4577_21127C.1
atgccccangacagcacattgccacgattaacaaagggannaagactgcctttcgggttgtctcctgttcgccgctccttgcggctctgttcgtcgtttagctgtagacattgttgaggtagaagttcnggccagccaaggctgtggtcccggcgccggtggcgttgggctgggctttccccttgctctcctccttcttctgctcctccttcctcgcctttctggcgtcggtggcgttcgcgttcttggcggctgccggctcgtcgggtctgttccttctcttcggcgctccgcgggcggggcaggcgtcgttgtcagccagcktgtcgcgcggcgtcctgtcgttgtgggtgtgcccgctgtcgcggcaggtgtcggcctgcttggtcgcgncccgcgtggtgctccgcgcggccgtggcacccggcgcygcgccggcgcgncgcgccgctgcgnccgcggggcggtgtcggcgggccgtcggcggcgcggnccgctgcggcgctggcgcgcgcgtgtgtgncggggcctgctgcgccntcgctgcggcgcgcgctgcgcagtggccgcgngccgcgcgtgcgcgcgcgcggcgcggcgacggntcgcgngcggtggcgcngcggtgagcgtggggtggggnctgctctctctctctctctctc

SEQ ID NO: 98266 - DNA, 654 bp, Zea mays
  Clone ID: MRT4577_21128C.1
aacctacgtgactggtccgtgctcccccgtgcttcgcttccacttccgccgccggccactcgcccgcaggccgcagcacgctccgtgcctccctccgcgccgtccacggaccgcggtcccctgcagccctgctctgtcgtccgccccaagccccttgctccgctgcgggctgcggcgctacctgctccctggctctcagcccaccgcttctcagtccacttctgccgcaacccctcttctctcggtctagagatccgtccgggcgcggcagcctcgctttcgtttcggtaagcaatcgtacccgagcttgcttggattccctagtccgaagggctcggatgccctgctaatccaatacatcgatccgtggcctgtctagatttttgttcttgaaaacgggcaaggtcgacatgagttgacagtgtacgagttcttgctttcttgttatctaatcaaggtgttggtgcagcttgtttaccaaaatttagggggtcgcgtgctgctcagctgctcggcttcattcatgtgtgtaatagctagtagcctggtactgctatgtggcattgtggctgtactatatactagggttattacttcttattattgtattagtgacttgtgatgtaccataccatagttgtaatagctgctatg

SEQ ID NO: 98267 - DNA, 481 bp, Zea mays
  Clone ID: MRT4577_21129C.1
ggcgaaggcaaccggggccgaagtgtcaacgtgtggctgcaatccacctccgcattcactccacgcgcacgccgctatacgcgacgctgccgagcgcatcgccgccggtccctccctcacttcctgtgcctgttctcagcccgccgcttctcagtccacttctgccgcagcccctcttctctcggtctagagatccgtccgggcgcggcagcctcgctttcgtttcgttagttgtagatttgtgtgctgacggatgccctgctaatccaatacatcgatccgtggcctgtctagatttttgttcttgaaaacgggcaaggtcgacatgagttgacagtgtacgagttcttgctttcttgttatctaatcaaggtgttggtgcagcttgtttaccaaaatttagggggtcacgtgaagcctgtccctgcttcaggaggggcgaatgttccttcttccaaattcccagttcgcgatgtttttt

SEQ ID NO: 98268 - DNA, 281 bp, Zea mays
  Clone ID: MRT4577_2112C.1
gcggccgtccttttttttctccccttgttagtttttattagaacacaacgagctctgatcgatgaaaacctgctcccagcgcacgcacatacactaacacacaaaggccaaactgaagcaggacacataccgtacacagatctggacacgaccttgttacagaacacatggcaaaggaaggacctaattagaaaaacgacttggaggactaggcgcacttcttgggggacttgtgctacttgatagcgaccatggccgctttatcccgcgcctttttgggc

SEQ ID NO: 98269 - DNA, 167 bp, Zea mays
  Clone ID: MRT4577_21130C.1
aatggagattaagaagatggtgaaggaggatgacaccatcattgttggtgccagcatcactggcaaaagggggaggggcttgttattattaccccctggccaatgcaagcatgcgtcatgcgttggttgggatccaacccaatcccgacgcggggttttgcccaaaa

SEQ ID NO: 98270 - DNA, 333 bp, Zea mays
  Clone ID: MRT4577_21131C.1
attcgaagacatacttcaatacctctgataatggcaatgacatactattaacataacacaaaatcaaggcaatgacattctattaacataacacaaaatcaaggcactaaaaaaagctgcaaccttattggcatatatagtacacgaagcagtgacacaataagcccctaccattcacaggaattccaaatggcaacttctgaactgggtaaacaatgtatttcatcataaagttagatgcaaaagctacaactaacagaaccaccaaagttgtttaactaccaataggttacagccataatccttccccacgctccgcggacgcatggttca

SEQ ID NO: 98271 - DNA, 507 bp, Zea mays
  Clone ID: MRT4577_21132C.1
acacttaaggtttggataaaggaaccacggacatttttcagggacacaaaacacaaagaaccgcatagaaattgagcccacaatttatacgcaggggtctgcagaatattcagaggggaacaaaccggaaaaaaattaccccaggaacgggtgggggcccaaagaacaagctagaaaacttctagaaagggaataccaatgaaaggtgaccacctcttcacattactcaacaatggggggctcagtcaagaatttgaggatacagctttcccaacaaggtcaaagacaaatcaggcccaggctaaaggaaaatattactgagccggctgaccacatttttgcatgtcagacccgaaaattaaaaaccttaggcatgaactcaggaccattttaatagacctcaaaaagctttactaaaacctctacctggaaattataacgcccatattttcccttgctcaaaatgtattgattaccctccacccatatagggaattattccacaaa

SEQ ID NO: 98272 - DNA, 816 bp, Zea mays
  Clone ID: MRT4577_21133C.1
acgtgcctcgactcccgtccgccccttccccatccgcgcgagcaacctagctccctctgccccctcccgctcgcagttctcctccacgcgctggcaaccgctcctcggtcccgctcgactcgctcctgctccacctcaccgcgcccgcccccacgccgcggcggtcgcagcagatgccgacgccgccgcactccttcctcttccccgctgcgcaggcgctggtgctcgccatctcctctcacccgctccccacgctcgcggccttcctggcctcccgtcgcgacgagctcctccgcgccatgggcgagtccaacctcgaggttgctccatgtaccagcgcccagatcccacgcttggcgagatgaacttgctggggacggggtctgagcctcggcctcgacctggatctcccccatcctctcccccaactctggtgaggaggactctcgcccgtggttgccggctccccgtataaggcagttggtattcctctcgcgttctctgtgaagctgacaaggtgggcggcgataggcacttctccggtgtaggcaaggctggatccaagggcagtgctcgaggacgaagggtatgtgcaggtggtgtcactgctgtgaagttgtctgtaaaggtagtcaaccagctaaagcttaagttaagtgttgagtgacgctgtctgtaatcctctcaaagctattgagttagtgccttaaacttagagagtgctaattgtgttttactatggaaaaaacattgcaaaatttcgcttggctgcagttatcatgttcatcataggaaaaaaaaaaaaaaaaagcggcc

SEQ ID NO: 98273 - DNA, 703 bp, Zea mays
  Clone ID: MRT4577_21134C.1
gatattcgttgccggcctgcagcctcttcatgatctgcgcggtggacaagggtacaggtggggaggatagtccatgccctatcccatgtactcctctctcctcttgactctcactcgccatcctctgtttttcgaacacctgtgattacatccatttcttggttgcatgatggatccagagacatcgatgtagcccaggtgcttggtactcgccttattcaggaattgtctgcgatctttgctgatccgtattgaactatggccattcaccaagtcgaggtggggatcgtctcaatccgagatatggatctgcctaccaggcacactgcgaggatatctatgtcccggcgcagggcggctgccgacacgaacctgctgtgttatctggatcatcttatctgaaattctctaaagcaactgccatagagcatatacggcttcactggaacaggcgatagcactatattctagcattgttcccaactcatgatcacttgccgagaactagtgacttcgatcgtcaaaaaaacagtcgatacttttgcgctgtatttacactgaaataggctgggcaaagtacaacctatgcgtactcgacgatgatgctgatgatgctacgctccagcctcatcttgatgaaggcctgcctaaagctggagctgctgactttattgatgatgctcacgatttcttgtctagcatg

SEQ ID NO: 98274 - DNA, 1344 bp, Zea mays
  Clone ID: MRT4577_21135C.1
aagctcggtatttggctcgagggttaatgttccaccgttcgggtgtgctgattgttaaggcacagatctgggacaccgcaggccaggaaatatgacgagagacgggcgttgacagctaaacactccgtctgttgaatgttgatcccttcaacatttcccctattttaacatttattattattattaaccaatcgaatcaactgcacctcttgaccgcttctactccaccgcctgctgctccgctagtcttcttcaaccttgtgatgcttcagcccccccgcccctggtattgatcgctcagcacaaagcgtcgtacttggataggagaaaacaattctagacagtcgacagagagagagaaaaaaaaaatagagaactgagagatcgaggacaaagggggagaggagatgtctcggggcggtagccacggggagctgggccagaggatcgattacgtcttcaaggtggtgctcatcggtgactccgctgtgggcaagtcgcagctgctcgcgcgcttcgcccgcaaccagttcaacctcgactccaaggccaccatcggagtcgagttccagacccgcaccctcaacatcgacgcccgcaacgtcaaggcacagatctgggacaccgcaggccaggaaaggtaccgagcagtaacaagtgcctactacaggggtgcagttggagctatgttagtatatgacataaccaagcgccagtcctttgatcatgtggctaggtggcttgaggaactacgtggccatgctgataagaacattgttatcatgcttatgggtaacaaatctgatctgggcacacttcgtgccgtcccaattgaggatgcgaaggagtttgctgagcgcgagaacctcttcttcatggagacctctgcacttgaggctatcaacgttgaaaacgctttcatgactgtactgactgagatttaccggaccgtcagcaagaaaaaccttgttgccaatgaggagcctgattctagcggaaactcgagtttactgaaaggaacaaagattgttgtccctggtcaagagccaccctctacattgaaagcaacatgttgtatgtcctcttaagcatgatattgtaccataataccatgttctttctggtcgtcggggtttctgattacccctgacatatctgcgtgatgaatggctgtgaatcttggaggtaaagatgagaaggtctacaggaacagttaactcatatacgctaactatctggaaacagccttctttttgtatctgattttgtgatatagtacagtcattaagaagccttctcttcaaactcttaaaaaggttgttccagaaaaaaaaaaaaaaaaaa

SEQ ID NO: 98275 - DNA, 531 bp, Zea mays
  Clone ID: MRT4577_21136C.1
gtatcaacaacacgaaccttagcaagtttattaagaaaactgccggtaccattcattaatccattcgtgctcacatgtgcgaattttcaacacccagcatggcagcccccaaaaccacgctaggctaataatctgagacttgctggtctgtggaccctttatcacccagtattgggcctataaatacaacgaaggccacacagattctggtcggtcgatccttctatgctttagatgcacgcggtgcctggatcgaccctgccttgtatggcataagaaaccttgtggtgcgctctgctccatacatcagaatacaatggcatgctagaaactcacagctgtactggatcgttcctaggccttggacactggggacgacaacctctccttaacgatactgcctaacctcaatcgaatggtattccattctctcccactgccttcacccacaatgccttctttctcggggcctcagtctctgagaccgaacgagcgtggccaaatccaatcggagaaatgtctcctcaaaaa

SEQ ID NO: 98276 - DNA, 214 bp, Zea mays
  Clone ID: MRT4577_21137C.1
tttttggggtttttttaatttttttgggggttatcaactttctttcactgtatcttttggcaagcaaaaacttttgagcccaaggcctttgccccacaaacttgacatgtaaatgtccccaacacgatgcatgtacaaaaactttaccgtgcctaaacattaatgttgttgcccaggtttatccatcaatcacatgaaaaattctaaagtaatc

SEQ ID NO: 98277 - DNA, 982 bp, Zea mays
  unsure (1)..(982): unsure at all n locations
  Clone ID: MRT4577_21138C.1
cccagcgtccgggnagagtggtacttgtactgcctccacgaccgcaagtacccggcggtcctgcgcaccaaccgcgccacggcggctggctactggaaggccaccggcaaggaccgcgaggtccgcaatggccgcaacggcgtgctggtgggcatgaagaagaggctcgtcttctaccgggggcgcgcccctaggggccagaagaagagttgggtcatgcacgagtaccgcctcgacggcatctacgcccaccatttcctcctcgtctctacgaggttaaacttgggaattaccattcatccgtggccgctgttgtaaataatgatacttctgctcaagaggctgaatggcgcactattcgaagtatacttgatcagggcaagacaacaactacattgggaaaagtaaataatgataaagcaagaatcttgaagtgaaatttgatgtaagcctgtaaccactgatgtttcaagtttacctgaaaatgtcgctgaaatggaggaccaagttaaacgtaagaattgggagaacgaaatggttcttgaagatatgaaaagggaggaagatttgctgaaacaagttaaggaattatacaggaagcagaagcaagagctcatggattatgtcactcaaccagcagtgacacagacgtcacgtgattcgccagcaactcattcacccgcaactcctgggagtaatccgtttggagccaagctctccaacaagtggcgataacattttggtggcgtacatccctattttgttggggcttattgcctgttctggcatcagcacgacgtaactagcatttgccacaagcttggtgttagtttgtgagggtgataggctagtgaaattgttctgctgcttagcattgttggccctatggataccaattgatctatagacagccgggaacttggctaacttattatgactatggatgagacttttgtgatgtaattgatgagactattgattt

SEQ ID NO: 98278 - DNA, 1862 bp, Zea mays
  Clone ID: MRT4577_21139C.1
agtaatgtcttgtagtttgatggtgttcggttctgtatgttatcacgtggtgctgggttcgattccttggcccaccattgtgtttcttttaaaaaaaaaaaaaaaaaacacttgttctcgaagatcctcttccgccaagccctaacatctcaaatctatctcgctctccctcgtaaggtcctgcaaccccgccgccctctgctcccgcggccatggcaccaagattagtggtcacatagttcgtcttcctgcgacggctcaattcgcggaggcgcggcatggcgactccgtcgctgccgacgcagattgtggagttcaattacaaggcgatagaggacaagctcaagagactggctctcgaagtgagccaccatgagaacaacattaggttcctcaaatcccaactcaatactgttgaagaggcgtgcgtcgacctgggaattaaacttgggaattaccattcatccgtggccgctgttgtaaataatgatacttctgctcaagaggctgaacagcgcactattcgaagtatacttgatcagggcaagacagcagctgggattatatgccaactgaaagtccgtcatcatgagctagcatctaagatgccactgatgaaagatatacttggttttgtggctacattgggaaaagtaaataatgataacctcagcaggcttctcacagagtacttgggaatggataatatgcttgctcttgtttgcaagacttatgatggtgttaagggtcttgagaaatacgacaaggatggcatcattgataataccagtggcgttcatggacttggtcgctctgttggaaaatttctggatggaagatttactgtcttttgtcttgaaaacttgaggccattttccggtgatgttatcattgacgatccacaaagaaagcttattttacatagaccaaggttgcctggaggggagtcgcctcctggttttctggattttgcagtaaatatgatccacctggaccgagcacacttgaggttcctcacagccagtggccatggtcttagggaaactttgttttatactttgttttcccatttacaagtttataagactagaactgacattcaaagtgcccttcctctgataaaagatggtgctgtttctctagatggtggtctactgagacccaatggctcattctgccttggccatagcaagaatcttgaagtgaaatttcctgtaaccactgatgtttcaagtttacctgaaaatgtcgctgaaatggaggaacaagttaaacgtaagaattgggagaaggaaatggttcttgaagatatgaaaagggaggaagatctgctgaaacaagttaaggaattatacaggaagcagaagcaagagctcatggattatgtcactcaaccagcagtgacacagatgtcacgtgattcgccagcaactcattcacccgcgactcctgggagcaatccgtttggagccaagctctccaacaagtggcgataacattttggtggcgtacatccctattttgttggggcttattgcctgctcgggcatcagcacaaagtaactagcttttgccacaagcttggtgttagtttgtgagggtgataggccagtgaaattgttctgctgcttagcatagttggatgccaattgatgtatagggttagaatgctttttagcttttcctatgctaatcaaattgccaactgctaatcttgattcttggctgttgatagcacaaacaaattggaagcagcagctggttgtcgttttagttgcttcttcaacatgcacattcttattgcgatgtgccaatatgtatatgcctgctcaacgtgcttgactgatttttcatgccaccac

SEQ ID NO: 98279 - DNA, 485 bp, Zea mays
  Clone ID: MRT4577_2113C.1
ctgcaggtcgtttctagacagaaaagttatgctgacacccaccgaagatagttagagtttgaagagggtgatcatgtgtacctgaaagtgtcaccaatcatgggtatgtggagattcaaagtcaaaggaaagttgtcccctcactttattggaccctttaagatcctgaagcgagttgggcaagtagcttactaactagagttacctaatcacttggctgatgtgcatgatgtgtttaatgtatcctagttgaagaaatgcctcagagtcctagaggagcaactaccaatggatgaactcagtgatttgacctatacggagtaccctatcaagatcatcgataccctgacccgagctaccagaaacaaaatgatcaagatgtgcaaggtgcagtggagtcaccacgtagaagatgaagccacctgggagcgagaagatgaattgcaaacggaatttccccaccttttcccaagttcttcttaatc

SEQ ID NO: 98280 - DNA, 674 bp, Zea mays
  unsure (1)..(674): unsure at all n locations
  Clone ID: MRT4577_21140C.1
ccgagagtctcttctcttctcgtctctcgtcgcctcccgagtctccggcgaccacgccaactagacgaccatggagcaaggcgccgactccgcggcggcgaggcggatggccagggtcgcctcccacctccgcccgcccacctcgcagatggaggaggtggccatcttgaagggctctgattgccgtgcaaaaggtgcggcaccagggttcaaggtcgcagtcctaggtgcatctggtgggattggccagccgctctcgctgctcatgaagatgaaccctcttgtttcggtgctccatttatatgatgttgtcaacacacctggtgtcacagctgacattagccacatgaacaccggtgctgtggtgcgtggcttcttgggtcagtcacaattggaaagtgctcttactggaatggatcttgtgatcattcctgctggcattcctcggaaacctgggatgacaagggatgatttgttcaacatcaatgctgggattgttcggactctttgtgagggaattgcaaaatgctgcccaaatgcgattgtgaatgtgatcagtaaccctgtaaattctaccgttccgatcgctgctgaagtatttaaaaaagctggaacatatgatcctaagcgccctattggngggtgacaacacttggatgtagtgagagccaata

SEQ ID NO: 98281 - DNA, 215 bp, Zea mays
  Clone ID: MRT4577_21141C.1
ggggaaatagacaactttgggaatacaaaaggttttgctgttgcaaaaacaaactaggaaccctctaaagatggagataacgcgacagcttaatcgggatcggcaacgaccttgggccccaaccctttaaagccctcgggggggatccccgcgacggggacaagggagtaaagctcctccttggcatcctcctcggggttccttttgggggcgat

SEQ ID NO: 98282 - DNA, 272 bp, Zea mays
  Clone ID: MRT4577_21142C.1
attttctttttttttttattttttggttttatgcctcgagtggatcgttatatggggagggatttatatttttaaatagtagaggttacatggtagctttcccccaatgtcctattattgttcatacatacataattttctcttaaattaataaacaaattccaagcttactttatacactagtgtacctaattttaatgcagtatatcttctacagtgtctaatttaaaggttaatctataccttcacggtagttgaaggttttttttttt

SEQ ID NO: 98283 - DNA, 550 bp, Zea mays
  Clone ID: MRT4577_21143C.1
tcttcttctcttccctctcccgtcgcctcccgagtctccggcgaccacgcggaaccgacgcggccatggagcaaggcgccgactccgcggcggcgaggcgggtggccatcttgaagggctctaattgccgtgcaaaaggtgcatctggtgggatcggccagcccctctcgctgcttatgaagatgaaccctcttgtttcggtgctccatttgtatgatgttgtcaacacacctggtgttacagctgacattagccatatgaacaccggtgctgtggtgcgtggcttcttgggtcagccacaattggaaagtgctcttactggaatggatcttgtgatcattcctgctggcattcctcggaaacctgggatgacaagggatgatttgttcaacatcaatgctggaattgttcggactctttgcgagggaattgcgaaatgctgcccaaatgcgattgtgaatgtgatcagtaaccctgtaaattccactgttccggttgctgctgaagtatttaaaaaagctggaacatatgatcctaagcgcctattggg

SEQ ID NO: 98284 - DNA, 387 bp, Zea mays
  Clone ID: MRT4577_21144C.1
cccacgcgtccgcccacgcgtacagggacgcgtgggcgacgcactatggtggcggtgccggtactatacttccagattcctaagttcctaactcggaggacggacgttgtttgcgctgaatgcttttgtccattcggcggcttgggctcagatctcgctcgtgccttcctacggaccggagcgaggtgcgctcactaatcaggcgcggatcaccgcagatttggaggcacatgaggaggacgaagcaagaaggctagcgttagcgatgccgggcttttgagaaggggttgagcctacctgtgaaggtgactctggaggagggggtggtggctccgcaggcggagggagaagctgtacgagggatcgaacatgtatcatcggcgagct

SEQ ID NO: 98285 - DNA, 127 bp, Zea mays
  unsure (1)..(127): unsure at all n locations
  Clone ID: MRT4577_21145C.1
actcaagnactgttgaggccgcaaagtgtttacacaaagtggtcaaccgggccgaaggcggcataaagatccctgctaccgcggagagggttgcttccatccgggaaggtatcggtaatggcattag

SEQ ID NO: 98286 - DNA, 193 bp, Zea mays
  Clone ID: MRT4577_21146C.1
ggttgatggattcggttgaacggtggcgagacctgttctacagcagctatgtcctcttcgcctgttaggcctgtgaggtctactcctcgtgagcttcttgtttccgcgcgcgcttgttgtgtttgttcttggctgttacccttgcggtcttcctgatgactggtgccctcgtgcgtgctctctgttgttccgg

SEQ ID NO: 98287 - DNA, 147 bp, Zea mays
  Clone ID: MRT4577_21147C.1
atggcctcacagcagcgtgcccgggccgaggggttcgagacggctcttaacgaggccgtcaagaactgcaaggcgcttgccgaggcggctgagcagaaggaggccgagcatgtggccatgtccgaggctatctcggctttctgctag

SEQ ID NO: 98288 - DNA, 1652 bp, Zea mays
  Clone ID: MRT4577_21148C.1
ctgcagggccagcgaaagcttcgttgttccggcgggcagttgcaagcaaacaactgccgcgcgcataacgccattgaggtaactggctagtgctagtcccaccctttgcacggcagcttgctagctagctacctacctcgggcgcgcgcggcatggcgaggcggacgagcggccccaagaagaagctgaggaggggcctctggtcgccggaggaggacgataagctcgtcaaccacattgccaagtatggccacggctgctggagttccgtccccaagctagcaggtctagagaggtgtgggaagagctgcaggctgaggtggatcaactacctcaggccggacctcaagaggggagcgttctcgcaggaagaggaggacctcatcatccatctccattccatgatgggcaacaagtggtctcagattgcttcgcagctgccggggcggacggacaacgaggtgaagaacttctggaactcgtacgtcaagaagaagctccggcagcgcgggatcgacccggccacgcacaagccgctcccgctggccgccgagggcatcagcagccgcacggcggtgttcagcgacgccgagctcatcctgtcgtcgccggcggcggcggcggggcggcacatgccgccgccgccagtggcggcatcggcggcggagagctacgtgtacagctacagccacagcagtggcggcgcgagcgacggctctctgcagtcgctgtcggggtacaacagcaacagcaagcaaacagctgcggatcacttgggtgccgcagccgcagcggggtacctgcagcaggagcaggacccagcagcagcagcagcagcagccgacgcgctgcactgcggaccctccggtgccccggcggtcgttctcccgtcagtgtccagctccagcacgctgaactcgatggctggcctaagccccgcggccaccaccaccgacgaacagtgcaccaacaactgtagcagctgcagcttccacagcgggttggagccgtggctggagctgggcagcacgagcggctactacggcgcctccgccgccgtggaccactacggcgcggcgctggacgagctcaagtggtccgactacgtgttcgacggcggctacggtggccagccgggacagggcatctacggcgacagcaaggacgccgtgcagttcgtggacgccaacgcgctcagcagcagcagttggtgcttgaattgatccccgtcggtcgatcccaacgcgctcggcggcgagcaattaactaatcggccggccgccaattccaactccatctccagcacagcagagacacacactgatacacgtgtgcatgtgttcctacgtgcctacctacgaggctacgactacgattgattggttgattggtgatacataaagtagctcatacatgtttgcattggtgagcttcttgtttgtaaattcaattttcgtcttctttcggattggattacagggtttgttaattttccggcgcggtcggtcgacatgtagagagtgcatatggtgacggtgattggggagtgacgagacatacatgtaatggaacatatatatagagagagagattacatatataataataatacatatttattatattatatttaaacaaaaaaaaccccaaaa

SEQ ID NO: 98289 - DNA, 266 bp, Zea mays
  Clone ID: MRT4577_21149C.1
gtaaaaccaccaaattttttttttccggcccaactttaaagggggaaaaagaaatggggtcaggggcatttgtaacactagttttacaaccgggggactgttttcatgaatatacagggtcccccactttttggctcagcagggttacgggcccctttggagtgttgccatttggcccatttttggaccaggggtttcctttccattctccccggtggggaattatagggggggtgggaccctcaaacataatggtcttttccccc

SEQ ID NO: 98290 - DNA, 202 bp, Zea mays
  Clone ID: MRT4577_2114C.1
gtttcgatgagtcatatttatatgaagccagtcacagaaggttacactagtacacgtttatagagagtcgaaatgcatatataaatatgacgagccaattcctcagccaaaaaacattatccatgcattttcacactctataaacgtgtaccagagtaaccttccgattcgatgagtcatatttatatgaagccagtcacag

SEQ ID NO: 98291 - DNA, 129 bp, Zea mays
  Clone ID: MRT4577_21150C.1
atagggctaagggggcttaacacacacaatacgacacagtgggaggcctgccaacaaggccttgcgcgtaaacacttgccagatcacacacaaggtaagtgggaccggaactaccttggggggccgacc

SEQ ID NO: 98292 - DNA, 248 bp, Zea mays
  unsure (1)..(248): unsure at all n locations
  Clone ID: MRT4577_21151C.1
agtcgtattaaacncgcgcacttggcgctggccctcgatatcggggagtgcatgtcgttcctcgtcaccgccgaccagaagcccggcgacgacgtgctgggggtgtccaccctgttcatcaaggtcgtgaacagcatcagggccgtgatctgctacgggggctccgacaccgcgccgctggccaacgtggcggccagtcgcatcgggtgggcgtcgtccatgcaagcactgcaggtccttccgctgga

SEQ ID NO: 98293 - DNA, 175 bp, Zea mays
  Clone ID: MRT4577_21152C.1
cttggaacacgaaagcaccgtaatgatttgtagggaagtgcatgacaattctcatgtcatacacagattgttcatatgcagatactgtgctagatgaatccccaaatctgcagggacgatcagatacaagtagcaccaccatgacattgctcctgcttgatcccaggcacaagac

SEQ ID NO: 98294 - DNA, 406 bp, Zea mays
  Clone ID: MRT4577_21153C.1
ggaagggaacagctactaaaattcttttgacgggggacggcaaacggccctgggaattcacatttggaaatgaaagaaaaaaacttgggtagtcataaatcgtcctgaacccaaaaaattgttggcttgacgggctccgtgatctcgacggacccctccagcattttggacactttccccataaacggccgcattttggggcggtcctgcaggcaccacatggccgttttaaccatgccctccacgggggcaaccctggcggcgtcttcataggtggcggcaatgcgggggtccaagatgttgttaatgcggggctccacgtacacctttttgtacccccacttggggaagtaccagtccttactgcccaccgacttctgccggaacccgtatttgcgggggccgg

SEQ ID NO: 98295 - DNA, 1423 bp, Zea mays
  Clone ID: MRT4577_21154C.1
gattgagctcgtggccggccggggagaccccagagcgaagaagccccggccctcctgtagagctggtctccctctgaccctctctcctctgcgcttccgctgcgtcggccctgctcgtagcttggaggcggcggcattctccggcaatggggtgcaaggcgtgcgataagcccaagcccaactaccgcaagggcctgtggtcgccggaggaggaccagaagctccgcgactacattctcctccacggccacggctgctggagcgcgctccccgcgaaagccgggctccagcggaacggcaagagctgcaggctgcggtggatcaactaccttcggccggggctgaagcacggcatgttctccccggaggaggaggagacggtgatgagcctccacgccacgctcggcaacaagtggtccaggatcgcacggcacttgcctggcaggaccgacaacgaggtcaagaactactggaactcgtacctcaagaagagggtcgaggccaaggaccaggggcccagcacgcccgcgccggcggcgtccaattcggacgacgactcgcactgcgtcaagcagcgcagggacgacggcgacacggcggcgggagccaacggcccggcggactccggcgcgtcggagccgcgcgagtcgtcgtcggccgacgactcgagctgcctgacggacccgcacgcctgcaggccccacgcgcccgtgccgcccaaggtcatgttcgcggactggctggacatggacatggactacgtgggcggtgccctgccgtcgacagcaccagcagcacctggtctgctcggcgctgcgggcgtggccacggccagcacgggcgaccgcgaccgcgatcagcatcaggtgatgagcatgagccaggggtccgtgcaggtggatgggccatccggtgccgatgtgtccctgcacggcttcggtgacagcggcgccggctgttgggagttccaggagcacttcgatgccatcgatcacatgcagggcggccggcttctgcgacctgctctccatgagcgactacttcggcctcgactagactccaaccctggttggtcatccatcgttggtgagaggatttgcgtttttttttatttacactttgttagaagtctcggtgaaaggcttgcttgtggctgtaaattactgtcgtgtacgtatagatagaggaattttaaaaagcagataaaaatcaaggacctacattgtaaaaatgttgtcgtgtttcttgtggttcgctttgtagagtagagcaccgacggaaggaaaaggaacagatgtagtagttatactagcaagtacacatacgttgctacctttacatttatacttgagtgtcaaatataaatataaagacatgtgtgttttattgtctaggtagaaatgattgtgggtttagagtcaac

SEQ ID NO: 98296 - DNA, 179 bp, Zea mays
  Clone ID: MRT4577_21155C.1
ggcagggtcccgtctcctgacttgcgtgacgcctgcctagtgtctgagtgcgtgccatcgacgcagagtcgcgggggtttgcagaccaggccaaagacccgattgctgtcatgcgctcccgctcgaatgtatcttctagcactggatgtgcttctaatattagggacccattcgtcgat

SEQ ID NO: 98297 - DNA, 207 bp, Zea mays
  Clone ID: MRT4577_21156C.1
gcatgatacgttgccgcatacgcagctcggaattcggctcgaggacactctgaaccgacaaaattggtatcagatccagacaggaatatgggcccgtctatatcaagcgggagaggggaggctttgtgctctgaggggacacaccgtcactgcgtctatggcttgccctgaggaagaggcctccaaacccacccttttgaacaaacc

SEQ ID NO: 98298 - DNA, 330 bp, Zea mays
  Clone ID: MRT4577_21157C.1
gcggaccaacccttccggggttttcccctttaaccccggcaagtgttcttctttggttcgttgaaccgggaaaaataaaggcggaaaccaggattaagcgccgggcggttaaaggcgaagcccctccaaatcctgggcctattcaaggtgctcccccgcttggtcgttttgaaccttaattttaccttttggcccttttactgcaagtgccggtccaagagggattcgccgagccttttaaggccccccagggccataatgtcccccttaaaggagaaggggatcgacttgccaatggttttttgttccccaacccgggacatagccaag

SEQ ID NO: 98299 - DNA, 266 bp, Zea mays
  unsure (1)..(266): unsure at all n locations
  Clone ID: MRT4577_21158C.1
accagacccgtgntgagaagatcctgcagttatggcgctcaaaggaagtttacgaccagtgaacaattgctaattttgaaagcaggaagaaagggagcttgccttaattcgctggccccacgacatgttcaacagaccttacgatctttcaggatcagcgccaggccctaaaatgtcctcgaacctcagagaggatagccgatcatctgcgctgggcaagtaatctgccccacgacagttcatcnaccactacaccgggctatcct

SEQ ID NO: 98300 - DNA, 595 bp, Zea mays
  Clone ID: MRT4577_21159C.1
tattgatcttcttcttggtcgccctcccttcgcctgcgctcgcgcagcagcaacccgccgctccctccggctggccgtcgtccgtcccgctcccggcgcccgcaaattcttcctcccccctcgacatggcgtcctgcccttcggtcaagaacatcctcgtgctggacgcggaggggaagcgcgtggccgtcaagtactatgccgatgactggccctccgcgtcctccaagctggctttcgagaagtcgctcttcgtgaagacccagaagaccagcgccagagcagaggctgatgtggtaatgttcgatggctacatcattgtgtacaagttcatccaagatctccatttttttgtaactggaggagatgaggagaatgagctcattttagcgtcagttcttcagggattttctgatgctgttggcattcttctcagaaacaatgtagacaaaaggaccgcacttgaaaatctggatctcatctttttgtgccttgacgaagttgttgatggagggattgttctggaaacagatggaaatgtgatagccgagaaggtgtcaggccatggattggaaggagctgggtcgttcactga

SEQ ID NO: 98301 - DNA, 621 bp, Zea mays
  Clone ID: MRT4577_2115C.1
atgacgaacaggtacctcaagtggaggcgcatgatcaagggggagcacaagatgatcaaggtagaagaggccttgctagatccggactgggtgttggccatgcaggaggaactcaacaacttcaagcgcaatgaagtttggacactggtgcctcgtcccaagcaaaatgttgtgggaaccaagtgggtgttccgcaacaaacaggacgagcacggggtggtgacaaggaacaaggctcgaggcaaaaggttgtaccaaatggatgtgaagagcgctttcctcaacgggccaatcaaggaggaggtgtacgtggagcaaccccctggcttcgaggatgaacggtaccccgaccattcttgtgaagagtttagcagggtgatgacgcagaaattcgagatgtcgatgatgggcgagttgaactacttccttgggttccaagtgaagcaactcaaggacggcaccttcatctcccaaacaaagtacacgcaagatctgctaaagcggtttgggatgaaggacgccaagcccgcaaagactccgatgggaaccgacggacacaccgacctcaacaaaggagttgtacaaaccctccccggacctcacaagtccgttgcaaagtga

SEQ ID NO: 98302 - DNA, 387 bp, Zea mays
  Clone ID: MRT4577_21160C.1
ttttttttttttttttttaaaaaaactttagatatttattagaaatttagtagtcgcatcatacgcataagtatgttgattaccgtggtaattcaaacaaaagtaaggtattttttctcacagtcacactcatctaagtcaaaaggaaaccacgtacaaagaccagaaaacccatcatcattccagctcgcctagtctcactctcagaaagacgaaatccagtgtgaccgtagcagcagcagcttcggatgggtgcctgattggggaagaaaagaaaaggagaagaagcacacagaaatccatagcatatataaatggtctcagttattacgctcctcccttctccgcgttttccacctcagtcctagctagcagctccgctcgtgc

SEQ ID NO: 98303 - DNA, 451 bp, Zea mays
  unsure (1)..(451): unsure at all n locations
  Clone ID: MRT4577_21161C.1
ccgnncggaaatnccggggcggcccacagccgtccggttcctggattccctgaagatcttaagttggaggtttgtttggatgaggttgcctaagggctggggatcatggtcccaaaccgggggattgaacctgaaaaccttgaagttggggtttttttgcaaccccttaattacggagctaatgatctacttttgccctaagttttttttgaaccatgctccattttttttgtaaccccagattaatgccaaatttagttgaaattaaaggtttaagtttgctggttttttgcctaatgtttccagtcctggggccatactttgttttttaagcgacaaaaacttgttgaaaactagttaatcttagctcctgggtaatgggggtttttttaaccttaatgtttagattttgtcctaagttcagttaaaagaattatttttttgggttgcc

SEQ ID NO: 98304 - DNA, 499 bp, Zea mays
  Clone ID: MRT4577_21162C.1
cccacgcgtccgaccaaatacgccacggcggcgcggcgcgctggctacccacaatggcgctcaccaccgcctccacggtctcctgtccctcccgaatcatccgccgcttctcttcttctgaagactctagccccccttcctcgctcctacatctgcgccccgtgcacgaggacccggggaagtccccgcgcgcctgtagctggcaccggctcgcagagcgcacgatggaggagtgcgcaccaagcgctcctcaacggactaagggccgccggcgacagtgacgagcgagggggcggccagcacgaagtcacgagtgcatagacagcactgctgagaaggacgccagctgacatcctcaaaggtgaggatgatgaacccagcgatgggacaactcctgtagttggtctacctggagaactcttgaaggcggctgagaagccaaggcacatgaacattcatccgatgactattcttgcggggataccaatggctctcgagt

SEQ ID NO: 98305 - DNA, 353 bp, Zea mays
  Clone ID: MRT4577_21163C.1
attcggctcgagctgtctttaacccgctctcattctttctcacctggctgcaacacctggaccgactagcgcccccgccctgccaattcttagactatcccttcaactgtctttggcgccgagtattctttggattaagacgctttcgcaccggagactaactcccaccaggagctagattgaaacctctgagggctctacagggtaggacacggttaacctgatcgcctgaaactaacataggattggtggtaaagcggaaccaatgtactcactccgtcagctgtgcttgcctcaaagaccatgtcatcgaggatgcaatgtatctcatggttaaacacatgaactggtac

SEQ ID NO: 98306 - DNA, 343 bp, Zea mays
  Clone ID: MRT4577_21164C.1
cttcctttttttttttttttttttttctttggtttgggggtttttttttctggggccagaccaaaaaaaaaaaagcaggtttttcttgtcaagacaaatgactcaaaaatgcgaccccaatccagatgaccatgcaaatcaaccttgtttcaaaataacagtttagatccccaaacaacagacacagggcacacacccaattgtttttaacagatcgaagttttcggccccaagtccaaaataaacgagggcccatggggggacccatctttttttttttattgcagccttggtcaccttggcaccagtggggtcctttttctccacgcttttgatgactcca

SEQ ID NO: 98307 - DNA, 1599 bp, Zea mays
  Clone ID: MRT4577_21165C.1
cggccgggccgggaaaacatctgtcgtcgtgctcacgacatgcgcgcctcctcctccgcaccttcttcttccccttcttcccagtacatcgttgagctcttccaccgtaccccaccattgttttgtttctccccatccccatcttcgtcgtcagcaccacccaagcattctccgcgcttgctctgctccaggtggcgctgcggggatgagcggcgcgacggtggaggaggtgcagatccaggaggctctcctcttctctgaaaccatcaagggtctcaagacactgaggtcgcagctctactccgcggcagagtacttcgagcttgcctacacgcagcaggacgaaaagcaggcggtgacgaacaacctcaaggagtatgccgtgaaggccctcgtcaacaccgtcgaccacctggggtccatatctttcaaggtgtccagcctaatcgatcagaggttcagtgaggccaccgatgccgatctccggatctcctgcatccaccagagaactcaggccagccaagcctgcgtcgacagagagggcatttcgcagcagtccttgctggtcactgccccaaagtatcacaagagatacatcttgccagctcaaggccagtcaatgcccagtgccatgcccaacttcagggagatgaacaaggtggtcgtcacaggcagggcgtctcagatgcatcaagtattcagcgctgaaacaagagctaaagagaagaagcagccttcactcaggtcagtgtcccgccggccggatggacagccaaaagctcggactgcctccccctcgttctttccgttcgaagcttaggttgacaaccaaacaaataaacaaaaaaatctctactgtttgcagaaagttgcaatccatcgctcgcctaccttcgcagcgtgcacgttcagcgtcgccagcacagcgtgcgcatcccatggcaccagctaagaacgctacacccaccaacagagataagcgatcggaatcaccagttccttcgacagctcctccactgacaaggtccgcgtcgctctcaaagaaggcatccttgctcaagacatcaagcgtcagggctcaggccgtctcacagccacagcccaagaaactggcaccactgaggacgcaggtggacaggagcgacgattcgaaggacggtgagcgtaccccgaagaagagcaagaagttcctcaagtccatcctcagcaggcgcaagtccagaaaagatgagccgctgccgagttactttgacgactactgagccacaggatttttcttctccctccgttggacggcaccgcggtctctccgcgtactcctacttcactgtgtttcactttcatcatccaagtgttatgttctcaatataaatatcgtcttcgtatagaaaatagcttaaagtttacatgaatgtagtgggaagtttcagcaagagatgtcatcgccccacttgcctgtttctataagagatgctcagatcaaagagtaaacctgtaacagtcaaggatgggaatacacaagtaacacagaaacatgcatcgggtgtaaaagaggcaattacctctcatctcacgcattgcaaaaaaaaaaaaaaaaaa

SEQ ID NO: 98308 - DNA, 577 bp, Zea mays
  Clone ID: MRT4577_21166C.1
aaaaaaaaaaaaaaaaaaaaaaaaaaaaaaaaaaaaaaaaaaaaaaaaaaaaaaaaaaaaaaaaaaaaaaaaaaaaaaaaaaaaccaaaaaaaaaaaattaaaagttttgtcccttgggccgcaccccccctttggggcggatttttccattttttccctcccccctggggggccggtctcgtccttgcttcttaggggcccccttttcccccctttgggggagtcgttttccattccccgggccgttgttttacaccggggaaactgggaaacccctggctttccccacttttttggccttgccccctttccccttttggccagttggcgtattggccaaggggcccccccctttcgcctttcccaacatttgcccagcctgattggcaattggcccccccctgtttcggccctttagggggggggggtgtgggggttccccccaggggacccgttccctttgcaagccccctagcccccggttttttggtttttttccctcccttgctggcccggttcgccggttttccccttaaagctttaattcgggggctccttttgggtgcccgttttagg

SEQ ID NO: 98309 - DNA, 393 bp, Zea mays
  unsure (1)..(393): unsure at all n locations
  Clone ID: MRT4577_21167C.1
ttttcnnttttttaataaaaaattctttctttcgtggctttgttctcttcaagcttgcgattgcgagtaacatatgaagcagagccattcaagattgcgagatggaacagcaaatctagcagaagcttgtggcttgtgccgctggaccacacgccagggttaagccagaaggctcgcgcgcgtacctccgataccgaatcacatgccgagacgtgactcctaagcccgccgaataattagagcttgccgctgaaggaactgatgaatagcttcccagcaactcagtgctcagagcctccctgtcccatcatcctcctctttcacccaaggcgaagtttgatcacagattaatctggaagcttctttttgggagggaaagagacagcactgctc

SEQ ID NO: 98310 - DNA, 516 bp, Zea mays
  Clone ID: MRT4577_21168C.1
aattcggcacgaggccgcttatgggcgcgaatagcgtcgccagcgtgcaatctctaccattctcacctccgtgagactgctattactttacccttttttgcggctttccccataggcatggtatggatccctgaatatatgcagcgaggataactggcccccaatcctgaccgaccgcgcgcatgcaagtaccttaccgccaattatttgcagctgcgcagagtttttttcgacgaaaggtgggcgggagcagcttatacaccatcgaacgttggaggaatacgtcgttgctcttcactggcgcgacgttggcggctcaaggtcagatgactccgacgggcggtatatggggttcagcgacacacattttccccaattagcagatgggcggaggcggagttcccggcggcggagctgaaccggagggcggcggtccaccacggacaccgatgtgagctccttccagggatgattctgatccactagcatcttggacgcccagatgcagggaccatc

SEQ ID NO: 98311 - DNA, 385 bp, Zea mays
  unsure (1)..(385): unsure at all n locations
  Clone ID: MRT4577_21169C.1
ggaggggggggcggaacacacacttgtttgtatgcggggggggcaaatttaaatgcttgatgggggggcgtacgggcccccatataccaattacctagtttggggcctttggttacgcccccacaggccaaagtcagccagaattttttttgcttgtcccgaaaaaaaagggaaaaaagagggttcacttgttgcaccaacggggggcccgtaagggaaacccataaaaaaaaacgtacatgcttgcaatgcagttagcaggggccaacggggaaacctacggttaaataaaaaaaaatagccctacctaccccactggagaaaaactgatctggagctttcgctttcgctaaactccatgcatttgaaccggnaatgtccttgg

SEQ ID NO: 98312 - DNA, 331 bp, Zea mays
  Clone ID: MRT4577_2116C.1
aaacccggggcgcgagcacatgcaagagtggccgctttatcatatattgacgggaggagcaaatattctatagagaaccaccaaggtctgataggagaatggctgacacacaacgtgacatagatcacggcataggcattcctaaggggatggagaaacttgaaacaatagtgagattcaccaacgtcacacgagggggaatgtgtatatgaacttccgcacctggacgtgcggccaatgctgtacgatagtaagtccggatacacccacggacacataatgacgagaagcatcatctggtgaacatccgaccaaccatggactagcatca

SEQ ID NO: 98313 - DNA, 419 bp, Zea mays
  Clone ID: MRT4577_21170C.1
ccggaacggaggagcagctatgtttattgtttacttcaccggcccttttatactcgtacaacaatcatggagttcaaaaatacacacggttccacagcgctgcacgtgtcacacagtgacaccaagcgacccgtgcgcactgtgcacgtacggctagctctctcaacaatctctgttttttttttgttgttgttgttgtacaagtcacaaaccaaccatatgcatgctaatccagctggtttacggtttgattttgcttttccattttttttgaaagaaaacctgatcctacaggtcctagtcctagctatgcatgaccacacgaacacacgtacgatacgacgcattttctacagtggaacacaaaaaaaaacgctgtggcagaagcaaaggcaacagacgacactctttttttttgt

SEQ ID NO: 98314 - DNA, 275 bp, Zea mays
  Clone ID: MRT4577_21171C.1
ctatccatgccctcccctcttccccctcctctatcatctctcatgcgcccactccccatcacatctcatctcctatattctccatccttgtatcatctcctcgtgatttcatctcaaggactctatggaaggcagcattcttctatcccttccttgctagaataaataacaacagataaaacatcacatctaataacatttggtctcgtaggtcttctattttgcctgaatttgttttttccactgtactcatttacaatgtgaaaagtcatgtc

SEQ ID NO: 98315 - DNA, 645 bp, Zea mays
  Clone ID: MRT4577_21172C.1
tccaaacagtttgtctgctccgcccgttgcccgtggcccgtcggtctctcttgcagtctcgccgctccccttcctcccccgcaggaatccgaatcagtaagtccggcgacctaggtctctcggcttgtccgcagcccgccggtcagtaatggcgcaggatgatccggttgtttctgctcagtggctgcacgagcacctagggatgcctgatgttaagttcagagatatacttcttctatcccctgcgttactggttttggatgcttcctggtacatgccggtagagaacagggatccatggaaagaatatcaggtggcacacatccccggtgcgctattcttcgacttagatggcatagttgatcggacaactgatttaccgcacatgctgccatcagaagaggcttttgcagcagcaatttctgagctggatataaaaaaccaggataaagttattgtctatgatggaaagggattcttcagtgcacctcgtgtttggtggatgtttagagtgtttgggcacaagaaagtctgggtactagacggcggtttgcctcagtggcaagcttctgggttcaacgtggaaaaggccagccctgacgatgacgcagttctgaaatcaatcgctgcaaacagggctgtcaa

SEQ ID NO: 98316 - DNA, 156 bp, Zea mays
  Clone ID: MRT4577_21173C.1
atgcgcacaccattgttcatacttaatgcagcctacgattcgtggcagcaaattggcaaggcggtgggggactggtactacgatagggaggtccctcggcagattgattgcccgtatccctgcaacccaacttgcaagaaccgtgatgatgattga

SEQ ID NO: 98317 - DNA, 1297 bp, Zea mays
  unsure (1)..(1297): unsure at all n locations
  Clone ID: MRT4577_21174C.1
ggcgaagtacccttgctcaatggggcccggacctcacaaggggaatcagtttgtctgctccgcccgttgcccgtggcccgtcggtctctcttgcagtctcgccgctccccttcctcccccgcaggaatccgaatcagtaagtccggcgacctaggtctctcggcttgtccgcagcccgccggtcagtaatggcgcaggatgatccggttgtttctgctcagtggctgcacgagcacctagggatgcctgatgttaaggttttggatgcttcctggtacatgccggtagagaacagggatccatggaaagaatatcaggtggcacacatccccggtgcgctattcttcgacttagatggcatagttgatcggacaactgatttaccgcacatgctgccatcagaagaggcttttgcagcagcaatttctgagctggatataaaaaaccaggataaagttattgtctatgatggaaagggattcttcagtgcacctcgtgtttggtggatgtttagagtgtttgggcacaagaaagtctgggtactagacggcggtttgcctcagtggcaagcttctgggttcaacgtggaaaaggccagccctgacgatgacgcagttctgaaatcaatcgctgcaaacagggctgtcaaaagggtttataatggtgaacagacaaatacaatctcgtttcagactgaatttcagcctaatctattctgggcactggaaaaggtcgcacaaaacgtcactgctaagacgtaccaacagatagatgccagagcaaagggcagattcgacggcgtggcgccagagccacgggaaggggtaaggagtgggcatataccaggaagcgtctgcgttccgttccccgagatgttcgacggcgcaccaccgagccttctcctccccgccgacgagctgcggcggaagtttcagcacgcaggaatctccctggaccgacccatcgtcgtgacctgcggatccggcgtgactgcctgcatactcgctctggggctgtacaggatcggaaagcgtgatgtgccagtctacgatgggtcctggacggagtgggagggtcagtcggactccgattaccccaaagtcaccgctcctggtacagcttgagcgtctgggactgggagttggcagttttagactgccagcatgatggcattgtgtttgcgacaggctgaaccgattttatcgagcactggaagcattgtattcgctactggtaggcctgctaatggcaaaaattccaacccacgcccacccaaaaaaanaaaanaaaanaaaaa

SEQ ID NO: 98318 - DNA, 356 bp, Zea mays
  Clone ID: MRT4577_21175C.1
gggcgattgggatcctcgaggccggccggtttataatggtgaacagacaaatacaatctcgtttcagactgaatttcagcctaatctattctgggcactggaaaaggctagtgactttttttaacctcaaagtactagctttgcatgggtagaaaatgaataatgtatcagtctggtcatatgatccccttttgctttctttgatttaacattgatgccccacccaaaattccgtggaactccataaacttgatcgattctctgaagtaataggatcagccctgaattctgtaaaaaaaaaaaaaaaaaaaaaaaaaaaaaaaaaaagaaaaaaaaaaaaaaaaaaacccgcggcc

SEQ ID NO: 98319 - DNA, 149 bp, Zea mays
  unsure (1)..(149): unsure at all n locations
  Clone ID: MRT4577_21177C.1
ggccgggtttgtttcggttgcnacagnacagcactccctttcacgaatcccccacctggggggggggacgacaactcatcaatccgcttgacagccaggacgacagaaccaccatttgtgccacgggagagggacttcaagctacaaca

SEQ ID NO: 98320 - DNA, 1135 bp, Zea mays
  Clone ID: MRT4577_21178C.1
taccctacctcacaagtccaatcagtttgtctgctccgcccgttgcccgtggcccgtcggtctctcttgcagtctcgccgctccccttcctcccccgcaggaatccgaatcagtaagtccggcgacctaggtctctcggcttgtccgcagcccgccggtcagtaatggcgcaggatgatccggttgtttctgctcagtggctgcacgagcacctagggatgcctgatgttaaggtaaaaaaaaaacatctagtttgcgtgttcatattcacttcagagacacttcagtaatgcttccttcatcgaagaagaaagttcagagatatacttcttctatcccctgcgttactggttttggatgcttcctggtacatgccggtagagaacagggatccatggaaagaatatcaggtggcacacatccccggtgcgctattcttcgacttagatggcatagttgatcggacaactgatttaccgcacatgctgccatcagaagaggcttttgcagcagcaatttctgagctggatataaaaaaccaggataaagttattgtctatgatggaaagggattcttcagtgcgcctcgtgtttggtggatgtttagagtgtttgggcacaagaaagtctgggtactagacggcggtttgcctcagtggcaagcttctgggttcaacgtggaaaaggccagccctgacgatgacgcagttctgaaatcaatcgctgcaaacagggctgtcaaaagggtttataatggtgaaacagacaaatacaatctcgtttcagactgaatttcagcctaatctattctgggcactggaaaaggtcgacaaaacgtcactgctaagacgtaccaacagatagatgccagagcaaagggctagtgactttttttaacctcaaagtactagctttgcatgggtagaaaatgaataatgtatcagtctggtcatatgatccccttttgctttctttgatttaacattgatgccccacccaaaattccgtggaactccataaacttgatcgattctctgaagtaataggatcagctctgaattctgtaaatatgatcaactcaaaaaggagctatgaagatcatgactaagcgaaacattaatgctagtcccatgcc

SEQ ID NO: 98321 - DNA, 214 bp, Zea mays
  unsure (1)..(214): unsure at all n locations
  Clone ID: MRT4577_21179C.1
ccctcnnncccggcgnntcgcgctttctggtcnnngtcgtcggcncccgggaagatgnngctggcggnncttcagggtaccttcanntctggtnncaggccctttttctggcatgttcttnnngccagaaggtgcagnnnagcgcggatnnaggaagaaataccattcagcacgaaaaagtgaggcggagcgctgntacttctctctcttcatt

SEQ ID NO: 98322 - DNA, 3815 bp, Zea mays
  Clone ID: MRT4577_2117C.1
atggatcctaagggaaaggggatggtggtcaacgacaaggagaaggagtccttcctcaacgagccgagggacgacaagcctactgactctggctcaagtcataagaagaaggacgggaagaagaagaggtgcatcaagaagatcgtctactacgacagcgacgagtcttcttcttccccaagagacgatgactacgatgagaaaaagaaaccggttaactcaaattttcatttgattattctcgtattccttataattctaatgcccatttgctttctattcctcttggtaaacctccacactttgatggagaggactacgccttttgaagtcacaaaatgcgtagtcaccttttctctctccatcctagtatttgggagatagttgagaatggaatgcaatttgatagtacggataaccctgtattcattaacgaacaagttcataagaatgcacaagctaccactgttttgttagaatcattatgcagggatgaatacaacaaggtgagcggcttggacaatgccaagcaaatatgggacaccctcaagatatcgcatgaggggaatgacaccaccatgatcaccaaaatggagttggtggaaggcgagctgggaaggttcgcgatgatcaagggagaggagccaacacaaacgtacaaaaggctcaagaccctggtcaacaagattaggagctatggaagcacaagatggacggaccacgacgtcgtccgacttatgctcaggtcttttactgttattgaccctcatcttgtgaacctcatccgtgaaaatcctaggtacacaaagatgacacccgaggagatactcaaaaaaatttgtgagcgggcgtatgatagtcaaagaggcaaggaacaagaaaagagcaggaagagggagaagaagaaggcctacaagaaggcgaagggcgaggcgcaccttggcaaagaatgggattcagactgctcttcttccgactccgacgacgaaggactcgctacctcagccttcaacaaatcgtcactcttccccaacgagcgccacacttgcctcatggccaaagaaaagaatgtaagtgttcgagaaacccctaagtatactacttcaagcgatgatgattctagtgatgatgaagtagattatacggatttatttaagggtttagatatagcaaaagtggataaaattaatgagttaattgatactctaaatgaaaaagatagattgctagagaagcaagaggacattttatatgaagaacatgacaaatttgttagtgtacaaaagtctcttgctttagaaactaaaagaaatgaaatgttatcctctgaattgtctgtgtgccatgaatcaatctctagtttaaagattttgaataatgatttaagtgctaagctagaggtagcaaataaatctagttcatgtgtagaacatgttgtaatctgcaatagatgcaaggattttaatgctgatgcttgtgatgaacacttaatttccatttctaaattaaatgatgaagtggcaagtcttaatgctcaacttaagacttgcaaaagtgattttgataaattaaaatttactagggatgtctacactgttggtagacacccctcaattaaggatgggcttggctttcaaaaggaagccaagaacttaacaagccaaagggctcccattcccaacaaggagaaagggaaggcccctatggctaatattcctaagagaaaccatgcttttatgtatgataggaaaattggtagttattctaactttaataagagttatatttatgctggttattatgatccaaatgctatgtttgcctctagctctacttttgtgcatggtagaagtaggtctaggaaaagtaatattgtgcatcatgtgcctaggaaagtttatgcatccgggggctcaagctggattatcgacagcggatgcacaaaccacatgacgggggagaagaagatgttcacctcctacgtcaagaacaaggattcccaagattcgatcatctttggagatgggaaccaagtcaaggttaaaggactaggaaaaatagccatttcgtccgagcattctatctcaaatgtgttcttagttgaatcgctcgggtacaacttattgtctatggtctttagaaggagtgatggttcactagcttttaagggtgtattagacgacaaactctacttagtggatttttcaaaagaggaagccgatctagatgcatgcttaatagctaagactagtatgggtgggctttggcatcgccgtctagcacatgttgggatgaagaaccttcacaaacttctaaagggagaacatgataaattagaaacccaagggaccctcaagcgctttctaaggagagctcaaaacgaatttgagctcaagcaaaatggtgtggtagagaggaagaacaggacgctcattgacatggcgaggacaatgcttggagaggtcaagatgcctgagcggttttggtcggaagctataaacacagcttgccacgccataaaccgggtctaccttcatcgcctcctcaagaagacctcatatgaacttcttaccggtaacaaacccaacgtctcatactttcgtgtatttgggagtaaatgttacattctagtgaagaaaggtagaaattctaaatttgctcccaaagttgtagaagggtttttactagggtatgactcaaatacaagggcgtatagagtcttcaacaagtcatcaggtttggttgaagtctctagcgacgttgtatttgatgagactaatggctctccaagagagcaagttgatcttgatgatgtagatgaagatgatgttccaacggccgcaatacgcaccatggcgattggagatgacgagcacggggtggtgacaaggaacaaggctcgacttgtggcaaaaggttatgcccaacttgcaggtttggatttcgaggagacttttgctcctgtggctagggtagagtctattcgcattctattagcctatgccgctcaccactctttcaggttgttccaaatggatgtgaagagcgctttcctcaacgggccaatcaaggaggaggtatacgtggaacaaccccctagctttgaggatgaaaggtaccccgaccatgtgtgtaagctctctaaggcactctatggacttaagcaagccccaagagcatggtatgaatgccttagagatttcttaattgctaatgctttcaaggttgggaaagctgatcccactcttttcactaagacttgtgatggtgacctatttgtgtaccaaatttatgtcgatgacataatatttggttctactaatcaaaagtcttgtgaggagtttagcagggtgatgactcaaaagtttgagatgtcgatgatgggcgagttgaactacttccttgggttccaagtgaagcaactcaaggacgacaccttcatctcccaaacgaagtacactcaataccttctcaagcggtttgggatgaaggatgccaagcccgcgaagacaccgatgggaactgatggacatgtcgacctcaacaaaggaggtaagtccgttgatcaaaacgcatactggtctatgatagggtcattactttatttatatgctagtagaccggatattatgcttagtgtatgcatgtgtgctagatatcaatccaaccccaaggaatgtcaccttgtggccgttaagcagattcttagatatttagttgctacgccttgcttcgggatctggtattgtcggcgtttcggacccgcggggatcgtcaaccaaccagtgaatttgtcgctgcgtgtccctgcctag

SEQ ID NO: 98323 - DNA, 173 bp, Zea mays
  Clone ID: MRT4577_21180C.1
gcggacgcgtgggcgacgccacagcttgtgttggcgcgcgcaatggcactcgtgtgcgctctcgtctccaccaccgcgtcgcgggctcccaggaatgggcacacggcgtgtcttgtgtttgctcctctcttatctcttctcgcgcaagacgctgtgggcaggctggcgcccgt

SEQ ID NO: 98324 - DNA, 225 bp, Zea mays
  unsure (1)..(225): unsure at all n locations
  Clone ID: MRT4577_21181C.1
ccccaaaccaacaccacgggggcttcgngttgtgaaaacccaatcttcaaccctaccagatccaccacgccctcacagctggcatctaacctnaatcacccttttttctttcacaancatcanccctattactggtttttgcctggggnncctcnatngncccanaacatcanttcacaacaacaacaacaacaagngctagcggaccgggctgcctactctcag

SEQ ID NO: 98325 - DNA, 369 bp, Zea mays
  unsure (1)..(369): unsure at all n locations
  Clone ID: MRT4577_21182C.1
ggggggtgttttttttactgcagcccaagtgggctttggcgtacttgttcagagttcagtcggtggatttggtggaactggtcatttcgctgacgatgacccagactgctacatggttctgtgccgattaagagggagattggggggggggggggtggtaagcaccctaacgttgttcgcatatttgaggggggggggagggtcggcacatattaattattccaggctgatcttatcgaaaggcgctgtgtccaataatgttcaggtgatgggaagnaaaacaaaggtctacattgcgctggtgtntgctnccgggggcgagactgtggacacaattggaagtggcgtgcacattatgcatgcaggtgt

SEQ ID NO: 98326 - DNA, 623 bp, Zea mays
  Clone ID: MRT4577_21183C.1
gggtacacggcgccccccttcgagtttttttttttttttttttttttttttttttttttttttttttttttttttttttttttttttttttttttttttttttttaaaggaaacgaacaaacaactgctttggattgcccgagcccggggaggaaacacggaaaaccccgggggagccaaaccattcgggcccccccccaccaattttaagggggagactacacaaaaaaaaacccccgggggaccaaaaccgccaaaggggcccccattaatattccggcccccctaccctccccggtttaaacagcaccccccgaactgggaggagacccactttaaaaaaaaaaaagctgaaacaggggcaaaatgttattttggcccaatttgccggggccccctggccggccggggggggaaagccccttgggtaaaaaaaatccaaccttggaaaactgggggcccccttttttggccaaccccggcaccccggggggggggcgcggggccatcccctcggggagggggtttttgggcggccggccccgcgggcgcggaattttggggggggcgggggggtcacccggtttgggaggggggccccccccccccggcgcggggggggg

SEQ ID NO: 98327 - DNA, 163 bp, Zea mays
  Clone ID: MRT4577_21184C.1
gaacaaaacaattttaaaatgtaacaaccaaatatttaaaaagccaggaaattttgggaaaacaaattcaggatttaaaatggaaaaagtttgggtaaggggttgatcctaaccaggaaaccaacttacggaagaatttcccgaacgcgttggcggacactgg

SEQ ID NO: 98328 - DNA, 229 bp, Zea mays
  Clone ID: MRT4577_21185C.1
gcacattcatccacactaacgaacgttctctagctccgatcacgagctagctgaagtcgacattcgccgctgtgctgaacagcacgaagacgcctaatgcgatcgctactgctggtgagaccgcgactcgtactatctcctactgctgaacgccatggttggcgagcaccttctctttatgcagagctacgagctcgacgcctactgtgacattttaacacccgagctc

SEQ ID NO: 98329 - DNA, 322 bp, Zea mays
  Clone ID: MRT4577_21186C.1
ggaacacccgcccgacccacgcgtacgcggcaatctcatcatacccaaattaattttcttgcttaaacaaactgcaatccgatctggtgatcatacattggtcctagccatacagtgctaacaagctcatatacttttgctacttctgatatacctattaccactggcgaatccaatgtgctaatatccaattcatcaaccgtacaagatccaacaggcaatcgaaacacgcatgttaccattataacccttgttcctacaacaaccggtatccctacaacagcagttaactctacaacatttgctggctcataacatgatg

SEQ ID NO: 98330 - DNA, 234 bp, Zea mays
  Clone ID: MRT4577_21187C.1
ggtgaagatggttcccactaagcccatggtggtggagaccttttctcagtatcctcctcttggtcgatttgctgccaagaagaaatgatctatctggctggtgctgtgcttgcttgttggttacctcgtggaagcttaaaatatctcgtcttgttgacatccttgcagttgtcgcgtgaacaagtaatctatgatggcaatgtttgcctggtcatgaagtattattactttcgg

SEQ ID NO: 98331 - DNA, 774 bp, Zea mays
  Clone ID: MRT4577_21188C.1
ccggccgggatactccatccaaaggaaacaacacaaataaccatccccatcctaggttcttgtcgattctcgtcaatctcacgagactcctgatcctagtcgatactagctttcttttcaaccaaacgacacaacggcgcagtcttctcgagtagaagttctgccctcttttttcgcttccgtcaccccgcgatttatcaaccctagatcgagctgtgcttgatctagatttcccagagcctcaaccgcaaatatggctgacaagggtcttgaggatgtccccgagggacagatcgagtccaactacgatgagaccgtcgactccttcgatgacatgaacctcaagtctgagctcctccgaggtgtctatgcctacggtttcgagcgtccttctgctatccagcagcgtgctatcatgcccgttatcaagggtcacgatgtcatcgctcaggcccagtccggtactggaaagaccgccaccttctccatctctgttctccagaagatcgacaccaatgttaagcagtgccaggctctgatccttgctcctacccgtgagcttgctcagcagatccagaaggtcgttgttgccatcggagatttcatgcaaatcgagtgccacgcttgtatcggtggtaccagtgtccgtgaggatatgaaggcccttcaggacggccctcaggttgttgtcggcactcccggtcgtgttcaggacaggatccagcgccgtttcctcagacgacagcatgaagatgttcgttctcgacgaggctg

SEQ ID NO: 98332 - DNA, 966 bp, Zea mays
  Clone ID: MRT4577_21189C.1
agtacaaaactcataaccatgtatgccttacattcgatgttccataaaaaaataagtcttaatagcatcacggtttcaacgaaagtaataatacttcatgaccaggcaaacattgccatcatagattacttgttcacgcgacaactgcaaggatgtcaacaagacgagatattttaagcttccacgaggtaaccaacaagcaagcacagcaccagacagatagatcatttcttcttggcagcagccttcgtcaccttgggctccagttgggtccttcttctccacactcttgatgactgccacacctcacacattgctgtcaagtttgctgagctcgttaccaagattgataggcgatccggcaaggagctggagaaggagcccaaatttctcaagaacggtgatgctggtatggtgaagatggttcccactaagcccatggtggtggagaccttttctcagtatcctcctcttggtcgatttgctgtccgtgacatgaggcaaacggtggctgtcggagtcatcaagagtgtggagaagaaggacccaactggagccaaggtgacgaaggctgctgccaagaagaaatgatctatctgtctggtgctgtgcttgcttgttggttacctcgtggaagcttaaaatatctcgtcttgttgacatccttgcagttgtcgcgtgaacaagtaatctatgatggcaatgtttgcctggtcatgaagtattattactttcgttgaaaccgtgatgctattaagacttaatttttttatggaacatcgaatgtaaggcatacatggttatgagttttgtactaccctttgcagtgtgttcctgtttaccttttgtgctgacaaaaaaaaaaaaaaaaaaaaaaaaaatcggttcagccggaggtagggtccagcggccggaagagcaccgcacatcgcgcggtgtccggtgcgcccccggcggcccttgaaa

SEQ ID NO: 98333 - DNA, 2031 bp, Zea mays
  Clone ID: MRT4577_2118C.1
atggcgaggacgatgcttggtgaattcaagacgcccgaacggttttggacggaagccgtgagcacggcttgccacgccataaaccgggtctaccttcatcgcctcctcaagaagacttcatatgagcttctaaccggtaacaaacccaatgtatcttactttcgtgtttttgggagtaaatgctacattctagtgaagaaaggtagaaattctaagtttgctctcaaagctgtagaagggtttttattaggttatgattcaaatacaaaggcatatagggtcttcaacaaatcatcgggtttagttgaagtatctagcaacgttgtatttgatgagactaatggctctccaagagagcaagttgttgatcttgatgatgtagatgaagaagacgttccaacggccgcaatacgtaccatggcgattggagatgtgcggccacaggaacaaaaggagcaagatcaaccttcttccacaacaatggtgcatcccccaactcaagacgatgaacaggtccatcaagaggaggcgtgtgatcaagggggagcacaagacgatcatgtaatggaggaagaagcgcaaccggcacctccaacccaagttcgagcgacgattcaaagggatcatcccgtcgaccagattttgggtgatattagcaagggagtaactactctctctagattagttaatttttgtgagcattactcttttgtctcttctattgagcctttcagggtagaagaggccttcctagatccagactcggtgttggccatgcaggaagagctcaataacttcaaaagaaatgaagtttggacgctggtgcctcgtcccaagcaaaatgttgtgggaaccaagtgggtgttccgcaacaaacaggacgggcacggggtggtgacgaggaacaaggttatgcccaagtcgcagagcgctttcctcaacgggccaatcaaggaggaggtgtacgtggagcaaccccctggcttcgaggatgaacggtaccccgaccacgttgggaaagccgatccgactttattcactaagacttgtgatggtgatttatttgtgtgccaaatttatgtcgatgacataatatttggttctactaaccaaaagtcttgtgaagagtttagcggggtgatgactcaaaaattcgagatgtcgatgatgggcgagttaagctatttccttgggttccaagtgaagcaactcaaggatgggaccttcatctcccaaacgaagtacacgcaagacttaatcaagtggtttgggatgaaggacgccaagcccgcaaagactccaatgggaaccgacggacacaccgacctcaacaaaggaggtaagtccgtggatcaaaaggcataccggtctatgatagggtccttactttatttatgtgctagtagaccggatattatgcttagcgtatgcatgtgtgctagatttcaatccgatccacgggagtgtcacttagtggccgtgaagcgaattcttagatatttagtcgctacgccttgctttgggatctggtatccaaaggggtctacctttgacttgattggatattcatactccgactatgctggatgtaaggtcgatagaaagagtacatcggggacgtgccaattcgtaggaaggtccctggtgtcatggagttctaagaaacaaacttctgttgccctatctaccgctgaggccgagtatgttgccgcaggccagtgttgcgtgcaactactttggatgaggcaaaccctcagggactttggctacaatctgagcaaagtcccacttctatgtgataatgagagtgctatccgcatggcggacaaccccgttgagcacagccgcacaaagcacattgacatccggcatcactttttgagagaccaccagcaaaagggggatatcgaagtgttttatgttagcaccgagaaccagctagccgatatctttaccaagcctttagatgagtcgaccttttgcacgctgcgtagtgagctaaatgtcttagattcgcggaacttggattga

SEQ ID NO: 98334 - DNA, 347 bp, Zea mays
  Clone ID: MRT4577_21190C.1
actactttttttttttttccttatcttttgttaggacaaaactgataaccatgtatgccttacattcgatggtccataaaaaaattaagttttaatagcatcacggcttcaacgaaaggtataattctttatgaccaggcaaacattgccattatagaatacttgttcacccgacaactgcatggatgtcaacaagactagatattttaagcttccacgaggtaaccaacaagcaagcacaggaccagacagatagatcatttttttttggcagcagccttcgtaaccttggctccaggtgggtccttcttctccacactcttgatgactccgacagccaccgtttg

SEQ ID NO: 98335 - DNA, 431 bp, Zea mays
  Clone ID: MRT4577_21191C.1
ctggttgggttattttttttttttttttttggaaggaaaaaggtattgaaacgttctactgaaaccaagaaatcttgctccattgtgtcatacgcaaatccaagcggctagcctggagagttcaaatacctcagtgcggagcctgcgctaaaactacaaaccgatcggaccgttcctttaacgcgatagctggacaggactgggccctccgaacaacactgatacaagcgcggtaagtccacatgtaaaggtgctaacggcgctacgtggaattgactctttttcctctactaggttcgaatgctgcccacaagccttgattaccagacctacaaggcgacgggaattagttcctgaaaaaacctgttcagggcacctttctgcggataaaaggccatcaggttacccactggatcctggaacggcttctg

SEQ ID NO: 98336 - DNA, 655 bp, Zea mays
  Clone ID: MRT4577_21192C.1
ttaagcggtccagctagccgacaggcgagtcctgttgctcgaaataaggaagaaacacggtattgcacccaaaatacccagatgttcaggccctgacagccacaatgaacagacaccggcactcaaggtgccattacaaatggaactccggttccactcctgcgggtatgaacaacctccacatcggagagcctgcgggacgacaaactccgggtgactcgccggcgacctctgcagcagcagcgatgggtcccagggcggacgcttccgctggaaggctctcattcgtgtccccactcgagggacgagaacccgacattaaagccaaagagccggaggtcggtccgcgggtggcgctgacggtctcatcggcggagaagctttctccagctggcaccaccttagcaccggtggcggcgtccacctgcccaccaacaccgcaccagcgggcgccggtcgccccaaagcgcaacgacatgtccttactcccgtcctcgctacaaaaacgagaatgggaccgtcccagaatacgagtaccgccctcgcggcgtacaacgtgttgtgagaccctccggtgcggctggccaccgtcgctcggacagagggcggaatgctgcaccctggctgggcagcagcatttcgccttccccaacat

SEQ ID NO: 98337 - DNA, 768 bp, Zea mays
  Clone ID: MRT4577_21193C.1
gcgggatcgacaggcggtctggcaaggagcttgagaaggagccaaagttcctgaagaacggtgatgctggtatggtgaagatgataccgaccaagcccatggtggtggagacgttctcagcgtatcctccccttggtaggtttgctgtccgtgacatgaggcagacggttgctgttggagttatcaagagtgtggagaagaaggacccgaccggcgccaaggtgaccaaggctgctgccaagaagaaatgatctatctggctggtgctgtgcttgcttgttggttacctcgtggaagcttaaaatatctcgtcttgttgacatccttgcagttgtcgcgtgaacaagtaatctatgatggcaatgtttgcctggtcatgaagtattattactttcgttgaaaccgtgatgctattaagacttaatttttttatggaacatcgaatgtaaggcatacatggttaaaaaaaaaaaaaaaaaaaaaaaaaaaaaaaaaaaaaaaaaaaaaaaaaaaaaaaaaaaaaaaaaaaaaaaaaaaaaaaaaaaaaaaaaaaaaaaaaaaaaaaaaaaaaaaaaaaaaaaaaaaaaaaaaaaaaaaaaaaaagggggggccctttttaaaaaaccaaatttacctgcccgcaccttgcaactacaaatttttttaagggggcaccaaaaataaattacagcgccgggctttaaaaccaagaacctggaaaaaaccgggctttcccaaaattaaaccccctgaaaaaaaacccctttt

SEQ ID NO: 98338 - DNA, 1024 bp, Zea mays
  Clone ID: MRT4577_21194C.1
ggccgcttttttttttttttttttaacttgaagacacaaagacaagccaatcatcagcacaaaaggtaaacaggaccacactgcaacaagggtagtacaaaactcataaccatgtatgccttacattcgatgttccataaaaaaaattaagtcttaatagcatcacggtttcaacgaaagtaataatacttcatgaccaggcaaacattgccatcatagattacttgttcacgcgacaactgcaaggatgtcaacaagacgagatattttaagcttccacgaggtaaccaacaagcaagcacagcaccagccagatagatcatttcttcttggcagcagccttcgtcaccttggctccagttgggtccttcttctccacactcttgatgactccgacagccaccgtttgcctcatgtcacggacagcaaatcgaccaagaggaggatactgagaaaaggtctccaccaccatgggcttagtgggaaccatcttcaccataccagcatcaccgttcttgagaaatttgggctccttctccagctccttgccggatcgcctatcaatcttggtaacgagctcagcaaacttgacagcaatgtgtgaggtgtggcagtccagaactggggcatagccattgccaatctggccagggtggttcatgatgatgacctgggaggtgaagctagcagcctccttggcagggtcatccttggagttggaggccacatacccacgcttcagatccttcacagcaacattcttcacgttgaagccaacattgtcaccaggaagggcctcctggagagcctcatggtgcatctcaacggacttaacctcagtagtaagaccagtaggcccaaaagtaacaaccataccaggcttaatgacaccagtctcaacacgtccaacagggacagttccaataccaccaatcttgtacacatcctgaagggggagacgcaggggcttgtctgaaggcctctttggctccttgactggtacaagggcccaaccctacttgag

SEQ ID NO: 98339 - DNA, 566 bp, Zea mays
  Clone ID: MRT4577_21195C.1
acttcccagacaccagacactcgactcttctcccccacgtccatattgaagagagagagaggaaagcacctgacatcatctgcgcgctccgctgtcccctcatgcgagcggacggtacgttgaactcttctacgcaccgcagacctccaagccttgaaaaaacatattcgactagcatgaaccttgagaccgaaaaaaaatgtgaaaccaacactcgatccatcagctcaacttcctctgcttccgagtggcatccgccgctgctatcactgctgtccaccaacaatgcaaacacctcctctccctcccttactatgagaactgtcagcgtcagcataagaccaccattccctaagccaaccgttgcccctgagaatgtcccaaacttcatcacaccacgctccttccacaaaggacagactcctcacaactatattacactactactctgatactaccagtatgaagacactaaagtacttgacactcccactctccacacgatggtcaactgattatattacattacgcggcctacacactaaacacgaccatcaatagatatc

SEQ ID NO: 98340 - DNA, 295 bp, Zea mays
  Clone ID: MRT4577_21196C.1
ggataaacacaccaccatacccacttctcttggattggtacaggcgattttttgggggctcgaaaacgctcaagggggggacctctactctatctacacagatcagacgcacgcaccacctggtctgttgggaatggacccgtccactccgatcaacaagcgaagcaaccgtcaactaaggctctaaatctcctaccctccgaccctcataataccgatcaagcatggcgacacctactcccaattctgcgagcagatcataacactccaatctcggtccctaccccccagtacc

SEQ ID NO: 98341 - DNA, 1072 bp, Zea mays
  Clone ID: MRT4577_21197C.1
tcgtaaccataacatatgcctactcacgtgggcgatggtggcacggatcagttcagcagcttgctcagtgtctcacttttcttctcgcaaatccagatgcgccatagacgagtcatacagagtgctctacaaaatgtactgcaacaaactactggatactgatcgaaccaacaagctgtacaaaaggtgagatccactgaccaacaggtgatcttctcgacggggttcaaaggcatgattcaaaccttcgcccatggctcctcaccttcactggtcaccagagtggttttcgggggttcatacatagaccatacttatcaacaaaacgtgtttcatgccatccacggcaaggaaacatgaatacaggctgagtcagccagcacccgctacggcacaaccaaacttgagtagaggatcagtcagcacacctagggcgcatggttgctgtaatctccccttacgccgccgccgccgtcagtcacaccattagggatgcttgccctattagggttcgccgtggtggagtatggagagtagggagtggcaacgctgccattgctgcttctcatgcgcccagccgtactgctccttgtaattttcgttcgggctctccgtcccttgcccatgcacttctcgaggtgcggggcgaagcggccggcgacgacagggcgaccgcagttcatacactcgacgacatcggcggcgatggcggggtgcgtctggccgaacacgtcgaccccgcccttgctcccaccctcctcggcggccccgcctcctccagggtggtggtggtcacctccagcggcggaggccgccgcacgtgccgcccagacgcggagctcctcctcctcgccgtcgacgctgcggtccaggccgaggcgcgcgatgcggtggcactccgacgcgacgtccgccacggcgcagtcgaggagctcctcgaagcaactgagcgccagctgggatcgagggctgagaggagcgtccttggacgacgacatgcctgcctcccgtttcctgcttcctgccggttttccccgccggccgcgaggtaccccggaaaaatcgttcccgg

SEQ ID NO: 98342 - DNA, 221 bp, Zea mays
  Clone ID: MRT4577_21198C.1
cccgaacgaacacccacaagggggagggatacccataaggactcatacatagagcatccttggaaacccacactcaggactgcgacgcctagccgggcacgaaaacatgacgatcaggcacacggattaaggtcggggacacatcataaacaaactactgtggtctaaaagtccaaattatatgggataccaactccttgtcctcaagatgaacgacggca

SEQ ID NO: 98343 - DNA, 399 bp, Zea mays
  Clone ID: MRT4577_21199C.1
cctttctttttattttttttttttttattatcttttttttttttttttgggcatcatcaatcaggccattccaagcttggtgattagcaaactacaggcgttacatgaaaataaatgccccaacgatgtgattcaaacaggaatgccacaaaccttggacccaaatgggcgttataccgtgacattccaaacattgaagaccccctatatattgaaaccatccctctagccaagcccacaaaccgaagttaaaaggtgcccatctatccctgggatgaattttttatggtgccacaaaaaaggatgcattccccgcttgcgagggcaaatcagcttcctatttcccagctcggcgacagcaaaaccaggagatcactcccatgctttaagggcaccacc

SEQ ID NO: 98344 - DNA, 734 bp, Zea mays
  Clone ID: MRT4577_2119C.1
cctcgaggccggccggggcagacgctactaagtgccagccggagcatgacgacagccatgtgaatatgagcggtgtcgcgtcagtaagaacgatggaagaggaagccgagaaactgggagaggatcggcacgaccgatctgcggggctcaaggagtgacccccgggcgtttcctcgagactggcaggccgcgctccgcctcttcctccgaagctggcagcagctagccaccgcaactgggaaggcaagactttccctagatctggtgcgctgagaacaacgccagaaaggagcgtacatccacgtcaagacggtaatagtactcaggactacacaccgtccaatacagcctatccagctactctatgggatatggtcaaagacttcacctcgctatgagggtactctccgaatactaacctaagcgaaactataatgcgaaagaaaagactagcataaatatgacatggaacctcagagcgataattgggcgaagtatggaaagatatgaccggaaagaacacaaaagtacgtggcgaaatctagacaagtgtaggaacttgacaatgaccatgcaatgagcatgacgacaatgtctgccattgctgggctcatatcttcgagttcaaaggaaaagaataagccagcaccgagtgaaaccatctgatgacagaagaactctctacgatcgcacggagatgtgaaacgttatattcaagtttcttcgaaagcagc

SEQ ID NO: 98345 - DNA, 680 bp, Zea mays
  Clone ID: MRT4577_211C.1
cctgaggtttgatggtgctctgattgttgatgtcaacgagttccagaccaacctggtgccctacccaagaatccacttcatgctttcctcctacgccccagtgatctcagccgagaaggcttaccatgagcagctctctgttgccgagatcaccaacagcgccttcgagccttcctccatgatggcaaagtgtgacccccgccacggcaagtacatggcctgctgcctcatgtaccgtggtgatgttgtgcccaaggatgtcaacgccgctgtggccaccatcaagacgaagcgcaccatccagtttgtggactggtgccccactggtttcaagtgtggtatcaactaccagccacccagcgtcgtcccaggcggcgaccttgccaaggtccagagggccgtctgcatgatctccaactccaccagcgttgtcgaggtcttctcccgcatcgaccacaagttcgacctgatgtacgccaagcgtgccttcgtccactggtacgtgggtgagggcatggaggagggagagttctctgaggcccgtgaggatctcgctgccctggagaaggactatgaagaagttggtgctgagttcgacgagggtgaggatggtgatgagggtgatgagtactatagcagctgagattgcgacctgatgatctgcccgagtggctttatct

SEQ ID NO: 98346 - DNA, 381 bp, Zea mays
  unsure (1)..(381): unsure at all n locations
  Clone ID: MRT4577_21200C.1
cgccaagaactataatccatagaatcactgcatagcaaaacacatgcgcacacttcaaagtttagcatctggtacttgagatggtgaaacctctagcaacaaattccagatgatttcatgctagtagaatccagttaccaaagagagaacaaatgctagcaaaataccggaacaccccagttgagatttcttcatgcttcacataacaatggcttctcctcgcccacaaaaacaaacaaagagggacttcagcaaggcgcataaagcttatggctaatgcgcgcatcactatggctccggcgttatcttcacctgaacccgcagatggactttgccgncnnttttgtggctgtcgtcagcaatgaacttcgaccaaggaat

SEQ ID NO: 98347 - DNA, 172 bp, Zea mays
  unsure (1)..(172): unsure at all n locations
  Clone ID: MRT4577_21201C.1
gaaaaccggcccgacccacgcgtncggagaatcctgattaaaatccaactttttttgttttcatagaaacaggcgaaaagcggcgagggccctcgtctgaatgaagactgatccaatctgaaaatactgagaccctgctttgattgtttggcggcaaaccatattctgaacg

SEQ ID NO: 98348 - DNA, 160 bp, Zea mays
  Clone ID: MRT4577_21202C.1
gtgacatgtttgctggtagatagcatcttgctcttggggtcctcgttttttgtatgcccttgaaagttgtatgcaaacaatgactcgatcatctgttgctcaaatctgcataacgtatgccgttgtcagatgtaataatcataggcgctcaaatgacaat

SEQ ID NO: 98349 - DNA, 1288 bp, Zea mays
  Clone ID: MRT4577_21203C.1
gaatgtaaccagggctatcaccagaaatcacactagtttcagcaggttctaccccaataacctgaaatgataggagggaaattattcaaatgaaaccaaacagtgacagaaaaattaggtcagataaatttcatacatattacatattgacatcggccttgcagaaatcaactgtattctcaaaatagaaattatgatagttgaacgactttagaatgaaaaaaaaatgaaccgataacagaatgatggtgctgctatccttttgctagaactagtttgatagtaatgtctctatgttctcataaaacacaaacacataactgtttagctaataaaatacaagaaaaccccttcaatgcaaaattcactcaaaaattaatccaggcaaaagtaggaaccttaatatctttgttcatccttttcaagtaacgcccagtgccactaatggtaccgcctgttcctatgcttgcaacaagtatatcaacagaacccaacgtgtcttcccatatttctgggcctgtggtttgaaagtggatctcactatttgcctcattgttgaactgctgaaacatatacgcatttggtgttctcaggactatttcctcagctttatcaaaagctccttttagtcctttggtaggatcagttaacacaatctctgctccgaatgcacgcagaagaatgcgtctctcgacatctaacgatgaaggcattgttgctatcaacttgtatcctcttgctgcagccacagaagcaatggctacaccagtatttccagttgttggttctaccaaaatggtcttgtctggagaaattaatcccttctcttcagcatcattaatcatgcttaatccaatcctatctttgacacttcggcaaggtcccatgtactcgagctttgcagcgatattagccacacatccgtcagcaactctattgagatacaccattggtgtttttccaatgagctgggtgacatcctgcgcaatgttcaccgcgtccatctcatccgtgtagtcatcctggatttcgacagaagcggaggctgctgccttcgatgaccatgccgcggagaggtggcggcgggcgaaagcgagacgcggggaaggaaggataccggggccacgcgaggtcaaaacggagttggaggtgacggaactgggcgcagcagcggcgacccgggggaagagcgagcaggcaggcggtggagccatcgccatggctgcgtctcttcgctcgtgctgtgtgcttgtttgtccgctgcccgggggtcccgccccggcgaggt

SEQ ID NO: 98350 - DNA, 116 bp, Zea mays
  Clone ID: MRT4577_21204C.1
ttaactttttacaaaagcaggaaggttgaaaccctccaaagcttatacataaaacctagcttgtccttctccagaactggaaacgctcttccagcctcacgaacagaacgagtact

SEQ ID NO: 98351 - DNA, 266 bp, Zea mays
  Clone ID: MRT4577_21205C.1
ccacgcgtccgccctcgcgtccgcggacgcgtgggaaaaaaaagggggaatttaaaaaaaaaaaggggtataaaaaaaacaaaatatgaaaaataaaaaaacttaaaggattgggcggccggtctagggggtccaaaatttactagctctatctgcgcatcgagtagcttgacagacctggtaactaaatttaattaactggccggcgtttcacatcgtagagactgggataacccatgtttttgctgaccttaaggaccttgata

SEQ ID NO: 98352 - DNA, 667 bp, Zea mays
  Clone ID: MRT4577_21207C.1
cccacgcgtccgatattcttcccgtcgaaggcggagagaggaaaagggacaagggcaaggcaagagagaggcgtcgtcgtttgatctgctgccggagtgcgaagaggaagaggaagaggagcgccggagttgtaaagatgttcctggtggactggttctatggggtgctggcatcgcttgggctgtggcagaaggaggctaagatcctcttccttggcctcgacaacgccggcaagaccaccctcctcttttgtccatggcgctgctgctttcgcaggagggttgaaatcaagtctggtcgtgacatggcagctgcatggaaaggtttatggtagctagtgataggcaaagcttgtaagtcggtgttaatcctagatatgtgatgtggggtctactttctcttctgattgtttcttggggtggtctaaacggttcaaaaaatgcgacttcttcgggtcagctagaagttatgtaatcacgttacatgaagcagcgcattgttcgccagctgctttggtgtggtggacttctgtcggtaatggtgagcttgcggtttctaaaagtatgcgtgtagagtaattgtgtatctacagattccaaaccttgcatttgctgttgactgaggtagcccggaaatgataaaacatcctggtgaaagttgcattgc

SEQ ID NO: 98353 - DNA, 1070 bp, Zea mays
  Clone ID: MRT4577_21208C.1
gaccctcgaggctggccgggagaatcagcacgcagggcacaaggagaagaagaggggaagaaatattcttcccgtcgaaagacggagagaggaaaagggacaagggcaaggcaagagagaggcgtcgtcgtttgatctgctgccggagtgcgaagaggaagaggagcgccggagttgtaaagatgttcctggtggactggttctatggggtgctggcatcgcttgggctgtggcagaaggaggctaagatcctcttccttggcctcgacaacgccggcaagaccaccctccttcacatgctgaaggacgagcggctcgtacagcaccagccgacgcagtaccccacgtcagaagagttgagcatcggcaggatcaagttcaaggcgttcgaccttgggggccaccagatcgcccgccgcgtctggaaggactactacgccaaggttgatgctgttgtgtacttggtggatgctgttgacaaggaacgttttgccgagtcgaagaaggagcttgatgcgcttcttgcagatgactcccttgcaaacgttcctttcctcatactgggcaacaagattgacatcccatacgcggcttcagaggaggagctgcggtactaccttggcctgagcaacttcacaacggggaagggcaacgtgaacttggctgattccaatgttcgccccctggagatcttcatgtgcagtgtggtgcgcaagatgggctatggtgaaggcttcaaatggatgtctcagtacatcaagtgaggcactgtcgtcctctttcgtccatggcgctgctcaggttcgcaggtggttgaaaatcaagtggaactggtcgtaactatggagaacatggcagctgcatgaaaaggtttatggtagctagtgacaggcaaagcttgtaagttggtgttaattaatcctagatattgtgatggggtctgctttctcttctgattgtttcggggtggtctaaacggttcaaaaataatgcggttgcttcgaggcagctagaagtatttatttaagcttatgtaatcacgttacatgaagcagtgcattgttcgtagc

SEQ ID NO: 98354 - DNA, 1334 bp, Zea mays
  Clone ID: MRT4577_21209C.1
cattggtacctcctcgaggccggccgggaatgaccgcttgtgatctgatctgacggtagaggtaagttgttctagaacaagtagacgccaccgaagaatctagaatacagcacgcagggcacaaggagaagaagaggggaagaaatattcttcccgtcgaaagacggagagaggaaaagggacaagggcaaggcaagagagaggcgtcgtcgtttgatctgctgccggagtgcgaagaggaagaggaagaggagcgccggagttgtaaagatgttcctggtggactggttctatggggtgctggcatcgcttgggctgtggcagaaggaggctaagatcctcttccttggcctcgacaacgccggcaagaccaccctcctccacatgctgaaggacgagcggctcgtacagcaccagccgacgcagtaccccacgtcagaagagttgagcatcggcaggatcaagttcaaggcgttcgaccttgggggccaccagatcgcccgccgcgtctggaaggactactacgccaaggttgatgctgttgtgtacttggtggatgctgttgacaaggaacgttttgccgagtcgaagaaggagcttgatgcgcttcttgcagatgactcccttgcaaacgttcctttcctcatactgggcaacaagattgacatcccatacgcggcttcagaggaggagctgaggtactacctcggcctgagcaacttcacaaccgggaagggcaacgtgaacttggccgactccaatgtccggcccctggagatcttcatgtgcagtgtggtgcgcaagatgggctatggcgaaggcttcaaatggatgtctcagtacatcaagtgagtcgctgctgtcctcttttgtccatggcgctgctgctttcgcaggagggttgaaatcaagtctggtcgtgacatggcagctgcatggaaaggtttatggtagctagtgataggcaaagcttgtaagtcggtgttaatcctagatatgtgatgtggggtctactttctcttctgattgtttcttggggtggtctaaacggttaaaaaaaatgcgacttcttcgggtcagctagaagttatgtaatcacgttacatgaagcagcgcattgttcgccagctgctttggtgtggtggacttctgtcggtaatggtgagcttgcggtttctaaaagtatgcgtgtagagtaattgtgtatctacagattccaaaccttgcagaaaaaaaaaaaaaaaaaaaaaaaaaaaaaaaaaaaaaaaaaaaataaaaaaaaaaaaaaaaaaaaaaaaaaaaaaaaaaaaaaaaaaaacagggcggctgctcaa

SEQ ID NO: 98355 - DNA, 2081 bp, Zea mays
  Clone ID: MRT4577_2120C.1
atggatcctaaggggaagggaattgtgatcaacgacaaggagaaggagtctttcgtcaatgagccaagggatgacaaatccaacaactcgggctcgggccacaagcgaaaagatgggaagaagaagaagacaagacgcatcaaggagatcgtctactacgacagcgatgagtcctcttcttcccaaaaggacgacgacaacgactacaggaagacggtcaattcgaacttttcgtttgattattctcgtattccacatagttcgaattcgcatttgctttccattcctcttggtaaacctccacactttgatggggaggactacggattttggagtcacaaaatgcgtagtcatttattctctctccatccaagcatatgggagattgtagagaatggaatgaaatttgatagctcggatagccctatgtttatcaatgaacaaattcataaaaatgcacaagctactactgttctcttagcatctttgtgcagggaagagtacaataaggtgagcggcttggacaatgccaagcagatatgggacaccctcaagatctctcacgaggggaacgacatcaccatgctcaccaagatggagttagtggagggcgagcttggacgattcgccatgataaggggagaagagccaactcaaacttacaaccggctcaagacccttatcaacaagataaggagctacggaagcacgcgttggacggatcacgacgtcgtccgcctaatgctcaggtcatttactgttcttgatcctcatctcgtgaacaatattcgtgagaatcccaggtacacgatgatgacgcccgaagaagtacttggaaaattcgtgagcgggcggatgatgatcaaggaggctagatatgtcgacgacgcgttgaacggtccactccacgagtctcaacccattgctctaaaggcaacaagaagcaaagaggcgctacctagcaaggtggcacaaattgaggcggccggactcaatgatgaagagatggctctaatcatcaaacgcttcaagacggtgctaaaaggtcacaaggggcagccaagcaagaccaagacaaaggggaagcgctcatgcttcaagtgcggtaagattggtcattttatcgctaactgccccgataacgatagtgaccaggaacagggaaacaagagggaaaagaagaagaattacaagaaggccaagggcgaggcacatctcggcaaggagtgggattcggattgctcctcctccgactccgacaatgagggactcgccgccactgccttcaacaaatcggctctcttccccaacgagcatcacacttgcctcatggcaagggaaaagaaggtaatcactcataatgctaatacttatgattcttctagtgatgatgaatctagtgaggatgaaattgattactctagtttattcaagggattggatagaactaagatagctaagattaatgagttgattgatgccttaaatgaaaaggatagaatcttagagaaacaagaagaccttttatatgaagaacatgataaatttgttagtgcacaaaattcacttgctttagaagttaaaagaaatggaatactttctggtgaactttctacttgtaatgaaactatttcttctttaaaaggtgaaattgatgttttaactgctaaactagaagtagcaagtaactcctgtgttgaaaatattacaatttgcactaggtgtaaggattttgatgttaatgcttgtagtgaacacttagtctcaatttcaaaactaaatgatgaagtggctagtcttaatgctcaacttaagactagcaagagtgaagttgataaaataaaatttgcaagggatgcctacacggtcggtagacatccctcaattaaggatggtcttggcttcaagagagaggccaagaacttaacaagccataaggctcccatcctcgtcaaggagaaagggaaggcccctatggctagtagtgctaaaaggaaccatgctttcttgtaccatgataagagacatgctagaaatgcttataataattttgattcacatgcttatgattctcatgccat

SEQ ID NO: 98356 - DNA, 656 bp, Zea mays
  Clone ID: MRT4577_21210C.1
cctcgagccggccgggtctcggtgttcaatatgattgctagccgctctcatttctctgactccgacgggatgttgccctgcccctgattgctacacaacaggggcacgaacgtcctgctgcacttctcgcgtctgtcttaggtcgatgatccggtgacggacgaaacacttcaccaggtcacgctcaatgccggtgatccccggatgaagaagttctagaatgctactgactgagtcagctcgtggctcgattccaacgcttcacatcaagtcatgccacatattgtcacgccaccgtctatcaccaactccgaccttttcgccaaggaatggtgatcatgaacatgcttgcctgcacgtttgattacactattatgtgtacatggatgatgcacaccatggtgagcgatcgatacatcagattctaactcgcatgctcactacaaactttactatgatgttcgtgcacatgcagcggtgtggatatagccctttgccacataaagtcagttcgtgatggccactgaagagcacgctacaacggtggagaagattatatcttatctccgcacgacgctggaaggttgctatgcgataaaagcacatctagtgccgacaggatgatgagtgcagcctccaacgaagtgccgttgctg

SEQ ID NO: 98357 - DNA, 270 bp, Zea mays
  unsure (1)..(270): unsure at all n locations
  Clone ID: MRT4577_21211C.1
attataacacaagaacaaagccggatcccctttatttatttatttatggggccggatgaacgacccgagacaagcatttatttttttgctgtgcttattatgggggggggggggggctacaagcccatcccacatgcactatgctcttgggggggggggggagggcatcattcccccgtcgaaaaaccatgggcttttgccgaccccgctgttggttgcgcgtaaggctggggccctcttactnctgccgcaacagctgacattcaacct

SEQ ID NO: 98358 - DNA, 276 bp, Zea mays
  Clone ID: MRT4577_21212C.1
tatcagtcgcctaatcgaaggtctatgccaaatccttccaggtcaggccctggtgctttgccgctttgcttgatcagcctgcggtccttggatatttgatttaaatatcttactgcctatgattctgacagttccgcaacctgacatgcaccatgaatggaggtcgcttggttgccaagggacctatctgtcctacttaattgaggcagaatgaattctgctgcagtcaccttatccgacttatcataacctattgatgggatatgaactgactgc

SEQ ID NO: 98359 - DNA, 299 bp, Zea mays
  Clone ID: MRT4577_21213C.1
gttgtcgggcagagtttatatatacggataaactgaaggggttgtttggcccaggaaatgtaacttgaatagcacggattataatcctactcctcctatagtatttttatttttatggacaggccaaacatcttactctaagctaaattgaacaacttatcgtggtacaaacactttgggggggctcatatcctttcttcagaccggccttttcagaggcttgaccacttattttccggaaattcccaggctgccaagtccctcttttctggcgggaacacggaatactaacttttttg

SEQ ID NO: 98360 - DNA, 1046 bp, Zea mays
  Clone ID: MRT4577_21214C.1
aattcggcacgaggcagaaacgaaaaacctgcgacacgaaccaaaaccctcctctccctcagtccctctcgagcctcgatccgcctccgccccacgcacccgacatcgctcgctacgcccacttcatcgccgcgggcgcaatgagcgcgggctggaggacgctgttgctgcgcatcggcgatagatgcgccgagtatgggggctccgccgaccacaaggaacacatcgaaacttgttatggtgtactatcccgagaatatgaacactccagagatgcaatatttgagtttctccttcaatgcacagaacaattgcctcacaagattcctttctttggagttttgattggtttgataaacttagaaaatgaagacttcagtaaggctattgtagataccacacaggctaacctagaggatgccttgcacaatgaaaatcgtgataggattaggatattgctgcgatttctcagtggtctgatgtgcagcaaagttgtagttccaagttcaatcatcgagacatttgagactctattatcatctgctgtaacaatattagatgatgagactggcaatccttcgtggcaacctcgtgcggacttctatgtttattgtattttggcttcacttccatgggctggtccagaattgtttgagcaagttccagatgagttcgagagagttttatttggtatacagtcttacataagtatcaggaggcattttgatgatattgctttctctgtctttgagacagatgaaggccactctcctaacaaaaaggattttatggaagatctgtgggagcgcattcaagctctttcccgtaatggatggaaagttaaaagcgttccaaaaccccacttgccatttgaagctcagctggtggccgggaaatcacatcgcctttcccctataagttgccctccacccactccctcgcagtcatcttctggaaatgttaaaaggtcaggagaaacatgaagccgatatgaagtatcctcagagacttcgtagactacatatctctcccaatgaataaagctg

SEQ ID NO: 98361 - DNA, 321 bp, Zea mays
  Clone ID: MRT4577_21215C.1
cgacccacgcgttctgttgagtttatctcttgattatttcacttatttttgctagaactgtttctagggctagagaagaaattaatgcgtgctttcttttgagcttttattgttttaaaaaaaaattatacttttttttattaattaatttaattataaacccctatttttatttactaattattaaaaaagggcggccgttttaaattatccaaattttctaacccaatatatgctatttataaaattattttatttggtaaggtaaattcaataaactttccgtctctttttaacgttttaaatggtaaaacctttttt

SEQ ID NO: 98362 - DNA, 259 bp, Zea mays
  Clone ID: MRT4577_21216C.1
gtttttcattctaggcatacttccttcgtcccagtatataaggcataaaccacctttgttttaaagcccaagaaatgtatttaactctctttatcaatactagtactaccgcatcgatgtatgtgtatctagaaagaacatgctttatgttatgggacaaaaacaaaaaatagttatatgtaaaaaaaaaaaaaaaaaaaaaaaaaaaaaaaaaggaaaaaaaaaaaaaaaaaaaaaaaaaaaaaaaaaaaaaataaaa

SEQ ID NO: 98363 - DNA, 369 bp, Zea mays
  Clone ID: MRT4577_21217C.1
ttcatttcacagcttttcctcttccttggtctgatgtttagatgctttgagttccagttacaaacctaccttccttgtgtcctacagattctgaacataccagttcttaccaagctgtgtgttcccaagaaagtatgactaggactgctctttttagtgctaaaatgtcattactgcagattcctttgtgacagatctttccagtttcttcattttcattgcaacaatctactcctgcatgttatacttccttttcatcctcgctgctaaggcttcccagtgcttggtgatgttttcagaatcttgtactttgtgtccacgatggtactgaatctgcttctacacagtcagcagagataaagtgttgaa

SEQ ID NO: 98364 - DNA, 261 bp, Zea mays
  Clone ID: MRT4577_21218C.1
cggaatcaagagcaagctgggcaagcgacctacgtgcagagcagcataccatgtgataactctaactctgtcagactgcatgcacgggcatcaggagcggcatgttcatcgtcggaaccatggtgcatacgctaatactgctctgggtcaccttcagaacatactgcaccaaggtgggggagaacgccatagccgagctgaacaagaggtactacaagaagcagcccctcctatcctagaaaaatactgatcgaacgccac

SEQ ID NO: 98365 - DNA, 375 bp, Zea mays
  Clone ID: MRT4577_21219C.1
cggacgcgtgggcgaatctaccgagggaggaggaggtggtggtggtgaccaggcggacgacgactgcgagtacgcgttccctgagatcaccaagtgggaggccattgcctggctcgcgatcttcactgcctggatctcagtgttctctgactttctagtcggtgcaatcgagggggctgccaaggcttggaagatacctgtcgcgttcatcagcactgtcttgctcccgatcgtagggaatgctgcagaacatgccagcgctgttatgtttgcgatgaaagacaaactggacctttcgcttggagtcgccatcgggtcttagacgcagatatccatgtttgtgataccgttcagtgtaaaggcaggatggatgat

SEQ ID NO: 98366 - DNA, 465 bp, Zea mays
  Clone ID: MRT4577_2121C.1
gaacgtccgcacctaagatctccgtatcctccgtcgcgtcgagcatcgatcatgtcggcctactgcggaaagtacaaggatgagctcatcaagagtgctgcctacattggcacccatggcaagggtatccttgctgcagatgatttttctgagaccatgggcaatcgcctttccagcatcaataggcgataaccctgaggagaaccgacgagccctccataagctactattctgctgccctgatactatacattacatcagcagtgggatcctgtaccaagataccctgtaccaaaataccaaggatggtaagccttttgatgatgtcctaaaggagggaggcatcctcgccgacatcaaggttgacaagggcaccatcgaggctgccggcactggtaacggaaaccccacccacggccgtgacgaccttgacaagcgctgtcaccattactacgagggccgggg

SEQ ID NO: 98367 - DNA, 486 bp, Zea mays
  Clone ID: MRT4577_21220C.1
gaccagccgttaggcgctgactgcaaggctaaggacaacaactgccgctgaggagagaaaggctgcgggctcacatcaagctagcatggctgactggagggcgctgtggcgtactgtaaatagagcaccatgtagtttcacacgctgccacatgattgaatggaagaaattgctgttggtactcaggatctaactggctgaatcggaaacgttgttgcacataagcagctagaaccagtgcagccagtcggttgaatggaagaaactgatcgcagctgacagtctgcactaagggttcctagcacaagacgaagcaggtggtgagccctaactttttgggccaacagatgcaccaaaggtaactgttgcaatacgcctgacggacgatgcaggaacatgggtgataaaggcaagatgcctgctgcaattgcccgacggatcctgtatgggtgaagatcagtgtctccacacactgaagacactgct

SEQ ID NO: 98368 - DNA, 320 bp, Zea mays
  Clone ID: MRT4577_21221C.1
gaattctaaattaatgagtggtggggtgggactaatgtttcttttaccagaacctaaaccaggggttggattaaatgttgttgtaaaggatattaaatggcctaactacaccccggggtacgaaaccaaggatcctgattttttggcagctttcctggtaactcctaacttcggggttccgcctgaaaaaccaggacctgcagttcctgcggaatcttttactggtccatggccaactgtttggcctgttggacttaccagctttgatcgttccaaaggacaatgttataacatcgggcccgttcttggggacccaaatc

SEQ ID NO: 98369 - DNA, 1937 bp, Zea mays
  Clone ID: MRT4577_21222C.1
gtttgttaaccaagcgtaatgacgtctgataatgtcgtcacgaacgtcaacgtgcaagcagacgctatgatgaagtcagaggggtcacccgggttgacagaaggatagtcgctgacgagattagtacaaaactataccgatacaatgcgatagcccctgacagaacgtgacaaccctaattgtagctcgaggttttgctcaaccaaatcccacgcgtccgtgagcgaacgtgagcggtcttcgccttgtcctccgactcttccattccattctattcccgcttccacacgtcggtcggcgcccttcgcgatcgtgtcgtttcttcccgcagcctgcctgccgcctgcctgcgtgtggggtgatggctaggcacttcaagtacgtcatcctcggcggcggtgtcgcggcggggtacgcggcgagggagttcgccaagcagggcgtcaaccccggcgagctcgccatcatctccaaggaaccagtggccccttatgagcgccctgcactcagcaagggatacctcttccctcagaacgctgcaagactgccaggcttccacacgtgtgtgggcagcggtggagagagactacttcctgaatggtactctgagaaaggcattgaactgatcctgagtactgagattgtgaaggccgaccttgcttcaaagactctgaccagtgcagctgcggaaaccttcacatatgagaccttgctcattgctacgggctcctcggtcataaagctcactgattttggtgttcaaggagcagaatccaacaacatattgtatctaagggacattgcggatgccgacaagttggttgcagctatgcaggcaaagaagggtggaaaggctgtgattgttggaggtggttacatagggcttgagcttagcgctgccttgaaaatcaacaacttcgatgtgaccatggtgtaccctgaaccgtggtgcatgccccgtctcttcactgctggtattgctcatttctatgagggctactatgctaacaaaggaatcaaggttgtaaagggcacggttgctgttggtttcgacgctgatgccaacggagatgtcactacagtgaagttgaagaatggaagtgttctcgaagctgatattgttattgttggcgtcggcggcaggccattgacgcgtctcttcataggccaagctgctgacgagaaaggtggactcaagaccgatgcattcttcgaaacaagtgtagccggggtatacgcgatcggcgacgtggccaccttccctctgaagctctacaacgagcagaggagagttgagcacgtggaccacgcccggaagtccgccgagcaggccgtgagggcaatcaaggccaaggagtccggcgaatcggtggccgaatacgactacctgccctacttctactcccggtcgttcgacttggcgtggcagttctacggcgacaacgtcggcgacgacgtgctgttcggcgacaacgacccggcctcggccaagcccaagttcggcagctactgggtgaaggacggcaaggtcgtcggcgtgtttctcgagggcgggtcggccgaggagaaccaggccatcgccagggtcgccagggcgcagccgccggtggccgacgtccaggcgctgaagcaggaggggatcgatttcgcttccaaaatctgagctcttggaaaggtgtaaaaaaaagaaacattggtaccagttttagctgatttctttggcaattctactttgagccttttcagaccacttgggtgctttgttacacagtagttcagattagttgttagcccctccctaataatttggccttcgatgtgatgttgaaagaaccaccgtgggatgacgatcctattaataatgcatgtgatttgtagcgtcaaaaaaaaaaaaaaaaaagcggcctagggccacaggtaaaaaaagataaataatt

SEQ ID NO: 98370 - DNA, 374 bp, Zea mays
  Clone ID: MRT4577_21223C.1
aactgaaagggagggggacattcaaagttcggttttcaatcttattacaatacacatacaagatcttggtggatgtcaggaataaaatcagaagataaacatgtactataccactgatccatctatagaacatcataagcacatataaataaacaacttccatctagctgatatcacattctgcatgcttggacttaataacatgtacaaactagaaatggatggtgccgtatccgctatcatgtgtaactatgggggaaaaactgcaaactgataccatttgattatcaggcttttaagaaactttgatgccatatgactgtacgaattgcaggcatccggtatttaccaaaagaacgtgatccaaacaacag

SEQ ID NO: 98371 - DNA, 1091 bp, Zea mays
  Clone ID: MRT4577_21224C.1
acggcatatttctgttgaattatgcgattgtagcaggtagcgggaaaactaattgggggttggggtcacccactcgagtcggaggataaggttgtcataaccatacccgttgagcttgttgatggccttctcggcgtcctctctgtgaacaaagttcacaaacccaaaccccctgctcgaatcgcatatttctgttgaattatatcagtatgtttgtttgaattactggtacctgagtcatgaatttatcttgttggaaaaacttatgttttccgtcctgataccagaaaggctgcatacctagctgcaatgcgaatgtaactgcttcatacagatctgcttataatgatcttctgaaagtctacagggagtcagatgaagcagaggaaagggggcgtgtcctaagcacactgtgcttttgtaaggacgagaatattgttcttgaatcactgaatcttctttttaccaatgagtttcgcaagcaagatgcatattatgtacttcaaggtcttgacgtggagacgcgtgataccgcatgggtgtggttgaaggataactgggatcgtgtgacaaggaaatacggggacacacaagcaggaggttttatcagatacgtcgtcacattgttcacctccaacgagaaggcagcagagttctcccgcttcttcgcaacccgcaagaagcctgaattcgagagaacactaaagcagagccttgagaacgtccggatcagcgcaaggtggatccagggcatcaagagcgaaccgaggctcgctcaaacggtgcaggagctgctgcgtagaccctgatctgccctcggttgagttgcaggtgtggccggaaataagctggtcgtagatgacatacgctttgtacattctcagtgtgtaaaaggttacctctcttagtgttcatggcagcatgcaaatgtaagctattgggttgaatttttagcccaagcatgtgctagcagtgatctcgtgtctaatttgagaagcgtagaggtttaaaagaagattaaagtgcatttccgattcttaaatttgtgcggctgtgttaatctgatctataaacttttaaaataatctctt

SEQ ID NO: 98372 - DNA, 1509 bp, Zea mays
  Clone ID: MRT4577_21225C.1
aattcggcacgagggagactcctcgcgtccacctttcggtctcctcttctctgcgaatcccgtaatcccatctctctcgcctccactgccgcctctccgtctccagcttaccaccgccgccgctggatgtctacgcagtagatccatagaccctgatctcctcgaggtgattcccctcgtcgccagaggtatcctcgggcagcaatatccactggcgacgcagccgccacagccgctacgttccctcctccaccgccatcaccacggctaggtggaagcgctcggcgaggtagcggctcgggggaaagacatggtgctgatcgagctggagcccgaggaggcgacgcgcccctcgttgccggtggcggaggagcaggcggtcgccggggacgcggcgcgcccctcgtcttcagcggcgcccgaggaggaggaggcagccgctggagggaaggcgtcgagggcgccggaagaagaggaggatgcctttgaggacgcgctcaccgacgagcagctgcgagagaaagctagaatccaagcaaatgatgcaaaagcagaaggaaacaagctttttggtgctggacaatatgaggaagcattatcacagtatgaaatatcattgcaaattgctgctgagctggaatctgctgaggatatacgtgctgcatgccattctaatcgtgctgtatgcttcttgaaattgggaaaacatgatgagacgattaaagaatgctcaaaagcacttgagctcaatccatcatacctgaaagccctgcttcggagggcagaagcgcatgaaaagcttgaacattatgatgaagctattgccgatatgaaaaaggttgttgaagtggatccttcaaatcaacaagccacgaggtctcttttccgacttgagcccctggcagctgagaagagggaaaagatgaaggaagaaatgattgcaaagctgaaagatctggggaactctgtgctgggccgcttcgggatgagtgttgacaatttcaaagctgtcaaagatccaaacactggctcttacagcattcaattccaaaagtaacacgacgtgaagaaagacatggatgaatatggctgggcggcatatttcagttgtaattgttcaaggaacttgtgcgtcacatacctggacaatatccaaacagatatctgcaaatcgatctgaaggtgggacatggaagaggaattggagtattgcgtcgcgtttgcatttgtcgcacgttagactgttagagatgctttctcgagtgcgaacttgcatgatcattttgaactctggtattttcctcaatgcatggtcgttttttctttgttgtaaagacgccgccgacagagagccaaaccgtggggctcacagcacccagtcgcaggcgacacgcgccgggagggacgaggcggaggacgatgggaggggggcagcctgccgcggcgagtggtcgaggaacgggcgcgtggcagacccggacaagacggcaggggatcgaggcaagacga

SEQ ID NO: 98373 - DNA, 285 bp, Zea mays
  Clone ID: MRT4577_21226C.1
aattagggggccaatttactatatacattatcttacacttacaccacctttccttccaaaatcacattcacataaacatacatagacctttagataacataaacaaaatacaaaatgccaccccctaaacccacaaaacaaacaattgagacccctaatcacatcaaccaatatacacaactcctacacaacattatctaacttagtaaatatactactcaccgaatctccattttgatacaaataacacaaaacctcctaaaaaactcgcaactaacacctttt

SEQ ID NO: 98374 - DNA, 473 bp, Zea mays
  Clone ID: MRT4577_21227C.1
agcacctaaaatggaagctagatcttttattactatgacttgccacaaaagcaaaacaaaaattctacacgatgcacatttgcatatacgatacgagcaaagaccccagaacttacgttggcacaactaaagggtggaagtctcttgtcagtcaatacaaccatactatgacaaaaccaaattatataaacctgtcaggtagttaagggcagggtagatcaagaagccgctcaacaaagcaaagctatggaaaacaatgcgatcaggacagaaacacagcatcaactggagatcaagtgcaaaaagtttaaactcagcttactacgtaagttaagaaggcatcaacaacatacaaaataatggtggtccagaaaaatttggggccaccgtcttcgagaaacagacaaatcgtccttaactttgagccatgactggcggcttaattctcaagccagcttgagtgtgtaaactgc

SEQ ID NO: 98375 - DNA, 967 bp, Zea mays
  Clone ID: MRT4577_21228C.1
ggcgcccacgcgttaaaaaggcgcgatccatggaccggtcgatcaacttccgcggcatcgccgggagcgccggcaacatcatgcagggaatggggaaattcgttttcggcaacgagggactcgactcaaaggaagatagctatgttgagagataccttgaccggataagcaatggcaccatacctgatgaccggagatctgccatgactgagctgcagtctctcgtggccgaaagtcgcttagcacgatgtcgtttggagcgatgggttttcctatcctcctcaatatttttaaagaagaccgcgaggatgtagagcttgtgagaggtgcactggagacctttgtgagcgcattgactcctattgagatgtcacaagggccaaagactgaggttcaaccagcatcagtgaattctgatctgctgtctcgagaaacggagaatatttctcttcttctgagcttattgtcagaggaagacttttatgtgagatactacacaatccaacttctaacagctctacttacaaactcgctgaaaaggtgcccagttacaggaagcaattctattgattccccgtggtataacagttctaatggacatgcttatggatcgtgaggtctttgacagatatttctatcttaaaaggattgaaacttcgcacccatgttctcctgtaatgtagcatgacgaaactctatatcaagaatctaagtagtcgatatacataaaataaataaatcaatgagcacttactctagtgtcgtatcgtcttctattgccatgatataatcacataaaacatctattgaatcggctttgatcactgacatgtcctttgtggaaagaccaaccattaaaaagtcattggtgcacccatcggtagagacttttacatgagcttttttatcccaatcatcaccaaaccacctttgcaagtctgcttgaataatagggcctttctcatct

SEQ ID NO: 98376 - DNA, 448 bp, Zea mays
  Clone ID: MRT4577_21229C.1
ctagaactagtctatcaccctcgagggggagtcgtctgacaccattgacaacgtcaaggagggcattccaccggaccaacagcgccttattttcgccggcaagcaactggaggatggccccaccctggcggactacaacattcaaaaggagaacacccttcacctggtgctccgccttaagggtggcatgccaatttttgggaaaaccttgactggcaagaacattaccttggaaggggaaaactttgacaccattgaccatgggaagggcaagaaccaagaccaggaaggcatttccccaaaacaacaacgtctgaactttgcttgcaagcaacttgaagaagggcggacccttgcggactacaacattcaaaaagaaaatacccttcaacttggtcttcggcttaagggtgggatgcaaaactttgggaagaaccttactggaaaa

SEQ ID NO: 98377 - DNA, 2018 bp, Zea mays
  Clone ID: MRT4577_2122C.1
atggatcctaaggggaagggaattgtgatcaacgacaaggagaaggagtccttcgtcaacgagccaagggatgacaagtccaatgactcgggctcgggccacaagcgaagagatgggaagaagaagaagacaagacgcatcaaggagatcgtctactacgacagcgatgagtcctcttcttcccaaaaggacgacgaccacgacaaacaaaggaaaccggttaattctaacttttcttttgactactctcgtattccgcaaagttcaaattcacatttgctttccattccactcggcaagcccccacactttgatggggaggactacggattttggagccacaaaatgcgtagtcacctattctctctccatcctagcatatgggagattgtagatagtggaatgcactttaatagttcggatagtcctatattcattaatgagcaaatccataagaatgcacaagctactactgttcttctagcctcattgtgcagggatgaatataataaagtgagtggcttggataacgccaagcaaatctgggataccctcaagatctctcatgagggaaatgacgctaccttgctcaccaaaatggagttggtggagggcgagcttggacggttcgcgatgataaggggcgaggagccaactcagacatacaaccggctcaagacccttatcaacaaaataaggagctacggaagcacgcgatggacggaccacgacgtcgtccgactaatgctcaggtcctttaccgttcttgatcctcatttggtgaataatattcgtgagaatcccaggtacaccaaaatgtcgctcgaagaagtcctaggaaaattcgtcagcgggcgaatgatgatcaaggaggcaaggtatgtggacgacgccttgaatggaccgatcaacgagccgcaaccttttgctctcaaagccacagggaacaaggaggcgctacccagcaaggtggcgcaaattgaggcggccggtcttaatgaagaagaaatggccctcattatcaagagattcaagacggtgctaaagggtcgcaatggacagccaagcaagactaagaccaaggggaagcgatcatgcttcaaatgcggtaagcttggtcattttattgctaactgtctcgataatgatagtgaccaggaaaagggaaacaagagggaaaagaagaagcattacaagaaggcaaagggcgaggcgcatctaggcaaggagtgggactcggattgctcctcgtccgactccgacaatgaaggactcgccgccaccgccttcaacaaatcaaccctcttccccaacgagtgtcacacatgccttatggcaagggagaagaaggtatgtactcgcaactctacctatgcttcttcaagtgaggacgaatctagtgatgaggatgaagtagattattcatgtttgttcaagggcttagatagatctaagatagacaaaattaatgaattaattgatgccttgaatgaaaagaatatacttttagaaaagcaagaggatttgttgtatgaagagcatgataaatttgttgaggcacaaaaatcctatgctttagaagttaaaagaaatgaaatgctttcttttgaactatctacttgtcatgaaaccatttctactttgaaaggtgtcaacaatgatttaaatgctaaattagaagtagcaaataaatccaattcttgtgtagaaaatgttgttatttgcaatagatgtaaagactttgatattgatgcttgtagtgaacacatagcttctattgcaaagttaaataatgaagtggctagtcttaatgcccaacttaagactagcaaaagtgaatttgataagttaaaatttgcaagggatgcttacacaataggaagacatccctcaattaaggatggacttggcttcaagagggaagccaagaacttaacaagccataagactcccatctccaccaaggagaaagggaaggctcctgtggctaatagtgttaagaagaatcatgctttcat

SEQ ID NO: 98378 - DNA, 353 bp, Zea mays
  Clone ID: MRT4577_21230C.1
ccacctgcgggtgccagatttcatgagagacggcctgctacttttacgccggggtaccaccatccctccgtcagtcacctctagcggagaaatgccctcctctaagatctccgtgctggagcacaccacccgcggagggctttcatgttgcgcgccggctttacacaaagaggtgccaggccttgacttgcgccgtctcgaccccttggctcaacagggcaccactagggggaccggccatgccctatgaggatcacacgctgccaagggctaacataaagtggacacctgaagcgggtcctcctccagggtggctacggtcgatgacttgagacagatctcatagatctctc

SEQ ID NO: 98379 - DNA, 313 bp, Zea mays
  Clone ID: MRT4577_21231C.1
ggaagaagtatcaacattgtctgatgctgctgcattgcattcttatcctaaggaacatattgtggctgtggcaaaaggccttgcgctcccaaggaggatgctgatgtcaggctacacaagtaatataaacttggacagaaaagaggagagtcctgacataaattcttgtgagaaactgaacttaaataggagttcaggtgatgaattaatggatgaggatgtgatggaaaggaagcattgccgatttctataccaaacctgaagatcttagaggaaagacaaaggttactttcggagcatgtgttttaaagaa

SEQ ID NO: 98380 - DNA, 423 bp, Zea mays
  Clone ID: MRT4577_21232C.1
gtgggttgtggtgggggggtgaaaaatccattttaacatttttccaaggcactaacccacgtgatttttaaaacactaggctcgcaataggtgggaataacaaaaggctacatacccagataaacagacccctttttccactggtcaacaacaacacaaggcgcgcggggggagaggaaaaacgcacacgcatcacaagaactctatgaccaacaatcaggacatctcaaattccctgtcctaaaagcaaacactgggttaacacacaggaccccatcaatttttgttcgtggccaactcggtcagataaacaccagccggttccttttagctcacactattgatgactacaacaacaaccggatctcttatgtcacagtcaaactaacttcccacgctaggatacttatagattaagttcac

SEQ ID NO: 98381 - DNA, 359 bp, Zea mays
  Clone ID: MRT4577_21233C.1
cacacacacatggaattcttctgaactcgatgacactatccatctaaaggaacaggcatcaaactgccgttctgcttgctgacagacacccacacaagccttctaatgcacatgcctgatcaacacataactcttgggcatcacgctccgaaagacagacctgaccagcctagctaacagagtactactgggagtctaactcaaggcggttgatacggacacccacgcttgctttagttacttgcttggaggacaaactgggtcaaccaggcgcctggaaactgaactacacagcgcgcacgcagacgcgggagaccttgctcggatacctacggacagacagagcggtttctactaag

SEQ ID NO: 98382 - DNA, 367 bp, Zea mays
  Clone ID: MRT4577_21234C.1
gaccagatgatttttttttactatgaccgggggggcggctactgttgcgaccattcataagaggaaggccttgatactgcactcagcgggactccccccgttgatgtctcgttagagcttagtgatttagcatttttacgatggtttctctctacattaatacgctctccataaggagatcaccatgcaccttgttcatctaatgatgggtagtatgcatatttttgtcaacagccttattgtactagctttagccgttgatgatgttagctcgccctccatcttctatgtgtaggttagcattcagaagaaggaggtcatgttctcaaaactgcagtgttggttctaacccggtcaacagttggag

SEQ ID NO: 98383 - DNA, 134 bp, Zea mays
  Clone ID: MRT4577_21235C.1
aaagccaaagaaaagtatcccaaactgagggggctacttgtgtatcattattaaggactatcctccaggacatgagtgaattgcgcgccgcgacacgctggctataacgtctttctacagcaacgttgcatgct

SEQ ID NO: 98384 - DNA, 726 bp, Zea mays
  Clone ID: MRT4577_21236C.1
acgcccacgcgtcggcatgagccacgatttccctgcggtcccgtcgttgcggttgttgggggtcaaccgtatcctcgggcatccggttgcatgcctcagttgccgccttggagctcgttgtggccgttgcggccaaccccgcaagcccgtccttcctccgctataagcctctaatcgcttgtgaccgtgcccctaccttcctttgaaccagtccccgagagctccgtgtccatggactcgccaccgctaaacagagagtagggggaaagcgccgccgcgaaggcgtggccggccacatcgagcgggaccttggtgactgggagggtggccgagatgggtgctggtgaagggactcgcgcacgcggggcgccgtgggagtagtggagattgttcgccggaggtgtgaaactacgccaagttaccctccgtcgtgaacccgctcggccatcgcttaaccctccgcgcgaggtttcaagtcacctgaagttcaccctggtaactggatctcaagtgtcaggagaagaacaggtggtcgaagaggagccgcctaacactgaggcattcgacttgatctaggtggcgtttctcagtcgacattggcgccgacgatccttagttcgttttatggttattcctttattttgtaataagtcttccgctatgtaataattactctgatgttatgtgacatttatctctataaaaaaaaaaaaaaaaggggcggcc

SEQ ID NO: 98385 - DNA, 382 bp, Zea mays
  Clone ID: MRT4577_21237C.1
aatacgacttactataaggaaagttgccacgctctgcagagcaccgatcctgaatagcgggcgcgactccacgcgtccggtcatgagttgccacacactaaccaacctcccaagtgcaaagcataccatgtatacaccagcgggcaagcggcgctcgtaatggccgtgagttgccgtatgagcatttcactagcagatgctttatgctcagggtaataacgcataacaacgcgttgagatagatgctcactaactgaactgaatctccaacatcacaagtggacgtgatacaccgtatatatgttagtgacaatgttacactagagagtgaaatatgtaaaatccaaaactacaagaccatcctctatggtagcacaaaagt

SEQ ID NO: 98386 - DNA, 286 bp, Zea mays
  Clone ID: MRT4577_21238C.1
cagacgtggggactctcacctcccgcgcgctcgtcggcaagccggctaccagcaccagggacgtcttcggcgaggtgcgcgtcaccgtgcgcaactactgctggcaagcccaagccagcggcgtccggcagccccgtggtacgggggccgaccgggtcgtgtacctggggccgctgtccggccaggccccaagctacgtggccggcgagttccccggcgagtacggctgggacagcgcgggggtgtccgccgagccggagagtttcgccaagaaccgcgagctgga

SEQ ID NO: 98387 - DNA, 272 bp, Zea mays
  Clone ID: MRT4577_21239C.1
atcaaacgcacatgtcgccacttccaaggtgtggaaaccgttaaggcagatctatcgtcgaacaaagtgactgttaccggcaaattggatgccgagaagctgcgagataagatcgccgagagaaccaagaagaaggttgacatcatctcagctcagaccaaaaaagaagccgccgccacggaaaatccaccggagaagaaggttgaagagaagaaacctgaagagaaaaaaccagaagaaaaacctaaagagagtatggtggttttgaagat

SEQ ID NO: 98388 - DNA, 2010 bp, Zea mays
  Clone ID: MRT4577_2123C.1
atgggaaccaaggcaagaaggagtgatggttcattagcttttaagggtgtattagacgacaaactctacttagttgatttttcaaaagacgagtccgatctagatgcatgcttaatagctaagactagtatgggctggctgtggcatcgccgtctagcacatgttgggatgaagaaccttcataaacttctaaagggagaacatgtgttaggactaaccaatgtttgtttcgagaaagatggaccttgtgcagcttgtcaggcagggaaacaggtgggaagcactcattacagcaagaatgtgatgacaacatcaagaccactggagcttcttcacatggacctcttcggacccgttgcctaccttagcatcggggaagataaatcagaaacccaagggaccctaaatcgctttctaaggagggctcaaaacgaatttgagctaaaggtgaaaaagataaggagcgacaacgggtccaagttcaagaatctgcaagttgaggagtatcttgaggaagaagagaggaagaataggacacttatcgacatggcgagaacgatgcttggagaattcaagacgcccgagcggttttggtcggaagctgtgaacacagcttgccatgccataaaccggctctacctacatcgccttctcaagaagacctcgtatgaactccttaccggtaacaaacccaacgtttcttactttcgtgtatttgggagcaaatgttacattctggtgaagaaaggtagacattctaaatttgctcccaaggcagtagaagggtttttactagggtatgactcaaatacaaaggcgtatagagtcttcaacaaatcatcgggtttggttgaagtctctagcgacgttttatttgatgagactaatggctctccaagagagcaagttgatcttgatgacatagatgaagatgatgttccgacagccgcaatgcgcatgatggcgataggtgatgtgcgaccacaggaacaacaagagcaagatcagccatctatctccacaatggtgcatcctccaactcaagacgatgaacaggaagagctcaacaacttcaagaggaatgaagtttggaacctggtgccacgtccaaagcaaaatgttgtgggaaccaagtgggtgtttcacaaaaagcaagacgagcacggggtggtgacaagaaacaaggctcgacttctggcaaaaggttatgcccaagtcgcaggtttggatttcgaggagacttttgctgctgtggctaggctagagtctattcgaattttattggcctatgccgctcaccactcttacaggttgtttcaaatggacgtaaagagcgctttcctcaatgggccaatcaaggaggaggttggaaaagccgatcccactctttttactaagacttatgatggtgatctttttgtgtgccaactttatgtcgatgacataatatttggttctactaatcaaaagtcttgtgaggagtttagcagggtgatgacacaaaagttcgagatgtcgatgatgggcgagttaacctacttccttgggttccaagtgaagcaactcaaggatgacaccttcctctcccaaacgaagtacacacaagatcttctcaagaggtttgggatgaaggacgccaagcccgcgaagacaccgatgggaatcgacgggtatgtcgacctcaacaaaagaggacagtgttgtgcgcaactactttggatgatgcaaaccctccgggactttggctacaatctgagcaaagtcccactcctatgtgacaatgagagtgttatccgcatggtggataatcctattgaacacagccgcactaagcacatagacatccgacatcacttcctgagagaccaccagcaaaagggagatatcgaggtgtaccatattagccttgagaaccagctagccgatatcttcaccaagccgttggatgagaaaactttttgcaggttgcatagtgagctaaatgtcttagattcacgtaacttggattga

SEQ ID NO: 98389 - DNA, 279 bp, Zea mays
  Clone ID: MRT4577_21240C.1
gtcacccgtgactcaactgttcgtttgggctcgatcatgcacccacaacgggccctacttgcccctgaggcttaaaatgtataggtcatgcaagtattatcagcatggccgacaattggcgccttcgagccacaagagcaccctttcattacaacaggttgaagcaagcggcatcggacagctactgggcacaggagtcagaacggcagacggcgtgcactctctaaggttttgaatattagccagcccatgggccctgccagatcataggcgtaactg

SEQ ID NO: 98390 - DNA, 457 bp, Zea mays
  Clone ID: MRT4577_21241C.1
accaggaaccgtttctcttcgagaggcccgaagccagaagaggaaagccactagtccaacaccccaggaagacgagttggaccaagagatcaggaacatggagatgcttcatcaacaagtacaaaagaagaaggagaagatggcccgactagccgaccttcagaggcaaattgacgaagccattgaagaagtacgtcatcttgctcaagatgagcaagaacgaaggccccagcacagggagctccatcaagaaggattgttcgatgatgatggatggtcacgatgattcccatcatgaaaattttgcttttgatgatgcttctcctctgtcaacagaactgcaggctacaccttggcccccatcttacaagccaccttagcttcccatgtacgacgggcactcagatccaaagcagtttctgatgagctatgaagcaaccatatcttcatatggagg

SEQ ID NO: 98391 - DNA, 192 bp, Zea mays
  Clone ID: MRT4577_21242C.1
ctttcacgttaggaaaatgtgtacatggcgaatctcgactagcactgctcttagggaccaggcgatcgatgagttcatcaagattgttgcccacactgctcactctgaagaccttactgtggtctaacgaatcctaatgtctggggcgatacatgaccgaagcggcatccattggactgttgggtgcttcat

SEQ ID NO: 98392 - DNA, 1880 bp, Zea mays
  Clone ID: MRT4577_21243C.1
ccggccggccgaagaactgtcgtattgacgccttgtggctggctgagtgctccccgccgtactacgcttccgtccagctatcgagatcagtcggggcgtggcgccccgggtgttctcgccgtagaggggatgaagatcacggcgctccttgtgctgaagacaaccccctcaggagccgttgcctcgccctgcggcggccagtcgggcccgggggcggtgctggtggcctccggggcggacgacagccacttcggctacgtccgcctcgtcgtccgccgcgccctcctcgtcttcgtggccctcatcgccgaacagcccgtccgggcaggggagccgccggacttgcaacaagaacaagacgctccccatcgcattagtggagaaaaggctagttgaggagctgaggaataacgacacactgaaaattgatggtgagactgggagtggcaaaactactcagcttccacaatttttgtatgatggtgggctttgtcaggatggtggagtcattggcatcactcagcctctgagagtggcagctgtgacaatagcggagcgtgtagcggaaaaatgctatgacaaaaaaagcaaaaaggttggatactccatcagaaatgatgattccatcgccggccgggaagatgggctgtcagactcgtcttctcctgtgggaaccgtcttgctatcgtgctaggcattggggtgcgaccgaatccaacaggagaggaaaggggcgcttgctttatattccttctcggctgcaatctgcgtccatccatccagccgtctcggggcagccaagaggtcgtgtgcgcgtggatctctccgtagaagggatgaagatcacggcgctccttgtgctgaagccgtcgacctccggagccggtagctcctcgtccggcggccagtcgggcccggaggcggtcgtgctcgcgaacgcgacggacgtcagccacttcggctacttccagcgcagcgccgcccgcgagttcatcgtcttcgttgcccgcaccgtcgctcagcgcacccagccaggccagcggcagtccgtccagcacgaagaatataaggttcactcccacaacagaaatgggctttgtgcggtggcatttatggatgatcactatcctgtacgaagtgcattttctcttctgaatcaggttcttgatgagtaccagaaggcttttggggactcctggaaatctgctactgcagatggaactcaacagtgggctttcctgacagacgccttggcaagatttcaggaccctgcggaagctgacaaactaatgaaaattcagagggacttggatgaaacaaaaattattcttcataaaactattgatagtgtcctggccagaggagagagattggatagcttggttgagaaaagttctgatctaagtgctgcttctcagatgttctacaagcaggcaaagaagacaaaccaatgttgcacaatactttaaactttggtgcttcaatcatgtttgcaagaaacaaaaacgatcgatattgtgctaatttactgtaagttaagtcgcccatgaagcgtggacacgcggttgcaaggctcgagctcagtgctgttggtctcagtttgcaaggctatagttttctccaagacctgccgattggactgttttcttgtgagaattcctgctctccaaacagcacatggagtatcattctttagtggttatgaaactgcgtagtgcctgctaacaccatttattgtactatataaggcttgcctcaaactgcagaaattaccaaatattgttaaattctcaaagcttactggcagtggtggaccagtggcgaagacagcacaagctgatagtctcttctgaaaaaaaaaaaaaaaaaaaaaaaaaaaa

SEQ ID NO: 98393 - DNA, 315 bp, Zea mays
  Clone ID: MRT4577_21244C.1
ctctttctcgggtagtcaaatacatacccctgtgttctttaacgggtgggggctccaaaatcttttaaccatctgatcgcttttcttctcatcctgtctctcaccatgatacctccatttgtattgttctcctatttttattatgaggtttacttataaatctgatttattttcttccattctctttctcttattttactctttatatatctttttattcttatttcttaaaatctttattttataatttatatttctttctttttttattattttattttttttatttcttcttttacctttttttttttttta

SEQ ID NO: 98394 - DNA, 396 bp, Zea mays
  Clone ID: MRT4577_21245C.1
gcggggaccctctagagggcgcgccgtggttttttttttttttttttttttttttttttttttttttttttgtccattttttgttttttttgtttgttttaaaaaaaaacacggcccttggcatctgatttaaccatttaaggtttttagaagggcccaactgccaattttttgggggaaaacaaaaatttttttttggaaaagggggatccacccgttttaacagaataagggggcctttacaagtaattttcagatcgccaacaccccaggaacggggcaccttacaggggatggtaaaaaaccaaaattttttttgaagtgttttttaaagcccgggaagttttagggggttttcaccaacttgcggggggaataaaaggcccagaggaaaag

SEQ ID NO: 98395 - DNA, 204 bp, Zea mays
  unsure (1)..(204): unsure at all n locations
  Clone ID: MRT4577_21246C.1
aacgcacgttttaccacatacttccacacaaaatgactgagactgtatcgcctcctcgctcgctngctgcgacacgctcatngcgctcagagcagtcgcacgcgcggccgtcgctctccatcgatctctcgagcattcgcgcactctcgcaaacatcactgcgttcaacacgctcattagtcacgagctcctcgacatgattct

SEQ ID NO: 98396 - DNA, 311 bp, Zea mays
  Clone ID: MRT4577_21247C.1
cccatcaaaaacataaattaaacctgttcccaatacctcaccctcacacttggtatcactcataaaaatccatgtaaaagttcctaatttaaaacaaactgcattaacgttatcctggtcaatctcacaaaaaatctgcccaattaaagttccaaatcaaaaaaggttgaaaaatcaaccttactccttggcctctctgcctttttttcttttccatttaaaatatatttggatagagaggcctaaaaaaaccatcacaacactaccccattgtttaaaaataatggattgccactgatgacggataaaac

SEQ ID NO: 98397 - DNA, 913 bp, Zea mays
  unsure (1)..(913): unsure at all n locations
  Clone ID: MRT4577_21248C.1
cccacgcgtccggataaatcttaaatctgtctctgtcctcgtataattatacttactatcttgtgatgttccggcagcagagtcggttggacattgtttcgggctacagaagagttcaagagtaattttgctactaacacatagacaaatagcatagcctattgatcttgtcttttcgaacagattcaaagacgttgaaggaagaacaaagagaggagttatttgaaagtttaaaggccaatagctctattgggtgggaagtggatgtcatatgcccaaaggatctatctgctaaaatgttaaaaaggtcgaaagttaatctgaatgaaatatcacataactctgccatgggtcttgttagaaaagttcttcgcatgggagttctactggcagaagtatatgtagatacagtgggagatcctgaaaagtacagaaccaagctaacagaaaagtttatagggatcaaatttgtggttgccaaaaaaagctgatagcctttaccctgttattagtggagcaagtatagttgcaaaggtcactagggatagagcactgcgaaactgggtgtttgatgaaacagctctgagtctgcacatgagaactagatcaggatatctaggagaccctgatactaagcggtggttagaagatcacaagcatctggtatttggcttcttcaagacgcagtcgatgtgactgggagtctgataaagttgatcaagaagagattgatagtggagacaccaagcgacaagtcaagcttttaagcctgggcttcactggtttcaaaaggaagaccgaggagattgaatcaaccggaanaggctgttgcaaattcttccaggttcacaaacttgagttggtcaggaagttcccgtgatgtgtggtgtgctgattattgagaacttactac

SEQ ID NO: 98398 - DNA, 254 bp, Zea mays
  Clone ID: MRT4577_21249C.1
cggggagaaacactccgctctctctttcctcctgcgattctggcatctctttccctgctccgtctcgacgatgacttaccctttttttcctaaggcacctctctgcctcgctagagcaaaaaccttggcacgaatgggcgacacttcaacccgtaagaggcaaccaggtgactgctggcctgggggatgcgggacaggcaatactggttgtggctgaccagtgagagggctgcgggaaagctgcagcgtataga

SEQ ID NO: 98399 - DNA, 1487 bp, Zea mays
  Clone ID: MRT4577_2124C.1
gctgtccctccccttcccaccgctgcatgggcaaagccttctccctgctccggccaccgcaaccacctcgcgaggacgacacggagatgatggagctgaggaagcgcccgaggccccggcgcctcgacccggacttcctctcgtccccgcctcctatgccgccgaggaagcgggcacggaagcaggcagcggcgccgaagccggtcgaggccgcgggcgctctgaagtggcagccgccgaggaagggctccaggcgcgccacggtgggcatcgggtgtcccgtcgctgggctccatcctgcgacgtgcggccggcagccgccgctgcgcatgtcgacgcgcgtcctcttccgcccgcgccatccattcaactggtacgagccggacctgtggacggaggtggctaagcacctgtgcggcttcgacctactccgcctctccttgacctgccgctggttccaccgcctcctcgccgacgactccatctggcgctacgccttcttccgcgaccttaacctcaccgacgccaacccgcacgttcatcgcccgctctcccgctcctggcgctacctctactttgccgccttcgatggctcccacgccttctcgctctgccagaacggcgagcaccgaagttcgtggcggatcgggtcattcgtgctggactcgccgcacatggtgctgatcgggaagctgccgctgccgaagtggctgccgtcgtgtcccgaagacgtgcggctcaccatcgcgatactgggcgcctgcaagctcctcaacgtccgccctgggatctggatcacggacatgcatgtgatgcgatgccccttgtgcaaacggaacagctgccgagggaacaagcagatcctggatgcacgccactctgagctgttcctggagaaggcgtactgggacgagaccttggagtacgagagcctcggcgagcactttcaggacgaggaggtggccgccgccttctgtgccgttgtcaacgcgaagcagttcgcttccccatccactgcatctgtcctcaacagggcctggaccggaaagcacgacgacccgatgaccaggcactgtgcttccgcaaccgccgctgccatccacaccaacctccagagcaacggaggactactatcgacgtttgaggcgatgcgggacacggccagggacgggcagatcgtgtccatacgcatctcccaggtgctcttctgatctgtacccaatgctgccttggctgctgtgatttatgatggaagtaggcctggccacactcgttctttttttactgctattgatgcatttctgtctagattggactgcagagagaaagttggggcagatttccggcttcaatttatgtccttattagtagtatattgcacacgtactggaatctgcttgtttgcttaatggctataccacgaacgggttttgtcactaaaaaaaaaaaaaaaaaaaaaaaaaaaacccccccccccacccaccgcc

SEQ ID NO: 98400 - DNA, 821 bp, Zea mays
  unsure (1)..(821): unsure at all n locations
  Clone ID: MRT4577_21250C.1
actttactctccgtctcgtcgccgcctcctcacccgccgccgacgccgacgcaccgcgccagcagcctgacgcgagttccggtgtggtgacgccaagcgccgtgcagcatggacatcgacccttcctcggtctcccacgccgacggcgggggcgacctgtggccgttcgactcgctcaccacgtccctcttcttctcctccgtctcctcctccccgccgctccacccgctgcccgtcgcttcctcctcgtggctcacgccgccgtctccgctctggctcttcgaggaccgccagatgatgccgatcgaggtgggccctgcgcccgccgcggcgccggacaacactgccgccgtcgcagaggaggcccagcgagcacgctccgggaattcggacacgccaattaagaagaccgaacgtctcaacaacaaatggcaatttaacctagctctgcatgacgatagcacgaacagctcatgcttgttcaaggagaagctgactcatgctctcaggtacttcaaggagtcaacagatcaacacctgttggtccaggtttgggcgccggttaagagtggcgatcgctatgtgcttactacatcaggacaaccctttgtacttgaccaccagagcattgggctgcttcagtacagggctgtatccatgatgtacatgttctcagtagatggagataatgctggggagcttggnttacctggacgtgtctacaagcaaaaagtgcctgagtggacaccaaatgtgcagtattatagcagcactgagtacccacggcttaaccatggcatcagttacaatgttcatggtac

SEQ ID NO: 98401 - DNA, 413 bp, Zea mays
  Clone ID: MRT4577_21251C.1
gaacctttggctgatttatgtgcttgtcctggtaatgtgtcgctgtcgcatgaggaccgttatgcgtatgtgactgtgtgggatcatggggtgtcgatggtgtagaattggtagagtacgtcggaggatatggggcctctgcctgctaatcgttgggcgatggggcttggtgtgtctcattcgggttgtgttcggggtattcctctttgtgctgctcctgttcatatttatacggatgatactactgcttttaatgggcggcctaatcggggtgattttaattgtgagtcgatggcgcctcatgggtagcataagcgtatgggtttgggtgtgattcacgttggtttggcggtgcggctgtatgagtctattgatgatcaggttaagtttcctactctgtctagtcctactga

SEQ ID NO: 98402 - DNA, 663 bp, Zea mays
  Clone ID: MRT4577_21252C.1
gctcatcgccgccgttccctgctaactctatcccctccgcctctcgtcgtgctgaggagggcggagacaactgcggtgcggtggtgcctcctcaaatccccgccgacacttcctgccgcccccaggtggatcctgtccgcggatccaggaggtgctagctagctccctgatccaagctgaaattaggtactatgctccatgaatccatgatgcaggagctcttccgttgcacgaattttggttcgacctctagagatggggggagaccgggatctgaacctcccggggcgagctgatgtacggctcgccggtgtccaaggacctcaacgtcccggtgcagccgcccatgatctcgtccgggctgctgaggtacagatcggcgcccagcacggtgcttggcgacctctgcgaggacttcctcccttccgcgtccggagccgccagccccgacaacgtcttctccagattcctcgccgagcaccacacccgggacgacaagccgtcgccgccaccgcctgcccccgccgcggtccacttcccgagcgaagccgacatggcttcccaccagcagcagcagcaaatgatgttccactcccaccaccagcagcaacagcagcaggagatggtgggcgccaagtccgggctttaccgcaccgtgagctc

SEQ ID NO: 98403 - DNA, 351 bp, Zea mays
  unsure (1)..(351): unsure at all n locations
  Clone ID: MRT4577_21253C.1
cattgattcatccaacacacgccctttttccgtcacttacttattcacaccgccccaattcacgtcggacgtcttcttatcggagaagggggacttctacatctttccncactcttctcctctctatcttttgtattccactacaccgtcctttctactttgactaacatcattatttttttcattttatatacattttatctttatattatatatctttcttatatttcattttattaattctttttcttatttttttataatttcttattatttctttacattctatctactttttaaatattttttatattatttttttctttttctttcaattattttttccttttt

SEQ ID NO: 98404 - DNA, 1273 bp, Zea mays
  Clone ID: MRT4577_21254C.1
ttgggtacctcgaggccggccgggctgacctttcattccaagatagatcatggacactagccaacggtactggtgtgattgatattcaacacccttgcaggtctaatgttgctgttcggaaggagctgcacaaaccagcttcagatcgctcttgtatccatctcgagtttgacatttctggcactggtcttgtgtatgaaaccggagaccatgttggtgtatatgcagaaaattctgttcagactgtggaggaggttgaaaggctacttgacctttctccagacacattcttctccatccatgcagatgcagaagatggatctcctcgtaaaggaggaggttccttggccccacctttcccatctccatgtaccttgcggactgcgcttctacgatatgctgatctactcaatccaccgaagaagcttctcacgcatctgatccagctgaagctgagcgacttagattcttggcttctccttctggaaaggatgagtattctcaatggataactgctagtcagaggagccttcttgaagttatggccgcattcccttcagctaagccaccactgggagtgtttttcgcagcaatagctcctcgtctgcaaccacgatactactcaatttcatcatctccaaagatggctccctccagaattcgtgtaacatgtgcattagtttttgggccttcaccaacaggaaggatccaccaaggagtttgttcaacatggatgaagaatacaattcctctggaacatagcgaagaatgcagctgagctcccatatttgtgaggcagtcaaatttcaagttacctgctgacccatccactccgattatcatgattggtcctgggacagggctggctccttttagaggtttcttgcaggaaaggttagcactgaaacaatctggagcagaactgggcacttcaatccttttctttggatgcaggaaccgtaatatggactacatatatgaagatgagctgcaaactttccttgaggcgggggcgctttctgagctaattgttgcattctctcaagaagggccaacgaaagaatatgtgcagcataagatggtggagaaggtcagcataaaattgtgtatccctaacaagtttgtagcaaagggggtacataattacagtttgagatgaggacatcatttatactgtttgagacgaggacattatgtatatacttggtacattagaaggccaccgaaaacaaattttgcatctggtttttgaaagcatgtaatccttccaact

SEQ ID NO: 98405 - DNA, 379 bp, Zea mays
  unsure (1)..(379): unsure at all n locations
  Clone ID: MRT4577_21255C.1
atttcgcgaaaatacagccagtgccaccgccttccttatcctgggcctcggacggacgggcccgagcgagccacttcgagcctaccgccgccgccgccatggtggcgctcgcctcactctcgtctatctgcccctgcggcatcgcccgccgccgcgctgctgccgccacctcacccgccgccgttgccatctcgtgctgcgccgtcgcgaccccgtcctcctctgggaaagggccccaggattctagaaccccccgaagaacgctgnggagaactgagggtgccaccaagagcttggaagattcggtctcgcgattgatggagcagttctgtgatgggtccgctggccctcctctgcgagcgctccccgtcggcgggct

SEQ ID NO: 98406 - DNA, 947 bp, Zea mays
  Clone ID: MRT4577_21256C.1
gcgattgggtctctcgaggccggccgggaaactatgccatttcacctcaatatgttcagtcaatcgtggggcataatacatccagactagacccagctagagtaggcacaccataccatcccatgcaggtgggggcaacctacactacccctagtcctcagcctgtaatggctgggaagttcagtcctgttgtttatgttcacccagttcctcaggatccattgcatggaacaccctctggttttcaaggatggcctcgccctgtgcttttgaattcatatcaagctagcatgcagaagttccaaggcaacaccccggtgtatttggcccctccaatcatggcaactgggaacctgccattggtggtaccaagccctgcaccacttgtgcagccgttccaggccattcatcccatcatggttcctgctgcaagcagcgtggtcccaggaaaatacatgtgaacttgtcataccaatgacaatctccttctgttggaagagtcctggctttccagttacccctttggtttggggtatacgtctgaaaggactccgcgattttgcctggtctgttgattcacttgtcagttgctggtctgtgtccgtattttagttggaagggctttgcaacttcgtcattcttcatgctctgtgtgggttttcgaaatattctttttagaggggggaggcatggtgcagtaaaatgaaatagagagaaattgcagcaattctttgttatcttagcaacaccttttcttcttccgagagcactatgtacaaggtgacattataaaagattaagatagtgaaggccttattttcgcgaggctaatgtacattcatcttgcaagtgttgcaacttttttgaagtttgtttaagtaaaaaaagacatgaagtttgtttcgacacaacgtagtaaagcgcgtgcaccacctgctgacgctcgg

SEQ ID NO: 98407 - DNA, 794 bp, Zea mays
  Clone ID: MRT4577_21257C.1
gggtacctcgaggccggccgagccgtgcgggcttggcggtccgcagtagcagcagcaacgagccaacgaagcactggttgttggtaggtgcacgcaccccaccccccccacccaatccctcgcggcgggcgggcgagagagcgagcggcgatggcggcactggaggcggtgaggtcgtgggcggtgtccgtcatcccgccggagctcgccgccgccgcggggggagacccgctcgccgcgctggcagccaccgccgcggcccttgtcgcggggctgcttatcctcgccgtctggttccgatccggaggcggggcgccgtccaagccggtcgccacgccattacggccgccgccggtgaaggtggacgccgacgccgacgtggacgacgggcggaagcgcgtcaccatcttcttcggcacgcagaccggcaccgccgagggattcgccaagtcgatggcggacgaggcgagggtgcggtacgagaaggccgtgtttaaagtggtggatctggatgactatgctcaggaggacgaggaatacgaggagaagctgaagaaggaaactgtggcgctgttcttcttagcaacatatggggatggagagccaactgataacgcagcaagattctacaaatggtttactgagggaaaagaaaaggaagtttggctgaaggatcttaattatggtatttttggccttggaaacaggcagtacgaacactttaataaggttgcaaaggtggtagatgagctactagaggagcagggtggggaacgtattgttcctgttggcct

SEQ ID NO: 98408 - DNA, 2892 bp, Zea mays
  Clone ID: MRT4577_21258C.1
ggactgttttgttcatatcggtgtggcccacccgccctcctgccgtcctcgatctcgtctcctcctccctacccaatccctcgcggtgggcgagggtggaagcgagtgacgatggcggcgctggaggcggcgagggagtgggcgggctccgtcataccgccggagctcgccgccgccgcggggggagacccactcgccgcgctggcggccaccgccgcggccctcgtcgcggggctgcttattatcgctgtctggttccgatccggaggcgggacgccgtccaagccggtcgccacgccggtacggccaccgccggtcaaggtggacgccgacgccgacgttgatgacggccggaagcgcgtcaccatcttcttcggcacacagactggcaccgccgaggggttcgccaagtccatggcggaggaggcgagggcgcggtacgagaaggccgtgttcaaagtggtggatctggatgactatgctcaggaggacgaggaatacgaggagaagctgaagaaggaaactgtggtgctgttcttcctagcaacatatggggatggggagccaactgataatgcagcacgattctacaaatggtttactgagggaaaagagaaggaagtttggctgaaggatcttaaatatggtatttttggccttggaaacaggcaatacgaacattttaataaggttgcaaaggtggtagatgagctagtagaggagcagggtgggaaacgtcttgttcctgttggccttggagacgatgatcagtgcattgaggatgatttcactgcatggaaagaactagtgtggccagaattagatcaattgctccgcgacgaggatgacacaactggtgcatcgactccatatactgctgctattcctgaatacagagttgttttcattgacaaatctgacctgtcattccaagatagatcatggacactagccaacggtactggtgtgattgatattcaacacccttgcaggtctaatgttgctgttcggaaggagctgcacaaaccagcttcagatcgctcttgtatccatctcgagtttgacatttctggcactggtcttgtgtatgaaaccggagaccatgttggtgtatatgcagaaaattctgttcagactgtggaggaggttgaaaggctacttgacctttctccagacacattcttctccatccatgcagatgcagaagatggatctcctcgtaaaggaggaggttccttggccccacctttcccatctccatgtaccttgcggactgcgcttctacgatatgctgatctactcaatccaccgaagaaggctgctttgcttgctttagcttctcacgcatctgatccagctgaagctgagcgacttagattcttggcttctccttctggaaaggatgagtattctcaatggataactgctagtcagaggagccttcttgaagttatggccgcattcccttcagctaagccaccactgggagtgttttttgcagcaatagctcctcgtctgcaaccacgatactactcaatttcatcatctccaaagatggctccctccagaattcatgtaacatgtgcgttagtttatgggccttcaccaacaggaaggatccaccaaggagtttgttcaacatggatgaagaatacaattcctctggaatatagcgaagaatgcagctgggctcccatctttgtgaggcagtcaaatttcaagttacctgctgatccgtccactcctattatcatgattggtcctgggacagggctggctccttttagaggcttcttgcaggaaaggttagcattgaaacaatctggggcagaattgggcacttcaatccttttctttggatgcaggaaccgtaatatggactacatatatgaagatgagttgcaaactttccttgaggagggggcgctttctgagctaattgttgcattctctcgggaagggccaacgaaagaatatgtgcagcataagatggtggaaaaggccacagatatttggaacatcatctcaaatggtggttacttatatgtttgcggtgatgccaagggaatggctagagatgtacacaaaatgcttcatacaatagtccaagagcagggatctttggataactccaaaaccgagagctatgtaaagagcctgcagatggaaggaaggtacctccgtgatgtatggtgacacatcacctcaaataagccatagctctagcgtgtggaagtaaagctggctttgcgtgtatgacatgtctaatgccaacccaatcgtcagctttggaatgaagcgtgccattgatgatatactgaaatgagttgatcagtgcaattctttgacatctaactatttattattatatgagatgggaggaactgatggagaataaatgctgctgtagatttgtagaagttcaaaaaaattgggtacccctgacaagtttgtagccaagggggtacatcatacagtttgagatgaggacactatgtatactgtttgagacgaggacattatgtatactactctagaaggctaccgaaaccaaattttgcatctgtttattaaaagcttgtacttttatcatggtatcatggaaaaaaaaaaaaaaaaaaaaaaaaaaaaaaaacccggttgggtcccccttttttttgagccgcttttttgaaaatctggctgtgaggaaaatctggttgtagggaaaatctgagtatccttatgattacgcgtggaggaaaataaagttgttcatagaacccgggttttaaaaagtgccggtttttttctattcccccgccccccccgattatgggtttatgttgattttggagggtttttgcccccccgaattttataaaacctggctgaaaagctgagcgtttggcc

SEQ ID NO: 98409 - DNA, 627 bp, Zea mays
  Clone ID: MRT4577_21259C.1
tcgcgatctagaactagtcactgttgatgacagagagatacttgaatgaggatattgactcgggccttctgtattatcttcacacagaccagacattgggcattaaagtaaagaggactgatttaattgggctaataatgcgccgaaacgagcttgctactgagatcctgaaggcatcgatgtcagagagttttcctccaatgttacagagcccatcaacatgtaatagatgtcgacacctgatttcttgcaccatataccacaaggcacacggaggcagtggtacaactagtgggcttggtgatctatttgacaaccttgtgaatcacttaacagtcacacatcataattttcttaaacattgggatagattgattgatcttgaagctagagcttctcagattcttcaggaaaaagcaaaagatacatatataacttttgttcagcaaaagatgcagcctgaaacagctgatcagttagatgctcaatttgacagcatagatttcagcctgaaagttggtgatcttgtggtgcttagcactcagtctgggagaatagcagttgcaaatggatgtataagagaaataataagtcactctcacataacggtctctttgccacgccgtt

SEQ ID NO: 98410 - DNA, 714 bp, Zea mays
  Clone ID: MRT4577_2125C.1
gttcgacgcgaggagcgagcgagtgattagctcgtgcgtgctgtgcaaggaaagtaacccagcagatcgatcggtcgaggcgggtaggacaggatctagaggtagctagccagccgcagcagtaccgcctcgtcgtcgtcaccgccaagcccaccgccgcctccgccgtcggcctcgccggcccaggcgccatggctacggagccattaaaagggctgttcttggaagtgtgagcgactactgtgcccatcacgcgcactgcaccgtgatgatagtaaagaagcccaagcagcacaagcactgatcaatgccgactgatcactacgtgtactgcaaataatatgtactactgcaaagttatgtgtgcgtccgtccgtttgtgaataattgggtcatcaaccatcacatcttcggttgcttctacaagtatccgatccaatccttctacgtgtggattgggatttacaaataattgattgttctctgaacctgaaaacaatgtatttgtattaatgtgttggaacaattatatgtagttgcactaaaaaaaaaaaaaaaaaaaaaaaaaaaagaccattagattagtaaaaaaatcatgaatgagtaatgcactgatataaaagaaatatatgttaattttttttccggggggctccccgcccctgggggatttttttatttttccaggtggagcccccaaaattttggggtata

SEQ ID NO: 98411 - DNA, 1649 bp, Zea mays
  Clone ID: MRT4577_21260C.1
cattgggtacctcgaggccggccgggttatctatgatctatctatggtctcattttgtgttgaaaaaacagatgcaaattattatggcaacaatcatgttactattgttctacaagaggccaatttttttgtagaccgattggcttgctaagttttggtgctactatatctgtggtgatcttttaactggaggaacagatttaaaggcctcaacaaaggagaaccaggccaagttgtcggtcgtgcgttcacaaatatatttaaatcttccgccatgaaattatttaaatcttacagttcaggcaccagctaagcctaagatgctgagtttccatatgtgataatgttggactgtcttgttcatatcggtgtggcatatcattatgcttgaggtggtggtatgtaccttccattaggaaggatccaccaaggagtttgttcaacatggatgaagaatacaattcttctggaatatagcgaagaatgcagttgggctcacatctttgtgaggcagtcaaatttcaagttacgtgctgatctgtccactccttttatcatgattggtcctgagacagggctggctccttttagaggcttcttgcaggaaaggttagcactgaaacaatctggggcagaactgggcacttcaatccttttctttggatgcaggaaccgtaatatggactacatatatgaagatgagctgcaaactttccttgaggagggggcgctttctgagctaattgttgcattctctcgggaagggccaacgaaagaatatgtgcagcataagatggtggagaaggccacagaaatttggaacatcatctcacatggtggttacttatatgtatgcggtgatgccaagggaatggctagagacgtacacaggatgcttcatacagtagtccaagagcagggatctttggatagctccaaaaccgagagctacgtaaagagcctgcagatggaaggcaggtacctccgtgatgtatggtgacacatcacccccattcagccatagctctagcgtgtggaagtaaagctggctttgcgtgtacgacatgcctaatgccaaatgaagcgtgccattgtttagaaactgaaatgttcagtcgatcagtgtaattctttgacatctaactatttatcattatatggaatgggaggaactgttgtagatttgtagaactacaaaaaaactgtgtatccctaacaagtttgtagcaaagggggtacattattacagtttgagatgaggacatcatgtatactgtttgagacgaggacattatgtatatacttggtacattagaaggccaccgaaaacaaattttgcatctggtttttgaaaaaaaaaaaaaaaaaaggctcctatcatggaatgggaggaactgttgtaaatttgtaaaactacaaaaaaactgtgtatcccccccccctccgcacccaaagggggacattattaccgttttggatgaggccccaccgccccccgtttttggcgaggcccttatgtaaaaacctgggcccttaaaaggccccccaaacccaattttgcctctgggtttttaaaaaaaaaaaaaaaaaaaaaaaaaaaaaaaaaaacccccccaaaaaaaaaaaaaaaaaaaacccccccccccccc

SEQ ID NO: 98412 - DNA, 267 bp, Zea mays
  Clone ID: MRT4577_21261C.1
tagcagcctgtgcccagactaccaccctcatcatcagtatctttggtctgttagctgcaggtctggcaggggctagcatgggctagggcaccacagccaaatgcttgggtctcacttggactatttgaccaagatcagcgggtgctaagtggccgctggcgcctcccacttcgggcccttcctctggaccccagccttagccttgggcagctgaatgggattcctcaggcaggtcaggctgagctctttctgcggctggtgaatgca

SEQ ID NO: 98413 - DNA, 260 bp, Zea mays
  Clone ID: MRT4577_21262C.1
cttgattctttccatggctcacctttttgcccgcatcgcatagacattttgcgccacaaagaatgagggattgccgcgaccgattcgaaagccgcttcaggcgcgggtgggatctgtccgttgacgatttactctttacatattggtcatataagccatttcctcattatcatgcttatgagctttgctagcgtagatactctcttgtatactcttactctttctcttttgttgctctttgatgctactaattgaacctt

SEQ ID NO: 98414 - DNA, 312 bp, Zea mays
  Clone ID: MRT4577_21263C.1
cagaccattaactctatctactccacagcgcagacaaacccgatcgacaccatgagggggttgctcgttgccctcgctctcctggctctcggtgagagcgccacctgcacgcatacaagcggcgggtgcagctgccagccaccgccgtctgttcatctaccgtcgacggtgcatttgacagctccggttaacctgcacacctccagtgcatatacgcaacgacaggcaactgccgccggcggttcacctgacaccatcggtccatgtgccgacgacggttcatctgatcgagccaccatgccaataccatac

SEQ ID NO: 98415 - DNA, 446 bp, Zea mays
  unsure (1)..(446): unsure at all n locations
  Clone ID: MRT4577_21264C.1
gggggaaaaaatatgtaacataaatttgggggccaaccaggaaagaagcgggcccaaaattatgaaaaacattaagggccgaaaaaaacccccttaaaaaaaaaagcttgtctatcgggggaaagggttaaaacaaaaaccccaaaaggccccattgggaaagggaattctaaggggggaaaccaaggaaaaaaaaaaaaaaaaagcccgaagttaacaaaaaaaaaaaaataaaaaaagggtccaaaggatgatatatttcaaaagatttaaacttaaatagaaggcccgggaaaacccttatccaggggacggatctttaattggggggggggggggaggggtntccggttttaaaccctacccaatcaaaattggttaaaacaaaaaaactttgtgggtgttaaaaacacaaatttttaaaaaggcagccccctgaaacaaaa

SEQ ID NO: 98416 - DNA, 1287 bp, Zea mays
  Clone ID: MRT4577_21265C.1
acactgtggggcagtatgagtcccacatcgcgttcactcttcctggactttaccgtgttgtccatggcattgatgtttttgatcccaaattcaacattgtctctcctggagcagacatgagtgtttactacccatacactgaaactgacaagagactcactgccttccatcctgaaattgaggagctcatctacagtgatgttgagaacgatgagcacaagtttgtgttgaaggacaagaacaagccgatcatcttctcaatggctcgtcttgaccgtgtgaagaacatgacaggcttggttgagatgtatggtaagaatgcacgcctgagggaattggcaaaccttgtgattgttgctggtgaccatggcaaggaatcgaaggacagggaggagcaggcagagttcaagaagatgtacagtctcattgatgagtacaacttgaagggccatattcggtggatctcagctcagatgaaccgtgtccgcaatgcggagttgtaccgctacatttgtgacacgaagggagcatttgtgcagcctgcattctatgaagcatttggcctgactgtcattgagtccatgacgtgcggtttgccaacaattgcaacctgccatggtggccctgctgaaatcattgtggacggggtgtctggtttacacattgatccctaccacagtgacagagctgcagatatcttggtcaacttctttgagaagtgcaaggcagacccaagctactgggacaagatctcacagggtggactgcagagaatttatgagaagtacacctggaagctctactccgagaggctgatgaccctgactggtgtatacggattctggaagtatgtgagcaacctggagaggcgtgagacccgccgctaccttgagatgttctatgctttgaaataccgtagcctggcaagcgcggttcccttgtcctatgactagtgtgggaaagaagaatcccaagccggagaaccatcgcctgcattatgattgttcaccgcaattcgcattgttagtcgtgtatttgagttatgtgtacttggtttccaagcactttggttcctttttgcgagtttttgggcagcgctggctggttcctattataggaattagctgtgacttttgcttcaaataaaagcctgctcgttctcctgtcttccagagttaaatgcaatgttttgttgcccaagtcttcattccgactgatggtgatgttatgttctgataattctgttaatcacctgtttaacgtggtaggctgatgcctgttcgtatt

SEQ ID NO: 98417 - DNA, 294 bp, Zea mays
  Clone ID: MRT4577_21266C.1
acaaacagaagacataactaacattatcttaacctaaagaaggcatcagggcgcagtcaacacgtatgaactatgcactgccatttttttctcggactagcaatcaatactgtagtctaagcggcgagacaccgcatgaaagccactctcatgacacatctgacgacttaccgaagatgatcgattggctcattcttgatgtatgccggataccctttcacaacattactaacctatgtacgtgacacagaaagatatgtgcgatagatcaagacataccatgtcctgtgagag

SEQ ID NO: 98418 - DNA, 1949 bp, Zea mays
  Clone ID: MRT4577_21267C.1
agaccttacaccaaccagatccggtataacgtctccatcgttaagacagacacgtcaacgctcccgcctatcatcaacgccgacgagattttcatcgtcatctctacgaccaacgttggcacggactcggaggacgtctctgctatgaaggctatcaaggcgaagtatcaggtgaagaagaactggatgggagacccgtgcgttgctgggacttttaggtgggatggactgacgtgcagctatgccatttctgatcctccaaaaattactgccctaaacatgtccttcagtggtctgaccggtgacatatcatctgctttcgcaaatctcaaggctgtccaatccttggatttgtcacacaacaacctgacgggctcaatccctagctccctgtcacaactgccgtcactgacaactctagatttgacggggaatcagctcagcggaccaataccctctagtcttctcaaaagaatccaagacggctccttaaacctaatctatgccgataatccagacctttgcaccaacgccggggattcatgtcagacggcgccgcaaggaaagagcaagctagtcatctactacgtcgctgttcctatggctctgatcgtggtggcgttggcagtactgctgtgttgtcttctgcggcggcgaaagacgcgagggctagcggacgtctctgtgaagccccgggacaagactccgacgagccttgcttcaatggcggccgacgaacacagacttagctcgctgcggcttgagaaccgccggttcacatacgaggacctagagatgatcaccgacagcttcaagcgtgtcattggccggggcggctttggatacgtctacgagggcttcttggaggatggcactcaggtggcggtgaagatgaggtctcagtcgtccaatcagggtgccaaggagttcctcacggaggcacagatcttgacacggatccatcacaagaaccttgtctccatggtcggctactgcaaagatggggtgtacatggcgcttgtctacgagtacatgtcagaaggatccctgcaggagcacattgcaggaaaacgcttgacttgggggcagaggcttcgaatcgcattggaatcagcgcaagggctagagtatctgcacaggggctgcaacccgcctctgattcacagggacgtgaagaccagcaacatcctactgaacgcgaaactggaggccaaggttgctgatttcggcatgtcaaaggctctagaccgcgacacctatgcgtccacgaacactcttgttggcacaccaggatacgtcgacccagagtacctggaaacaatgcagccaagcaccaagagcgacgtgtacagtttcggcgtggtgctcctggaactggtcacagggagacctcctatcctgcacagcccacagcccaccagcgtgatccagtgggcacggcagcacctggcgcgcggcgacatcgaggtcgtggtggacgcgtccatgggaggcaaccacgacgtcaacagcgtgtggaaagccgcggaggtcgcgctccagtgcaccgagcaggcgtcggcgcagcgccccaccatgggcgacgtggtggcgcagctcctggagtgcctcgacctcgagaagggccgctccgccaacgaaagtttctgcgacggagacgacagcggctccgcgaccgcgagcttgagccacagcagcgcatttgtgacggggcgtatttttgggacggtgccaatggtggagacaggccctgccacgaggtaaacgctagttgacgctgtttcacaaaggcacatggaagtgttcacaaattttttatatgaaaaacttcttattcaaacgtatgaaataagaacagcctggagcaggcctctttgttaggatcagctgatccaaatggttctaagtctgaagtctgaacgataggcgcgctccgctgcgcccgctcc

SEQ ID NO: 98419 - DNA, 548 bp, Zea mays
  Clone ID: MRT4577_21268C.1
gatgttgatgatgatggctctgttaaagacactgcaagccctgagctgagacggtatcagagagcaagtacagcgtctagaaaacaggttatatcagcttatggacaagttgatgcgcaatgctgatgatgaagcttcattgtcggaagtatgcattgtaaatggaagatgctgcattagaacaaccatggataattcttcattttttgatggattattgctctccagcaggtcagatgctggaagcatgatagaaccaattgttgctgttccgttaaacgatgagttgcaggaatcaagagcattagtggctaaagctgaactggatgtcttatcaaaacttactgataagattcgtcttgatcttgatagcattcagaatttgcttcagggaaacaattaaactcgataagatcgcagctcgtgcaaaatacagtattgcatatgatggaacatttcctgacctgtatttgccgaactttgagaatgaaactgtcactagtgctacaggtggatctatcaaacaaatttcctcagctcaacttcct

SEQ ID NO: 98420 - DNA, 1807 bp, Zea mays
  Clone ID: MRT4577_2126C.1
ccgtttggtgaatttaattgggtcaaccttaccctctcacatctctctctttccttctcatttttttttttttttttttttttttattcggaagcaacaaaaagctttattgcaaacgagggcattgttacaaaatatgttctatggtggacacgttacaaaacaaaatatacatcccatttcaagtcgccagtttggccaaaatcaccatatctaatatcttaacttcgtatgtgtcgtcaagccttactattccgtcagaaccatctatacctataagttttcctgtgtgcccacggaaactaccattcagtatcttgatcctgtcactcttcttcggcctgatgacctcgacctcgttcggaaggaccgtcaccatgtcaccgttgcccgaagacccaagtgcaactcggcaagatccatccccgagtacctccctaaccacaccaggaccgtcatgacctccacttaaaacttgaagcacaccatacgctaagcaacaaaaagctttattgcaaacgagggcattgttacaaacaatgggctatgagcgggccgctagaatcgtgtgcgagctggacagcaggaagagccgtagagttcgacgcgaggagcgagcgagtgattagctcgtgcgtgctgtgcaaggaaagtaacccagcagatcgatcggtcgaggcgggtaggacaggatccagaggtagctagccatggcggaggaagcgtctgcgcctgcggcggggacggaagcgccgccggggaagatgacgatggtggtaggggtcgacgagagcgagcacagcttctacgcgctgcagtgggcactgcagcacttcttcccgccgggccagccgcagcagtaccgcctcgtcgtcgtcaccgccaagcccaccgccgcctccgccgtcggcctcgccggcccaggcgccgcggatgtgctgccgtacgtggaggcggatctcaagcgctccgccctgcgcgtcgtcgaaaaagccaaaggcctctgcacacaggcgagcgacgctgtgtttgaggcgctggagggggacgctaggaacgtcctctgcgaggctgtcgagaggcacggggccgagatgctcgtcgtcggcagccatggttacggagccattaaaagggctgttcttggaagtgtgagcgactactgtgcccatcacgcgcactgcaccgtgatgatagtaaagaagcccaagcagcacaagcactgatcaatgccgactgatcactacgtgtactgcaaataatttgtactactgcaaagttatgtgtgcgtccgtccgtttgtgaataattgggtcatcaaccatcacatcttcggttgcttctacaagtatccgatccaatccttctacgagtggattgggatttacaaataattgattgctctctgaacctgaaaacaatgtatttgtattaatgtgttggaacacgtatatgtagttgcaacttcttttaaaaaaaaaacagcaaagttatgtgtgcgtccgtccgtttgtgaataattgggtcatcaaccatcacatcttcggttgcttctacaagtatccgatccaatccttctacgagtggattgggatttacaaataattgattgctctctgaacctgaaaacaatgtatttgtattaatgtgttggaacacgtatatgtagttgcaacttcttttctgtgagccgtgggcgtgtatgcacgttttaggtggagaaaatggtataaatcagatgaaagggtgaatgcacgtgataaacacaaaagaaagatacatgctcagaacgtgattagggcggccg

SEQ ID NO: 98421 - DNA, 395 bp, Zea mays
  Clone ID: MRT4577_21271C.1
gagaaaaaaaaaaaaaaaaaaaaaaaaaaaaaaaaaaaaaaaaaggagggaggaaaaaaaaaaaaaaaaaaaaaaaaaaaaaaaaaaaaaaaaaaagggggcggccggttttagaagaacccaagctttacgttaccgcgtcgcttgcgaacggtcattagcttcttttttataggggtcacccttaaaattacatattcactgggcgcgggcggttataacaaacgtgcggggagctggggaaaaacccttggcggttaccccaactttaaatcgcctttgcagcaacaatccccctttttggccagcgtggcggaaatacgcgagaaaggccccgaaccgaatcggccctttcccaacaagttgcccacccttaaatgggagaatgggaaccc

SEQ ID NO: 98422 - DNA, 244 bp, Zea mays
  Clone ID: MRT4577_21272C.1
gccgccctggttttttttttttttttgcctttaaattacccagggggatccataaaaacatgtgtattccaaagcccagcggggccatagattggagcgtctactttagcctaaataataaacatgttgagcgcggaacttctacaccccgcagactttaaacgaagaagcggggcagtacaaaacacggacacgttgacgtgtgtacaggtacaagtgaccagaaccacgcatgcatatatag

SEQ ID NO: 98423 - DNA, 400 bp, Zea mays
  Clone ID: MRT4577_21273C.1
caaaccaaaaacctttttttgggacctaacccccaaaaaaaaccaaaagggggccccccccaagggggggtgggggaaaaacccccgggggttttgcaaaacaaggggggtgaaggggcacaattggtcccatttgaaaaggggcccccccttaggccccacgggccgggaaaaccggccacaccgggggtggataaaaaaggggaggggggccccccccaccaaccgggcaaaagggaaaaattgggggcgggggaaaaaaaccgggaaagtccaaccccccccgtgggtgaaaggaaaaaaatgcgggggggaagccaaaaggaaccggcctaaagggaatttgtggttgtccaaaaaaaaaaccaggtttaacgccccttggtgggtgaaaggaaaa

SEQ ID NO: 98424 - DNA, 792 bp, Zea mays
  Clone ID: MRT4577_21274C.1
ggaagctccgctccgtcctcccggactcccgacgtctcccaactgctgccgcagcagcagccatgcacggctgccggcacctcgcggcgtccctaacccgggccctgagcccctgacccgggcgccctcccgcttcatctcctccaccccggcccgtctctcctccaaacactcggccaagctgcgggagctgaagctccacaccgtctgcgaggaggcccggtgccccaacctcggcgagtgctggtccggaggcgagaccggcaccggcaccgccaccgccacgattatgatcttggggacacctgcacgcgctcatttttctgcttgtttgtgtacctgatttccgtggagatccaagctgtgtagagattgatggttgcgacctctggactgcatgtttttgcgcacaacattgaaacagtggaagagctctccaaagaaacgtcagagacttccatgcgaatttcaaacagtctatagatgttctgaagatggcaaaagagtatgctcctcctggtacccttaccaggacatcgatcatgctgggctgtggggagactccagaccaggttatcagcaccatggaaaaagtgcggcctgctggctgctggtgtcgacatgtcataacatttggccagtacatgaggccatccaaacgccacatgcccgtttcagagtatgtcacacctgaagccttcgagaagtaccaaccataatactaaatggttgtcttcaaaattgttcattgggctcattcatgggcctattttgcagcaaccaacttcgcag

SEQ ID NO: 98425 - DNA, 583 bp, Zea mays
  unsure (1)..(583): unsure at all n locations
  Clone ID: MRT4577_21275C.1
ncctgtgntttagnacagctgaacccataggcttgttgtttatctctctctatatatgatatantgaaaattttgctattttatatattctgcactcggtcctaatacgtgaccttcccttatccacccgaaacactgttagcagatgcgatgctattagaagattaattagatgcttatggatacaaagcgatctacatttttngaaagatacacacttaaaacaatcttactcagcgtcaattccgaaacttttttgtggcccaactagaaaacacgtagccctgaaacatctggcttacattttgcgttcacttttccgatggtggtacctcttctaattaacatcgacgagtacctgcgttcataagagagagagagggaatcacaccttggttcagtacagcggtactgctaaaccactagtaactggcaggggtttctgaccagggcttcttcagttgcaccaatccagagggggattggaggggtttaaatctcgtttggattgatgtaaccgaacatacctttaagatgagataaatacccgagatcatcacaggcaggcatagctacaccacac

SEQ ID NO: 98426 - DNA, 256 bp, Zea mays
  unsure (1)..(256): unsure at all n locations
  Clone ID: MRT4577_21276C.1
agtgataacagcgactncctaaaggagctggagaacgggagcaaaacgtggcagccgaatccaccaggcaaattaatcgcggattttatcgagggggacctgccaccggggcaagggagcccactggagaggcttggcctgctcatgaagaacgaactcgaggaagaagggggaccaggaggtcagggacggcgacaaaccctcgagggacgttgacatgaggaaagattcagcagggaatgaaatgcaagacagc

SEQ ID NO: 98427 - DNA, 251 bp, Zea mays
  unsure (1)..(251): unsure at all n locations
  Clone ID: MRT4577_21277C.1
aanattcccatcacttttttttnaaaaaaannnttttttttggggggccaatgggagaggtttacggtttaacaagagttctatgcaaaataaataattaccttataaggggacaacgggccagcaacccaaagttgactgggagacgacgggctaaacctttcacgaactcgtaacaagattctccaagcgcctcatcccgtgggacctgtccttgacctgggacttgagattccaggtcggacccctgg

SEQ ID NO: 98428 - DNA, 745 bp, Zea mays
  Clone ID: MRT4577_21278C.1
ctgtgcggcgctcaggcggcgggccggggtctgaaggaaagcggctatgacgacaacggccgccgggtacggctgctgctgggcggggattccgcccttcgcgttgttgccgcggattctctcgacccgccgggagactcctcctcctcctcctcctcgcgcttcccttgtcgcctcctcctcgaagctcagggcgctggcaccacggctgagagtttcgaaccgtccaaggaggctcattgtctccgcttcctcctccggcgaggccaattcggacgcggcgccgtcgccaacggaagccgctattgatataaagcttcctagaagaagcttgcttgttcaatttacatgcaacgcatgtggcgaaaggaccaagcgcttgataaacagagtagcctatgaaagaggcacagtttttcttcagtgtgcagggtgccaggtgtaccataagtttgttgataatcttgggctagttgttgagtatgatctacgagaagaaaacgagctacaaggagaaaatgcggtggacaccagttctgaagattgatctgctgtgagaagcggtgttggtatgcaaaacgccctgtactctgtaggtttttgacaacattggttatttgtatatcataaaaatggcactttttaaagttgttgcacatactcatctgaaattctgaatacagcagggcctacattgttacttcttacaaaaaaaaaaaaaaaagggcggcggctcgcgatctag

SEQ ID NO: 98429 - DNA, 961 bp, Zea mays
  unsure (1)..(961): unsure at all n locations
  Clone ID: MRT4577_21279C.1
cctcgaggccggccgggttggcttctatcagcttaaattcgagagcgcaatacgaatttggacccattctcgttttttttgtataacacattacatactggattatgtgttcattacctgctgaagctctttgagcatgagagtgacagattttatggaaattgagtcatcctaccctaagacaaagacaagagtaaccatcctgaccattttccccccttgaaggtctgaacaagaaggacagaatcggagacgtgggaggtaggaacttctacctgcacaagaacgattcaagcaacgacgggctctacctccagggccaggaggagcccggtgcagatccaagtggtggtgacatcagccggcactcctcctcaggagtaggacaagcatctggtggcgctacaagtcagcaccaggtcctcaccatcgtcatcagcaagctggataagattgggcggcggacgaggcggatctggaggttcatcacctgcaacaactgcgcatgacgcagcacaatgcacaaagcatctgctgcacaacagtgcaggcaagaggtagttagctaattaaccagtgaaaggcttggcatggattctggttaaccagtgtgtggtgtggtgtgtggtgtgtaatcctaattcctagcagctgttaaccagtgtacatgccattgtggttgtggttaaaccacaagaagagccagtggggaaggggatagccccactaagcagagtcatgggcacctatcgccgatttattaagatatgtgtccatgcgcatgtataaaattcaaaagttgtagctcgaaagaaaaattacagctctctctctctctctctgcccagctgggactggttttacatgaaaacctctaaaaactaaaaaaaaaaaaaaaaaaaaaaaaaaaaaaagaaaaannnnnnngggggggggggccgcccactaaagaggggggccc

SEQ ID NO: 98430 - DNA, 857 bp, Zea mays
  Clone ID: MRT4577_2127C.1
gattgatcctcctctatcttctttcctgaatgaagtcttcataaagttggatggtgtttggggtctccttgggactgctgctttcgcattcttttgcttctatctccttattgcagtgattgctggggagatgatgcttggtttgaaacttgttttcatcacaattcacccaatgaaatggggaggcactttaatgaactcctttctgtttaatgttgggctcatactactttgctccatcagtgtgattcagttctgtgccacggcttttgcctattatgcacaagcaactgctgctcaagagatctttggccacacattgcaatcccttcgtggaattaagtatctttacaagtacaatgttttccagtatggctttgttgctcttgccatcctcacactcttctactatgctatatttgggtggagaaaaaaagaagccaacagggaggttccagctctcaaaatgattcatcacatttcccccctgagtgatagtcagttagcgtcgtagggatgtaaatgaacgaaaccaaatcttttcaaagagctgaggggctgcaaatggtgtatattatcaactacgtgacctcaaagcggagaatgggggaactgttggttaccaccacggtcatggatgttacaactacaacaagtagaactttgcggcgtttggtgtgtttgggagcgctttaccgcccccagttcgatattcatttcttggtcgtggctggagttaggtcagtttattgcttctgtatgtattatatactgtgatgacaacacaaggttctaggttgcattaatgacatgtcctgatcattcctgtgccgaaaaaaaaaaaaaaaaaagcggcc

SEQ ID NO: 98431 - DNA, 775 bp, Zea mays
  Clone ID: MRT4577_21280C.1
tgctcacgcgtccgccctgatctccactgtttttgcacacctttacctgcctgcgccaaaacctagccgccgcggcgccgcccgccgacctgccgtgccgactgctgagtgccgaccgacgtgcgcccgctggccgctcgacgttgttggcctccctcgacgccgctggccggtggccgctcgacggagtcgacgcctcacagcctccctcgacgcgacgccgctggccactcgacggagtcggcgcctcagtcacagcgagaattcagactgctgcgcgccttcatccccttcccggcggccgacgtccaactccgcctcacagtgcttctgtggttctgcctagcgcctgctcctgctcggtagtgctcgactaccccctgctcttctctagccttgagacagagagtcggagactccagtgcccctgctagcctgccctctggttttgtgttaagtgtgggggtgatgatgagccaccggaggcgttctcgcgctgccggctcgccgcctagtgacgccagtacgggtacagcccctactcctgagaagtcgggatggatccggccgtgggcagcgacagggacggaccttaaggtgctggagcttgcgctggggttccgcgcgcacaacgcgttgctcgtgcgcacatacttcaaccccgacgagcactggcagtgcctccaggccgcccaccgcgtcgagttcgggtatggccatctcacgtgggagtggaagcggggccctgcgcagctatctccccccgatgatcttt

SEQ ID NO: 98432 - DNA, 325 bp, Zea mays
  Clone ID: MRT4577_21281C.1
ggcattttaaggccctatggatacacttactctcatcgttgctgatgcatacgctgattgcattgttggtgatgactgtggttatgactatgagtttcttgatatcaatgctattgatgatgatggtcatgatgaaggtgacgaccttaaggatccttatctatatgctgcatatctaactgttcagcagttagcactgcttatttaaaaagctgaatatgccatacactaccaacactttatgtgtgatactggagaccatgctactactggcgtatctggtgaccattggtttgaacccgagagatacgcgatgtgtagactg

SEQ ID NO: 98433 - DNA, 293 bp, Zea mays
  Clone ID: MRT4577_21282C.1
aaaaaggaacatataagatcaataggtccagttttacatcaagcaagttcacatatggcgcaatataacatattaacaatgcaacgaaacaatgtctctgctggggcgtcaataatgcatcaaaaggacgataccttgagatgtccatatatataagctatactctagctgtctgagatatcccatcactggatctcaatgcgtaaactgtccttagtctgcagatttaaacagtcactaaattgatgaaggaccgacacaccaagagaccacgcctgatcatccattcatgg

SEQ ID NO: 98434 - DNA, 920 bp, Zea mays
  unsure (1)..(920): unsure at all n locations
  Clone ID: MRT4577_21283C.1
gtaccctcgggtctgccggctgcaaccctagtcctgatgtctcccacgcacctcgctcccccagtcctgcattcgtgttcctgtagccgccaccccagcccctggacgctcggctcgatccctccctcctccgcccaccacccgttctcctctagtcatcctcctcgccagtcgtcaggtgtcggccgccggttgtgctcctcgtcaggcgtcagccgtgatcccatcggtcgtcgcagaaacacagtcgctgctcgccgtcaccactcgccaggcgccggttcttctccaatccacgactcatcggctctccagtcctccgtccgtcaccgaatttaaagtgcaacgtgctgattctttatatgtacttctgaatgcttggacctggtgtgactacatagcctggtattcatttcataaatgatggaaagaagattgggacggcatgtatatttgattcccagaacccttccctttatgcaactcaatgctatgtcctcattctcagctggccatggacgccaacccaagaagaaggtatatcaccgtgaacctggtcttgacagggccatggatcttcaaaagaagcctgcccttctccttcgtctgcgtgacctcattttggcacaaaagacaggatcactacttgtgcgtgaccttgaaaaggaggttggttttgtccaaaaatggaactttctttcacttatcgagcgtcaccccaatatcttccatgtctctggtggaagtgcctcccgagagcccatttctgtcacacttacggagaaggccagaaagatatccagtgaagaggctgaagcgcgagagctaatggagccaatcttggtgagaaaccttanngaagtactgatgatgtcgatggactgccagattcctctggataaattgaactgatccagtct

SEQ ID NO: 98435 - DNA, 509 bp, Zea mays
  Clone ID: MRT4577_21284C.1
ttttttttttttttttttttttttttttttttttttttttttttttttttttttttttttttttttttttttttttttttttttttttttttgggggaaccactgaacacaggggctttttttgggacaaaagggggcagggggccctatcaatgggtgccaaagggtcaaaaaacaaaaatccccacaggggggttcccggaaaaaaagggcccccaaaaaaaaaaccccccttggaaaaaaacgggcccttgggcggcccccaaaagaaaaccccccatggcacaaacaccggccgggaacccgacctaacttcagagaataaacttggggcccaaaacaccggttcgggggggtttttgcctcccgggaagggggacctaacctttccggggacaaaaaacccgccggttcctttaaaaaaggatggtgcacccccaaaattttttttccaagggacccaattgtgggggtgccaatgaaatttaaccgggaaaacaaccccctcc

SEQ ID NO: 98436 - DNA, 288 bp, Zea mays
  Clone ID: MRT4577_21285C.1
cccacgcgtccggatgccaacaaattcattggttgctagctgaaaaacaacacccacacatgcatatatacatgtaactggcacacatgagaaaattaaaggtagctagctagagagtcttgtgaaggttagccattccgttcctgtttgtgaaaagggtacaaaagctagctttcacttcacacatgagagaagaagctaaggagaagaggtacaggctgctgtgggtgggttcgatggtaggtgagacatcacaatgctatgttagatatggggtctattccatct

SEQ ID NO: 98437 - DNA, 383 bp, Zea mays
  Clone ID: MRT4577_21286C.1
aatcatgtcgtgactctcaagggattattccgctctaaaaaaaaaaaaaaaaaaaaaaaaaaaaaaaaaaaaaaaaaaaaggaggggaattatttaaaaaaaaaaaaaaaaaaaaaaaagggcggtcgcggtcgggcgtcctagatgacccacgcttccgtgcgcgggcatacaacgtcttatactgttccactagattcacctaacttgacttcacttgtccaccgttttaccccgtgaaaacccggaaaccccccacctaacccaccttaatcgccttcccccctttccccctttgcccaatttttataatacccaaacggccctcccctttcaacattttcaccaattgaccagcctaaatggcacacgctacaccccct

SEQ ID NO: 98438 - DNA, 450 bp, Zea mays
  Clone ID: MRT4577_21287C.1
aaagctggctccactgccggaaccgggccccattgcctgcgcgtccacggagactcgatctgctccagcgtcttgccgatggtctccggcacaaacctgtgcacaaagagcaccgagagggccgaaatggccgcgaaggcggcgaacgctcccgacacggatatggcgcggcagacggacaggaacgacattgtcaccgcgccggtggtcaccctgttcgccaccgcccccagcgccgcggcctgcgagcgtagccgaagcgggaagatctccgagctcaccacccagcatatgggccctatccccacggagaagaaggccacgtccccactgagaaccgcggtggacagcgccgtcaggcagccgggcatgccgaccgtgctgacgtacaacagcggctaccggccgacgcggtcgatcagcacgatggccagcgcgatgaacgccctc

SEQ ID NO: 98439 - DNA, 567 bp, Zea mays
  Clone ID: MRT4577_21288C.1
ccggcgccccccctcgagtttttttttttttttttttttttttttttttttttttttttttttttttttttttttttttttttgggggccatataaaaagcaaattattcttttaaccaaaccattattgcccccaccagcagccaaattaggtccaacagggctaaaaatctttcaaaaaggatgttttcccccgtttttgcccccttacaacaacaataacaacaactggagggggggggctgcaacccaaggggggttcaattaccattaccattacgggtttaccattaccgatcctgcccaaaaaaagggagcaggagcccaggcccacaaccaccccctaccgcctaaaaattggtttgaaaagcacaacggtcacaaacttggccttgaaccggggcgggatccccaaagcaaccatggacctcgggttttttttttcgatgaaaagggggttaaaaaccacggtctggggctggggcagcggcctcaactcgttttggcttggggggaagctcaccagcgggtgctgcaaataagggggcatcagggggggctcccggc

SEQ ID NO: 98440 - DNA, 331 bp, Zea mays
  Clone ID: MRT4577_21289C.1
cgcgtccgaccgtcacataaaaccctttaaataaacgcgtagacgtcccccagacaacaagaccgcgcacgcgccattgaaacggccccgaggccataccgaacctgaagtggacaccactgagccatgaccgcgcgtggtgctcaacccagcaaactgcttcgggtgcaaaatcaactctgatcatccggaggagatgagatcccacgacctgcggggagcgccacctctgccgcattgggaaatccagaggggatcataccgtaagtgcgctcggggagacccaccacaacttcgcattcagaggcacgaagaagttctcccaccatca

SEQ ID NO: 98441 - DNA, 199 bp, Zea mays
  unsure (1)..(199): unsure at all n locations
  Clone ID: MRT4577_2128C.1
gaccaagctacctcctcgtgatttgcttccacccccgcccccatacacaggggcgactacaaagtttgttttccgttgccacaccccacaaataaaggccccacagagagaccgctggccccnaaagccctattattcacctactacctctttctcactcagaccaaacttcaaccgcgcgccagaagcgggccaaggc

SEQ ID NO: 98442 - DNA, 328 bp, Zea mays
  Clone ID: MRT4577_21290C.1
gggctcggaattcggctcgaggccaagtgctcgcggctgtttttacatggcttcacgacactgtccaccgacgggagggtgccaactccagtcggtaaatgtcctagccttcgcagtctgtcagaacatattggctggagaagagctgacccacactgtgtcaagaggagcgcaccattggacactgggtgcctgtcatctatcaatcatactggcgctagccgggcacgaactttaggggtgcaactaccatgttagcgaagtcttgcgaggaggaaccatacaagctgtgtcgagaaacaccttgtcgcgaggaataacgggcgga

SEQ ID NO: 98443 - DNA, 383 bp, Zea mays
  Clone ID: MRT4577_21291C.1
atgtctatttttcacttaattctgcctaccatgagcggccagatctgccgcggccttggcagccctagtaagagcatcagacaagatcatggctcctgcagagaagtagctgctggtgacgatgccatttaccacctttgctgccgttcttccagtggcagtagcaaccgtcttggttgtctctcttacgccatatgtctcatcgactgatcgcattgcaccaacaccagcattgacccccttttctagcatcgtcttcatgatatcttgagccactgtaaaagcttcctgcggagtagtgttgtactggcatgtttggtagttcctgcattcgatttgctcttcaacctcccaagttgccctgtcccagaaattcaaagttc

SEQ ID NO: 98444 - DNA, 769 bp, Zea mays
  unsure (1)..(769): unsure at all n locations
  Clone ID: MRT4577_21292C.1
gggaccctcgaggccggccggggccacggccacgccacgctcccgtcctctccgctggcctcgtgccccctcgtcccaactctcaactgccgatggggaaggagcaatccggtgtgcgcgcgcgggcgcggaagtgaaccccggttgagtagtaggtgggagatcgaggtcgcgcccttgccccacacgccactaaaggccgcgccgacgggctcatcagacgctttggagtttggacgggctcgcctcggccgctctggcgcttgtgcggtgggtgaagcgcgggtgctggtgcgggaagcctcgccagacctagcgctgccgactgccgagctgggtgcgggcgcgaggagtcgacgggaagacaagggtgaggatcagaaggatacggtgccactgcttatgtgacattcaaggaacgctttgccttggaaactgcagtattgctcagtggggctactattgtggatcagccagtatgcataacctattggggacaacctgagggaacttttaatttctgggacaggccaacttgggaggttgaagaggaaatcgaatacaggaactaccaaacatgccagtacaacactactccgcaggaagcttttacagtggctcaagatatcatgaagacatgctagaaaaaaggggtacgtgctcagcaaggatgctttggctaaggctanagcctttgatgagtcctatggattaacagctgcagcagcagcagggctgcagagctgagccaagagaatggttttactga

SEQ ID NO: 98445 - DNA, 1481 bp, Zea mays
  Clone ID: MRT4577_21293C.1
cattgggtacctcgaggccggccgggccgggacgccacggccacgccacgcgtcccgtcctctccgctggcctcgtgccccctcgtcccaactcccaactgccgatggggaaggagcaatccggtgtgcgcgcgcgggcgcggaagtgaaccccggttgagtagtaggtgggagatcgaggtcgcgcccttgccccacacgccactaaaggccgcgccgacgggctcatcagacgctttggagtttggacgggctcgcctcggccgctctggcgcttgtgcggtgggtgaaggcgtgaagcgcgggtgctggtgcgggaagcctcgccagacctagcgctgccgactgccgagctgggtgcgggcgcgaggagtcgacgggaagacaaggccacaaggaattatgagtgaaacagggcacactgtacaagtcactaacctctcgagcagagtatctgaaagtgatcttcatgagttcttttcgttctctggtcctattgagcatatagaacttatcagatcagaaggatacggtgccactgcttatgtgacattcaaggaacgctttgccttggaaactgcagtattgctcagtggggctactattgtggatcagccagtatgcataacctattggggacaacctgagggaacttttaatttctgggacaggccaacttgggaggttgaagagcaaatcgaatacaggaactaccaaacatgccagtacaacactactccgcaggaagcttttacagtggctcaagatatcatgaagacgatgctagaaaaggggtacgtgctcagcaaggatgctttggctaaggctagagcctttgatgagtcctatggattaacagctgcagctgcagccagggctgcagagctgagcaagagaattggtttaactgacagggtcaatgctggtgttggtgcaatgcgatcagtcgatgagacatatggcgtaagagagacaaccaagacggttgctactgccactggaagaacggcagcaaaggtggtaaatggcatcgtcaccagcagctacttctctgcaggagccatgatcttgtctgatgctcttactagggctgccaaggccgcggcagatctggccgctcatggtaggcagaattaagtgaaaaatagacataaaattcatccttgcagttactaaacatgaggacgaacaccttcaagtgatgttgcttgatgtatatttatgacacacaacagtgtcgtaaattaaaaggagacgaacactgcgtttggaacaaattgtttgctctgataagtttgattattgcaaatgtagtcaagtgatcgtgcagtcatgtttcagacttcctgcgcatttcatattcgtgcattgctgttgagtatctggagaatcaaagcaattgttctcccctagacaagtgttgtattacgaatataatatccctgattccagagcaaaaaaaaaatcatccttttttcaac

SEQ ID NO: 98446 - DNA, 127 bp, Zea mays
  unsure (1)..(127): unsure at all n locations
  Clone ID: MRT4577_21294C.1
gggtgnctctccgctccacctcggcagggaatgacctcagnagnanagctcagctttggtgggctccaatgcgcgtttgctgngtcagatggttttctctcgttttcggggctctcctcctcctttg

SEQ ID NO: 98447 - DNA, 343 bp, Zea mays
  Clone ID: MRT4577_21295C.1
caccaatccgaacatacatctcatatattagacattagcaaacatttaatacaatcacgacacatctacaccctgacacgaaaattatcacaattaatatactaaatcaataaatccgccgaacacatggcgggcatgtaaactagttagtgacttaacaaactgacttactaatggtaattagactctgaagtcggggaaatgacaacaaatcccgggtcagacgagtcattgaacacctgcgtgcaagtgaacaagatggaatcgaacgtgcttagcgcaagctgtaacgccccatagtgaaggagcctactcgcaaacatacaaaggaaacaaacatagg

SEQ ID NO: 98448 - DNA, 2225 bp, Zea mays
  Clone ID: MRT4577_21296C.1
cccacgcgtccggtgccaacgcccaactgccaaggcggggaggggggttccggtgcgcgcgcgcggaaatgaacaccggctgattagtaggtgggagatcgaggtcgcgcccttgccccacacgccactaaaggccgcgccgacgggctcatcaggcgctctggacgggctcgcttctgccgctccgcgcttgtgcggtgggtgaagtgctggtgctggtgcgggaagcgtcgccaaacctagcgggtgcagaccttggtgggggagcgaggagtcgaaacaaggaaccatgagtgaaacagggcacactgtacaagtcactaacctctcgagcagagtatctgaaagtgatctttatgagttcttttcgttctctggccctattgaacatgttgaacttatcagatcaggagaatacggtgctactgcttatgtgacattcaaggagcgctttgccttggaaactgcggtattgctcagtggggctactattgtggatcagccggtatgcataacttattggggacaacctgaggagacttttaatttctgggacaggccaacttgggaggttgaagaggaaattgaatacacgagttatcaatcatgccagtacaacactactccgcaggaagctcttacagtggctcaagatatcgtgaagacgatgctagcaaaggggtacgtgctcagcaaggacgctttggctaaggctagagcctttgatgagtcccgcggattaacagctgcagctgcagccaaggctgcagagctgagcaagagaattggtttaactgacagggtcagtgctggtgtcggggcaatgcgatcggtcgatgagacatatcgcgtaacggagacgaccaagacggtagctactgccactggaagaactgcagctaaggtggtaaatggtatcgtcaccagcagctacttctctgcaggagccatgatgttgtctgatgctcttactagggctgccaaggccgcggctgatctggccgctcatggcagacagagttaagtgaaaaacaaaacatacaatccatcctttttcagtgcaaacgcagtgtacgtctccttttaatttatacaacaaatcaacaatgttgcctgttataaatatacatcgaacaacaacacttcaagcatcctattaaggtgttcgtcctcatgtttagtaactgaaaaaggatggattgtatgttttgtttttcacttaactctgtctgccatgagcggccagatcagccgcggccttggcagccctagtaagagcatcagacaacatcatggctcctgcagagaagtagctgctggtgacgataccatttaccaccttagctgcagttcttccagtggcagtagctaccgtcttggtcgtctccgttacgcgatatgtctcatcgaccgatcgcattgcaccaacaccagcactgaccctgtcagttaaaccaattctcttgctcagctctgcagccttggctgcagctgcagctgttaatccgcgggactcatcaaaggctctagccttagccaaagcgtccttgctgagcacgtacccctttgctagcatcgtcttcacgatatcttgagccactgtaagagcttcctgcggagtagtgttgtactggcatgattgatagctcgtgtattcaatttcctcttcaacctcccaagttggcctgtcccagaaattaaaagtctcctcaggttgtccccaataagttatgcataccggctgatccacaatagtagccccactgagcaataccgcagtttccaaggcaaagcgctccttgaatgtcacataagcagtggcaccgtattctcctgatctgataagttcaacatgctcaataggaccagagaacgaaaagaactcataaagatcactttcagatactctgctcgagaggttagtgacttgtacagtgtgccctgtttcactcatggttcttacccttgtttcgactcctcgctcccccaccaaggtctgcacgtttggcgacgcttcccgcaccagcagcagcacttcacccaccgcacaagcgcggagcggcagaagcgagcccgtccagagcgcctgatgagcccgtcggcgcggcctttagtggcgtgtggggcaagggcgcgacctcgatctcccacctactaatcagccggtgttcattttccgcgcgcgcgcgcaccggatcccccctccccgccttggcagttgggcg

SEQ ID NO: 98449 - DNA, 141 bp, Zea mays
  Clone ID: MRT4577_21297C.1
ctcgagatcgcttgcacaaatacatgcgctttacgtctcattgtgtagaggagaatggtagttcgtattgagagatgtatgcgcaatggctgcagcagagtgcgtgcttctgcggattcagaatcccttcatggaaatatg

SEQ ID NO: 98450 - DNA, 615 bp, Zea mays
  Clone ID: MRT4577_21298C.1
gagaccctgccacacgcgagacggcgcaacgctggcggcgcgggaggcgaagaagcggctgacggcgaccctccccaccgccttctcaccgtacactctaaacttctgtttggcagcaccgacttcattaacgcctgcaaatccacttagaagttcgttgcttgataaagtacattctaaactcctgattagcaacatcggcttcattaacatctacaaatatactcagaagtttactgcttcgtaaaggagtatctccaaccgcgattgctgttcagtcaccctacattgctcaagtgcaattattaggctatctccagcagatttcctatctcacttctattttaaactccactctgtaaatagtgtcgtctcagtataaaatagtgttttgcacacctatatacacgcttcgctggagatggtcttaagagagaagcaccttccttggatggggtttctaggctcggcttcagttaacattgattcaaacacctgaacgcttggttaacacaaggaattggaagctgggaaatcatatgttgcgttttcttattattattttttaactctgatacacacaggacgacaggaggatgaatatacaggaagagg

SEQ ID NO: 98451 - DNA, 333 bp, Zea mays
  Clone ID: MRT4577_21299C.1
tttgaggcagccgggggttgccatatagaaagtctggttaaaactttgccggattaagggcttagcttataacgtggtgatattggatgggggcaaaattggacacaacatactacccggaaaaataaagagccaagcccagggggcctaatgattgagctgactaacataaatggaaatgccgtagtgcccaattagcaaacgggcaaaccttttattgccgggtgcttaatgaaagtttcaagcggaaaagaggcggcccgcgtataatgcgcaatgggggatcctctttgaaaagggagactgggaaaaggtgattgggcttaatctttt

SEQ ID NO: 98452 - DNA, 353 bp, Zea mays
  unsure (1)..(353): unsure at all n locations
  Clone ID: MRT4577_2129C.1
cccggaggacgnccggggcgggcggggactaataggcggacacccacaggcccccgaagcgccggatggcgaaccgcgagacggcgcggcggacccggctccggaagcagcagcaccaggacgagctggagcaggaggtggcgcgcctgcaggccgacaacgcgcgcgaggcggcccgcgccgccgacagggcgacccagaacacccgcgtcgagcaggagaacaccgggctccgggcccgagccgccgagctgggcgaccgacgtcgctccgacaacgaggtgctgccgcctcgcgaggagttcagcggcgtcgccatggacaagcaggaggagatgccggcggacgacccg

SEQ ID NO: 98453 - DNA, 613 bp, Zea mays
  Clone ID: MRT4577_212C.1
tacgcataggagctcgagggccgcttttttttctttttttttcttttttttttttttttttttttgtttttttttttctaaatgaaaagcctccccgagatgaagcaacaacgcaaacagccctaattattctcaataacccggaaccaatgcaggggaattaacagctcttacaacatcaggtgttgtaaaccacccaatatttcacaacagacacacataacacgatagcaggagcaactctcggcagatcacgggataagggcagcacactggcctgatgctgctaaaacaccaaacttctctaatactcgtcaccctcgtcgccatcctcgccctcatcgaactaagcaccgacctcctcggagaccttctcgagggccgccaggacctcacgggcctcaaaaaactcaccttcctccataccctcaccgacataccagggcaccaaggcacccttggcgtacatgaggtcgaacttgtggtccatgagggagaacacctccacaacaatggaggagttaaaaatcatgtacacgggacgctgccccttggccaggttaccaaccaggcacaacgctaggaggctggaagtcgatgcccgcccttgaac

SEQ ID NO: 98454 - DNA, 216 bp, Zea mays
  Clone ID: MRT4577_21300C.1
acgcggacgcgtgggttaccacacaagttcagatcaaggtcatgccccatgcagcagacgggggggggcgccttatacaggatccttcaggtcaagttaaccatgggcctgttctagaacctttacccagactctagcctatgcggccagcttgtgaagcaagaacatcttatactggcacgcgtagccggcaggaaatgcttgtttctttggaag

SEQ ID NO: 98455 - DNA, 173 bp, Zea mays
  Clone ID: MRT4577_21301C.1
ggaacaatcccccacttttttttgggacttgataaataatactcatacattcgggggggaagtttcacttaagttcaacaccaaacttaaaaaccacatccctatttttgtgctaccaaggcctaataataatacaagtgctttaaactgaaaattccaagttttttcccaaa

SEQ ID NO: 98456 - DNA, 158 bp, Zea mays
  Clone ID: MRT4577_21302C.1
aggtaccgtccgattcggtcgacacgctcggccccccttcttgtttccaattatatttgggggtggaataaataatttgtgcagggggaaagggtccaacacctggcccaccgtaaaggaccaggtgagaaacccttccttttttccttttaatccca

SEQ ID NO: 98457 - DNA, 303 bp, Zea mays
  unsure (1)..(303): unsure at all n locations
  Clone ID: MRT4577_21303C.1
tcgtctcgtccctagtccgtccgcgtccataaactcaatatcctcgtccatcgcccccgaatacatttccgtgtgcgtttccgggtgccgctgaagtcgtatcgcattccgagcccgattcgcgttgactttcgatcgactttcgggtgccttcgacgatttcgcggtgccttcgcagattagattaggcattcccttgtcgactctcttcgaagggggnntagagcgccgagtcgaccccgtctgtcactgtgcgatggtgccttccctctatcccgccgctctggtgtaccttgtggaaac

SEQ ID NO: 98458 - DNA, 301 bp, Zea mays
  Clone ID: MRT4577_21304C.1
taaagcaacaccaatggccaccttttttctcctataagattaactcagattaaacccgggggggggaaacagcttttttttatccccattcctctctggttgtcccctgggttgggtggggcctaggataaacacaactttaataattgtcccagagcgaccttgcaattaaaaactcatttgggcaacaacaaacgagctgaacgaaaataaaccctttggtatagggtaaacttattgggagccagacaggttttcttggtcgggcgggccccaccggtaatttccttcagtttccggc

SEQ ID NO: 98459 - DNA, 1442 bp, Zea mays
  Clone ID: MRT4577_21305C.1
cattgggtacctcgaggccggccgggtaatctattctacgaaaaaaaaaaaaaaaaaaaaaaaaaaaaaaaaacactacactccgttccccttgtcccaattgctccacttgcatctcagggacgcccacgacccccaccgcccaccagtgatctcgccgccgcgacgcgaggcaccacggccggcgccggccgccttcctccagaaagtatcccccgtggtcccgtgcgcccgaatcacctcttaatttcgttcttagccgctgcgtttcacagaggtcgcgacatgcccgcctcggcgtctcctcctgcccagcccgcggaaccgccccctcctcctcctcccgcttctcctgcccctccggaggatgtggaggcgactgccggttcaccttcgagggcttcagcagtggggacggtgaactggggaacggccaccctcgttggcgtcttcgctgggctgctatacggcgggagcagggaggcctccgcctccgtcagtaaggatgccgaggtgatgctgaagatgggaagcaccactgacaagcgtgaacagtatagattgatgagagatgctatggagaaaaggttcattcgggttgccaaaggttcactagtcgggggtgttcggctggggatgtttactgcgactttctttggcatacagaaccttcttatcgatactcgtggagtacatgatgtattcaacattgccgctgctggctctgctactgcagctgcttttggccttatattgccagggtcaatgatgtggcgtgcaaggaatgtattggtgggatctgctcttggtgctggcatctgctatccacttggctgggtacagttaaagctggcagaaaaggccaatcttgagattgcaaattcaaaaccatcatccgatttgacagagggaaaaggaaatcaaagccgtgtgggtgctgctatcgaacgacttgagggtagtctgaagaagtgagtgaagcctacgcatcgatggcatttttctcgttgtcttggttccataaatgtagcagctacaaggactgggctgcactgactattgcttcttttctcgcatgttaatgttatcgacttttgtttcgagtttgtagtaggtatcgccgtatcccactggcaacttgtatctttcaagtcacaagttattgagttcgcagttgctattctaaaaggactgggaaatgcaaaatgtgtttttttttttactttttttcaaaagctggaaaagatgtctgttgtactgaaacagtagataagtcattgtttgagttttgtttggcacagcttaaaaaaaaaatatgtctctcaccatattctgtctcatcataattttggatactagtacctttctgtaacttttgaaatctatatgaagtactaaggctagaccgcattttgggcagtttaatggggctgttgggcagt

SEQ ID NO: 98460 - DNA, 782 bp, Zea mays
  Clone ID: MRT4577_21306C.1
gccggcctggttctcgaacctcacataacagtcaaaatggtccgtggaccaagaagcaccagaagcgcctcagcgcgcccaagcactggctcttggacaaactgtccggagcctacgctcccaaggcttccgctggtcctcacaagacccgcgactcgctgcccttgatcatcttcctccggaaccgccgttaagtacgctcttaacggtgacgaagtcaaggccatcgtcaagcagcgcctcatcaaggttgacggataggtccgcaccgatgccactttccccaccggtctcatggatgtcatctccatcgagaagaccggcgagaacttccgcctgatctacgacaccaagggccggttcaccgtccaccgcatcaccgctgaggaggcacaatacaagctcggcaaggacaagcgcgtccagcttggcaagggcggcattccctacttggctacgcacgatgcgcgaaccatccgttaccccgaccctgccatcaaggtcaacgacaccgtccaggttgaccttgctaccggcaagatcgaggacttcatcaagttcgacactggtgtcatcgacatggttaccggcggtcgcaacatgggtcgtgttggtgtcatcacccaccgtgagcgtcacgatggaggcttcaacattgtccacctcaaggatgccgttgacaacgagttcaccacccagtgagtccaacgtcattgtcatcggccaggagaagccctggatctccctccccaagggcaagggtgtcaagctctccatcgctg

SEQ ID NO: 98461 - DNA, 351 bp, Zea mays
  Clone ID: MRT4577_21307C.1
cggctgtggacgcggaggggatgggagagctagggttgcttgggggcaagggtcacgcacgcgatcgatagacgtcgaaaacgtacgcatgatggacaatgcagattaacacgcgtggacgtcgcagattaatgggaggcagaacaagggagaggcaggctaccccttgtagccttaataagtagtagagattacaggtactaatcagaacaataaatactatcaggacacaatcaggagtgtgtccattagaggaacgagaaacaattaaaaggcacatcatagagataaactaatcatcaaaatcataattagacgaacaaagcacttcagaattgagatatatcacaa

SEQ ID NO: 98462 - DNA, 487 bp, Zea mays
  Clone ID: MRT4577_21308C.1
cgttcttgttggattactgccgttcggcaccacacgtgcggaacggatgagcaaatatgaggagattcctgtatggtaaaggttagcgcctgcggagagcgcttgaacagcaccgtgaacttaattcagcatacagatgactgcccgaaggagctccatgaatacaatgaccacggattcgttacaagggcacactacctctgacaagattggggatgtagccacctggaggatctggacacgacctctctgaagctctaccttggggatatgggacatgatcaccttcataaaagggggacagcaacagaacttatctcccgggatatatacgaggatcatgctcatagatgcgagggtccactcctctacattgtcctgatagagaccaatggcaataactgggacatggccttatagcgcagttgcggcctagcgcgtactctatgagacggtcacgatgattgatgagcctcaatgcgcgatt

SEQ ID NO: 98463 - DNA, 160 bp, Zea mays
  Clone ID: MRT4577_21309C.1
gtccgaattcccgtcgacccacctccgcgaaccttgggcggacacttggacttcctattgcgaggatagcccgaagggcgtgcttatacaccaaacggggtctaaaccaaaacttgacaacctaaaaggcttgcaagacattaaacataaaatttacttt

SEQ ID NO: 98464 - DNA, 882 bp, Zea mays
  unsure (1)..(882): unsure at all n locations
  Clone ID: MRT4577_2130C.1
ctcgaggccggccgggagtgcaatcaggtctgtgccacggcttttgcctattatgcacaagcaactgctgctcaagagatctttggccacacattgcaatcccttcgtggaattaagtatctttacaagtacaatgttttccagtatggctttgttgctcttgccatcctcacactcttttactatgctatatttgggtggagaaaaaagaagccaacagggaggttccagctctcaaaatgattcatcacatttcccccctgagtgatagttcagttagcgtcgtacggatgtatatgaacgaaaccaaatcttttcaaagagctgaggagctgcaaatggtgtatattatcaactacgtgacctcaaagccgagaatgttggttaccacggacatggatgttagaagtagaacccagttaactttgcagcgtttggtgtgtttgggggcgcttttccgcccccagttcgatattcattttttggttgtgtctggagttagtcagttcattgcttttgtatgtattatatactgtgattacaacacaaggttttaggttgtattaatgatatgtcctgatcattcctgtgcccgttcaaaaaaaaaaaaaaaaaggggaaaagggtatattttttgngtgtgtttgaactttgcccgtgntcactacaccattggcaaggagattgttgacctgtgccttgatcgcatcaggaagcttgccgacaactgcactggtctccagggcttcctcgtcttcaacgctgttggtggaggaacgggctctggccttggttccctcctcctagagcgcctgtctgttggactacggaagaaatccaagcttgggctcactgtgtaaccttccccccaagttcctaact

SEQ ID NO: 98465 - DNA, 354 bp, Zea mays
  Clone ID: MRT4577_21310C.1
cccaggaatgatttaaattatcgaacggggggattggattacattcaaaacaacttaaaaaatactactaacaatagtccaacacgtcacaaacaaggaactaaacaaaataaccctaacaacaaacaggcttccacaacagcaaggaaaaaaggcatccaccctaccctccaaacccgaaaagggttcggccctggcccttgaacccgtaaacaacctccatggcggaaacaattttgcggggtgcgttctcggtgtaggtaacggcctcccggataactttttcaaagaaaatcttgaggacccccggggtttccttgtaaataaaccccgaaatgctcttaaacccccccc

SEQ ID NO: 98466 - DNA, 279 bp, Zea mays
  Clone ID: MRT4577_21311C.1
tccactcttcctggttcttctactaaaacctatttttatctgaagacaagttccctgatgatctcaagatatatatttaaagatctcatacaaatatctactggtgtcctatcatatgcctatcataccgttgaagatctcataggtatacctacaacactggaaagctttcatcctatgtatcatataaaaaaattctagctctcttatcccaaactacctgtccatctaaagtattgctcaatatatttcaatacttctccaaaatgttactatatc

SEQ ID NO: 98467 - DNA, 710 bp, Zea mays
  Clone ID: MRT4577_21312C.1
tctctctacagccagattctcagaaaagctggtcagcaaaaaaattgaaccaaacaggcctgaaggctcgtggagctaagcgaaggcagtcctagtcggctaggaagaatagagcgtgggatagagatttattttactattggtattttattgggttgaatcaaggtattgcttgagcaaggccgagcaatattgggtcctccgcccatgctggtgacctagtgagtagtgagacaattttcactactgcaccaggcctgcccttcttcataaaatatgttactgaaggagcctttgtttacttatgtatgctgcataaaaccaaacattgataggacagtaataaatttgtctttcacaatattacatttccttttgttttcaaacaaagaatacctatcatgaattatcagatttaaaccctcatctaaatgatattcaggaagcagaagagcgtgaaaaaattgtaaaggatcccaaatccattgtaccagcagcatttgtttccttccgatcacgttggggtgcagcagtttgtgctcagacacagcaaaccagtaacccaactgtttggttgacagaatgggctccagaacctcgtgatgtgtactgggataatttgtctattccatttgtctcccttacagttcgaaggctgataattgcagtggcattcttcttcctgaacttcttttatgtgttcccaatag

SEQ ID NO: 98468 - DNA, 200 bp, Zea mays
  Clone ID: MRT4577_21313C.1
gacccagggggccaccccggaatcaccgaccaattccggacagctaaccagaggcccctaaaagtgagccgtaaacaagcccgctgaaaacatggccaaagcactaccctacgtgaaattggtatacgaataaaatgcccccaaacattcaaacctgaaacaattagtgcaaaacccggggaacctaaggagagacctaa

SEQ ID NO: 98469 - DNA, 280 bp, Zea mays
  Clone ID: MRT4577_21314C.1
cccgggtcgacccacgagtccgaccacgcgtccgcaattaaggttcagatacatccttggactcttcgatcgtctcgcttaaggtaatgttgggagcagttgttcgtgatgagcgtgaatagattggacgagagttcaaaggtggtatctgtcattgtcctgtgaaatagttatgataattgttttcctcttcaagaaactatcaacatcaacggactactgaccgtgatccttcaagtcttatgctggaggccgtgctgagggttttctctctgtccag

SEQ ID NO: 98470 - DNA, 283 bp, Zea mays
  Clone ID: MRT4577_21315C.1
ttttctcgtgcgcggacactcctgatgccgacctggattgctggtaagtcgaccacgctgccaaacgcaaacatctgggtgatgctgtccgtgtacaggacgaacaggaggcggatatggtcgtaccactaggacgcgtagacggctgcccagaggacgggcaacaacccgccagaggagtccttacaggtcgagccgagcaccacggaggacaagcctactagccactacagacgaagcatggaagggttctgaaccgccaacaaaatctagggatgacctc

SEQ ID NO: 98471 - DNA, 191 bp, Zea mays
  unsure (1)..(191): unsure at all n locations
  Clone ID: MRT4577_21316C.1
ggtatgggaaggagcncacttggccgcgccccgatcgacgagttgtcagtcagcacgtcttcttcaacctacttctcctctatgaagaagccgtcgctcctcctcttcccgggcgcggccaagtgcgcctccttcccatacccgccgccgctccccttgccgtatgcggtgaacccgaagtgcgacgcgcg

SEQ ID NO: 98472 - DNA, 700 bp, Zea mays
  Clone ID: MRT4577_21317C.1
ccggggccagagccctcggcccatgccgatcgatcggcgctctgccttgtgccattcgctcgcataatctccgggccgccggtcgcgcgaacggagctattgttctggtgggccggtgcggtgctttctgttccgatccatcctctgcacctgcacgccgccgacgacggtgaaagcacgcgctgcctcagcgtggaggcaaggcaaggcacacacggaacgatcggtattcccggcgacgcagaacatgcatgcatgaatcggcggtcctgaatcctgatgacggtctccgtctagatcgggtgtcctgcctgcgcgtgactggcttcgaagaccttatgctgaccctaaggtgctggacacaccgacctcatgaggatgggtacaaccaacccagtagtggagaaattggagctgccgaccacaaccacagttaagcagtccacaagcagtccgatcaagccgatccctcgtagggatagcaattttacccgtgagtttggatatctgtcggatatccgacccatcgggtacgggttcgggcacgaaatttgacccacgggtcttacccgtacccgacccgattttaatacgggttggatacggatttgattccttacctgcgggtacccgacggatatccgaaaatagtgattttagattttcaataaacaaaaaaaaaaaaaaaaaatttgcggcc

SEQ ID NO: 98473 - DNA, 341 bp, Zea mays
  Clone ID: MRT4577_21318C.1
tagattagatcggcaagggaaatgtggaatgtggaggggtccaggtggggactatagtaaagaggagggtggagtacgagaggggcagagggttcctactctcgttggagggggaggagtggtagggggagtagtgagaggaagatggcgtcgggggtcaggggggatgagagtggctttcttcttcgggttccttgggggcggtggtggggttgttttctcatggatggggggggggggggggatggccaagagtggggtcggggtggggtccatgggtggcatggggttagaggtcggcatgaagtccatcgtggttggggtcatgggtgggggggtcg

SEQ ID NO: 98474 - DNA, 378 bp, Zea mays
  Clone ID: MRT4577_21319C.1
gtcgatgcacgcctctaaagtgagtcgtattataagaaaacaaagcaaaaaaaaaaaataaaaaataaaaaaaatcaaaaaaaaacagagacaaacaaaaacagtttaacgcataacaaacacataaaacggggcaaggaaaaccacaaacattgtaaaccaaatctacatcaaaaaagggggggccctcccaaaggttatcgcgctagatccccctgcttcacaacttaagccctcttccaaggtccccccaatttacatttccgggggctttttttaaacaccttgcccgggaaaaccccgggcttttccaaaattaatgcctttaaaaaaaacccccctttctccacggggtattttacgaaaaggggccccctc

SEQ ID NO: 98475 - DNA, 235 bp, Zea mays
  Clone ID: MRT4577_2131C.1
actatcctgttggggtttttctgcagcaccaagaagcaccattttttccttaggataaacttagaacaaaccctgactggggttacagcatccattgatccacagacaatgctggttgatgcatgggtcttttggagccgaggattaacacagtactatcaactgtcccagagcgtccttgcattaaaaaacatagatgggctacttacaaacgtgtacgatcgaaattaaaccc

SEQ ID NO: 98476 - DNA, 630 bp, Zea mays
  Clone ID: MRT4577_21320C.1
cattgggtacctcgaggccggccgggacttcgttctcctcgagtgaatgcgaccctccctccttcactccttccgcgccgactcacggacgacgccgccatgatgaatcactcccaggagactgctcaccctaccacggcagctaaggccatgggcaaggatctgagggtccacttcaagaacacaagggacacagcctttgcgcttcgcaagatgcctttgacctacgctaaggataccttgacgatgttattgctcacaagcaggcaattcccttccggatatactgcgggggtgtggccctcaccacgctcgctaagtcacgccactccaacgtccaggtgcgctggcccgccaaatccatgaggttcatcctgcacctgctgaagaatgatgagagcaacgctgatgtgaaaggctagaatgagcacaacctctatgatgctcacatccagacgaatctggcccagaagaataagctgcgcacctaccgcgctcacgagaggatctatccctacatgtcctcatcttgacacattgatgctgatcctgtcagaaaaggaagactctgggaatagagaggacgactacatagtcgcagcaaggaagcatcgaagtatatcatctgct

SEQ ID NO: 98477 - DNA, 287 bp, Zea mays
  Clone ID: MRT4577_21321C.1
tattttcacatgtagaccgcagagctttttaatgcaatgtgatacctccagaggacacgcatcgagatccccagacgagtatataccacaaggcaatgagcttacgacattatatgatactaatacgttcaatccactggcggaattcttggtcttttgagtggtaccctgaattgaatgatgatgcacacatgcataaatatctttgatgactttactcgagcatttgatcttgagtgcagtaagaccacatgcataatgactgtccaatggctcgaatccaaaat

SEQ ID NO: 98478 - DNA, 501 bp, Zea mays
  Clone ID: MRT4577_21322C.1
ttgggtacctcgaggccggccgggaccaaactccacagcttgctggcaagcctctgaatccatgcatccttcgtcaccttccattctgcacttacagcagcagcagcagccacagcttgctgcgcttggtgtgcgaccccagctcgctccatggaccccttctgcttcagcttgcagataagcggatgtatgtcagttgtgtcatcatttatcactgtccaatgtccatagacatcacaacaagcactcgaagatttgggactgttccaacaagcaccgagctgttcaaaacgacaagcacttgataaaagatgagttctccctgcacttctgaatacttgagaaactctgaccatgaatgtaaccttagatattaaatatacatgatggaatgttcaaacttttgtcttctcaaaaaatttgagtagacgtttcatttgtggaacctattggtaaaaattcgagttttgaaggccaaaaaaaaaaaaaaaaaaagcggcc

SEQ ID NO: 98479 - DNA, 551 bp, Zea mays
  Clone ID: MRT4577_21323C.1
gcggccgggcggacgggctgatagaataccaaaacttgtatatatcactcacataatggtctatattaggatgctggaatacagatgtgctagcgtgctgaggcgtagcagtggaactgttatgtaaactgctgtttattgtgtgacaaaatccctttctttccgattgtcttagacaatcaatgatagagaccacacgtgtatcacagtaagtgccaatccattacttcagtactagctttaattaattgagagactctataacgaagtactgaggcatgccttatacatatccgaggaatctacacattataaaaaaagtatactatgactaatctatatctgctaggtgaacgggcatgtacaaagtagtagccttacgtagattgagctgggcgaaaggggaaggggaaaaaaattctatgagcatttgcttgcttgggaaagataacatccggcgagaataatatactactgctaacagatcatttattatgagaccgagccgcttcctatgtagaattgtagttactagtcctttatattgcaat

SEQ ID NO: 98480 - DNA, 492 bp, Zea mays
  unsure (1)..(492): unsure at all n locations
  Clone ID: MRT4577_21324C.1
cattgggtacctcgaggccggccgggcgaacgccctgcgcttanatcactcgggtagaacactcgcctcttccgactccgccataccaccaatagatccagctatggcggtgtagtcgaattcaatcctgagcgcgagacacacgaaatcgccgcaggctcgatatacgncagggctttcaccgcccaactgcatcttgcagcgactgtgctccagttcggggggaaaaaggaaccgtatctgctgaatccctgcgctccggggcggggatggatcttgacctggacgactacgtggacccctacgaggaggccgaggccgaggctgccgcggcggaggacggctccgacgaccccgacgaggacgactcggatgcggagagcgactacgaggaggagtcgtttggcctcctcaagtccggcaagcaccgggtgcgcaacccggacggcaccttccgctgccccttctgccccggcaagaagaagcaggggt

SEQ ID NO: 98481 - DNA, 263 bp, Zea mays
  unsure (1)..(263): unsure at all n locations
  Clone ID: MRT4577_21325C.1
cagacagaananagagagacaaaacccgggccaaacacaaagacccggggagcagccagaggccagagaagcagccgaacaggaacacgagcagccagcacgcagcacagaggagcaccggagcaggacaccaagaccagcagcccgccagcacgccggacagcaggagcacgagcacgacagaacgagaggcgagagcgacagcaccagaggagaagacgagcgccccgaacagaaccgagcaggagcagaggccagcaggc

SEQ ID NO: 98482 - DNA, 374 bp, Zea mays
  Clone ID: MRT4577_21326C.1
ctctgatagcttgcaccaggtcgtacgtacgtacgtagatcgatcgatcgatcgctagctagctgacgaccattgcgtccctctcctcagcggccatcaacggccattccttcacgggcgcacccgctcgcgcagtggtcagcaggaggtccttcaccgtgcgtgcctctctccgcaaggcgattgccaacgccgccgtggtcgttgccgccagcgtcctgcatgccggcggctgagccatggctcacgatgtgctgctgggcgcaggcgacggcgggctcgtcttcgatctcagacagttcaccgtgaacgtcggcgacaccatcacctttaagaacaacgccggcttcccgcataaagtcgtgttcgacgaa

SEQ ID NO: 98483 - DNA, 1203 bp, Zea mays
  unsure (1)..(1203): unsure at all n locations
  Clone ID: MRT4577_21327C.1
gccggtttcggccatatcctgcctccgccccgcccgcctcccgcgggccatggcatcctcatctcctctcacccgtgctcaccgcgcctccacctccacctcttccgtcgccgccgccctcctcgcttctgcctcgcccattcccccgcgccgcttcatccagctccacgcgcaccttcttcgcacgggccttctagccttctcccccgtcacaaccacctccgccttcctctccctcgcggccgtctccctcccgtcccaccgcgcgctcgccgtcctcgaccaccacctcaccaccccgcactctctcccctccactttccagtgcaattccatcctccgcgccctctccgatccctccgacgcgctccgcttcctctgccgcatgcgtgctctcggccgtcgcgggaacgccttcaccctggccatcctcctcaagccccgctgctcactcgcgcacgcgcgccagctccacgcaaacgttgtggcggagggtcacctccgcgacgccctcctcgccacctcgctgatgaggtgctatgctaaccgtggcgacggggacggcgcgcgcaagctgtttgacgaaatgccagtgagggacgcggtcgcatggaacgttctgatcacctgttatgcgaggaaccggcggacaaaggacgccctgaagctttttgaggagatgagaggcagggacagtgagtcggagccagatgatgtcacctgcattctgctcctccaagcatgctcgagcctgggcgcacttgatttcggtgagcaggtgtgggcgtatgccgaggagcacggttatggtttctagctgaaggtgcgcaattcattgattacgatgtacttgaggtgcgggtgtgtggataaggcatacagggttttctctggcactcctcagaagagtgtggtcacatggaccgcaatgatctcaggattggcagcaaatggctttgggaatgatgctatctcagtatttgaagagatgattagatcagatgatgctcctgacgaacagacttttactggtgttctttctgcatgtagttatagtgggctggttgacgagggttttaggttttttgatatgatgcgatgtgagtacggattgaagcaaaacgttcgccactatggatgcattgntgacctaatgggccgggctggcttgcttgatgaggcttatgagttcgtgataaatga

SEQ ID NO: 98484 - DNA, 628 bp, Zea mays
  Clone ID: MRT4577_21328C.1
cccacgcgtccgcccacgcgtccggccgctcgagtgggcgggcggacgccagcgcccccgtgcagtatgtccacagctggaggttctgccagttcggctgcgtggacaactacttcacggcgcactaccagtcccccaggcagatgctgtgcctctgggagaagctgtcagcggggagagcgcactgctgtaactacagataacatgaggccccccaggggggaaatggtggcctagccgcctaggtgcatcaaggcccatgaccttcgttccattcgcctggcttcggtggttcggttccatacgaccatctgctcagatgactaatgccagaaaccatgatctcgacaccgcatgttctttggttcttagattgaaggtatacgggataagggtgttaccaactgctgcttcatcttcaattcttcactgaggtgaatgctggcatgaggatagaaggggagggggcgtgaattcacattggctgtttgtacaggccgccggcctatttgtagaactgcaaatccgtacccactggaacgggaaattgtctcccctgtgtggctgtgtatgcagatctgtgtgtactattcgtgcgaatcggtggtgtatgtgtatttgacatccc

SEQ ID NO: 98485 - DNA, 1074 bp, Zea mays
  Clone ID: MRT4577_21329C.1
acgtagcgcgaatagcgggcgccgagcacggaggcgcccagcgcgtcggcgaactggtacagcgtgtccaggtgccaatcggtgtcgccggactgttggccggcggcggtcatgcgggcgcgctgggcgtcgggaagctggctgcccaggtgggggatggagatcagcagcggggcagtgccgcggctgaagtggtagatgtcgctcaagaaaaactccgggtggcaagggcaaggcgccgcgggctgggccgcggatggcgggcgcccttacgccggagcgctgtcccgcggagaccggacagcactctagacaggaccacccgccagaggttttgcatcagtttagtggatatagatgatcggtatcactgatgcaaatgacgccggcccgggagcatgcggacgtttgttccagccgccgcgttgccatgccggcgcacacacaggccttatgccggccagggcgcgccctgttgccagcgcgccacgatgccgtcgatcagcagccgcaccttgggggccaggtggcgccggtgcggatacacggcgcagacgggcgcgcccggcggcgcgtggggctccagcacggccaccaggtgcccttgccgcaggtcgttgcccaccaggaaggcgcccagctggacgatgcccgcgcctgccaatgcggcatcgcgcaatgcctcggtgttgcccagccgcagtcggccggcgaccgcgacagggcggtcctggccgtggctggcgtagcgccacgggaccggcgcgcccatgtgggtgaaggccagggtctggtggcgcgccagatcgtcgggcgaggccggcgcgccgtggcgcgccagatagtcgggggcggcgcaggtgatgagccggtgcggcgccaggacgcgccgcaccagccggctgtcggcctcgccgccaatgcggatggcgacgtcgatgccgtcgcgcaccaggtcggtgtagtcgtcggtgaagctgatgtcggcttcgacgccgggccattgccgcaggtagtcggccaccaagggcatgatgtgcagccggcccaaggccaccggcaggtcgatgcgca

SEQ ID NO: 98486 - DNA, 765 bp, Zea mays
  Clone ID: MRT4577_2132C.1
gctgatttcatgaagcgaccctaaaaaatgaactcgggtgccgggagctaaaaaaaggtacgcatccaagattcttggttgccaaatttgatgttgctaagaaagcatgtctcaattttctcgataagtttaaggcgtcagtcgttactggtgaacaactcttaggacaaagttgtataaaggattggctgatcagttgatggatattgttgtgaatgcagtacgtctgatttctgttgtagtttttctgtgaaaggtttttatacctgtccatttcaaagcatatttgaagtatgaaactgttataggcttaaaggttctgtgcatctgcgattcagatgactcagttgatctttttatgtccaacggagacctccagaagcaccaatgcgttgtgcggtcctaaggtagcgatgggaagagaggcaggagaaggccaaatttgacatggggagaggtagtaaaaggagacttgaaaaggatggaatatatccaaatatttagccttaaataggactataggagtgcatacaccataggaaacagttatacatgtgcctgaatcttgacttgtgatttatgttgggtttcaactctaacctacctgaactttcttgtgactaaaagacactgttgttgatggtggtggataatgcatatgtgccatttatggtgtaaataaataaataaaaagtttatgtatcccaaaaaaaaaaaaaagggcggcccccggcatggtggcctggccgccccgggaataatcct

SEQ ID NO: 98487 - DNA, 204 bp, Zea mays
  Clone ID: MRT4577_21330C.1
agctcgcctgctgcagagtctaaactccaaacgatctgtactaacttatcgataatgaggagcttatgctgtagaacctcgactagatctatcgacatcgaacccagctggagaaaaacctatgacgaatatgctccatcatgattaccgtagcttgaatctcggactcagcatctaacgcagcactgttgaaagcacattagt

SEQ ID NO: 98488 - DNA, 549 bp, Zea mays
  Clone ID: MRT4577_21331C.1
gagcaactacctatgcattggaattggtaatttacatttgaacaagtcaggttttttttttgtgcctcgatcacaaacttcattccgaaaatagcaatagaaggacctacgatcagtgtagcaaagctggagtgctagagcagtcccatggctgatttggtgacccggaatcacgggatgattgaaggggactgatccacttgtcaccaaatcaaccctaaaagggtgaaaaaaaagaataacaacaactaaccttaatttcccaagccaaccatgttctgataccggcaattttactacagctgcgatcagttaatttccatccgaagcatcatcacaacatctccttgatgaaatcaaggttgagtgtgtcacgcacgatgaggaacatgccaaccatgagcaccaccaatatccctgatgacatgatcccctgttcaacttctcgcggaatcttgcggccaccacgagctgcctcgagaaggatcaatgccagcgtgccaccgtccaacgctgggaagggtaacaagttatggccgcaaggttgag

SEQ ID NO: 98489 - DNA, 484 bp, Zea mays
  Clone ID: MRT4577_21332C.1
tttttacgcgtgggcggacgcgtgggcgagggtgctgtccgcctcgatttgcctccacgtgccaagctgcatgatgtcttccatgtcgggcttcttaagaagttcataggtgatccaccagcgaggccgccaccgctgccaccattgcttcatggggctgtgacaccagagccagaacgtgctgtccgtttccgccaggcgcccggtggtcgacaagtgctcattcactggaagggacaatcggctgcgtcagcaacttgggaggatatggctgagctccgcgacaagtttccccaatttcagctcgaggacgagctggacgtcgaggggggggggagagatgtcatgtacgggcgcaagtataggcgccgccgtgacatcagacacgcagctgagcgcgctgctcacgctacacaggatggcgccaccattaggggctgagattccaaaatccaaacagcagattagtttccattttccccaa

SEQ ID NO: 98490 - DNA, 665 bp, Zea mays
  unsure (1)..(665): unsure at all n locations
  Clone ID: MRT4577_21333C.1
aaccaaaaccacagctttttgtatatagttacgagtggtncaagcacacgtgttcagtacgtgacaacgacagacacgtatgtcactcatattaggcgttgccggtgacgatccgggcggcggcgtggagctgctggtcacacgcgacgacggcgaagctcctcggcgccctgctgcccaacaccacctcctctctcgtcgtcgtcggcggcggcggctcgttcaagaacgcccagctgctccgagtccacctacgcgagcgagcatatatgcgcagcagcgtacaacagtacatgcatgatgagaccaggtctgactagctagctagttgtgaacacacgtacggtaccagctgccgccgttcgcggcggcggagctatcgacggcgttctcggggaggaagaagccatcgtcgtcgctcctcgtgcagcagtattgtaccggtaccgcgcggggagagccggagccggcgttcggcatgctgccgtgctgcctccagaacgccgccacctcctccttggtcagcgaccggttcctcatcaaacgagcttccttgtcactcagcactgaggagctccaaccggacatcagggatcccatcgccgctactactgtgttcaattacacggacgatcctactactctcctatagctgcaggacgaag

SEQ ID NO: 98491 - DNA, 875 bp, Zea mays
  Clone ID: MRT4577_21334C.1
ctctcagctatcaataataactattcagaaaacttttttgtacgacgatggtctgcagatatatagcagctagcgtcggattacatgacgcgtgcaggatgttatttactattatacgaagaggaagacctatatatttggatgactcacgcaaaccaaaaccaaagctatatatataattacgagtagtacaagcacacgtgtacagtacgtacgtgacaaccacagacacgtatgtcactcatatacgacagacacgtatgtcactcatattaggcgttgccggtgacgatccgggcggcggcgtggagctgctggtcacacgcgacgacgacgaagctcctcggcgccctgctgcccaacaccacctcctctctcgtcgtcgtcggcggcggcggcggctcgttcaggaacgcccagctgctccgagtccaccagctgccgccgttcgcggcggcggagctatcgacggcgttctcggggaggaagaagccatcgtcgtcgttcctcgtgcagcagtattgtaccggtaccgcgcggggagagccggcgttcggtatgctgccgtgctgcctccagaacgccgccacctcctccttggtcagcgaccggttcctcatcaaacgagcttccttgtcactcagcactgaggagctccaaccggacatcagggatcccatcgccgctactgtgttcaattacacggatcctactactctcctataactgcaggacgaagaactgtgtgtgtgtttgtgtgatagagagagagagagagagagagagagagagagagagatgactgatcggcagtccggacggagagtactacacaagcccaactgcaggacgaagaactgtgtgtgtgtttgtgt

SEQ ID NO: 98492 - DNA, 362 bp, Zea mays
  unsure (1)..(362): unsure at all n locations
  Clone ID: MRT4577_21335C.1
gcgctccatttccctcacctcccgcagcagctagccgccgccagccaacatccgaaccaaccaaccaacccacagcgggcgattaaagcgtccagatggtagcgatcgccaccgtgcaacatcatcgccgcgactcggaggcggagctcaacctgcccccggccttccggttccacccgacggacgaggatcttttggcgcactacctctgcacgcgcgccgcggngcgccgcccgcctgtgtccatcatcgcctacgtcgacctgtaccgcttctacccgtgttacctgcccgagcgcgccctctttagtccccgcgagtattacttcttcatcccgcgagaccgcatgtaccccaacgtc

SEQ ID NO: 98493 - DNA, 395 bp, Zea mays
  Clone ID: MRT4577_21336C.1
cagggaagcccgcccccccaaagccaagggggggggggggggggacatcaccaagccaccgggcccggcccaagcacgggggaaaaggtgaaccgggggccaaatacagtgggaggggggcaaaggaaaaaagaaccaagccccggacagggcccttaaaaaacgggggtggggggccccacccgggaaaggggtttggggggcccagaggaaaccttttccgggggggccccacaccccccgcggccagagagctagcggggcccccccaaacacgtggggcgcggacagaaacacccgttctggggcacccagagcacgaccaaaagggggtttgtggggaccaacaccattgggaacttttttatgcccatataaaaggggggggggggcca

SEQ ID NO: 98494 - DNA, 125 bp, Zea mays
  Clone ID: MRT4577_21337C.1
gaaattaaacatgagttgggcttatagaaaatgaagagagggtttctatatgtctacaatggctacatgggtgtgcaatatcacagcatctggcgttcatcttaaatctactctttgcaccttat

SEQ ID NO: 98495 - DNA, 1388 bp, Zea mays
  Clone ID: MRT4577_21338C.1
ccgggcgtttcttcctgtgagcgacagctggtggagctgcgccgctctcaccttcaccggcgacgggcattcacaagcataggcacaggttatgatctgtctgtcaccaccttctctcctgatggccgcgtctttcaggtcgagtatgccacaaaagctgtcgacaacagcgggactgttgttgggatcaagtgcaaagatggcattgttctgggtgtcgagaagctggtaacctcaaagatgatgctggaggggtcaaatcggaggatccattcagtgcaccggcattcgggcttggttgttgctggtttggcagcagatggcagacaaattgtttcaagggccaaatcagaagctgccagttatgaaaaggtctatggagaacccattcctgtgaaggatttggcagatcgtgtagcaagttatgttcatctttgcacgctgtactggtggctcagaccttttggttgcggtgttattcttggaggttatgatagggatggaccacagctttacatgatagagccctcaggagtttcctataaatactttggtgctgcattggggaagggaaggcaggccgcaaagactgagatagaaaagttgaaactttcggagcttacctgccgagaaggcattgttgaagttgcaaagataatttatggagtgcatgacgaatccaaggacaaagcttttgagttggagttgagctggatctgtgatgaatcgaaccgccagcatcagaaggttccgaatgaattgttggagcaggccaaagctgctgctcaggcagctcttgaggagatggatgctgactaagaaacatgacaaatatgcccatgcttcatgtttttgtgctgttgatatctttgatccctttggggtgacaccgtgacagactggacattgccaatttgttggattttatttggatgtcatgtaaaactccattcatggaagtttgaatctggattgactgatataagagctgtggtgttttttacattctggtttagtcacgggctcacggcgctcgcgttctttaggaacttgcccttagacgatgcctgttttcatccatcaacaagtctcttcccacatgcgtgacagactggatatggcaaatttgtcggattttattttgatgtcatgtaaaactcaattcatgtaagtttggatttgaattgactgatgtcatagctgttgttagactttattggcacccgaaccatagctactagacggcgattgttttgcgtgtcggacctctttctgtttttgtaggctatgtgaaaaaggacggcacccataaggttgttgcgttttcgattagtcccgaacttgttccatctttcgttgcatttgaaatctttggtccctttgggctc

SEQ ID NO: 98496 - DNA, 765 bp, Zea mays
  unsure (1)..(765): unsure at all n locations
  Clone ID: MRT4577_21339C.1
taccctcgggctcgccggggttcatcacccgtgcgtgcgctctctctctctctttctcgtgcggcaactgcgaggccgccgacgcccgacggcagggtgcccaggccttcttcggtcccatcgcgaggccatagttgcatcattcgcctgagacgactgcccaccaccaggactgatctcactaggggcgtagaggtgaagagaagaacttgacaatgagcagcatagacacagggtacgatctgtctgtcaccaccttctccccagatggtcgcgtcttccaggtcgaatatgctaccaaggccgttgacaacagcgggactgttgttgggatcaagtgcaaagatggcattgtcctgggtgttgagaanctaggaacctcaaagatgatgctggaaggggcaaaccaaaagatccattcagagctgcggcactctggctagactgctgatggtttagctcttaagggcatgcatcctgcctaaaaaacatgccaaatatgcccaggcttcatgtttttgggctgttgaaatctttgatccctttggggtgaccccgtgacaaactggacattgccaatttgttggattttatttggatgtcatgtaaaaccccattcatggaagtttgaatctggattgactgaaataaaagctgtggtgttttttcccaaaaaaaaaaaaaaaaaaaaaaaaaaaaaaaaaagcaaaaaaaaaaaaaaaaaaaaaaaaaagggcgcccgctcgcgatctatctagatcgcga

SEQ ID NO: 98497 - DNA, 281 bp, Zea mays
  Clone ID: MRT4577_2133C.1
ggaggcccagattccccaaaggggggcccaaagccgggcaacccggggaaccggagaaggccaaaggccagcaacaaacacaaaaagccggaccaaccgggggaccacgaggcggggagggcccgccccgaaaagcaccccgagaagccccccaagggcaccaccgaccggccccgcggcaaccagcaacacggggaccgcggcagccacaaacgcgcgcagacaaggccgacgaccccgaacacgccggagaggccgccgcccgacgaccacagcccccc

SEQ ID NO: 98498 - DNA, 1400 bp, Zea mays
  Clone ID: MRT4577_21340C.1
tgggcactttcgatgccgccccgaaccggtatccggactatggtctgtctgtattgattgctcgctctcccccggtggctccctgtgcgcgggggctctcttcgtcgtgcggcaactgcgcgaccgccgacgcccgacggcaggtgccccaggtcttcgtcgaccccttcgcaaggcctcggttccatccttcgccggaggcgaccgcccgtcaacaggacttgatctactactcactagcggtgtagaggcgaagagaagaacttgaccatgagcagcataggcacaggttacgatttgtctgtcacgactttctccccagatggtcgtgtcttccaggtcgagtatgccaccaaggccgtcgacaacagcgggactgttgttgggatcaagtgcaaagatggcattgtcctgggtgtcgagaagctggtaacctcaaagatgatgctggaaggatcaaaccgaaggatccattcggtgcaccgtcactctggcttggttgttgctggtttagcagcagatggcaggcaaattgtttcaaggaccaaatcagaagctgccagttatgaaaaggtttatggagaacccatttctgtgaaggaattggctgatcgtgtggcaagttatgttcatctttgcacgctgtactggtggctcaggccttttgcgttgcggttgctatttttggagggtatgatctaagggattgggccaaagctttaaatgtatagaaccctcaagagtttcttacaaaaacttgctgtgctgcattggggaagggaagacaggctgcaaagactgagagagaaaagttgaaactttcggagcttacctgccgggaaggcattggtgaagttgcaaagataatttatggagtgcatgacgaagctaaggacaaagcttttgagttggagttgagctggatctgtgatgaatcgaaccgtcagcatcagaaggttccaaatgaactgttggagcaggccaaagctgctgctcaggcagctcgtgaggagatggatgctgactaagaaacaggacgatttgcccagacttggtgtttttggtgctgttgaaatctccgatccctttggggtgacccactggacatggccaatttgtcacaatttattattttgacccatgtcatgtgaaactcctttcgttgaagtctggtatctagattgacttgtatcagagctgtggtttacgcagactggattctggagtactggactgtgtgtgtgtttttcggaactgtgcatctgacttttagctgttcgttgactttgtttttcttttttcagataaagagctgtttcttgatttgatgcagaaaaaaaaaaaaaataaaaaaaaaaaaaaaaaaaaaataaaaaaaaaaaaaaaaaagcggccatagc

SEQ ID NO: 98499 - DNA, 1252 bp, Zea mays
  unsure (1)..(1252): unsure at all n locations
  Clone ID: MRT4577_21341C.1
agctcnnnnnnnnnnnnnnnnnnnnnaaagtcacccaacagctaaaagtcagatgcacagttccgngnnncacacacacagtccagtactccagaatccagtctgcgtaaaccacagctctgatacaagtcaatctagataccagacttcaacgaaaggagtttcacatgacatgggtcaaaataataaattgtgacaaattggccatgtccagtgggtcaccccaaagggatcggagatatcaacagcaccaaaacatgaagcactgggcaaatcgtcctgtttcttagtcagcatccatctcctcaagagctgcctgagcagcagctttggcctgctccaacagttcatttggaaccttctgatgctggcggttcgattcatcacagatccagctcaactccaactcaaaagctttgtccttcgcttcgtcatgcactccataaattatctttgcaacttcaacaatgccttctcggcaggtaagctccgaaagtttcaacttttctatctcagtctttgcagcctgccttcccttccccaatgcagcaccgaagtatttataggaaactcctgagggctctatcatgtaaagctgtggcccatccctatcataacctccaagaataacaccgcaaccaaaaggtctgagccaccagtacagcgtgcaaagatgaacataacttgctacacgatctgccaattccttcacaggaatgggttctccatagaccttttcataactggcagcttctgacttcgtccttgaaacaatttgcctgccatctgctgctaaaccagcaacagccaagccagagtgccggtgcactgaatggatcctccggtttgacccttccagcatcatctttgaggttaccagcttctcaacacccaggacaatgccatctttgcacttgatcccaacaacagtcccgctgttgtcgacggccttggtagcatattcgacctggaagacacgaccatctggggagaaggtggtgacagacagatcgtaacctgtgcctatgctgctcattgtcaagttcttctcttcacctctacgcccctagtgaggagatcagtcctggtgctgggcagtcgtctcaggcgaatgatgcaactatggcctcgcgatgggaccgaagaaggcctgggcaccctgccgtcgggcgtcggcggcctcgcagttgccgcacgagaaagagagagagcgcacgcacgggtgatgaacaggagaagaaacgcagggtga

SEQ ID NO: 98500 - DNA, 302 bp, Zea mays
  Clone ID: MRT4577_21342C.1
accacgcgtccgggacgcgtggctgacgcggggcagctggaaccgctcgctcacacacaacaacattgtttctctcccatcccaactgcacaacgatgatgacccgaagaaactcccactcccacccccagaaccgctccctcgctctctccctcttgtcagctccacgatctgcacgtctaccagctcgctcgctccctccctcacctcaactccacgatctgctcgtccaccagctcacagatgcagataaatgagggcatttgacagcggatccgagcgggcgcaaaggaaggaaagca

SEQ ID NO: 98501 - DNA, 572 bp, Zea mays
  Clone ID: MRT4577_21343C.1
cattgctacgctattgacatatctactcgagactgtccgcctcatataccgcccaaaggattctgatgtgtggccactggggttgaatctgtgcctgtggtttatgctcaaagggcggtattagaaccctgaactcatggagatagcgccttactgcaggccaccttcatggcacggcgtggcacagtgtataacaaggcaacagcccgagttgcaccaggccgcttaataatcaataaatgacttccacatttaaaaaaaaaaaaaaaactgcggccgctactccatgacctaattatcatatccatccatgaccatggatatgatctattatatatctacctaaattcagtggactgacaataattatacaaccccatcactgtgaaatacataggtatacccaacttaatggcattagagaaaaaaacacatttcttcagctggctatatatctatgaatgcctgacctatcgccctttccaaatgtacgtccgtctgtatacctaaatgtacgctcactctatcgcctctttatgcaccatatatgtagtggttacgcacatatgacc

SEQ ID NO: 98502 - DNA, 1383 bp, Zea mays
  Clone ID: MRT4577_21344C.1
gaccctcgagttcggccgggagaggagactcatcttcttctccaagctgatttctgcttgttagctactcacgtcaacagaaaatctcgcgttcagctcctctccagtctctccgcctcccgcttacttctctgactctgtcctctttcgtttctttcttgtcggcgacggctggcggctggggtgctgcgccgctctcaccttcaccgccgacgagcattcacaagtagtggtctcttactggtggcggcgtagaggtgacgaaaaagccttgacaatgagcagcataggcacaggttatgatctgtctgtcaccaccttctctcccgatggccgcgtcttccaggtcgagtatgccacgaaggctgtcgacaacagcgggaccgttgttgggatcaagtgcaaagatggcattgttctgggtgtcgagaagctggtaacctcaaagatgatgctggagggatcaaaccgtaggatccattcagtgcacaggcactcgggcttggctgttgctggtttggctgcagatggcaggcaaattgtttcaaggaccaaatcagaagctgccagttatgaaaaggtctatggagaacccatttctgtgaaggaattggcagatcgtgtggcaagttatgttcatctttgcacgctgtactggtggctcagaccttttggttgtggtgttattcttggaggttatgatagggatggaccacagctttacataatagagccctcaggagtttcctataaatacttcggtgctgcattggggaagggaaggcaggctgcaaagactgagatagaaaagttgaaactttcagagcttacctgccgagaaggcattgttgaagttgcaaagataatttatgcagtgcatgatgaagctaaggacaaagcttttgagttggagttgagctggatctgtgaggaatcgaagcgccagcatcagaaggtcccaaatgacctgttggagcatgccaaagctgctgctcagacagctcttgaggagatggatgctgactaagaaacaagatgatatgcccaaacttcatgttttggcgctgttgaaatctctgatccctttggggtgacagactggatatggcaaatttgtcggattttattttgatgtcatgtaaaactcaattcatgtaagtttggatctgaattgactgatgtcatagctgttgttagactttattggcacacgaaccatagctactagacggcgattgttttgcgtgtcggacctctttctgtttttgtaggctatgtgaaagaggacggcagccataaggttgttgcgttctcgattagtctgtgagagatttatggtgtcgttgctgagaaataagctagtgggtccctctcttctcttcc

SEQ ID NO: 98503 - DNA, 1108 bp, Zea mays
  Clone ID: MRT4577_21345C.1
gggggggggtggttttttttttttttttttttttttttttttgctgaatcaaactgctaataccatcataatttcaccaaacataacatatggttaaattgttaagtagttgaattataccatccgacacctcttctgtaaggatacacactgaaaataccgacttcgaagtaaactgacttgagtgttccagaatcaaactgtaaataccctaaagcactgaataagcaccctacgtttgaagttccaccttgtaaaaataacgcacactaccctctcaaattctgatggttcgttacctagtattctctcttgatctctgatttcgaaaacccacggagcagtgttgcagctgttactctctagtcgatcttgaccgaagagtagatgagcctggtgaaccagaagcaggcgtagaagccaatggtgccggtgagcacaaagaaggcgtaggaggcaatgagcatgtagccaaagtataggacgccggagacggtcttcgttatttccagcttggtgaagaagtagaacgtggcgtagaggaagaggtacagcgctgacgagccagacgtcaggtaggatctccaccaccactggtagtcctcaccgcagagctggaagtagcagagcacgatggcgatctccgcacaggtcaggataaggatgacaaagaccaggaacagaaacccaaagatgtagtagaactggtgcagccagatcgatgtcaggatgaagaagagctcgatgaacactgcgccgaagggcaggatgcctccgatcagcaccgagacgaccgggttcatgtaccatggctgctccggtattggccgtgctatcttgtttgtcctcactgggtcctccatggcaggtttcttgaagccgaggtagctgccgataaagaccaatggcacggagatgccgaaccagaggagtaccagagcaaacatggtggtgaatggcacggcgcctgaggatttctcgccccagatgagtgcattcaggaccaagaaaattgcaaacacgatgccagggaacatcagcgcggtcttgatggtgacattcttccacgccggagaccttgaacatcctgtaaagccgcgaggaggcg

SEQ ID NO: 98504 - DNA, 1158 bp, Zea mays
  Clone ID: MRT4577_21346C.1
cattgggtacctcgaggccggccgggctgggatttcccgtgcgtgctctctctctctctctctctctctctcgtgcggcaactgcgaggccgccgacgcccgacggcagggtgcccaggccttcttcggtcccatcgcgaggccatagttgcatcattcgcctgagacgactgcccagcaccaggactgatctcctcactaggggcgtagaggtgaagagaagaacttgacaatgagcagcataggcacaggttacgatctgtctgtcaccaccttctccccagatggtcgcgtcttccaggtcgaatatgctaccaaggccgtcgacaacagcgggactgttgttgggatcaagtgcaaagatggcattgtcctgggtgttgagaagctggtaacctcaaagatgatgctggaagggtcaaaccggaggatccattcagtgcaccggcactctggcttggctgttgctggtttagcagcagatggcaggcaaattgtttcaaggacgaagtcagaagctgccagttatgaaaaggtctatggagaacccattcctgttaaggaattggctgatcgcgtggcaagttatgttcatctttgcacgctgtactggtggctcaggccttttggctgcggcgttattcttggaggttatgatagggatgggccacagctctacatgatagaaccctcaggagtttcttataaatactttggtgctgcattagggaaggggagacaggctgcaaaaactgagatagaaaggttgaactttcagagcttacgtgccgggaaggcattgttgaagttgcaaagataatttatgcagtgcatgacgaagctaaggccaaagcttttgagttggagttgagctggatctgtgatgaatcaaagcgccagcatcagaaggtcccaaatgacctgttggagcatgccaaagctgctgctcagacagctcttgaggagatggatgctgactaggaaacaagatgatatgcccaaacttcatgttttggcgctgttgaaatctcttatccctttggggtgacaggctggatatggcaaatttgtcggattttattttgatgtcatgcaaaactcaattcatgtaagtttggatctgaattgactgatgtcatagctgtggctatttacatt

SEQ ID NO: 98505 - DNA, 1517 bp, Zea mays
  Clone ID: MRT4577_21347C.1
ccaggtcagtcgggactacccgctgagtttaagcatataaataagcggaggagaagaaacttacgaggattcccctagtaacggcgagcgaaccgggagcagcccaacttgagaatcgggcggcctcgccgcccgaattgtagtctggagaggcgtcctcagcgacggaccgggccatcacccgtgcgtgcgcgctctctctctctttctcgtgcggcaactgcgaggctgccgacgcccgacggcagggtgcccaggccttcttcggtcccatcgcgaggccatagttgcatcattcgcctgagacgactgcccaccaccagtgtgaccacccgccgctgttctgcggtgttccttgacaatgagcagcataggcacaggttacgatctgtctgtcaccaccttctccccagatggtcgcgtcttccaggtcgaatatgctaccaaggccgtcgacaacagcgggactgttgttgggatcaagtgcaaagatggcattgtcctgggtgttgagaagctggtaacctcaaagatgatgctggaagggtcaaaccggaggatccattcagtgcaccggcactctggcttggctgttgctggtttagcagcagatggcaggcaaattgtttcaaggacgaagtcagaagctgccagttatgaaaaggtctatggagaacccattcctgttaaggaattggctgatcgtgtggcaaggtatgttcatctttgcacgctgtatgggtggctcaggctttttggctggaggttattcttggagatatgatagggatgggccacagctctacatgaggagtttcctataaatacttcggtgctgcattggggaagggaaggcaggctgcaaaaacttagataaaaaagttgaaacttcagagcttaccttccgagaaggcattgttgaagttgcaaagataatttatgcagtgcatgatgaagctaaggacaaagcttttgagttggagttgagctggatctgtgaggaatcgaagcgccagcatcagaaggtcccaaatgacctgttggagcatgccaaagctgctgctcagacagctcttgaggagatggatgctgactaaaaaacaagatgatatgcccaaacttcatgttttggcgctgttgaaatctctgatccctttggggtgacagactggatatggcaaatttgtcggattttattttgatgtcatgtaaaactcaattgatgtaagtttggatctgaattgattgatgtcatagctgtggctatttacattaaaaaaaaaaaaaaaaaaaaaaaaaaaaaaaaaaaaaaaaaaaaaaaaaaaaaaaaaaaaaaaaaaaaaattaaaaaaaaaaaaccctcactcgtagtcgtagctaaagcataaggggagggagctttgggcagggtgcgcacacgggggttacctagctcgctctgttagcctaccatggttgaccaccaccgggccccaacgggaggtggcggggcctacgggaacctccagcgcgggggc

SEQ ID NO: 98506 - DNA, 360 bp, Zea mays
  Clone ID: MRT4577_21348C.1
aagtatatacaaaacaaacaaaaatactctccaatcttttcgtctccaacaccgtctccgtcttcacaccgggccgtacctgatgatgtccgtgtccctcgcctcgaagaagacaactccaactctgttgccgcgggactgctgaattccctccataaacacttccgaacccagtaagggaacaacacgatctattcagagacagatagagaaaggaccgcaggggtacatccatccatcagacaatcactcctgtactaccctacggaatatgaacaccacaatgtctactagcgccaacagtgctgtctgaatgactgatccggcattatcgcattgtcacacgaacacatcccctct

SEQ ID NO: 98507 - DNA, 364 bp, Zea mays
  unsure (1)..(364): unsure at all n locations
  Clone ID: MRT4577_21349C.1
gtgnaagcattgttgaagttgcaaagataatttatggagtgcatgacgaagccaaggacaaagcttttgagttggagttgagctggatctgtgatgaatcgaagcgccagcatgagaaggttccaaatgacctgttggagcaggccaaagctgctgctcaggcagctcttgaggagatggatgctgactaagaaacaagatgatatgcccaaacttaattgtttggtgctgttgaaatctttgatccctttgcgggtgacagtctggacatggccaatttgtctgattttattttgatgtcatgtaaaactcgggtcatgtaagtttgaatctggatcgattgatatcatagctgtggtgtttt

SEQ ID NO: 98508 - DNA, 707 bp, Zea mays
  unsure (1)..(707): unsure at all n locations
  Clone ID: MRT4577_2134C.1
gggtacctcgaggccggccgggattccattttcacctggngttgcatcgagtgtgctgagtgcagaggcccatggcgatgctagttgatcttcatcccattgtcgagtctgttgcttagtcgtgacgatccgtgcgatcttcaaactcctggagggactatcgaggcaatgcaaagtgcacagatttctaccggagaaggttaaccgtcgatcagccaatctcacgaacaattggatgacttgcgacaactgattggtcgtgggattcaccgaccttgacctcgctggctgaacttcatcggctactatgccgcctgctttgcgtcgtgctgtcaccactccgctaatgaacaagctgaaccatgtcaaaaagacggtcagatcatatatgacctcctatgcagcacatggctaactgttgacatgtgccgtgttgctgcccattctggaaccacatgaggagtgctgagggcccaatggacatgatgaatctgacttgtcagctatgtcgtataatgagacaagacactccgcgcacctgttgatgtactcactgtaccaattgatttgtataccgaatgctatgatgactgtcaggaggacttgactgctgcatgcatctatctggcttcaatttgagccatgctatattactgatacctacaagcgaaatgaatggtgctaccgatcacagatgcaactatgcg

SEQ ID NO: 98509 - DNA, 354 bp, Zea mays
  Clone ID: MRT4577_21350C.1
aaaaggggcggaaggcgaaataaaatctcttttctttcaatcaattcatagatagcagggcatgaaccattttcataccaattgaaagttcccatccaataaaggcaattagctgctagggttaacattctctcctttgaatacttggtggaaaacgccgctttttccttgggaattcatgggcccaaagacggttttttgtccattagttgcaacccagcattctttggcgactccaacacgttttaaatcggacaatttaactccaggtgctcctcctttgattttttggacagtttcattgtttgccaatggatcaggaacgttgaattgataggcgtttcggatcaactt

SEQ ID NO: 98510 - DNA, 1378 bp, Zea mays
  unsure (1)..(1378): unsure at all n locations
  Clone ID: MRT4577_21351C.1
cctcgaggccggccgggccggggaaaacaaaaaatcgtcagtgtgatcctgtgagggttcatcttcttctccaagcagatttctgttggttagctactcacgtcaactcaaaatctcgcgttcacctccttcatagtctctccgcctcccgcttacctctttggctctagtctatccccctctcgtttcttcctgtgagcgacagctggtggagctgcgccgctctcaccttcgccggcgacgggcattcacaagtagtgatctcttgactaacggcgtagtggtgactaaagagccttgacaatgagcagcataggcacaggttatgatctgtctgtcaccaccttctctcctgatggccgcgtcttccaggtcgagtatgccacaaaagctgtcgacaacagcggtactgttgttgggatcaagtgcaaagatggcattgttctgggtgtcgagaagctggtaacctcaaagatgatgctggaggggtcaaatcggaggatccattcagtgcaccggcattcgggcttggttgttgctggtttggcagcagatggcagacaaattgtttcaagggctaaatcagaagctgccagttatgaaaaggtctatggagaacccattcctgtgaaggatttggcagatcgtgtagcaagttatgttcatctttgcacgctgtactggtggctcagaccttttggttgcggtgttattcttggaggttatgatagggatgggccccagctttacatgatagagccctcaggagtttcctataaatactttggtgctgcattggggaagggaaggcaggccgcaaagactgagatagaaaagttgaaactttcggagcttacctgccgagaaggcattgttgaagttgcaaagataatttatggagtgcatgacgaatccaaggacatagcttttgagttggagttgagctggatctgtgatgaatcgaaccgccagcatcagaaggttccgaatgaattgttggagcaggccaaagctgctgctcaggcagctcttgaggagatggatgctgactaagaaacatgacaaatatgcccatgcttcatgtttttgtgctgttgatatctttgatccctttggggtgacagactggacattgccaatttgttggattttatttggatgtcatgtaaaactccattcatggaagtttgaatctggattgactgatgatcagagctgtggtgttttttactggtggattttatttggatgtcatgtaaaactccattcatggaagtttgaatctggattgactgatataagagctgtggtgttttttaaaaaagaaaaaaaaaaaaaaaaaannnaannnnaagttctctgcgttgttaccactgct

SEQ ID NO: 98511 - DNA, 769 bp, Zea mays
  unsure (1)..(769): unsure at all n locations
  Clone ID: MRT4577_21352C.1
gccggccgggtcggggctcacacgcaacgacgcgcctcggcctcgcagaaacaggggccaaaaaggaaaagaaaaaaaaagaggaaaagaacgcagggaatgggcaagcagcagcaggcaccaccggcgcggcggtccccggcgatgtcggcgcctccgccaccgaagcgccggaagaagaagggccggccgtccctcctcgacctccagaagcggaacctccgcctcgagcagcagctccaacagcagcagcagcagcagcagcccaaggggcgacgctccaaccgccggagcgccggctccgcggacgagngacgacgacggccccgcctccggctccggccgccgcgagaagaagctgcgcctcgtcatgggcctccacgacggatcacccaagcaggtagaaaaggcgaggaaagcgacggatgggcatgaagagttgtcagattccgggcccacaacacctttgccaaacaaaaagttattgctcttcatccttgataggctacagaagaaggatancatatggtgtattttcagagncctgttgatcctgaagagctacctgactatcatgacattgtaaagcatccgatggatttttcgacaatacgtaagaagctcgataagggtgcctattccaacttggagcaanttgaggacgatgtgttcctgataacaccaacgcgatgtgctacaattcaccagatacnatatactatcgacaggcacgaggtattttcagagatcgctaaaaggattttgagat

SEQ ID NO: 98512 - DNA, 1241 bp, Zea mays
  Clone ID: MRT4577_21353C.1
ggctcgcactcgcgccggtcgttcgctgcagcacacaacgcaatcgccactgtcgtcgctcgtcagtccaccgactccaccgccaccggcagaaccagaacacatcgagcggcatcggagcgcgaatctgtgcggcggcgtcgcctctgccgggcgggtgggcggcatggggaggtccccgtgctgcgagcaggcgcacaccaacaagggcgcgtggaccaaggaggaggaccagcgcctcatcgcctacatcaaggcccacggcgagggctgctggaggtcgctaccaaaagccgcagggctgctgcggtgcgggaagagctgccggctgcggtggatcaactacctgcgcccggacctcaagcgcggcaacttcagcgaggaggaggacgagctgatcatcaagttccacgagctgttcggcaacaagtggtcgctcatcgccgggaggctgccgggcaggacggacaacgagataaaaaactactggaacacgcacatcaagcggaagctgctcgcccgcggcatggacccgcagacccaccgcccgctggccgcagcgccagcaggagggccgcagcagcagcattgccattaccagatggagccacagaagcgggcggcggcggcggaccattccgaggccgccgttgccaccaactcgccggaaggccagcagccgcagcagcgacgacgacgaggcgccggcgctggcgccaccgccgcggcggcggcagcgccacctcgacatcgacctgaacctgtccatcagcctcgcggcctaccagccgccggagggaaccggcagcgccatcgagccactgacggcgacgacgaagcgggaggagggaacggcggcggcggtgtgcctctgcctcaacagcctcgggtaccgggcaggcgtcgagtgcgcctgtggcagcggcggctcgccgtcgtcccgttcgcagtgggctcgggattttttacaggcggcgccctgctacagaggctagcattgatcagtgagacagtgacatgatcgggagggcttttactgaggggaggggcagagcagatatagttaactagtagtactattagtaaaaaggcaagcgtgcttagtaggctttagcagctcatgcattgcatgcatcatgggttatttacgaggagatgtgctctttgtcttttgtcgattctggctctggcctcggacacagactgatcgatcatgccttggcgaaaaaccccccacaccc

SEQ ID NO: 98513 - DNA, 640 bp, Zea mays
  unsure (1)..(640): unsure at all n locations
  Clone ID: MRT4577_21354C.1
atcctacttgcatgttcttctactgtctatgaccctatacattggaacagttctatttctgtgttttgcaacccatatatttctgcagtgtcgtgtacgatttgggatgtgtgatgttccaacacataattaggataactaaaaaaatggaaactttctatcggttaatgttcatcacatctttgttttttatatagcttccaaatatttgtatcttagtttatgcatgcttttgtctggatgaaaagctaatgaaatatattattgaacatacaacacatagttattgggtatgagttggcatgcattatatagtatcattattgataagttgtttgatatttttaatttggcaagcctggtatcaatcattttcttctgcttgttttgaacatacacaatcatgttcttttttctccagagagcttacataaattccctaggagagggaattctggggttagttctgttcaagcccagcagcaatctgaggagcagaagcctgttccacagaattctaaccagagtggtcaaaattctgctcccgcaactggaatgcangtctctgcctctggaaatggcgatgctacatncaaacattcactcaattttgcaccatctacttcggcaccatcttcat

SEQ ID NO: 98514 - DNA, 450 bp, Zea mays
  Clone ID: MRT4577_21355C.1
gacctgttaccagaggctgaagatgagatgcatggaggaggagaaggtcatcccactggagtggggggatgctattcaccacctgtacgaggagtggctcatcaaagggagccttttccccgtggcagcccccgttctggtgatcgaggccgaccacaacatgcagaaaatgttagaactctttgaacaaaaccggcaccgaatcctaactctggagaatcggaagcttggtccataggataggaaagatcatgcccgagaaatgcctgctgctgccaagctagcttttaggagcagtttggaaagctccactctcaggagggctttgtgtctgcccacagttgtcttccttctggccttctctcctttcccagtgtcttcatcctgggatcctgggcctcgtgggtaaatgggaccagtgggtttgccatgccctctggtggcacagcc

SEQ ID NO: 98515 - DNA, 456 bp, Zea mays
  Clone ID: MRT4577_21356C.1
cccactcctacggtattaccaactatttgaagcctgctgttacccgcttcctactgcactacgaacttgacttccttgtcagcgctgttgccaactccaaacaatccatttgccggtatcgatggtggatccaaggtctcaagtaagattggcgtcattgagaacttgctggcgcaagtccttatcctcatccttagcggcagattgaactacgacattttacaatgctcaaggatattctgttggaaaatatcttgtgcaagaggataaacctgatctcataactaatgttattgagaaggcggaagcataaggggtttctatttatcttgccacatgaatcgtagtagcggacaattctgcagataatactgacagtaacattgttcctcccactgatatccctgatgactgtatgggtcttgatgccagccctgatgccaccaaaacattcaa

SEQ ID NO: 98516 - DNA, 764 bp, Zea mays
  Clone ID: MRT4577_21357C.1
tcgcccttaagcagtggtaacaacgcagagtacgcggggggccaatcgaaagcccgaaaaggaggaagaaccgaactagcgaagaagaggacgcggcaccatggcgacggcacaggcagcgtcggcgtccccaacccaccaccgcgcgtctccagggacgtcgccgccgcagccgccgtaccccagcgccgccaggatcgccgactccgcctgcttcccccagtacaccgcctcgctcaagtgtttggaggccaaccaggacaagaccaagtgccagcagcagttcgacgattacaaggaatgcaagaagaaagagagggaggctcggctggaacggaataaaaccagatcactctttgggtgaacaatggcgtcccacctgagcaatatgctggcggtgcaataagtctcctgctgatgtgagcgaaatcacggcttttttctttggtttcatgatgatcctctgcaacttgtgcaaggtagggaatagaaataccgatctcgagattgagggagatgtaagggcgtctgggaacagctcattaacacaatggctacggtgaatgaatcgaatgagcgaggatgtattttgagaacaaccaggcgtcatgaaacgacagtttgttcaataaatttgtattccacccctgtaacgattgtacttcaaaatatttccatgtgttcttaaaaaaaaaaaaaaaaaaaaaaaaaaaaagtactctgcgttgttaccactgcttaagggcagatccagcacactggcg

SEQ ID NO: 98517 - DNA, 296 bp, Zea mays
  Clone ID: MRT4577_21358C.1
gggtggggtttttttttttttttttttttttttttttttttttttttttttttttttttttaaaaaaaatcatttgtaaattcaaaaaacgggggggggggggctcccccgctccactaaaaaaagggaggtttcctccctggggagggcccaaagttgttaatttgggggggaaaaaccactatggaaacggcctattaatgtaactttcaagggaggaaacattcttcttggctccaaaaaaaaatcccccccactgggtttaaatgtttgccgttagggcaatattggggggg

SEQ ID NO: 98518 - DNA, 602 bp, Zea mays
  unsure (1)..(602): unsure at all n locations
  Clone ID: MRT4577_21359C.1
cggacgcgtgggcgccgcatgcgcagctccatccgaggaaagcggagagggagagggacagagccgcgggagcgcagccccatgtccggcgccaccaccaagaaccagccaagaatggcgttctcggcggtggcgccgcgccaacgtcggcaccctctacgctcggcctcgtgcccgtggtggaagcggcccagctgtggaggtaccgggagtgcctgcggaaccacgcggcgcggcttggcgcgcacgtgctcgacggctgctgcgagttcatgccgtccgggggcgacggggccgccgcgctggcctgcgccgcctgcggctgccaccgcagcttccacagacgcgaggcggtccccggcggcggcgtggcggtatcgccctcggcggcggtaactcccacccccaccgccggcgccaactcctcccgcgccattccgctgctgctggccccgccgcacatgcacacgcgcccgccgcaccacgtgccggcgtccccggcgtccgcgcccgccgcgctggccgagtcgtccagcgaggagctgcgcgggcccgcgcccgcgcccgggccgncgacgcacgcgcaggtggccgtagtagga

SEQ ID NO: 98519 - DNA, 226 bp, Zea mays
  Clone ID: MRT4577_2135C.1
tctgatcctctccccctttccacagcgtcagaaacagttgagggggatgaactttataacaacgattgattcaacttcaccatctttttcacccaacacggagatctccctaccgttttcacctaaagtcccatctgccctaaaacctggacctccattggttccatgtacatgcacttttattacaccaccaatgctatgcatgatcacctcttaccacacttac

SEQ ID NO: 98520 - DNA, 478 bp, Zea mays
  Clone ID: MRT4577_21360C.1
gtgtgtttttttttttttttttttttttttttttttttttttttttttttttttttttttttttttttttttttttttttttttttttttttttttttttttttttttttttggccgggggcctggggtttttttttcccgggaagagttggggcgccgaccacaaaaaaaaaggggttatttgcccgggacaaaactttaagggaagggggggcccctttttaattgggggccaaggcaaacttttacagaaggggggctttttttttggcgaagaaatggttgtcgcggccccacaggagggaaaaaatactggcccacagggtggaccacaaaaaaaaaaacgtgtgggtgattttttgcccctccacctgaccctttagaaaagggtgctggggggccaacccccaaaggggggaaaaaaaaatttcttacaagggggcggccaaaatttgtgcacgttagagaattcgagtta

SEQ ID NO: 98521 - DNA, 455 bp, Zea mays
  Clone ID: MRT4577_21361C.1
gtcccccgcgaggggggggtggggattaaccaaccgggcataggggcctggccgtttttgggtcgatcctgggggtgtgggtgtttttttttggctcacccgttccacaccctttcgtgggcggggtggtccatacttgctaccttgcccatgcaagggtacgggcccccccgggggggttttttttggttgtcctttgcggtggacagggggcctttgttctttccgcgtgggtgggtgggttttattttggcgacgatcggtgatccggccgggggcgccgggggaatgggtgggcgttcgatcagggggccggtcgtgcgcgggggctaggttttagttcaccctggggccgttggggggggggctgcttgtgttggggatgctggcgccgcacttgggggggatgctgggggggtttccggggttggggcgcgtgaccccctggggggggt

SEQ ID NO: 98522 - DNA, 438 bp, Zea mays
  Clone ID: MRT4577_21362C.1
gcaaagatcatcacttcacttattttccttcttatttatcctgggattgaatttctgcagctaaaaaaaatttgtaagtcatacaataaataattgttctgctggattgtttgttcagacaaccaagataactgctgctatcatgagtttttttatgaattgaagttgccatgcatatagcaactaatctggcattaagcaggtatatgacactgcattagcccgctacagacatccaaactcttagcttccaaatgttattatttctatgtatgctatattcaatgtgagctagtttatctagtagttcacacccggcgtctttaccatttagcttgtgtggttaattagacctagtgaccttgtatggatgaaaacggtcggaaacggtcgataaacgctaaaaccgtttcaattttcattttttattgaaaatga

SEQ ID NO: 98523 - DNA, 243 bp, Zea mays
  Clone ID: MRT4577_21363C.1
gcgccaacaaacatacatttttttttttatgttggcaaaacgaagggtccaacttccacatttggttcccttttttttttacagctgtttttgcttaggtgacatggaaactaaaaacggcctgttttgattaacaaatccccaatgccctttaaagcatattttttaaacaacacaaataccttttaatttctatggtttggctgccagggaaccttaacactgatttttttttttttttcc

SEQ ID NO: 98524 - DNA, 760 bp, Zea mays
  Clone ID: MRT4577_21364C.1
attacaaattgcagatgcgtccttcgcgcttgtacgctactccaacaacttgttagcatgacatggacaatgcacggcaaggactaggactaggagcacaaggtacacacagttgctgagacgtacgggtacatctttcaaaattccaagctcaagggggccggacgaaatgaactggagatttcaaaggacggtcctatcaacgcaccaaagttcgaaaggaaggaggttttgcctggtagatttgtgacatttttcttgcggcaagccggaaagtagtaaaacacacgaacaagaaatgcatcagattccctctctctctctctttttcactcgttcgtgccatgcctgccgcaggacaggcacagcagcagtgacagtaccgcagccaaccaaacaaaggtcactgcgactctgcgagaaaggcggttggtggggcagggaaagaaaaaaagagcaaattccctgacccatgccagctcggtggtgtcctcgcctcctcggcctgccacccggaccctgtatgtaattgtatccaacactgcagttccagttggtccctcaccacctctgcaaaagttgccatagtaattctttggttggcatatatttcctgtccagaaggattcttacatgtgcttaaggcattgtgatcttgcatgtacatcttttacagatcaaacaggcaaggacttgtggtaggtagcccaggagtacaggtatgatagctgtccgagagagtatgcacagttgcgacttg

SEQ ID NO: 98525 - DNA, 217 bp, Zea mays
  Clone ID: MRT4577_21365C.1
gggaaaacaaccatttccctttggtggttccccgaaagagatttttttgacgcaacggaacccttccaaatccttcttttggatcgccattaccctagttttacatgggttttacaacaggccggggccgcaacaaaattttttgacgggttttggggcccagtttcaataaggggggggccaacagataaattttattggcattaaacccccgggg

SEQ ID NO: 98526 - DNA, 494 bp, Zea mays
  Clone ID: MRT4577_21366C.1
actttcgaccggccactcgtgcacgtacgctagcagcacagcagcagccagagccatcccctctcctcgctacgcttcgcttcctcggagccgagtcctcctcctcctcctccaccctcggccgtccccttccgggggacgagctcgaccgatatggctgatgcgagagcggctgtcgctgtgaaagaagaatgcatgctgaaggttggtgaggtggaatctaagaggctgcaccgcttcataactttctagatggaccatgagttcaaggagaaaattgtggacccgattgggatcgcggttccagcttgggtggcttggccaacagcctccctgaaaatgactggccatacccgatctaagaattcgaatttggtactgccgaagatgttcagaagaacaagatcttctataatcgtaagggccccatcctccggccacgcggaggagcagaagctttaagttaccttgaagccgaaactccagagtgggct

SEQ ID NO: 98527 - DNA, 341 bp, Zea mays
  unsure (1)..(341): unsure at all n locations
  Clone ID: MRT4577_21367C.1
agggcgtcccctcctgctcgcccatggctcccatcgctgtaggcaaaccgatccatatagtccagctccaccgttgactcgacgacatcngaatctactaccagatccgcaaattctcgtgaggtacatgacttgcctgtggtatatcgtgatggatatcgagagctgttactccccctcggagctggggggggtcctatgaagcagcagctgtttatggcacggagcagagcgacctgcgcggataactcagcagtgcgagcacattaataagtggaggggtcttcggttattgctaaatcacgctatgctattctggttcaaggaccatgacgggacac

SEQ ID NO: 98528 - DNA, 429 bp, Zea mays
  unsure (1)..(429): unsure at all n locations
  Clone ID: MRT4577_21368C.1
tagacanggcgtgcacgccaccctaacctcagcattcaactcgagtcgatctccttcttctagcagcacgcaccctggggggggtcaaacatctttgtttgacagacccccctactggctcaccaacacatctcctaccaaacccatctacatacatccccacctcccctccaacctttacttcacctccgaatgcgaatcacacaccactccaccttttcacaacatgtcgagaataaaaatattctaccctaccataaaagtcaaatccgaattctagactcatccatacattcactacaaaaccttcgagctgaagcacatctatacctgcctctatatcattgactttcatgaatagatgacaagcctgccccacgacttatacaatcacatactcgacactatctcacatcatttgatgaaacc

SEQ ID NO: 98529 - DNA, 339 bp, Zea mays
  Clone ID: MRT4577_21369C.1
cgaacagttggacacactgtgctgaaatggtgtgatggatacagtgacacattacttgcagatacatactgtgctgaaaaaaaaaaaaaaaaaaaaaaaaaaaaaaaaaaaaaaaaaaaaaaaaaaaaaaaaaaaaaaaaaaaaaaaaaaaaaaaaaaaaaaaaaaaaaaaaaaaaaaaaaaaaaaaaaaaaaaaaaataaaaaaaaaaaaaaaaaaaaacataaaaagaaaaaacaagaaccaaaaaaacaaaaaaaattattaaaaacaaagctgacgatacaacgactgagggctgtgagaatcgaccaggattttaaagaacgacctttagttac

SEQ ID NO: 98530 - DNA, 272 bp, Zea mays
  Clone ID: MRT4577_2136C.1
tctaaatgaattgtggatacatctgtatcctcaacatactgaaacgactgtctaaatgaattgtggatacatctgtatcctcaacatactgaaacgactgtcaatggtgggccaataatgaatttttttgcatatgtattaagacgcttggtctgatttcgaaattgtccagagttttttatgttgttttcattgcaaaatgatggatctccttccgtaactttccaattacgagtacgagaattgaaagacatgaaaattctcaattctct

SEQ ID NO: 98531 - DNA, 578 bp, Zea mays
  Clone ID: MRT4577_21370C.1
ggacccaatcacccaacatacatttatatattttaaagggtcttgaaccccaccgagcatacaatggtttgggcgaacacagaagttgggttatgtttgttacccagggccaactttagggatgtcatagggctcgctgaggttcgccaaatactggtggaagccctggatacggcccctgggggacttgttagcaactttggccagtttttgcatggcaatcttcggcttcggatctataaagcgccgctccgccggggggagggggccgaagtcgggatgaaaattccttttttaatctcccaccttgccagtttaaataagctcattggggggatcagctggaaagccaaagtttccccctttggggagctcatggggctcaatctgaaacaacttttcaagctgaggctttttttttttttttttgactccaccttccttcaaatccagggccttacccttaagttttagcctcccccaaacgacgtttttgtattctgacatctcacgggggaacgggggcgctgggtactcgttccctgaccgcctgcgcctgggggttagggtttgtttgc

SEQ ID NO: 98532 - DNA, 270 bp, Zea mays
  Clone ID: MRT4577_21371C.1
ccgaagaaccggaaatggaaaacaaaatatccggtggccaaatggcaaacttttttgggacagaggcacatacccccacgctaacctgaaacacccccccattttgctacatgatgggggcccaaagagggcaccctaaacagaactttttaagttacaacgggctaagccctacggggccttacaagaaaattcagttttagccaagttaggggtccccagttcctaataaaaacccgaagaaaccaagctcaggcgccctttcctttt

SEQ ID NO: 98533 - DNA, 615 bp, Zea mays
  unsure (1)..(615): unsure at all n locations
  Clone ID: MRT4577_21372C.1
caagatatgctgccgattcgagccccgtgtgcttaaagtgatctatcagctgaatggtgcattgncagttcaacggggtccctcttggtgatctctgatagagactcgatatcatgcggagaggtgccggcatctcatgccgcgggaggaggccagagggcgcgcccacctacctgtgattggacgtcgaaggcgagccagacggtggagaagttgccccatccgagcttccgctgagcgacgtagcggccggcggcgaactggtccccggggcgtacggcgtggtagccacccttgcggtacccgtcgacgccctcgtcgtcttcctcctccacctccacctcgtcgcccgataaggacggcgacaacgacgacacccgcgacatgatcctcctcggtttccaacagggatttcaaggcgaggcccgcgtaggtgtccggcgatcccaccgggggcgttgcgagctcttcttccgggttaattggggtgggatgggaatcgcgcaggcaggtggtggtgggtttggttggttaaaactttttttttggggggcgggctcaggtggcgggggagggagggacggagagcagcatcccttcccctcgtgccgaatt

SEQ ID NO: 98534 - DNA, 622 bp, Zea mays
  Clone ID: MRT4577_21373C.1
cgggtcacacccccgcaggcacgcaggcatacccgtcgtgctgcctgcttcctgctagttctagcgctggtgctgatgctgctgtgccatggtgcgacctcaactgcgtgcccccggcccaggctgccgcccggcccgctaccatggcccgccctggagcaaactggcgcagatcaagcccgaacaaggccgaggctctcaggagtggatgcgggcgcatcggtccatcatctgcgtctggtacgacacccggcctcaccgccatcaagaccacctcggcagtggccaaggaggtacagacggaaaacgaccagcacgtcccgaaccgaccgcggaaccacatcacccaacggaaggaagacaatacgggcaggacctgatctggagcgacagcggaccagactacatgaaggtccgacagctctggaacctaggaactgtagacgcccagaagcgatgaggcgctgcgagccaaaggggggggcgagagagcagacatgagcaggaacgtgatccggaccggcactgccccgggtaatgaagagaagccaatgaagaggaggaagcacctttctatggtgagcttaaacaacataacaaggctggcatttggataagcggt

SEQ ID NO: 98535 - DNA, 1406 bp, Zea mays
  Clone ID: MRT4577_21374C.1
gggcaatcaaggagacggtgaaggagattgggctgcttggctcaaatggaattccatcttgtgtaccttcacctgcatatttccttgacccgccagttctgctaaatgaaagtaaaagaaatgacgataaaccaaatgattggacttcctcattgcaggaatgccaagctgtgtctgccaaaatgtcagggcaagagggatctcaagtttgccaagatttttctggcaatgcaggtgatgaggagttgccaaaatctaagaagcctgtcagggatagtacttcagccaaggaagcaccttcaacagacatatccacaagattgctaactgttaatgggggattggttccagagtcatcactgatgcctgtaataggcaggaattttcatatcctgaagcagctaaagattaacttgcttgacatagaagcaggctttgcctgaggaagcattcagagcctcaaagtctcagcaaataagaagacgttcatggcgtgcttttgtgaaggatgcagaattaatatcatatgtggtattggcaatcaatttcttgcagagcatgataaaagccgagtttctgaagaaagattggtggtactggtcctccttcactgcagctatcaagacaacaactgtatcatcgcttgcgctcaggatttacaccctcgacgactgcatcatgtacacaaaggatccagctccaaacctgcagccagctgacaatgcaaggtctggaaacaaggggaagaggaagaaagacatagattcatgagcatcgtaaccacaatgctcctggcttcccctgtagattctatctatctgcatttagaggcttctcagttctctggcagcataacaacgcggtcaggtagattggagatatagatggtagtggtcaggtagattggagatatagatggtagtgatacaggtcgcaacctatgtgtgacctctttcttactgtacattccagtgtcacagcaagggtgcagccatgatttgcccgtttcagtcttgtcctacttactggcctgccattgcgcgatatctgctgttgctaaggctcaatctctgtaaattctactcgagggatggcaccgggcaagtgctggtgtttaatctgttgcccgatgtgttgatctgttctaggggattagaggaggaatgctaggtcggtaggatttaccccatttctaccctgcttcattttattttagtggtggcagtgggtagtcgtagttttttcttttcttttcttttcagagctgggattgtttgatggatgtcccctgcggcatctgactgctttagggaatttgatacatgacgagtgtaatattttttttgacatagaagttgtaactaaaccgaaactaataatgatgaatgaaaatgaatcccctgttc

SEQ ID NO: 98536 - DNA, 216 bp, Zea mays
  Clone ID: MRT4577_21375C.1
ccgcattcgtgtacctgtatctttacttatgatgatgatgatgtatttccttcgtgtctgatagtaagtaattcacggccaggtcattgtagactctggtaaccgtttcggaaaatctagtgctatatctggtggatgattgtcaaaaactatgcaaaaaggcaatgctaacttttgtgaaaaacatacatgtagttttatcaaggaaataaaaat

SEQ ID NO: 98537 - DNA, 1581 bp, Zea mays
  Clone ID: MRT4577_21376C.1
tcttagtgtttattaataagtgataattatatttaataaatatataatattatttatatgatatataataaacgtagcaaggcacgactggctagtaacttaactggctgtaacttataggtacccaaaccttctctcctcggtatccaaagttccacactccacagtccacacccgcgcaaaaaacacagcaaggctccatgaacaagttggcatcctgcttcctccagcacggagcaccacacacccaaatcttcaagtcctaccatgttcagagatccccttcgctgcagttgcttgagaaccgatccgtttccatgacccggcaccgcgccgcggaccgtgctgccagaggcaccatcgtcgacgtcgccgtcgacagtggcaccagcttcgacttcgagagctacctgtcggccaaggccagggccgtgcacgacgcgcttgaccttaccctgcagggtctgcggtgccccgaggtcctgagcgagtccatgcgctactccgttctcgcgggcggcaagcgcctccgccccgtgctggccatcgccgcgtgcgagctcgtgggcgggaccgcggccgcggccgtcccggtggcgtgcgccgtcgagatgatccacaccgcgtcgctcatccacgacgacatgccgtgcatggacgacgacgcgctccgccgcggccgcccctccaaccacgtcgcgttcggcgagcccacggcgctgctcgccggcgacgcgctgctggcgctcgctttcgagcacgtcgcccgcggcagcgcgggcgccggcgtccccgcggaccgcgctctccgcgccgtcgtggagctcgggagcgtagctggcgtcggcggcatcgccgcggggcaggtcgccgacatggcgagcgagggagccccctccggctccgtgagcctgggcgcgctggagtacatccatgtgcacaagactgcgcggctcgtggaggccgcggccgtgtcgggcgccgtcgtcgggggcgggggcgacggcgaggtcgagcgcgtccgtcggtacgcgcacttcttagggctcctgggccaggtggtggacgacgttctggacgtgacgggcacgtcggagcagctcgggaagacggcgggcaaggacgttgccgccggcaaggccacgtacccacggctgatgggcttaaagggagcgcgcgcatacatgggcgagctcctggcgaaggccgaggcggagctcgacgggttggacgccgcgcgcacggcgccgctgcggcacctcgcgcggttcatggcgcacagacagcattgagatggggtggaagtggaactatggaagtggatctggccggctcatccggaacacttgataaaagtgatgcgttgactattagtttctcagacctcaacatcgagtgattactttgccccggcccaaaaggatttatgggcttccgagttgagtgacactgcagtttgccagtggcatgtggcaacctacctaatgggccgttcacgccttcacggacaagtagcctttataagtgcggttcttacttcagcttcccttactcctatcgttaaataaatctctattatat

SEQ ID NO: 98538 - DNA, 306 bp, Zea mays
  Clone ID: MRT4577_21377C.1
cttctacatgctcaaagtgggacgagtgtgcccccctaagtcgctgacgcttatgtgtaaataagcgatggaggttaagaagcactgtgagcgcacatggacgtgcaacgatagctggatgaacatgtggtggtgcaaaatcgcgtgctgatcatattggaagcacttgaaaagttcatcgacagtatgctagagagcgcatgcaagaaggttactgaacaatatgcttggaatagcatgagattcttcaaccatgatctcccggagatatccactggaggggtcatgtgtggctacactgtcacg

SEQ ID NO: 98539 - DNA, 305 bp, Zea mays
  Clone ID: MRT4577_21378C.1
acgccgtctttctgtgcgtgatctcaaggagaaattcgcgaaaggactatctggcgcttgcaagcttgctgaagacggcacgctagaaaaaacgcgcttgattatacaggcaggtgcttcttaaaaagcttataaatggtttaaacacactaaaaggacgtgtggctggtcgaaacagatacaatgctgtggaagctatattactgagggaggcactaactgtacagttgacacaacaggaaggggagctaatgtatgagaaggctgaagtgaaaaaatgggttatctttcttaagcaagctact

SEQ ID NO: 98540 - DNA, 219 bp, Zea mays
  unsure (1)..(219): unsure at all n locations
  Clone ID: MRT4577_21379C.1
taatcggcacgaggagacatcggtgcaancccccccccccccttngttttntnnttcccttacctctcgtcctccattcanggttttccctgcccctgtctgcctcttnttctttctccttctctaccgccgcctcttctcgcccaccgcctttttttttccgcgggcctcgtgtcggggggggcggcccctttnttcttgctggtntgctccgttggc

SEQ ID NO: 98541 - DNA, 437 bp, Zea mays
  Clone ID: MRT4577_2137C.1
gagataaatttcaagaaaccgaaaacattttttctatgaaacccaagccgttataagggcaccgttaaaacacacatctcaaacggaatacaataaaaggccccttcaaacacgggttggtgacaaaacttggggggtttcataaaaaagaaccgggtcgtggggctctcctgacgaatgctgccggaaggcaaaaaaacactgggctccccaccgctaggggattaaaaaacggttggccctgaaggaagggcgcaccttatttcgacacatcaaaaccggttgaatggaatcacctgttgcaaacaggcaaaagggtttgccccacctagcttaggaaaatctcggacaatccgttccaaaaaatagtagcccacgttccttgcgccctaaccccaccgagagggccaaatgaaatctcttgttcctgtcaaaag

SEQ ID NO: 98542 - DNA, 202 bp, Zea mays
  Clone ID: MRT4577_21380C.1
cctacgcggtctgtgaaagacccatatcatggaccctatacgttccaaccagcaatggcaaattgggtcggtaccttttttaccttggtggctccaacaatcattagccctatttcaacaggtacctttggtgcatttattggcacaaaacatcaggggacaacaacttcaacaacttgtgctagcaaaccttgctgcctac

SEQ ID NO: 98543 - DNA, 478 bp, Zea mays
  Clone ID: MRT4577_21381C.1
ttttttttttttttttttcgtttgtcccatccttatctagtgggccaatgacattactattctacgcgttttctgaggagcaacatgagagatagacttgacaccgacccacgaaaacgaaactttttagtctagaaagattcccaacccgatattgagatctgatgactgaacactcgtttgaatagctcgaggtgtcgacggagctaacttgtgagacggagctcacttctgagatagagctgtcttctttctcttggtttccatccttccgttacgagatatcgtttcgtacaatactactctatgcaatatgcaatttcgagaagagagcagagctagcccaccgcatccatccagcctgaaaggattcactcaactggactcgcggctctaggtgatcccaatggatccgtacagggtgatttgaactgctcctctcgagaagatcgacggatcgggcgagcaagcagggaga

SEQ ID NO: 98544 - DNA, 419 bp, Zea mays
  Clone ID: MRT4577_21382C.1
ggacctttgggctgctttatgtgcttgtataaaaggactaaggacgaaaccgagtccggtaacggttcgttagacactagaagtatctggtaacgctcttaggtagcaaaagatgttgggcccgaggccgcccgggacaaggactccgtcgaagacctctttccgttccggcatccgtttccggacttaagttgacctctttcgagcagtccttgcccgattctcgcgggatgtacgaccatttgtataacggctaaggtttcggagcatgccggctccgtcttgtagggtagcgagagggctctcaacccttcggagaaggtcgtagaagggtcggcagagggtggaaagaaggagactcctatgttaacgcatcctccctccgcctggaagttctcctcggaacgagtctccggact

SEQ ID NO: 98545 - DNA, 427 bp, Zea mays
  Clone ID: MRT4577_21383C.1
cacacacatcaggtaccatctcggtaatgatgtctggacgggccacttatgacagacctgcaccgccgtcgtcaagaagggcgaccacagaggccatacagtggccgtcatgatcatctctaaagctaacatgacatccggcatttccagtgcagatgttcgtatggacgtcaagattttgaaatccctatcagggcaacataatctcgtcatattccatgatgcatgtgattgacccctcaatgtctacaatgtcatagtactaagtgcaggtgaagacttgctagacagaattttaccaaaatgtgggagatatccatgggaatatgccatagctatcattgtacagattttgagcgtacaggccttcagtcatcatcatggagtaatgcatcgtgatttgaagccagagaattttctcgtcaca

SEQ ID NO: 98546 - DNA, 2420 bp, Zea mays
  unsure (1)..(2420): unsure at all n locations
  Clone ID: MRT4577_21384C.1
tttcgttgccgctcgcggcggnataaagcggcgtggggggagaggcggcgatgctggtgccgccgcccgacgtgcacctcgtctggctctgccactgcttccaccatgagagctactccgcatactgcacgtcgaggtttggacgcctcatcaaccgtccatcaatttttgatatggagaatgaagagtatgctgaggatctttgtcgagatgtctgggctactcatttcccatccgagccatttgaccttgactcgaatgagattgatggaaacagtgttgataatataacatgtgacagtgtcaatggtgaaattgtcaaaatggtgagacagtacgctggcctagcagaccgttttgcctcactctttgtgcaggaaggtgtctaccatgttgctgctaggcggcgatatgtgcgtttcctggaccttatgaagaaggttgcgtgtgcaacccaagagtgcacacggcttgtgcctagcctagacatattactgatgtggcttgctcaccagagttttcctgtgtgttatgccacggatatggtagcgatgggcatcagtgacaatgttgcaaaagtgggtgtttgttatggcgaagtggtgagcaatgaggcggtaaggaggacaaaggaactgtgggaggatgcatatgatgaaccatatgatatggctggatcagaggttgatgtgggagcagttagcacagcaagggaggcattttactgggtgccagcagcatcagaggaggatgccaaccggctatacaagagtttgcagccaggattccttattgaggtatatgtgttcttgaagggagaatttgataaggagcccaccagcaaggagttcctacgattgcgaacacagaggtgtcacagatcactaaagctcaacatatcgatgtccaatttatcctgcaaaagctggcagaaagtatggcacttgtattgtgaatttgcaactcggggcctcttcgttgagttcaggcgcacccttagtgggtgcttcaggaaaagcaagttcctcaagaacatctcattctcatggagcgatgtgttgcatgagaaagcacttgctctcacagaacaacttgatgtcaggatgagagcgatggcatcaattacccctccagttcaagcaccatacttgttgaagtgtgtgcctgatcgagtcactgatgatggtggggccatgatttctgatgtcatattgcgcatgagaaattaccgtccccaagaaggacgttggctgacacgcactgtacttgatcacagtgggagagaatgttttgtcatccggatgagagtaggcagagggatttggcggagaggtgctgaaactcccatggcagtgaaatgggaggataggagcattgaggttcgagaaggatcatggtcatacattgctagtacaagctctgttggttatgctcctgaaaagatagtgggcacaggaacagtgatgaaagatcaactggagaataaggtagtttggagcttatcaacaggagatacgctgacaataagtttgggagatgaactcagctttcagttaaaaaatgacagctcagaagaagaggcaaggctgcttgtcgggaggaggttgagctacagagtaaacacagataatgcgtcgagcaacctagtcgaggaggagcaatacctgacacttgttcgtaagtcaccgtatcatcatggtgacagagcaaccgtgcttctaaactggaaattacttgctgtggagttcttacctgaagaggatgcagtttttgttcttctcctatgcatggtgattgcacggaccatgacagagatcaggagagaagatgtggctgggcttttagtgcggcggaggataagtgaagcaagggccgggcagagagactggggttcggtgatgcttcctggctcgctttcaccggatcctcatctgcagccttggtaccggaacgcaacgcaggttttgagctctgcggagacaggaccagtgctcacaaagtactcacctgctgacgggaaggacatgttgtacaggcaagctcttataccctgatgaagccctaatagagattattaccataccatcaggacttgcctgatagataaaaaaaacgaacccaatcttcctgggtatcgcagggaaattatttcatttcctcaatgctatgacatacgacatttgtacatgacaattttttgtggttcgagctgttgtttcactaatgatgattgtcctttgatacgaatccagtgattgctgtcatatattgtttgtactgagaattttacacatttcatttcaagtttgtctggtttctgtagtttgacaatgaactaaaagaagagcttatgtccatttgaacaaaaaaaaaaaaaaaaaagggggccgctcgcgatctagaactagtccgcacgcccc

SEQ ID NO: 98547 - DNA, 885 bp, Zea mays
  Clone ID: MRT4577_21385C.1
atggctagagtgaggtctactgccagagtagcacgcgaaggagaagaggctggagcttctgagacgggccctatctcaggaatgatgaaacattctgggttagttgtacaagaagaaagaaaattaggatattttggagagaatgatgacgaactagttcggtttgctgagggaagaaaagtgattctagatccgagagatgtcgaagtcgtagttttcaaaagcttcttcaaagcaggtcttcggttccctctatacgagatgattgctgaggttttaaagaagttcgagatctatcttcatcaacttaccccaaacgctatagctagactcaacgtatacatatgggctctccaaagccaagggaagagtgccaacgctgaaggtttttgctgggtgcatgaactccactaccagactaaggctagagctgacgggctgcataagaacttcggatgttacaactttgcataccgaaaggatactaaggcacatgtgattggctatcgcaccaaatggccgactggctggacagaatggttttacgtaaagaccgacgagaagaagagagagaagcttatgactatgacaagattcggcaaaccctgtgccgaatggttggaattaatagaaacattgtgcaatgagattcttgggaattacacgaagaaggaagatcaattgatgacagctgccttcggcacccggaaaaaacgaagattgaatcgagtgatggatgctcttaactttgaatatccaaattatgaaaggcttgacgaaggagccggaggagcaaagaaaaagagggttgcacgtattttgaaaaggcaagccatgtggtccatcgaaaaagatcagagggctcgtaaaaacagaaaattttag

SEQ ID NO: 98548 - DNA, 298 bp, Zea mays
  Clone ID: MRT4577_21386C.1
tgcttatcttggtccatggttttgtttttttttgtaacaaccaaagacacaaacttcgggtaaaaaaacgaagtccggctacagcaaaaacgaaagggggaactctgccaccaacccagctgtgaacggcattcatttttttccagccgcacctatttacggtgggcggcccccgctctacatttaatgtcaactcgcagggccaaaacaagctctgtgcccagggcttccagctatccttggttcaactcccggaaaaacacgccctcggactgttggctcctgggcaatcccatct

SEQ ID NO: 98549 - DNA, 699 bp, Zea mays
  Clone ID: MRT4577_21387C.1
ggccggaagccttatattttcaattatgtcaaatttcttataatttcaattatgtcaaatttctttgctttagttaccctcttatagttctataagaacatcttaatgactttttttctgttttctaggttactgtgcctttgtagatgcagaacacgctttggatccagctcttgcagagtcaattggtgttgacactaacaatttgctcgtctctcagccagactgcgctgagcaagcactcagtcttgtggacacactgattcgaagtggatctgttgatgttgttgtagtagacagtgtagctgcgcttgttccaaagactgagcttgatggtgagatgggtgatgcacatgttgctcttcaggctaggttgatgagccaagctcttcgcaagcttagccactcactttcactttcgcagacagttttgttatttattaatcaggtattaagcatacataattttctcggtgttagtcactaagttgaagtaatttatttatggtttattccattatgtatcttattgaggtgaagcttcacatacgtcagaagattgttgccatattgaacttttattaaatgctataaatatagttggattttttactttcaagttcttaagaatttcatgctgcttaagaaaaaaggaatgccactgtaaattaggaaacattagcatataaattccatctt

SEQ ID NO: 98550 - DNA, 130 bp, Zea mays
  Clone ID: MRT4577_21388C.1
cccggtcgactccacgcgtccgcccagcgaccgtctccaccagcgattccgctctatcctatccatggcctccgcttcgactcgtggctgtaggatgcatcaaaccctaccgctccagacctcccggttg

SEQ ID NO: 98551 - DNA, 674 bp, Zea mays
  Clone ID: MRT4577_21389C.1
acgcgggaaaaaagtattgttccaaaaaaaaaaaaaaaaaaaaaaaaaaaaaaaaaaaaaaaaaaaaaaaaaaaaaaaaaaaaaaaaaaaaaaaattaaattaaaaaaaaaaaaaaaaaaaaaatttttttaaaaaaaaaaaaaaaaaatttagggggagaaatttttttaaaaaaaaaaaaaaaaaaaaaaaaaattccttggggggggccccctttagggggaatttttgaaattttctttaaattggggggcctttgggctttttttttaggggcccaatttcccctttttgggggtgtttttaaatttattgggccgggtttttaaaccgtggggttgggaaaacccttgggtttcccaattttattgcttttggaaaaattccctttttccccgttggggtttttcggaaaaggccccccccctttcccttttccaaaattttcccccccttttttgggaattggccccccctttatcgggccttttagccgggggggttgtggggttttcccccggtgggccctttctttttgcaggcccttttgccccctttctttggctttttttcctttttttttggccccttgttgcggtttttcccgggaagttcttattggggggcttcttttttggtttcctatttttttttttttgggcccttccccccc

SEQ ID NO: 98552 - DNA, 379 bp, Zea mays
  Clone ID: MRT4577_2138C.1
ggcgcacagcacagtcacagtgctcgggatagtttccgctccgctctcccactcccccacagtcccacgccctccagtcaaagcaagccgctgcttggccggccgggaaggctcggtcgcagcgccgaggaatggcggccaagccggtcaccgtcggcgacctcatccaccgcgtcgcctcttcctgcctctccaaccgcctgccgtgcaaccacaccttccgcgactccgtggacagcgactttgacgacgacgacgacgaccccttcgccgacgccgtctccagcagcgagaaatgccagcggtccccgcccgctgcggaggtcgaggaagaggaggaggaggacgagaagctcaagatctgggaggagagggagca

SEQ ID NO: 98553 - DNA, 433 bp, Zea mays
  Clone ID: MRT4577_21390C.1
ccggccgggaatccactatacccaccacaagcgtatcgtagcgatggatagagactgcctactgttcatcgcatctccgccgctgccgtctctaccgtggccaataagccggcgtatgcagggatggaaatcaagaagatggcctgcatctgcctcaacactccctcccccaacctgtgcactaggcacggaggcaaccactccaactaccaccaggtggtgcaccccgtgaccaccctacatatgcaggtgcacccggtccacaatcttctgaaagcacattcaatgatcccccaggaggaggtccagacggccgcgacaaccgacgaggggagggggataaacctctgtgagatctactaccttgacgccgccgacaatctccgaggctggaagggggtcatattgttccccgacgccgtcaccatacacc

SEQ ID NO: 98554 - DNA, 367 bp, Zea mays
  Clone ID: MRT4577_21391C.1
ttttttttttttttttttttttttttattatttggggtccccttcaacttttgtggggaaaacacccccccaaacccccaatcctccaaaacacctacaattccttcaacccaactaaaactccccgcccccaaaaaacaaatcacccaaacaaaaccctttcacctaaaccaacccacctgggacaaaccccccaaaaccaacccgcccccctcttaaccccaccaccggaaactaaccattccccccaaaaacttgtattcaaccccaacctaaaaaaacttaccttggaaaaaattaattttccccaaacaataccccaaagccacggccggtaccccataacccccccccgtttttttccccc

SEQ ID NO: 98555 - DNA, 278 bp, Zea mays
  unsure (1)..(278): unsure at all n locations
  Clone ID: MRT4577_21392C.1
ggtacctcgaggccggccgggccgggaaagcggcacagcacaactctctcgcagacaatcccgacgctacgccgaccgcaaccaatacgaattatctcaacaacaccaatcaaaaaaaaagagaaaaaaaaactacgacgatcataatatgaaaaaaaaacatataaaacggaaacaacgcgaaagaaacgacaacgacctcaacaaactaaacgntcgaccgacccaacaaaaaaaaaaaaacaccaaaaaaacaaaaaaaaaaaaaaaaaaaaaca

SEQ ID NO: 98556 - DNA, 237 bp, Zea mays
  Clone ID: MRT4577_21393C.1
cccgcaccatgtatcacggcacaggacactgcctctacaggataccatccaagaacgaacagcgatcctgagtcgatgtcactatggatcgaatcttagagttaccgcagactacattgtgcactgtagggttccagcattgatcaaagacctggtaatatgccctttcatctacacggacataaggtccgagtattaggccgaagaggccaaggttcatgctcaggagcatcactc

SEQ ID NO: 98557 - DNA, 326 bp, Zea mays
  Clone ID: MRT4577_21394C.1
tcgcactcttcctgattcagagagcaactgcctggcgaatccaccccccacttgtactgggtggcgctttcttgggtagtgttattgacagcattggatcgacgcctaaccgccaaccgtgccgctacggatgacgcccttgcacggtcaggcggtcgcactcgtgcgccactgcctcgatgccatacttatgagccgcctcaccattttcggcaactacttgtttaacgaggtcgacccgctcacggggaccgtagtcacactatatggagacaaatgtaagagactgacctcgtagctgtgaaacgctgattattaatcaggtc

SEQ ID NO: 98558 - DNA, 500 bp, Zea mays
  Clone ID: MRT4577_21395C.1
catcctatgcctactgtataaattcattctgcatcctgaaagatctttcatacaaacccctagtgatagtaaaagtaagtaaacaaacaagctagtagtaaatattctactcaatctacaataaaggatgccatggcaggtccttgccaaaaaatataataggataaacaaagatgtcaggttaactaactaactatggatcttcaggttcgtcaagccctaattaatactaacttgtgtagaagtaggaacagaggttactgctaggtggaatccgcgcattgtaaaaatcacctgactcctaactaggaggggaatataaatccaacaagagcacaaggaacacactgtggcaagcacaagcttggggggcgggccggtacagagcactgcctaggccgctgttgcacattttgcacgtctcatctgcttgtccatttccatccaggtcccccagggcaacaactgtgcaccgctcgctgccttctctaccgtgaccg

SEQ ID NO: 98559 - DNA, 282 bp, Zea mays
  Clone ID: MRT4577_21396C.1
aacaaggagcaccaccgcaactagtcaccgcctccctttttttacactttataaacaaaaacggcggggaacagatttttagtggccagaacacaagacaagatctcataacataatccctcaatcaacacaaaacaccaccaccacaaaaacaacctatacatacaaaccccaccttaactaaccaccctacaccttacacaatcacaccacacaaataaacatttttagcaactaacaatgcatgaaacacatcatactcatattaaacaaacacttttc

SEQ ID NO: 98560 - DNA, 549 bp, Zea mays
  unsure (1)..(549): unsure at all n locations
  Clone ID: MRT4577_21397C.1
ccggggtcttgctctcctcatgaaacaaagcaggacaccaacaatggcggggggggtggctgggggctcgggtcctcctgctgcgtcctggcgcgccgccttgngctggcgatgagccgccaacgccgccacnncttcaccatcaccaacaactnggcggggttcaccgtgtgggcccgcgggccactcccggtngggggcgggggcacgcccagctgataccgggggcggggacgtggtactcgtcaacgtgcccgggccgnggcaccagctccggnccnngcgtgtggggccccgcaccgnngctgcgtccttcaacnggcaaccagcgggaagcgtgccagaacggggcgaactgcgngnncggcgcgccctggccnntgcacgctgtgctgggggcagcccccgccgctgaccgctgnggccgagttcacnncatcggcggcgagccaaggacntttctacgacnnatctcggtggcatcgatgggcgtacaaccgtgcgccatgggcccttcnntcctgcgagcacccgnngcgtgcccggctg

SEQ ID NO: 98561 - DNA, 473 bp, Zea mays
  Clone ID: MRT4577_21398C.1
ccacgcgtccgcccacgcgtatcgcgtcgcaccaggtcgtccagcaagcaggttgtggtggccaccgtcgctctagcgctgctcctccacgcttcacatcttgcagccggagccgaaggagaaacggtgacaccgttgagcacatgcgaaaccccgatctgcgtcccctgctggggcaagaaccaggtctgcatcgccgcttgcgttgcgttgcgctacaccggcggtttctgcaatggtgacacctgcgtatgcaccaagcagtgccttgcggaagcggaagcggtggcggaggctggtgggccgtccccgccgcccgtgcagccgccgccgctcgggaagcgtgggatgggaatgctcaagtgatggacgattacgtagcttgttggccgacagatggctgaggcatatgtcaaataaactctcattgttaaaacataatatattctactaggcaaaaaaaaaaaaaaaaa

SEQ ID NO: 98562 - DNA, 349 bp, Zea mays
  Clone ID: MRT4577_21399C.1
gttactttgacgaggaggatatcatactttgagcctggggagtcttatgagtagagcgggcatgggctgtgctacacctgcggtctgcagcgccaaacaggagccttctgtacacacagtccaataagctcgtatctgcagacggtgagccggaggatacgcgtatattccatctgtgcgttaatccatgcttgtgttatctcactctttttagaatgaatcggctgcacatgagagactgtcacaacgtcgaagctgaatttgattgaaagcaaccttgtatttggtaaaatcttccaagagattattacactggggatccccgagggtttggggtttgaccaaaatt

SEQ ID NO: 98563 - DNA, 256 bp, Zea mays
  Clone ID: MRT4577_2139C.1
caacaataaaaggatctgcaactttcttctctccatatagcttcttctcctcactgagcttcttctccttagccatcttttcctcggtcatcgtcttctcctcagacatggagcaagcacgtctttaaaccgaagctcaaaaatcaagcaagagctggtaagcaagagttaaaaatttgagaaaataacgcaaacagcagaaatggcgcatcaaatgctgccgctgtgggttcctatttatacgcctagtgctttg

SEQ ID NO: 98564 - DNA, 611 bp, Zea mays
  unsure (1)..(611): unsure at all n locations
  Clone ID: MRT4577_213C.1
gctcccagcctccgtccgaccgtcctcgacctcccgtcccgccgcctcccacagtcgcaaccctagtcccacccgccgtcctcccgccctcccgcttcccattttcagtcgccgagccgcgtacagcgcacgcactgcacgcgcatcggcacttccagcgacgcgtcgtgagctcctcccttcgacccttcctgtggcgcgtcgtaagctctgtgcaggcgacggcggcgcgctaccagtgacggggggatacggcggcatcgtccccctcggcccctcctccatcccggtgcggcggcgccagcctacaggggatggtgagactatggacgaattcgaagaacggttgtttgggggcaaggacacagacaaaggatcactctacgagaagctcgatagggctgagaacactggtaggagatacaatatgggctctgggatgggttggtttgactgggttaagtgacaagagcagatctgggttgtccaagggtggtttcacttggttaagtgacagtagcagctctggtttccctgggtttcctgcntctggcgacaggagcaattcatgatggatggatggctatgattcttttaatgatggcttaaat

SEQ ID NO: 98565 - DNA, 265 bp, Zea mays
  Clone ID: MRT4577_21400C.1
acaaactctactccggtagcacggagaggaacatatgaagaccctaccttcaagttccagataccactccaagttgcagctgagagggaaatggcaaggcttctgattggagacccaaattttagctggactgttggatttaaagaatttgctcacccagccacggagaccttctctaccattgctcaagcagggccaactttttttcttgccattgctatgttcggatttgttttccaaatcagtgcattggtggcagagaaag

SEQ ID NO: 98566 - DNA, 775 bp, Zea mays
  Clone ID: MRT4577_21401C.1
ccccccttttttttttttttaatcacgaatcccatcacattgcataaaacaattatacttttcacataaacacatatcgatgcatttcccaaaatatagtccgcattttgtaacttagtttttttgcatcaaacaacgcatcacacatctttcttactaaaacccacgcgtccgcccacgcgtccgcgccatggctgcctgatctcaggcgcggcaggggttcgctccaggcgctgaacatgggaggagtggaaggggggcgtcggtctggggaggatggcggccaggtggggctgctcgatggaatccacagcaaggcgggggtggccggacttgagaagggcaggaagccagatgggagagggagcgtacgtgcagaaagcaaacaaggagcccaagccaaggggacgagctcacctgctcgagctcagaccctgagaaatgccctgcgcgctggattagagatggagagctcgggttcggttccatggcttcggtcgacattggaggaaggaagaaggagcagagggaggaagatggccggagaggagctcggagccgatgccccgacggcgttgacgaccgtggaggcgcgagcaggggcgcgcgtcggccatggggacctcctgctcagcgcccgagcgaaggaggggccaagccgcaggggaagctgcaggggagggtgtgtggcgccatgggagagggaggagatccccagcttgctgtcgtgcgggagaaggagaagctccacgggagagacggcgtgcccggccag

SEQ ID NO: 98567 - DNA, 2493 bp, Zea mays
  unsure (1)..(2493): unsure at all n locations
  Clone ID: MRT4577_21402C.1
ctgactgctgttcagcacaaaaacaacaaaactgtggaattctataatatatcaaagtaaacatgtttcaggaaacatctggtgttaagattgcaccggggctgtatttaccagcacatccgtgcttctacgtaaacactatataacaattataagcagtttcaattgcaaccatataaacactttgaaggagcgtcagtgccttcaactagttcactgacccatcttgatctttatttcaattgtgcagatatctatatttgcattactccaaagtctcgaacaaactccaactctccatgtttgcctccaaattttccatagatttcgagtcatcagagaatcgagctccatatgtcgactctgaatttcctctcttttgggtgcggcgtgcattcgccttttcttcataaaaatcaaaatcatccagaattgatgttccctgaggctgttccttgaaaattttcaacatttgcacaccttgcggcaacccaatctcctgtgtgtccctgctaaaagcaacaatcctgttgtcattgttttcaagaattatatgtttgaacaaccgatttgaaatatcctttataatatgccattttatagggaaaaagccactccatttatcttcttcccaaaaatccatggtcttcttgaaatcaacaggacctaacatttcagccaaacctacgaactgtccactggtgttaaccgagaagaataggaagacagggcatctttccccactgtccattaaattttgagcttcatggtatgcagcatccagcttattgttcccatttggtgtacttgcccaaacgttgtatttgatacctttatgaatgtcatcttcactatatgactttatcataaaaaacttggcctgattatattgaactgaaaaatctgatctattatactgatttctacggatcaatggacttgtgatatctttcaccgtggaggatactgaagcattgttcaatttatttgccctcggcccacgaacttggtccattaaatcctcagaatttctccagcgattacctttcatattgatcctatgttggtcactacagtttctgttaatcatcctaggttttgcaaaggtatgtttgcttgtgataactttggcttgctcattggtattaatcctggaaaaacaattccttgagtgaccattgccatgagaagtaccttgctggtatcttgacggtatatgtgcctcagcatcatggcaccaattaccagaacgcaaacgggtcctatctcggtaaccatagtgaagagagagtgacgggatctcatcaccatagtcgggtctccttgaggacagtgcggtttgaggaccatagtgccactgacttgagcgtgaaggtgccacgttatacttcttcctagataaagaagggatctcatcgccatactgcaggcctcttgatactgaaggaccttcatcctcaaagcaccattgagatggaacaggattgatctcatctgcatggtggaaccctctggcatattgaaccatctctttgcagttttctacagatcgagcattgcggcttgaaaagaaagtaaattggtctgatcttctgtaggattgttctgaatgacccaaaccgtgatcaagttcaactgctcctggacacttccgcatgcaaggagcagcagtaggataagacgaaagataatctggacttgcactgagggtgctggatttgattttggttctcattgtccctaatgcatctgggctacttgatgctgcttctaatgcagaagccttctcaaaagaacagtctgaagtagaaaattgtagcttctgcctatgataatctcttcccattggcaatggatccttcaaacatgcatgtgacccaagttcagtaacatatttggtgtcggcagactgtgctctataatccaaatgtgacaaatccctctttgcctgagacagcaaatggccatcttcttcaaatttcatactgccccataactgatatgaagagcatggatcttgctcgaaaatcacatccttcccaatggaagtaatattttttgtttctgctttccttactgtttctggtggatcagaaacctcctgcatctgggctaggcggactggcgtgcagcgagcagagcaaccaagcgacggctcgacgtgaagggtgcagggcaacctaatggcagctcggcgggggcagaagtggggaggcggcggcgcacagtgagcggtaggcgacggcgcagcacgagtgcaagtggagaggtggtcgacggcgcacagggagcagcggcagggccgctacggatcctgggccggcctcgagggatccagtcgcggatcctgggagcttgcttgtgctccgatgcggacgaagnggaggagtcgagacgcgccgctgnaagaaaagaggacgctcgggaaaaanataaatgtcgagaggaattacttctagttaacagatacacgctggtgctgccctgagagcg

SEQ ID NO: 98568 - DNA, 273 bp, Zea mays
  Clone ID: MRT4577_21403C.1
tccttatattccctcaacctccaatacacgggggggtttaatgaaaaatgggggggtgacctacatcagacgtgatcctatcggtccaaacgaatacctctctcctttgtgatcaatagtaatctataattgtctcactaactctataaagagacacactggattatcgaccaacgagtgtttcctgagtaccagttaaatacttcctatatctcaatgccacaagaccgtacattagtacaaaccacttacaaaaccctaagaacctacaag

SEQ ID NO: 98569 - DNA, 556 bp, Zea mays
  Clone ID: MRT4577_21404C.1
gcaagctcccaggatccgcgtctggatcccctcccgccgcccctggatccgctcccgccagcgcccctgggtccgctcccgcgcggcgcccctggatccgctcccgcgcggcgcccctgggtccgctcccgcgcggcgcccctgggtcctctaccgacgccgcccctgggtcctctaccgacgccgcccctgggtctcctccgcccgccgcccctgggtctcctccgcccgtcggctccaatcaagcgacggctgcaagatgcaggaggtttctgatccaccagaaacagtaaggaaagcagaaacaaaaaatattacttccattgggaaggatgtgattttcgagcaagatccatgctcttcatatcagttatggggcagtatgaaatttgaagaagatggccatttgctatctcaggattatagagcacagtccgccgacaccaaatatgttactgaacttgggtcacatgcatgtttgaaggatccattgccaatggggaagagattatcataggcagaaactacaattttctacttcagagtgttcttttga

SEQ ID NO: 98570 - DNA, 725 bp, Zea mays
  unsure (1)..(725): unsure at all n locations
  Clone ID: MRT4577_21405C.1
aattcggcacgaggcaattctggatgattttgatttttatgaagaaaaggcgaatgcacgccgcacccaaaagagaggaaattcagagtcgacatatggagctcgattctctgatgactcgaaatctatggtatgcatatttctgtttagagctgtgatgaaacatgttttcaaggatattataaagcacaccttttgttacctgatctttataattgaactggatgcacctctgcgaaaaatgtgcttgccgtcgcttttcacgtccttgtgtaggattgcatagcatctgtgaatatgagaataggtgatttgcacaccccttttcgtagaaaattacgcctcgtatacagctgctggcaatcttatctggaataaagaaaataagcatggaggtttaaattctatgggggaatcatgtggtcctgaaaccagagggctgggtgtcaggaatcggaactctgttttgtctgtatatcctgtgtgtagcacctactcaaacatttttttttgctacatgtcattttctgatatattcctaattggcaggaaaatttggaggcaaacatggagagttggagtttgttcgagactttggagtaatgcanatatagatatctgcacaattgaaataaagatcaagatgggtcagtgaactagttgaaggcactgacnngctcttcaagtgttnatatggttgcaattgaactgcttatattgtatat

SEQ ID NO: 98571 - DNA, 812 bp, Zea mays
  unsure (1)..(812): unsure at all n locations
  Clone ID: MRT4577_21406C.1
cattgggtacctcgaggccggccgggctccgcagtcggcgccggcacaagcccttcaggtcggacacgacggcgcgtagtcccgactacgtaggcaggttgccggcctccgcctccggcccttcccctgcgccccgactgagtcgctgctgcagccgccaacttcacccgaggcgagctcaccacagccctccggaagtttgttttaggggctatcaacttggaagatggccgatgaggaacaaaccccaggctctaggaagagggttgcaggtacccaaatcaataaggataatcctgagcctgatgatgacgaaccagagcaagagatgggtacatttaagaaagctactgaggaagttatggcaacccggatcattgtaaaggttcggcgccagcaaacatcatcagctccttctaatcctttctctgcaattagatttgcccccactgattctagtgttcaaacatgcgcccctgtcccacaggtccagccttcagatgttaaaggtgacgagggatgcaatggtactgggaaaaatactttgtctgtgccagacaagaatgcaggctctggtgtaaatactgactccggtgccacaactgaagcaccacctcaacctgttggaaccagtgacaaggcagaaggcacagaggctgaatctggtggagacaaagtggtagctggaaaacccaacgaaggtagctgcatgtcatctgaagttcagggcaaaacgaaagagggagatgctgaagaaaaggaangggcagatgaagctggaaataatggtacatttagcaaggatgatactg

SEQ ID NO: 98572 - DNA, 2022 bp, Zea mays
  Clone ID: MRT4577_21407C.1
attgggaccctccggccgggccgggagactagtctttagtccggtcttagttgttccctgaacgccggcatcttcttccgcgcattcggcctatgtccggcagcccctccgcagtcggcgccggcacaagcccttcaggtcggacacggcggcgcgtagtcccgactacgtaggcaggttgccggcctccgcctccggcccttcccctgcgccccgactgagtcgctgctgcagccgccaacttcacccgcggcgagctcaccacagccctccggaagtttgttttaggggctatcaacttggaagatggccgatgaggaacaaaccccaggctctaggaagagggttgcaggtacccaaatcaataaggataatcctgagcctgatgatgacgaaccagagcaagagatgggtacatttaagaaagctactgaggaagttatggcaacccggatcattgtaaaggtccagccttcagatgttaaaggtgacgagggatgcaatggtactgggaaaaatactttgtctgtgccagacaagaatgcaggctctggtgtaaatactgactccggtgccacaactgaagcaccacctcaacctgttggaaccagtgacaaggcagaaggcacagaggctgaatctggtggagacaaagtggtagctggaaaacccaacgaaggtagctgcatgtcatctgaagttcagggcaaaacgaaagagggagatgctgaagaaaaggaaggggcagatgaagctggaaataatggtacagttagcaaggatgatactgagaagaaaggtggaggtgaatcggagaccaaggattgcttgtctgaggagcagagagatgctggcaaaattagcaaggataaatctgagcagaaagatggaggtgaatcacatcagaaagacgctgataacaaagggcagacatcatcagcaacatcccttttctcgtttacgaatctgtcaagtggccaaaatgctttcaccagtctgactggaactggattttcaagcacgtcattctcgtttggctcagcctctacagatggcccaagtactggtcccctgttcgggctgaaagctgatggttcttcgttcccttcctttagtcttggtgctgccagcaacgggagttccgccacagtgcttgctacctcagcagaagcacccaagaaatttgctatggcagaaggccctgtcgaaaccggcgaagaaaacgagaaggctgtatttactgccgattctgccttgtatgagtacctagatgggggctggaaagaaagaggaaaaggtgaactgaagctgaacgtccctgtatcctcctccggcggcgagagagcccggctcgtcatgcgggcaaagggcaactaccgtctggtcctgaacgcgagcctctacaacgacatgtcgctcaaggacatggacaagaagggcgtgacgtttgcctgtatgaacagcattggggagtcgccgagcagccttgccacgtttgctctcaagttcaaggacacagccaccagggaggaattcaaggacgcggtggagtttcacagggcaagcaaagcaccggacgagccgctaaaggcgcccgagaactcttcgaaggcagcagaagcagaagcctgaagctgcactcgggtcacgcttactcgttttttgtacgtgtccaggaaggagctgagagatactttctgtcattgccttcttaagaatgttacgtcatgacaatgacatgatgtcctgagcactggtgctgttgttggaacagtgggtagccttgacgaactttcattagctacagtcctaatctagagttctggagacgagactcgttagatttattcgcttgtcttgtgctccgttatgtttgttctatcggttaagctatgcgtcatgtgttatctagttattatgtcatgaatgaacgtatgcaattatgcgtgtcctggttagtatattccgctaacggctagggctaggttggatgtatctgtatgcgggcaagggtgttccaaa

SEQ ID NO: 98573 - DNA, 295 bp, Zea mays
  Clone ID: MRT4577_21408C.1
ttagggacaactgcgtaccttcctcagggggaattctattaacactgtatgtctttattgtggggtcccatgctaccgccttgaacgtcagttacatagtgtttcgggatcctatgttatcgtccaaaccgaaggtcggggaaatatcttctacataaaacaacaatttcggtggatattgaaaggcagagactacgcccagactacctgacgggggtgtactcgggagcgaaccgcccttgttcctccccattcctctccatttgagccccgccagagccgtctttttattccg

SEQ ID NO: 98574 - DNA, 593 bp, Zea mays
  Clone ID: MRT4577_21409C.1
ggccgcttttttttttttttttttacggcaaaaccgatatatttagtgaggaacgcaatcacgacacacgacaatcgaaacctacacagggaaccaacaaaaaagatatgttagctaaccacaacaaggaccacccaacagaatactacaaccagcaaagaaaccagacaaccatggataacatgcggaatgatcatcattatattgttgggagacgtcttggcaaccttggctatcgcagaatccatgttattcacgctctctatcacaccccatgaaaacgattgcctaatgtcatgaaccgctaatatccccagacaaagatactcggagaaagattgcaccaacatgggtctatgaggagaccatgttgactaaaacggagataccgctcttgacaaacttgaaggcgctctacaactccttgaccgaccgacggccaatgttgtagtagcacatgcaaaaacttcaaagcaaagctgagacgagtggcaagacatgaccggtgcgtatgcgacatcaaaacggccccgcaggttcatgaggatcaactgcgctgtgaaaccagcattctccttggctatgtggtcctt

SEQ ID NO: 98575 - DNA, 834 bp, Zea mays
  unsure (1)..(834): unsure at all n locations
  Clone ID: MRT4577_2140C.1
aatccgcgagctgatagtactacggcatcctgacgaacctgggctcagaaatcctcttcagcagagagtcacacaaggccccttcacagtgcggtgccatgccggaagcaccgagtgcccagccagctcccgcctccggctacgcccccggggcgcaccgcgaggcgctcgacttcatcgagcacgtcacggcgaacgccgggaaggtgcagcagcgcgtactcgccgagatccttgcgcagaacgagacggccgagtacctgcgccggtacggcgtctcctccagcagcagccccctcgatcccgtagacgccttccgccgctgcgtcccgctcgtgacctacgaggacctccagcctgacatactccgcatcgccaacggtgactcctcgccgatcctctccggcaagcccatctccgagttcctcacaagctccggcacttccggaggggaaaggaagctcatgccgaccatcgccgacgagcttgacaggaggtcgctgctgtacagtctactgatgccggtgatgagccagacgctgcccgggctggacaaaggcaaggcgatgtacctgctcttcgtgaaggccgagtcgcggacgccaggagggctggccgcgcggccggtgttgacaagttactaccggagccggcagttcctcgacaggccgcacgacccgtacacggcgtacacgagccccaacgaggccatcttgtgcgtggactcctaccagagcatgtacgcccagctgctctgcggnctcgtgcaccgcaccgacntgctgcgcgtgggcgcgntggtcncgtcgggcttcctcgcgcatacgcttcctg

SEQ ID NO: 98576 - DNA, 263 bp, Zea mays
  Clone ID: MRT4577_21410C.1
gccggcatcgatctcgcttgaaaatcatccatcctcgtttgctgcgtgccgcaccatctgaacctcatggcgcaagatcaagatcgggatcaatgggttctgctggatccgatggctggtggccagggtggccctacagagcgacgatgtctagctcgtctgcgtgaacgaccgattcatcagcaccgactacatgacctacatgttgaagtacggacactgtgcacggacagtggaagcaccatgaagtcaaggtgaacgac

SEQ ID NO: 98577 - DNA, 278 bp, Zea mays
  Clone ID: MRT4577_21411C.1
ggccccgggagcaagacgaaccgcattcatggcgtcaagagcggcccaagcggggggatcaacgggggcgggggcgggcgctacaaggacaagaaggacgtggaagacgcgcaggggacggggggcacgaacgccgacaccacgaacggactgcgcagcaaggcggacgaggactgcaagcggacgcacaagggcagcacggggctgtacgagggcaacaccagggacaagggcgacgcaccccagcatcagtggaccagaaggacggggcccaacaa

SEQ ID NO: 98578 - DNA, 282 bp, Zea mays
  unsure (1)..(282): unsure at all n locations
  Clone ID: MRT4577_21412C.1
caccgcggcactcgcacgcaagctctcaatactgctctagagcctatatcgtctagaagcattggcaacagcggcactacaaaaattttttgggaccggaaaccnnaatctttggatccaagggaaataaagtgaaataaaccaaacccccactggacccaaccaaaaatgaacaaacccaacccaaacccccggccccaactcaatccatgaacaactcttcccataaaaaaaaaccgccccaaaaaaggtcccacccaaaaaaaatccttttttacccaa

SEQ ID NO: 98579 - DNA, 1475 bp, Zea mays
  Clone ID: MRT4577_21413C.1
cccacgcgtccgcccacgcgtccgcccacgcgtccgcgagcgaggcactgcttttgcattgctcacgacctgagccccagatgacgccgtccgtccatgccgacgagtacgtccggccgcctcaacggccgctggcgctcatggcgcacgacaagccggcatcccatcctcaacaggtgcacatctcggcggtgggggcgcaccacatgcgaattacttgggtcaccgacgaccgcagcgcgccgtccgtggtggactacgggacatctccgggacagtacgacgcctccgagacgggctaccaggccacgtaccagttcttgtcatacacatcgggcgccatacaccacgtcaccatcggcccgctagagccgagcacaacttactactacaggtgcggaagggccggcgacgagttcagtttccgggcacctccggccactctgcccatcgagttcgtcgtcattggtgacgtggggcagacggagtgggcggcgtcgacgctgtcccaaatcggcgccgcggaccacgacatgatgctgcttcccggagacctctcgtacgcggaccgccagcaggtgctctgggactcgtgggggcggctggtgcagcggctggcgagcgcgcggccgtggatggtgactgaggggaaccacgagaaggagacgctacgcgagcacgaaacggtgcagcgcttcgtggcgtacaacgcgcggtggcgcatgccgcacgaggagagcggctcgcgctccaacctctactactccttcgacgcgtccggcggcgcggtgcacgtcgtcatgctgggctcctacgccgacctcgaggaggggtggtcggagcagcacgcgtggctgcggagggaccttgcggcggtggaccggcgcaggacgccgtggctgctggtgctcatgcacgtgccgtggtacaacaccaaccgggcgcaccagggcgaggcggaggccatgcgcagggacatggagagcctgctctatgaggcacgcgtggatgtcgtcttcgcctgtcacacccatgcctatgagcgctttgccagagtttatgacaagaaggccaacagccagggtccgatgtacatcaccattggtgatgcaggcaacaacaaagctgagaaattcatgagtggccatgagttggcgcacctgtcgctgttccgggagccaagctttgggtacgggcggctgaggattatcgacaacaggagagcagtatggacgtggcaccgtaacaacgataaggatgcccaagtctccgacgaggtctggttggagagcttggccaccagtccataactaggaatggaccattccaacggcaatgccaaaacgatattatatatatactagatatgtgaccgttgtgacgggagtaaaaaatttatatgaaacatagaaacagaacaacaaacatcactgtgatatgtaaaatttatgtggtaaatattatcaatatcgcac

SEQ ID NO: 98580 - DNA, 181 bp, Zea mays
  unsure (1)..(181): unsure at all n locations
  Clone ID: MRT4577_21414C.1
catgatcaattaattaacctggtgttttactagcgtttgtgatgccactggnccaagatcgcccaataactcccagtaagcacctacaactagatcaaaaactactgacgcacacgcttataaaaacacaccaagcaacataaatgctaatttaacattatatttattaaggacattattc

SEQ ID NO: 98581 - DNA, 598 bp, Zea mays
  Clone ID: MRT4577_21415C.1
tctcgaagccggccgggccgagccccaagactgaacacccctgcttacgttacgatcaacatggcctcgagaaccaccgcgtcctccctcgctctcctgctgctcctttcctgcgccgccgtgagcagcgcggcgcgaaggctggaggaggtggcgacgcccaaggagggggagccccacctgaccgtgccggacctgccagtgccagagcacgacttgccgccgctgcccaaggtcgagatgccgccgttcccggaggtcgagctgccaccgctgcccaaggtcgaaatgccgccgttcccggaggtcgagctgccgccgaagcccgagttaccggccattcccggattccatttcccggagcctactacgccatgacgcgccgccacccctgcgtgctacttcctcggtcgtacgcgcgcgcgcgcgcgaattatatatgtgttcgtgttgggatatggatgcccgctcgtgtcgtgactcgtgagtgtgtgctctgcttgcgttcgtgcttgatgtattatatatacaaataaactttattttctgacttaaaaaaaaaaaaaaaaggcccctaaaaaaaaaggcccctagggcc

SEQ ID NO: 98582 - DNA, 1552 bp, Zea mays
  Clone ID: MRT4577_21416C.1
gaaaatgtaaacggatcactcctcaacaagttcaatgcttcttgaaatatgagatgggctcacaacaggggagatactgtcattataggcttcatcatttgtgtgactgtgtcgacctccatcttccacgaattgatatgcaaatctgtctttgtacctgtgtctgcaagtaaattcctgccagagcgaactcacaacaacccttttgcttggaaattcaagcttctctggggggggggattcgattttccattttgctgctgcataattagttgggatgtgctttccattggcaggcacacattttccatttgggtggtgcgtcttgggcattcagttgtgtggggatagaagtaactctagaattataaaattctagccatgcgtattgtccctctctaacaacaattatatactaccacctgtacacgtcggcccagatgaacgccaacgaggttggcgggagtgcactgcactgcacgtatgcacctgtgcacggccagcactctgccaagagaatccaacgcaacgactctgaactcgctccaaaagagagaacagaaaactgaaaacccaatgaatcagagcttcaagctgaacttgcagttgccggccttgatcttgatgagactggtgacgtccatgagcctgtccacgacgaggtcgcagcgcaccctggccgtgaccttccagagcttgaaggtgccgagctggacgcgcacgggcacgtcggcgcggaacacgagcggcacggcgcccgtccgctgcgcgtcctgcatcccggccacggcggcgccgcccagctgcgcctccccggccatggccagcgccagcaccgtggtgttgcggtggccctggtagaagggcggcagcgcgccccgcgccaggcggtacgactggtaccacacgcccaggctggacccgggctcgtactggatggcgatgcgcgagttggggttcgccgccgtcaccgccacgtcgaaccgggcccgcgccgccagcgtcgccgggtcgacctggaacgccgacacggagaggcggtccaccgagtaccgcggcgccttggggtccagcgccaggtacagcgcgcccgccgccgccgcggcgagcaccgccagcactgccgcgctgatcacggcgcagcagaggagccggcagcagcagccccggccccgccgcttcggcggcggcagcggcgccggtggcgcgacgcggcgcggcggcggaggcagggccccgggaacgtagccttgttgttgctgctgcttcgcgcgctgcgccgggtcgcccttgtccgaccggaacgagcctcccggcatcagcggccggttgccggcctccaggtccgctgggtggatcctctggtgatcagccattgtcaacctccaacccgctgctcgtgtcccgctgctctgcttctcctctcgacacaagcaaagcggcgaaggcaacgcaaggtcacgctagctccactcgtcctgcctgcactgccttcgcttggaacctggtctctccgtgcgcccagctctgcggacgtctggcggacgctggg

SEQ ID NO: 98583 - DNA, 1163 bp, Zea mays
  Clone ID: MRT4577_21417C.1
ggcccccgcgtccggagaggccaggtgccaagcaaaggcggtgcagtgcaggcagggcgtgtggagaagcagagcagcgggcggcgcacctgcacttggcagctctggccatggcggatcaccagaggatccaccctgtagacctggaggccggcaaccggccgacgacgccgctggtgccgggagcctcgttccggtcggacaagggcgacccagcgcagcgcgcgaacaaccaccaccaccaacagcaacaacgaggctacgtctacgtccccgggccgctgcctccgccgccgcgtcgcgccgcgccaccggcgccgcctctgccgccgccgaagcggcgcgggcggggctgctgctgccggttcctctgctgcgccgtgataaccgcggtcgtgctggcggtgctcgccgcggcggcggcgggcgcgctgtacctgttgctggaccccaaggcgccgcggtactcggtggaccggctcgccgtgtaccggcgttccaggtggacccgtcgacgtttacggcgcgggccgggttcgacgtggcggtgacggcggcgaaccccaactcgcgcatcggcatccagtacgagcccgggtccagcctgggcgtgtggtaccagtcgtaccgcctggcgcggggcgcgctgccgcccttctaccagggccaccgcaacaccacggtgctggcgctggccatggccggggaggtgcagctgggcggcgccgccgtggccgggatgcgggacgcgcagcgttcgggcgccgtgccgctcgtgttccgcgccgacgtgcccgtgcgcgtcgagctcggcaccttcaagctctggaaggtcacgtccagggtgcgctgcgacctcgtcgtcgacaggctcatggacgtcagcagccccatcaagatcaaggccagcaactgcaagttcggcctcaagctgtgatccgttcgtcgccgcgttggattttttggctggctgagtgctggacctgcttgctggtagtatttgcgcaggtgcagacgtgcagtgcactcccgccaacctcgtcggtgttcatcccggctgtgtacagatggcagtgtatcattgctgttatagaggaataattttgcaaaaaaaaaacccactcgtccgcggacgcgtgggcggacgctgggcggacgctggg

SEQ ID NO: 98584 - DNA, 363 bp, Zea mays
  unsure (1)..(363): unsure at all n locations
  Clone ID: MRT4577_21418C.1
gcgcacaacagaagaggacgagagaaagcaaggcgacggcgccggcgaccgcggcaccaacaacanacaccgccgaccgcgngacgccangggcanccngaaccacangacccangncngcaggggggggggaccaangaggcgcacaagcacaggaagaaccaaccgcngcagacggggaacaacaagcggaaganggaccgcaaaggccacaagcgnaacangcagagcgcgcagaagaccaagcgcaagggcacgagcgccacgggcaacaccaagcagcgcaagaacacgcgccaccgacaaccgcccagcccgaccaggnggaagaaacgcccgaagggcacccgaaaacaacgcccc

SEQ ID NO: 98585 - DNA, 599 bp, Zea mays
  Clone ID: MRT4577_21419C.1
atttgtgtcaactgcaaggcgcgccatccgatatctgcttattaggccactgttcggtacagtgtcctggagacctggacctggacggctggacccctggccacaagttcagcacctggtgtctgattctgaagagaagcaccattatttgtagtagaatcatcgtgcatgatttacctgctttgctcaaatccaagcactaggtagatatattcttgcggctgtagtgctgtcctggctcaagcctgaccccagaacttggatctcgacacacaagaaccatatcaacttccccccatcaaatcaccctgaaatcgtgatagcagtagcacactgctagtagtgttccggcttcagagacgtaaccattggttgcaagaacttctctgcggcaatggcatcccgattcgggcctggccagcacagcaggtggtcgtgcatggtgctccggtccacacctccttagcaccctgtactaactgagctagtaagggatcagtcccatcaccgtgcctattaacttcttttggggttagattattagagcagtcagcagtagaagcatctgtacatgttggccactgcataccctgaggccc

SEQ ID NO: 98586 - DNA, 563 bp, Zea mays
  Clone ID: MRT4577_21420C.1
ctctcctgtgtcggcattgcagccccctctccgccggcgactgcgccggctacccccgccagcgaccactgactcccgggaaacccagatccgctcaaaggcactcactctcctccaccgcatcgacccgccggaagaaacgagtgcggccggcgacctgagcctcctcgccccggtagcggcgagccttctttccccctcccccgattcgaacgagctgaggagactccaatactctgataatggatgcttccgaggagatttcccagcggctacgtccggagaagaaaccgtgtgcggatggcgagtcgcagcagcattcgccgccggcatccatggtgccggtatccaaggtgctcgacgacgacaacctcctcattgagatcctcctccgcgtcagcttccccaccacgcttgtatgcgccgcactcgtctgcaagcgctggctctgccatgcctctgaccctaagttcctcagccttttccgcaagcgccacccgcctcgcctccttggcttctacatatatatggggtcggcctgggtatggttgggcgcccccctg

SEQ ID NO: 98587 - DNA, 596 bp, Zea mays
  Clone ID: MRT4577_21421C.1
tggcgtgcggcgagccctcgtggcgctgcgctccggttccccgtctactatctctgcaacgctctcccgccaggcggcagctcgctcctcggagctggcgggtgcgcccctgccgcgcgcctctcgccggcgcctcgggatctcgaggtagcctgcctgccgcctggagcttttgaatctctagcggagcatttctattcttctccttggctcagatccggtggtgcagggtgccggttgtggcgctcggcggcgtgcagggttcgctgatgccgatgcacagcgccaccgcgtcggcgctgctcacctccatgctcgggcttaagcctgactcttggggttggctctccgagggatttgctacacctctataacaagacacaagagcctgatttttcgcctttgtactagaggattccaataacatttttacatgccttgcgggagtacgcccttggacttttgctgatggaatctgcgaccgaaaacttatggtcttatttccatgatatgcatcgatttttctcggattatctcttttttttcccccttgtatggagccatgggaagtatcaggatgtgttatctggagcatc

SEQ ID NO: 98588 - DNA, 553 bp, Zea mays
  Clone ID: MRT4577_21422C.1
cgtgcggcgagccctcgtggcgctgcgctccggttccccgtctactatctctgcaacgctctcccgccaggcggcagctcgctcctcggagctggcgggtgcgcccctgccgcgcgcctctcgccggcgcctcgggatctcgagggtgccggttgtggcgctcggcggcgtgcagggttcgctgatgccgatgcacagcgccaccgcgtcggcgctgctcacctccatgctcgggcttaagcctgactcttggggttggctctccgaggattgttgatgagatctggaaaggcagctagctatatatatctatgaatcgcgctcaaggggcatttgtttgtttccacaggatttgctacacctctataacaagacacaagagcctgatttttcgcctttgtactagaggattccaataacatttttacatgccttgcgggagtacgcccttggacttttgctgatggaatctgcgaccgaaaactatggtcttatttccatgatatgcatcgatttttctcgggatatctcttttttttcccccttgtatgga

SEQ ID NO: 98589 - DNA, 258 bp, Zea mays
  Clone ID: MRT4577_21423C.1
ccacgcgttcgtgcatacacgtataatctgataccgagtttacaggcgttgctgttatagccccttgagtggatctcctagagcctggtagggatggttcaagtttatcacgagcttggctctagttttttttttatattcaccttattagagaagattgtgatgtactatatgctgagggaatagctcgctagttgaatcccattgttatatatcctgttttagcacttaagccatgaattgtaaaaatggttgtaa

SEQ ID NO: 98590 - DNA, 590 bp, Zea mays
  Clone ID: MRT4577_21424C.1
cggactgtctagctcgccatgtcctacctctcctctgccgccgtcaccgccccttacttcgccgcaccggcgacaggccgcgccgtgatcacaacgaagcccttcaccgtgtgcgcctctctccgtaaggccaccggcaccgccaccgcggcaatgtgtgccagcgccctgcttgccggcggagccatggcccaggaggtgctgatgttcgcaggagacgatgcgctcatcttgcgagaccaggcaggtcaccgtcaaggacgcggacaccatcacattctagaacaacgccggcttcccgcacaacgacctcttctacgaagacgaggagccgagcgtcgcctacgccaccaagatctcgcatgacgagtacctcaacgcgccaagagagacctactccgtcaccctcaccgtgacgggaacctacggcttctactgacgagacgcatcaaggagccgtaatgtgcggcaagatcaccgacaactaattaagctagcgtatcgatccatatcacattcatgtatgtaactgttgcttcctgcttcgaactccgtcgagctgtccatctctacatgtgctcgactacaca

SEQ ID NO: 98591 - DNA, 321 bp, Zea mays
  Clone ID: MRT4577_21425C.1
ggagattcttatgaggaccgagaaagaaaccgctgtgcctgcatcccatgatgctggatatgagaaattgttggttgatagattgacccttatgccaggtaagatatcagccctggcgaaatccattcgcacttttgcacgtctaggaacacccaatcaaccaactactcaaaagaacagagattgctagtaatttaattctggagaatacatcttgtacttcgggtgtgctattggatatttttgagtccaggcctgatgccttggtccatattgcttctttagcgatctaagtagctctgctcttctcttgataagttg

SEQ ID NO: 98592 - DNA, 235 bp, Zea mays
  unsure (1)..(235): unsure at all n locations
  Clone ID: MRT4577_21426C.1
gtaagctcggatcctntattgcggccgccctgggtttttttttttgaatcgaggttacattgtacacgacccgcaaggaagctcgtgcatgcagcccatatcaatgccatactctccactgccgagggccgtacgtaccattaacgatgggaaggcccacccagctaacaacgcgttttctaggcgagatgtccaaagacctcggtgccttgtaaaaaccacaactacgccatgc

SEQ ID NO: 98593 - DNA, 123 bp, Zea mays
  Clone ID: MRT4577_21427C.1
caaattgcatgagattataagatacccatcttagcatgtttaacttgtagaataatgtcattgaatttgatatccataacctcttgcgtttgtctgagtcatgttatggcatggcatcacatg

SEQ ID NO: 98594 - DNA, 2360 bp, Zea mays
  Clone ID: MRT4577_21428C.1
gcactgggcaggcactccggcactggctccttccttccctttcccctgatccctcgtccagtcgtcctcctctgcccggtacagctgcgaagccggcactggctctgctctgctcgccagcagcaccgacctccactctacgtctccaccagcaaggcgagctcgcttttcactcccccaaatctctgaataaaaaatcgcgcaagcaacctcgctccaccggcctcccgcaagttcgttcgttcagtcaggtcaggtcccagcctacgcagcatttgacagcgcgaggcggttgcccagtcagtctggggtggacggctttgatttgcttcgaagggagtgagattggttgaagccttcgaccaaggttgtcaatggattctgggatttgggcatctgtttggagcttcatcaagttcctgcctttcttctttgcgcttctcctcctgggcatcatcaaaggtgctttgtttggcccatgggcatggcttgtcatgacaattggaatttccgcacttattctaggcttatggcctatgcatgtgatttggacatattactgcatcatcagaaccaagatggtaggaccggtcgtaaagttgctgcttcttattgttgcaactgcggttttggttatatggctaataattggcgtcgtgggaagcatccttgctggtttggcctatggctttctcgcaccagtaatggctacatttgatgcgattggggaaggaaaagaaaatccacttgttcactgttttttggatggaacatggagcactatcacaggaagctgtacagttgtcagggacatgaaagacatgttggtacactcatatttttcaatcatggatgaagttcgtcttcatgcacctcccgacggcaagccatatgagataagattgctacaaattcctggtgcaatatttgctgctgcttgtgggcttgtagtggatgcaataatgttcacactaattgccttgtacaaattccccgttatgctattcaaaggatggaagcggttgattgaagatcttattggcagagaaggaccttttcttgagacagcttgcatgccatttgctggtcttgcaattcttctctggccatttgcagttataggagcttttatagcctctgttatttgcagtgttccttttggtgtatatgctgctgtggtggtttatcaggaatcctcacttttcttgggactgtcttatgcaatatcatcagtatccatctttgatgaatatacaaatgacgtacttgacatggcaccaggatcttgctttcctaggtttaaatataggacaaatgaagcttcctcacatggtggctctctctcgagacccgcttcattcaaggacaagcatgatggaaagaaagcccctcagcgtgtaacatcatttaaaagtagctttgatgagttcaatccattcaagttgctagatcaccttttcatagagtgtaagcaccatggcaaggatctggtcgctgaaggagtgataacctcaaaagatatagaaggaacaaaggcaggcaaagccagcactggggtacttaatgttgggttaccagcatatgttatccttaaggctctcctccgatctgctaaagccaattctgatggtctcgttctaagtaatggatctgagataacatccgacaataggcctacgagtaaaatctttgagtggttttttgaccctctgatggtcatcaaagatcaaatcaaagctgaaaacttcacagaagaagaggaagcataccttgagaagcaagtgctcttgattagtgatccaaagcgcatcaaggagaatctcattcggcttccaccattgagtgagcgaaaacaagcagaaatagaagcatttgctcgaaggttgcaagggatcacaaagtcgatatcaaggtaccccacatccaagcgccgcttcgacgcccttgtgaaggctctttcagaagagcttgcgaggacaatgggtggtaatcaatctgctaatgggtctcaggtccggaagatgagaagtggtatcgtccgaatgcttagtcagagatcacttgggaaagcaacaggcatcccgggcgatgatcatgaggctcagctaacaagcgatggtttcacttcatgatgttctggaggtgttcaactgtaacctcagtttgaaaaggagatgctactttactgtgttattttgctaactggatacaaagaactgacacttctgtatgaagagtttagcctcaaccatctcgaggatgggttgtttgttttgaggactgtatctggacaacactgtagtaatactttgtaacagaaagcaaaagatatgtccttgttccaacaaaaaaactagctg

SEQ ID NO: 98595 - DNA, 410 bp, Zea mays
  Clone ID: MRT4577_21429C.1
gagctcactatgatggcggccgcccttccttttttttttttttttttaatttaattatggttgttcgctttttcaaaccttgatcatcaataatagtttcattttctaccacctccttgctttttcaaagcaacggggcggaaacaaaaacacttgggaaaccccatatttctaaaggggggaaacaaaacacccctttgacaaaaaaaaaaaaaccaccgattattcaacaaaaaccccccccaatatcggggacaaaaagctctcactcgcaacacacccaataagaggggggccctttataccaagaaaaaattttcctgtacccaaaaggcccaaaaaggcctcttaaaaaatatttaaaaacagcggtctattaaccaaaaaaaacatgggggcccctccacctt

SEQ ID NO: 98596 - DNA, 2032 bp, Zea mays
  Clone ID: MRT4577_2142C.1
atggatcctaagggcaaggggatggtggtcaatgataaggaaaaggagtccttcgtcaacgatccaaaagatgacaagcctactgactcgggctcgagccacaaaagaaaagacgggaagaagaagaaaacaaggcgcatcaaggagatcgtctactacgacgacagcgacgagtcctcttcttcccaaaaggacaacgacgacaacgactatgagaaaaagaagacggttaactctaatttttctttcgattactctcgtattcctcaaagtaccaatgctcatttactctccattccacttggtaaacctcctcactttgatggagagggctacggattttggagtcacaaaatgcatagtcacttgttctctctccatccaagcatatgggagatagtagaaagtggaatgaaatttgatagtactgatagtcccatatttatcaatgagcaaattcacaaaaatgcacaagcttctactgttcttctagcatcattgtgcagggatgaataccataaggtgagcggcttggataacgccaagcagatctgggacaccctcaagatctcgcatgaggggaacgacgtcaccatgcacaccaagatggagttggtggaaggcgaactaggaaggttcgcaatgatcagaggagaggagccaacccaaacgtacaatcggctcaagaccctcgtcaaccaaataaggagctatggaagcacgcgatggacggaccacgatgtcgtccgcctaatgctaaggtccttcactgtccttgatccacatcttgtaaacaatattcgtgagaatcctaggtacaccaagatgacgcccgaggaaatacttgggaagttcgtaagcggacggatgatgatcaaggaggcaagatacgttgatgatgcgttgaatggcccaatccacgagcctcaaaccgttgctctcaaagcaacgaggggcaaggaagtgctacctagcaaggtggcacaagttgaggcgatggggctcaatgaggaagagatggccctcatcatcaagtgtttcaagacggcgctaaggggtcgcaaggagcatcccaacaaaagcaagacaaagggaaagcgctcctgcttcaagtgtggtaagattggtcattttatcgctaattgtcccgataatgataatgaccaggaacaagagaagaagagggaaaagaagaataattacaagaaggctaagggcgaggcacatcttggcaaggagtgggactcggattgctcgtcgtccgactccgacaacgaaggactcaccgcctcggccttcaacaaatcgtccctcttccccaacgagcatcacacatgcctcatggcaaaggagaagaaggtatgtactcgaaacaatactacttatgcttcttcaagtgaagatgaatctagtgatgatgaaatagactatgcatatttgttcaagggcttagatcgaactaagattgataaaatcaatgaattgattgatgccttgaatgataagaatagattgctagaaaagcaagaggatcttttgtatgaagaacatgataaagttgtagaggcacaaaaatctcttgctttagaagtcaaaaggaatgaaatgctttcttgtgaactatctacttgccatgagaccatttctagtttaaaaagtattaatgatgacttgaatgctaaactagaaatagctaataaatcaacctcttgtgtaaatcatgttgtaatttgcaataggtgtaaagactttaatgttgatgcttgtagtgaacacctagtttgcatttctaaattaagtgatgaagtggctagtcttaatgcccaacttaagactagcaaaagtgaatttgataaactaaaatttgcaagggatgcctacacgattggtagacacccctcaattaaggatgggcttggctttaagagggaagccaagagcttaacaagtcataaggctcccatctcctccaaggagaaagggaaggctcctatgactaatagtagtcaaaagaatcatgctttcatttatg

SEQ ID NO: 98597 - DNA, 246 bp, Zea mays
  unsure (1)..(246): unsure at all n locations
  Clone ID: MRT4577_21430C.1
gggggggnaaaaaaaaaaatttttgttagtgatgattgtgggttaagccttggtttgnaaagnaaaaggggattttganannattaatttggaangaccgaanatggtattgaccangangaatgttaatggtatttgaaaaatgaggttgaagagaaggagnanaatgatntttggttgaannangananttaataggggagtnttagttattnttgnnnatntaattagttgaaaagaaaatga

SEQ ID NO: 98598 - DNA, 1214 bp, Zea mays
  Clone ID: MRT4577_21431C.1
tgggtacctcgaggccggccgggacaaaccccacggagctcgatctgcagccttcgatctgtcagtgtccactgaccagtcagctgcagctcgcaggctcgtagccgctagctcgacctctaggctctagctccaacttccccgctgtgttaagctagcgatcggcaagtcatgggcagcttggacaccaatcctaacgccttctccgccttcggcgtcgacgccaccaccggcttccagcccctccaccccgacgacgtccgcgcctacctccacaaggccgtcgacttcatctccgactactacaagtccgtcgagtcactgcccgtgctgccggacgtcaagccggggtacctgcggcagcagctaaggtccgcgccgcccacgtcctccgccccgttcgacgtcaccatgaaggagctgacggactccgtcgtccccggcatgacccactgggccagcccaaacttcttcgccttcttcccgtccaccaacagcgccgcggccatcgccggcgacctcatcgcgtccgccatgaacaccgtcggcttcacgtggcaggccgcgccagccgccacggagatggaggtcctcgcgctcgactggctcgcgcagctcctgcgcctgccgcccagcttcatgaaccgcaccggcgcagctgggcgcggcaccggcggcggcgtcatccttggcaccactagcgaggccatgctcgtcacgctcgtcgccgcgcgtgacgccgccctccgccggactggctcccagggcgtgtccggccttccgcggctggccgtctacgccgccgaccagacgcactccaccttcttcaaggcgtgccgcctcgccggcttcgaccccgccaacatccgctgcatccccaccggcccggagacggactacggcctcgacccggcgaggctgctcgaggtcatgcaggccgacgtcgacgccggcctcgtgccgacctacgtctgcgccacggtcggcaccacgtcgtccaacgccgtcgaccctgtgcgagccattgccgatgccgccgccgtgttcaacgcgtgggtccacatcgacgccgcgtacgctggcagcgcgtgcatctgccctgagttccggcaccacctcgacggcgtggagcgcgtggactccatcagcatgagcccgcacaagtggctcatgacgtgcctggactgcacgtgcctgtgggtgcgcgacacgca

SEQ ID NO: 98599 - DNA, 695 bp, Zea mays
  Clone ID: MRT4577_21432C.1
gccggccggtccgggaaaaaaaatcaactgattcgctgaaaaacggagaattgaaagcgaatgctgtctcccaccacactgcggccgctggttccggcggcggcgccatcgcaccttaccgcctgcttcttgcccgcgtcaaggcggcgtgcgccggcggcggcggtgcgcgcggtgcggaactacgactccatcccgaagcgggagcccttcacctccaaccgcagcaccctcgacgagttcctccggctggacaagccgctcgtccagcgtaccaaggaccagatcacagtcggagggccatgtaactagcatgtattaatactgaatcggaaaccgctttgctggttagaatgttctggtgaacgagcacaagaagaaaatattctggtcagagtgctgtccattgtttcagtttcagaggcacaaagcatttggagcggtatatctacttaacggtattggatatttaggtctctgaattgttttggtggtatatgcttttttacatacacatggtctcgttgtaagataattgtcatttgtgttgccaattggtctgcaagtaaagctaccctaaaaaaaaggtctgtaaatactaaataggcttgcacttgagccttcgtatcgccgcactaaaattataaagccgggattgttttcgtgagaggcaaaaaaaaaaaaaaggcccccta

SEQ ID NO: 98600 - DNA, 697 bp, Zea mays
  Clone ID: MRT4577_21433C.1
cccacgcgtccgcccacgcgtccgcggacgcgtgggcactagtgattcgctgaacaaaaaaaaaaaaaaaaatacaagaaggaatcgagagcaaatgctatcttcaaccacactccgaccaccggcgtcgccggcgccggcacacctcaccatctgctcctgcttcttgcccgcggcgtggcggcgtgcgccggcggcggcggtgcgcgcggtgcggaactacgactccatcccgaagcgggagcccttcacctccagccgcagcaccctcgacgagttcctccggctggacaagccgctcgtccagcgtaccaaggaccagatcacaggtatgaggtatctgctcggccggccgcaccgtcgtcgcctcggtgcataatctatttttctgaatgattttttttatgcgcgtcatgcgtcgacgcgtcgtcctgccacgatttttgtagtttagatttgtttacagttcttttgccttcctgactaaactggattacttttggatggtagtacatgtcattttggcataggattaagtagattcgttatctaccttctgttgtagttcaaacattcttttcatgtttttttttgaagtcggagggccatgtaactagcatgtattaatactgaatcggaaaccgctttgctggttagaatgttctggtgaacgagcacaagaagaaaaattctggtc

SEQ ID NO: 98601 - DNA, 866 bp, Zea mays
  unsure (1)..(866): unsure at all n locations
  Clone ID: MRT4577_21434C.1
gtgtccaccaagcgaaccaagcgaaccccactttaccacggcctgtgagaaactcccgacgccgtgcgatccaagcgaaccaaccggacggaagtgcccccaacccaaacgagcggcgtcgagatggacggcggcggcggtggcggcggtggcggcggaagcacaagcggcgacgatgggaagcaggagaagcacctggtgcttgcccacaagctcttcctgctctcccaccccgacgtcgacgacctctccaaggtcgacctccgctccgacgtcctctcggccgtcaaatccgatgacatggcgccactgttcgagtcgctggccgccgcgggcgtgctggagccggatgccgtgctgctctccgagatgcgcgccaggatcgacgaggagatccgcaagctcgatgagaaaattgctgatgctgaagagaatttgggcgagagtgaagtgcgtgaagcccatcttgccaagtccttgtactttgtaaaggttggcgagaaggaaaaagcactggaacaacttaaagttactgaaggaaaaactgtagccattggccagaagatggatcttgtgttctacactttgcaaattggccttttctacatggattttgatctcatctcaaaatccattgataaggcaaagaagttgtttgaggagggaggtgactgggagagaaagaacagattgaaagtgtacgaaggcttatactgcatggcaaccagaaacttcaagaaagctaccagncctgtttttggactccatctcaactttcacaacctacgagttgtttccatatgacactgtcatcttctatacagtcctcacaagtatcatctcattgtatcgtgtatctctaaaac

SEQ ID NO: 98602 - DNA, 329 bp, Zea mays
  Clone ID: MRT4577_21435C.1
aattcccggttcgacgcgctcacttgtcggcggccgccaccccgaaccagcacgggggcttttaatctatataagataaagatctcgacgcaatgactgggtgcacttagggcaatacatgtgattgcttgttcaacttcacacctagttggggccttgaggcaactgctataatctaagtgcgatgaccggacaagacgcgcaccaaatgccccatgcatagagtgcttacgtggattcgaggacttgaaaccgtgatctgagataaattctttaggaacatatccacatacactttgtagagcaaactagggatgcctctgaacaaa

SEQ ID NO: 98603 - DNA, 274 bp, Zea mays
  Clone ID: MRT4577_21436C.1
attcgaaatttttaattatttttgggaatgggacattgggggggggcggaatttttgggggaaacagaaaataagctgctctatttttcgccgtctgtctccgcagcactatgagggctccgaagtatcatgaattcaggaggaggggggacaactggccacgcaaggcaccaagctttttatagcgcgtattagggtttctgcaaacgtactcagtaagaccgcgatctagatagcatggcccgccgcattacgggtaacaagaatgtggccc

SEQ ID NO: 98604 - DNA, 298 bp, Zea mays
  Clone ID: MRT4577_21437C.1
ggaaagaactttctaagaccttaaaaaattgggcgggaagacttcacccccaaggaaacattcgctcctgggccaaaacccaaaagtccaagaccccagacaaaacagtttcccccgaaccccaaaactaaaagcttaaaaacccatctcagggggctggcccccacccctgagagagacccgggccccaagataggttttaagctccggaacagcccaaatagcctggatcagagcaaaacccacagcctttggggaatccttcttgaaaacaggcaggaacttggatgcccccttt

SEQ ID NO: 98605 - DNA, 410 bp, Zea mays
  Clone ID: MRT4577_21438C.1
acagttcaaagaacctgaatttgataccaaaatttccggtgcccaaatggcaaccttttttgggaaaaaggcccttcccccccccttaccttgaaaccccccccctttttgttacttaattgggccccaaaaagggccccctaaccaaacctttttaggttccaccgggttaacccctccggggccttacaaaaaatttcttttttccccagtttagggtcccccgtttcctattcaaaacccaaaaaacccaggctcagcccccttttctttttaaagggtttcaaattttggttttatgattgccccagggagcattttcccatttcttgacccaaccccccccataaaatcacccaggacggtcatggccccattccttccccccccaattgcacgggaagggggga

SEQ ID NO: 98606 - DNA, 231 bp, Zea mays
  Clone ID: MRT4577_21439C.1
ggtccgggatatgatgagaacgaaggcacaggggggaagggggaagggcacggtggttttttgctgcaacgagtaactgtggattgtaggcgctcatcttggccttgtagaaatttccttttagagaaagtcgtggaatatagggcgcgtgcttggtagttacaaaggaaagcttgtcttttcttatggtttcgtttttaggaggcatcaaggacacgttatatggaaggg

SEQ ID NO: 98607 - DNA, 457 bp, Zea mays
  Clone ID: MRT4577_2143C.1
gccggggccatctcttccttcctctaccggccggacccgctcaggcacagacaaccacgcacgccccatcacaacagctccctctgcatctacggctagtcgccgtggtctgcctgcctgcacaaccttcttactaatctgtctcttcttacgctgccaccctcccagcaccgcgggaagggaagcccaggaatctctcgaaccagctcccggcgcggcgtggcgagctcacaatctcataggatctgtattgggttttcagtaaggagcacaaaacgccttagggaatgcagaaagatgagcttgcacgtcgaagagctaatttgtgagggacttggcatgaaagcacgccatacttttcattctatgccggctcttgatgactccgaagcttaagaggacacgtatgttcaacccgtgctttcccacaagggggttcccacggaggcggatcaac

SEQ ID NO: 98608 - DNA, 334 bp, Zea mays
  Clone ID: MRT4577_21440C.1
gttctagatcgcgagggccgcccttttttttttttttttttttttctttttttttttttgtggcaagcaatcactattctaggattctttattcaaaattcaatccttgtatattactcacctaatctatattttctttttactgaaagggaggatcgattcccccaacgaatattacatgatcagttgcagggggcccaagattttcagtcttatgtccacccgcgcatttcttcctgtgctcggccttcggcttcttcttttcacatcttttcctgccacaacacgggccagttggcccgggcctcttcgatgccgaacagcgaccctttct

SEQ ID NO: 98609 - DNA, 192 bp, Zea mays
  unsure (1)..(192): unsure at all n locations
  Clone ID: MRT4577_21441C.1
cacgtggagcatatgatcgaggaactgctggactccgatttctttttggagattngctgctagtgctagggtagcggttacgctacctgcctagcgactggctancgcccccggccggcccgtcaccgtcgcgctccgctccacctctcctctgttcttgttcttgcacttgcaccatgcgtcgcgctcgcg

SEQ ID NO: 98610 - DNA, 977 bp, Zea mays
  Clone ID: MRT4577_21442C.1
gggacgggcacaacagtccggccgggcgtggaatacgggcacaactcgtgaacgacggcggcgcctagcggtgacatcgtcccctcgactcctcctccatccccgacgcggcggcgccagcctgcagattagcttattaccaccatgggtaaaagaaagcggtcgtcatgtcaacgagataaccataatgattctctagccagcaaaataatgagaactagaatcccagatcttcctgaggttgttgatgcaccaatgctgcctaccaaattcctctgtcttaagcacctgaccgttcgcttgtcatcaggaacaaccattacccaggcatttgactatttctctttggtttctttccttgatgcgtctccttccttggagacttttatattaaatgtgagtgggaaaggcatgatccatgaatcgatttctgcacatccacaattgaggcacacacctgagcaccaccatggccacctcaggagtgtgaagatatgtggtttcagctctgagaaaagcttatttgaactaacacgttatattcttgagaatgcggtgtcactgaaatttcttacactggacaccttttatggggatcggtgtggtcagggtaagtgtacaagttgtttacccacgcctgatgtttttatggatgtttccaaagcgatctcaggtatcaagacatacatcgagaacaaagttccatccacagttaaactaactgttctggagccttgcagccggtgccatgttagaagagtaatttagacaccatcctagtcatgctacgtcacttccatttaatttaatttaatttgagaagaaccatgcttgtttcctggattatttatagctgtgtcccgatgcacagcaaatttaatctctgatgatggaccgtgcttgtgtttcctgaattaatacatgccaactgtttagttttgtagtatggcatgtggatttatttaagacaagttgac

SEQ ID NO: 98611 - DNA, 777 bp, Zea mays
  Clone ID: MRT4577_21443C.1
ggccggacaacagtaccacgcgacgtcaaatacgggcacaactcgtgaacgacggcggcgcctagcggcgacatcgtccccctcgactcctcctccatccccgatgcggcgcgccagcctgcaggtgcccaattgtctaaatttctacaactcagatgagaccaaaactcctactccaatatctaatcagatttagtcccataagttgtctgagttattgtttggtccatcagtcgccttctatagcaccgaaagcaccccccgtattttgcggggggaaacggtgttctttcggggctacagattagcttattacctccatgggtaaaagaaagcggtcgttgtgtcaacaagataaccataatgattctctagccagcaaaataatgagaactagaatcccagatcttcctgaggacatttggtctcatgtacattccctaatgccaatgcgtgatgctggccgtgctgcttgcctatctcgtgcctttttacgttcctggagacgtcatcctaatcttatctttaataaggatacgattggcatgaaaaaaaattcatatggagagaatttccaccacataattagccgcattctcaggaatcactctggcattagtttgaaaacattcaagcttgactacagtggcatgtgtgggttcgatggaactatatcttgacagttggcttcaggctgctcttaatccagggattgaagaactcactgaaaacattcaagcttgactacagtggcatgtgtgggttcgatggaactat

SEQ ID NO: 98612 - DNA, 1076 bp, Zea mays
  Clone ID: MRT4577_21444C.1
ttggttccctcgaggccggccgggtggctcgctctagtcctccgactccagacctcgagtcctcttcctctcccctcacctccctcaacctgcagcttcgacgtcacctcctctcttcccgtctgcgctctctcccctggtgcgccgggctacaggtttcctccagggctgcaggaagcagcttctgctgaagcttgaatcgagaagtggcgtggtaacatcaccagggagaagttggattgttccgccgaagtgctcgatgacagatcatttcgctctaggtctaggcgctcttcttcttttgctgctaagtagcagctgtttcagttccgaccttgatgtccaatgcctgagagacgttaagcaatcagtgaccgatcctactggcatactaaaatcctcatgggttttcgataatacctctgtgggtttcatatgcaaatttcctggtgtggaatgctggcaccctgacgagaaccgagttctcgcattgcgtctcagcaactttggccttcagggcccattccctaaaggtctcaagaactgtaccagtatgactacactggacctgtcgagtaacagcttcacaggtgccattcctttagacatccagcagcaagtgccgttcttggcatctctggacctctcctacaacggtttctcaggcggaatcccagtgctcatttataacatcacgtacctaaacacccttaatcttcagcataaccagttgagtggtgaaattccagggcagttcagcgcccttgctcggttacaggagttcaatgttgctgacaaccagctgtcagggactatcccaagctctctacagagattcccggcatcaaacttcgctggtaatgacggactgtgtgggcctccattaggtgaatgccaagcctcagcgaagaagcaagagcactgcatcaatcatcggggctgttgttggcgtggtagtcgtcgtcattatcggtgcaatagttgtgttcttttgtctgcggagggtaccggccaagaaggcggcaaaggatgaggatgattaataagtgggcgaagagtatccaaggaaacaaaac

SEQ ID NO: 98613 - DNA, 779 bp, Zea mays
  Clone ID: MRT4577_21445C.1
ccgggaaaaaatatgtatacatgtatatgttactagccagttgttcaaaaaaaaaaaaaaaagatttaggtgacactatacccataagttgtctgagttattgtttggtccatcagtcgccttctatagcaccgaaagcaccccccgtattttgcggggggaaacggtgttctttcggggctacaggtacagaaccaatctcccctgtttaatttattttgttttggctaccataaccattctttttgtgtggcagattagcttattacctccatgggtaaaagaaagcggtcgttgtgtcaacaagataaccataatgattctctagccagcaaaataatgagaactagaatcccagatcttcctgaggtaccaaggcattaaattctgattattgcaagcatatgctcactgttactgcacatctaattacttgggattatgataggctacctgaatattacgatttataaacattgatattgtttagtgctatgatttggtcagtcatacatcattattgaattattccaactgaagcaatggctttacaatctcaatgtttatcttttatccactgcttgtgtgtgcaggacatttggtctcatgtacattccctaatgccaatgcgtgatgctggccgtgctgcttgcctatctcgtgccttttacgttcctggagacctcatcctaatcttatcttaataaggatacgattggcatgaaaaaaatttatatggagaagaatttcaccacaaaattagccgcattctcaggaat

SEQ ID NO: 98614 - DNA, 1889 bp, Zea mays
  Clone ID: MRT4577_21446C.1
gcgggacgggcaaatcgaggccggccgggacaacagtaccacgcgacgtcaaatacgggcacaactcgtgaacgacggcggcgcctagcggtgacatcgtcccctcgactcctcctccatccccgacgcggcggcgccagcctgcagattagcttattaccaccatgggtaaaagaaagcggtcgtcatgtcaacgagataaccataatgattctctagccagcaaaataatgagaactagaatcccagatcttcctgaggacatttggtctcatgtacattccctaatgccaatgcgtgatgctggccgtgctgcttgcctatctcgtgcctttttacgttcctggagacgtcatcctaatcttatctttaataaggatacgattggcatgaaaaaaaattcatatggagagaatttccaccacaaaattagccgcattctcaggaatcactctggcattagtttgaaaacattcaagcttgactacagtggcatgtgtgggttcgatggaactagttatcttgacagttggcttcaggctgctcttaatccagggattgaagaagtcaccctctggttgttccatacaaggagaatatatgaattcccatgctcacttttatctgatggggttcgaaattcacttcggtaccttaaacttcgttgttgtgctctccgtcccacagttgaacttgcccccatgagaagcctaacaagtttacatttgtcctttgtgagcattaaatggaatgggttaaagcgcctcctttccaactcccttgctctggaggaattagagctagtatgttgtgacaagatcgtttgcctcaagataccttctgccctgcagcgtctcaacagccttaatatttttggatgctcggccctcaaagtgctagagagcaaagctccaaatctctctagtctttctctttcagattttggaggcgggctagtcttctcacttgtgaaaacattgcaaatgaagaaactaatcactgaaagtactgtctatgatgctcgtaccaggctgccatccattatgcccaatcttgaaactcttgtcataaactcatttcatcaggttgttgatgcaccaatgctgcctaccaaattcctctgtcttaagcacctgaccgttcgcttgtcatcaggaacaaccattacccaggcatttgactatttctctttggtttctttccttgatgcgtctccttccttggagacttttatattaaatgtgagtgggaaaggcatgatccatgaatcgatttctgcacatccacaattgaggcacacacctgagcaccaccatggccacctcaggagtgtgaagatatgtggtttcagctctgagaaaagcttatttgaactaacacgttatattcttgagaatgcggtgtcactgaaatttcttacactggacaccttttatggggatcggtgtggtcagggtaagtgtacaagttgtttacccacgcctgatgtttttatggatgtttccaaagcgatctcaggtatcaagacatacatcgagaacaaagttccatccacagttaaactaactgttctggagccttgcagccggtgccatgttagaagagtaatttagacaccatcctagtcatgctacgtcacttccatttaatttaatttaatttgagaagaaccatgcttgtttcctggattatttatagctgtgtcccgatgcacagcaaatttaatctctgatgatggaccgtgcttgtgtttcctgaattaatacatgccaactgtttagttttgtagtatggcatgtggatttatttaagacaagttgacaaatcttgtgtattcggtccgatgctgatatgttaattgtagtgtggctgtgctgtggacttgagag

SEQ ID NO: 98615 - DNA, 362 bp, Zea mays
  Clone ID: MRT4577_21447C.1
aaaaaaaatgcttaaattccaattccaaaaaccaaaacaagagggttaaatttttacaagggggtctaacaggacttcctaaaacaaaaaacggggcattttgaacttcagggcattttttagaggcagaggaacttttgggcacacatttaaaattcatttttgggaaggttttttagcaaacagaagcacgggggattttctatcttccaaaggggggggaaccaccaggaacaccactggcgccactgccaccaaagcctggcctagcaccaaaaaggccaccggggccaaacccattaccaggtttagcccagggaggggcaaaacccccaccaaaggtagaacccccaaagccccca

SEQ ID NO: 98616 - DNA, 666 bp, Zea mays
  Clone ID: MRT4577_21448C.1
gcgtccggaacgcgggcttgcattagtgattcgaaggctgcagcctgcttacggccccaggcaaagtccttggctccgcgcaacattttcatgaaagggagacaccgctcggtggaccgtgagataaatctgttgaacgctgcgagtcttcctgtcaatcattggacatctcgggtcgactgaggtggagccatgtccattatggtctatatcttacttgggtttgcttctatgcctctatgggatactagatagccaagtatcttgccttgccgaatgtcgaatatgcacttttgggggtttaagcaaagtctggcttcacgcatgttggcgaatgtttctgtgaggtcttagagattgtcttctttattcttgcttgcgatgactatgtcatcgacgtaggtgaaattgttgcgacccatcttgctctctagaatgcttttggtagccttgagaaggtggagccgacgtttttaagccttcgggcattcgcacaaagcagtatgtgccgaagggtgttattaaacttgtctttgccttgtcctcctccttcatgtaaatctggtggtatcccgaaaaacaatcgagcagggacatgacttcgcatcctgccattgagtcgacaatattgtatattcttggtaggggggaaattgtcttttggcc

SEQ ID NO: 98617 - DNA, 311 bp, Zea mays
  Clone ID: MRT4577_21449C.1
aggggcaaacctgtctttacccttttttgcaaccctgaaaagcttggaaaatttttactccagtcccatgccttggacgcgctccccttataaccaaaaacacggtttggattacgtaacaaagggtgcgtatgttcactgcaccctggacagtacaaaatggctacgctagcacacaaaagcttcttttttgccaacacgattagcggcatcccccagggaaggcttacgagggattttccctacccgcctcgaaggagcccattttaccgggagcccattttttccaggatttccccactgtctttgct

SEQ ID NO: 98618 - DNA, 2226 bp, Zea mays
  Clone ID: MRT4577_2144C.1
atgaccacatcaagacctttggagttgcttcatatggatctcttcggacccgtcgcctatctaagcataggaggaagtaagtatggtcttgttatagttgatgacttttcccgcttcacttgggtattctttttgcaggataaatctgaaacccaagagaccctcaagcgcttcctaaggagagctcaaaatgagtttgagctcaaggtgaagaagataaggagcgacaacgggaccgagttcaagaaccttcaagtggaggagtaccttgaggaggaaggaatcaagcacgagttctccgctccctacacaccacagcaaaatgttgtggtagagaggaagaacatgacgctcattgacatggcaaggacgatgcttggagagttcaagacctccgagaggttttggtcggaagccgtgaacacggcttgccactccataaaccgggtctaccttcatcgcctcctcaagaagacttcgtatgagcttctaaccgataacaaacccaatgtttcatactttcgtgtatttgggagtaaatgctacattctagtgaagaaaggtagaaattctaagtttgctcccaaagttgtagaagggtttttgttaggttatgactcaaatacaaaggcgtatagggtcttcaacaaatcatcgggtttggttgaagtctctagcgacgttgtatttgatgagactaatggctctccaagagagcaagttgttgatcttgatgatgtagatgaagaagacattccaacggccgcaatacacaccatggcgattggagatcctttcagggtagaagaggccttgctagatccggactgggtgttggccatgctggaagagctcaacaacttcaagcgaaatgaagtttggacaccggtgccttgtcccaagcaaaacgttgtgggaaccaagtgggtgttccgcaacaaacaggacgagcacggggtggtgacaaggaacaaggcgagacttgtggcaaaaggttatgcccaagtcgcaggtttggactttgaggagacttttgctcctgtggctaggctagagtcaattcgtattttgttagcctatgccgctcaccattccttcaggttgttccaaatggatgtgaagagcgctttcctcaacgggccaatcaaggaggaggtgtacgtggagcaaccccctggcttcgaggatgaacggtaccccgaccacgttgggaaagccgatccaactttattcactaagacttgtgatggtgatctttttgtgtgccaaatttatgtcgatgacataatatttggttctactaaccaaaagtcttgtgaagagtttagcagggtgatgacgcaaaaattcaagatgtcaatgatgggagagttgaactacttccttgggttccaagtgaagcaactcaaggacggcactttcatctcccaaacgaagtacacgcaagatctgctaaagcggtttgggatgaaggacgtcaagcccgcaaagactccaatgggaactgacggacacaccgaccttaacaaaggaggtaagtccgttgatcaaaaggcataccggtctatgatagggtctttactttatttatgtgctagtagaccggatattatgcttagtgtatgcatgtgtgctagatttcaatccgatccaaaggagtgtcacttagtggctgtgaagcgaattcttagatatttagtcgctatgccttgcttcgggatctggtatccaaaggggtctacctttgacttgattggatattcagactccgactatgatggatgtaaggtcgataggaagagtacatcgaggacgtgccaattcttaggaaggtccctggtgtcgtggagttctaagaaacaaacctctgttgccctatccaccgctgaggccgagtacgttgccgcaggacagtgttgcgcacaactactttggatgaggcaaaccctcagggactttgtctacaatctgagcaaagtcccactcctatgtgataatgagagtgccatctgcatggcggataatcctgttgaacacagccgcactaagcacatagacatccggcatcactttctgagagatcaccagcaaaagggagatatcgaagtgtttcatgttagcaccgagaaccagctagccgatatctttaccaagcctctagatgagaagaccttttgcaggctgcgtagtgagcgaaatgtcttagattcgcaaaacttggattga

SEQ ID NO: 98619 - DNA, 423 bp, Zea mays
  Clone ID: MRT4577_21450C.1
cggacgcgtgggcggacgcgtgggcggacgcgtgggtttttgtggatgaagaaccagttgaagaaaacactccaaaagtattactgtccaagagaaagattatgtcaccgacgtctcaggagaagctttgcagtgctctgactggcattgatttgtgtgatggagttcaaagatttaagagcaaaatcattattgaagatcatgaaaacactccaaaatcattgttgcttatgagctttttgtttctgcagcagtgtgctactaatggttggaaagcggaacgaaacaatcaaacatcaggacaaagctctaaatttgtattgtcctttatggattggagataaagagatagagttttacagtcagttccacataattgtccttggtctagattcaattggtatgggaatataaattatgcgg

SEQ ID NO: 98620 - DNA, 1145 bp, Zea mays
  Clone ID: MRT4577_21451C.1
cccacgcgtccgcgcgctagctagctagctgttggcttgagatcgatccgtcgactaagctatagctagcagccatggggagggcgccgtgctgcgacaaggcgagcgtgaagaaggggccgtggtcgccggacgaggacgccaagctcaaggcctacatcgaggagcacggcaccggcggcaactggatcgcgctaccgcacaagattgggctgaagagatgcgggaaaagctgcaggctgagatggctcaattatctgaggcccaatattaagcatggtgacttcacagaagaagaggagcatatcatttgcagcctctacattagcattggaagcaggtggtccatcattgcagcgcagctgccggggcgaacggacaacgacatcaagaactactggaacaccaagctgaagaagaagctcctcggaaagcgcgcgccgtccaggcgcgcgaggacgaaccaggatccctgctacctcgccgcgggagccgccagcagcagcagcagcagcgccgcgacggccacgcaagccctaagcgcgtcggctctcgagcggatccagctccacatgcggctccaaggcatctacggcgcgttagcttgcaacgacgacagcaacgctgccttcgggtcggcggcggcggcgctgccgcagtggccgaagcttgaggcgctgtcgcaggccaacaggctgctcccggggtcgctgccggcggacgccatggccacaaccgtgagcgtgcagccgcacccacagcatctggtcgaggtcgaccaccaccagagcctcgccgccgccgcactcgagggcgagcaacagctcagctctgccggtgaaggaggctttttcgagcggcccaaggtagatttttactctccatcagccgaggtcgccgccgccgccgccgccagcgtagagatgaactcggtcgccccgatggttgttggcggctacgcgggcgccgccggattcgggcctcagcaccatcacgacgagctctacgactttctgtacagcaagtacggatcagtgggcgggctggcgcacgacggcgggcatgttccaacgttgccggagctgcagtgcccggacggcgctgccgccgtcgtcggagccgacgagaagttctcggcgtggacc

SEQ ID NO: 98621 - DNA, 1027 bp, Zea mays
  unsure (1)..(1027): unsure at all n locations
  Clone ID: MRT4577_21452C.1
aaagttttttacaaggattttccgtggcgtccaggaacagtgcaaactagaagaaacctccgtcatcagcgacctctccccaacggcgccgacgatggcgcaacagcagacgcagctaaccactggctcgggcatcctggatgccgtcccgctcttcgtcgtcatcctcctcgcggcccacgtcctggccctcgtgttctggatgtacaagctggcttccgagaagcaaccaccccggaggaagacacagtgacggcgccgatctacgccatcggcgatccttcgctagcctctttatcggttccattttcatgtgaaccagtaccctccagaacattcaggccgtcaattattcagagatatccatatagtctttcaatttgttttatttatacttattgcattttgggtattgtttgataacaacttagcgatattctatgaatcactatccgtttgggtgataaataaatgttcctagttttagaccatctccaaaaaaaaaaaaggcacctagtccctgatgaactacaatactacatggcagaatcatctttcttttttcttttttgggtttatggattaacggccacaccaagagaagcgattttacattggaatttgtgctctttgtcaaaacgtaaatctgacaagagcttttccagaattaataaagaagtagagttcggtcaagctcaaagagggaacaaaacaattggtggcaatgatggttatgtatgtgaattcctagtgttgtcaacgggttgggaaaaataaaagaattatttgtacaaaactaggtagaagtacaattgcttctgcttatggcagagacagtggttcagtcatgcttattaaatcaaagccagaaaactactgtaagtctgtaacaagctagtttagggttcactgcttagataatgcaagggataagatgaagtagatcttagccttggcttgtatacnaagcaccctggaccggagtataaagaaactgaaattttctgtctttggaggaacaaactgc

SEQ ID NO: 98622 - DNA, 250 bp, Zea mays
  Clone ID: MRT4577_21453C.1
cccacgcgttcgcccactcattttaccattcttcccaatagatgacctcaacgccaactgtcaaaattaacaggtgttgagcttcccgtctatatctgatactacctgctactatttacatattgatgtgaattcctctgctgaagaaacactgatcaacgttatgaacccatacacaataaccaaccatcgcaagctccacacaaaggctgatcacaaacatatcctttaagccatcaaactttatagc

SEQ ID NO: 98623 - DNA, 1293 bp, Zea mays
  unsure (1)..(1293): unsure at all n locations
  Clone ID: MRT4577_21454C.1
tgggtacctcgaggccggccgggaaaaaattcaaactgccgagcagcaaaccaaccagcccacccgccggttggtcacgctcctccccgatcccgaattcccgatctccggccgacgccatggcagccccctccgcggccgtcataggggtgctcgtcctcctcgtcgtgggggcctcgggcgcgcgcctcccaggccgcggcagcaccacccggggagctgcgctgccgcgcgggggagcgccggccacggcggtgttcgcgctgggaagcttctggcggtcggaggcggcgttcgggtgcctccacggcgtgatccgcacctccgtcggctacgctggcggctccaagtccaaccccgagtaccgcaacctcgccgaccacgccgagtgcgtcaaggttgagtatgatccccggttgattcactacaggcaacttttggatgtgttctgggcaagtcatgacccacgtgaggtgtttgggcaagggccagatgttggcaaccagtatagatctgtcatcttcactaatggaaccatcgaggccagattggctggtcttagcaaagaaaaagaacaagctaaagaccgtagcagcgttgttaccacacagatccaaccattgggggtctttcatcatgctgaaccagaacatcagaaatttgaactgaagcgtaaaccgttcctcttgcaattgattgggaatttgccggaggaggagctcctgacatcaacactagctgcaaaactgaatgcatatgccgctgagctctgccctgtgaatacccaaaagagaattaactccaagattgatgaggtcacaaagaaaggatggcccattttaagggacatttaactctttctagcttttggactgaaaccgatcgatgcaatgtagacacagaagaggtgcatgattttgcaaagaagatttttaggaatatttcagctgttcgccactgccatgatgacctcaatcatccattcttcattttgctcacaaagattatatagttggtcataacatgtcgttgtgttacgatatttgtaacgcatattcatggttcgaagcttactcaacagacaactttttttcgtattgtttgtttttcatttatgaaaatatagatgttttgtttttatttaataggtattgtgcatgttgtgactgatgttgtactagtaaattgctcgcgcaaagtactgttaaattgaagatcatgctaacatgtgtaccaactatttcgctgaaaaaaantataaaagcgctggacagtatacaagcttccggacgc

SEQ ID NO: 98624 - DNA, 493 bp, Zea mays
  Clone ID: MRT4577_21455C.1
catggttcgggtgatgagtgctgtatagactagcatggagacattccattaccattgcggtagatagcgaacatttctgacaaggccttctgaacaacattatcaacctcaatgctaatgcgatgggtgctggcaagactggcatggagacattctacaaattttgtaagtatcataaccattcccaccctttaatccgtgctcattatgaccctgatgcatgcggttggacattcggtatgaactcgcttgatctggtggaatggaggaccaagaacgacacaggcgtatatcattattggcagaagcgcaatgctgatcataccctatggaagctaggatctttaccacctggactccttgctttctatggctagtgtcaagcattcgatcccaaatggcatgttttggaacttggcacacaactgtagatcttgctactataaaggaaggagcactactgcactactgtggatatctggggccatggctc

SEQ ID NO: 98625 - DNA, 466 bp, Zea mays
  Clone ID: MRT4577_21456C.1
tcctctagattggccgcccttggaaggcctttttttatacttttattttctttaatcatggattcagtttttattgtctgccaataattttaaccctccttttccctgagccccggcggtatatccgcaaacctcttaagtccactccgagcgaaaaaaatgattttttttttagggatggtttaacacaatcgggctccccaaacgcgctacaaaaaaatttcccgggaaaaattggtccagagataaagttccacaaaaagtaccatcgggattaaaaaagaggaaaggtgggggcactaaaggaaggaggtaaacaaaataatggggggggggacaaaggggatttttaaaacaagaaaaatgggggcgcaagttaaataaaaaaatgggcaaaaaagggggggaaggggcttgttcaaaggggcgaaaagggggtttttttttccacagagaaaagggaaaa

SEQ ID NO: 98626 - DNA, 328 bp, Zea mays
  unsure (1)..(328): unsure at all n locations
  Clone ID: MRT4577_21457C.1
tgcagctagtacgtcggaattcggtcgagggnaagcaccacctttgctagtgcggtcaagagagcctgtgacaatttgacaatttgttccagaaccagtctgatgcacgtgcacctctaatatatgccttacaaactccagaggccatattcagaacatggtcttctcagtgtatgcaaggggctgcagccctcttctcttccttcgcaccctgaacaatacggacagttgtcgcacatatctacctgtatagacctctgtacctctcataactggtcaacgactgtaatttatacatcagtgtttttctacatacttttacacagat

SEQ ID NO: 98627 - DNA, 471 bp, Zea mays
  Clone ID: MRT4577_21458C.1
aaaaactgaagagtggcctacattgttcatatgctctcctcttatagataggacgaacagagaagaaagcttttcgattacttacttggctcgtccttttgtgagcggcattttcaatgcaaatagattcaatgtaatacattactttaagattaagtagtaggggtggcgtgacctgtgaatgatctgctttgttgaaaagttcccacaattcctaaaataaaaggaaaaatactttccactgtcctaaactaaggacggtaaggaagagggcgagcatatgctctaaattgatcatgctcaaatcatgcccttattgtggttcctagggtattgtctgctccgaaaaatacaaactgtccggaatactataaaatagaaatattatagtaaataggagcgaagaaaagtattgatatacgtagaattacataagcagatgccaatgtgccagagtgaagcaatgaccag

SEQ ID NO: 98628 - DNA, 1452 bp, Zea mays
  Clone ID: MRT4577_21459C.1
gccggccggttcgggagattcagtctcgtcttgctcgctcacgcagttggcactcgtcgcggcagtcggcgctgtcccctcccctcccgtcccctcccgccggtcgctgcagtcggcgcccaacccgtccatccgtccgccagagcacatctcacgctgcgggtcgaacagcccgtccgtcaatcaggtttcaggccgacggcggcacgatggcctgccccgccgccaccgccaccacggctcgcatcggggcgcggagaggaccgtgcctgtggaggagcgagaggagggccagcttcctcgtccgttccacgtccctgctcccggaccgcccggtccgggacacgagggcgcgcgccgcctcggagctgcagcaagcgcctcgaccagcctccgctaccgtccccgctcacaaggtcaccgtccacgaccgccagcgcggggtcatccacgaattcatcgtgcccgaggaccagtacattctgcacacggcggaggcgcaggacatcaggctgccgttcgcgtgccgccacggttgctgcacaagctgtgcagtccgaataaaatcaggacagataaggcagcctgaagcacttgggatatctgcagaactaaaagataagggctatgctttgttgtgtgttggtttcccatctggcgatgttgaagtcgagactcaagatgaagatgaggtatattggctccaattcgggagatactttgcacgagggccagtggaaagagatgattacgcgctagaacttgcaatgggagacgaatgagctgtgcctaagagaccttgccatctaaaatttgaataccatctcaaatttggacccatgtagttctgagtatgccggttatctttttgtggctccaaatctcactctcagccttctttccttcggctgttagcgtttagagtgacaaggacacttcctgagaggaggaataaagttctgctctgctctctattttccaggttgcccccttcccgcctttccttgttcggttgtcacttagcagcctggtgcgtggctgcgtgcagttctcgtttctcctctaatagatggcacacgttatgaagtgtgtaaaggtgtcaaaatccaaaaacatccagcattcacaatctttgtcgtgatgaagtgtgtaaacttgtaaaaaaatatccaaaaaattcacgatgtttttcatggtaaagattttggataattttttacaagtttacacacttcatcacgacaaagattgtgaatgctggatgtaaacttgtaaaaaattatcccagccgacgagaagacatctcacgtgatgggggcagcgcatgagaaatggagggaggccaatcacaaggcgtccgacgccggcgaccgcaccatgggtgatgggccacgactccatggacgctaccagcgacaaggcgcgcgccgccgctgaccgaaccatggggat

SEQ ID NO: 98629 - DNA, 4296 bp, Zea mays
  Clone ID: MRT4577_2145C.1
atggatcctaagggcaaggggatggtggtcaatgataaggaggagtccttcgtcaacgatccaaaagatgacaagcctactaactcgggctcgagccacaaaagaaaagacgggacgaagaagaaaacaaggcgcatcaaggagatcgtctactacgacgacagcgacgagtcctcttcttcccaaaaggacaacgacgacaacgactacgagaaaaagaagacagttaactctaatttttctttcgattactctcgtattcctcaaagtaccattgctcatttactctccattccacttgcatcattgtgcagggatgaataccataaggtgagcggcttgggtaacgccaagcagatctgggacaccctcaagatctcgcatgaggggaacgacgtcaccatgctcaccaagatggagttggtggaaggagaactaggaaggtccttcactgtccttgatccacatcttgtaaacaatattcgtgagaatcctaggtacaccaagatgacgcccgaggaaatacttgggaagttcgtaagcggacggatgatgatcaaggaggcaagatacgttgatgatgcgttgaatggcccaatccacgagcctcaaatcgttgctctcaaagcaacgaggggcaaggaagtgctacctagcaaggtggcacaagttgaggcggcggggctcaatgaggaagagatggccctcatcatcaagcgtttcaagacggcgctaaggggtcgcaaggagcatcccaacaaaagcaagacaaagggaaagcgctcctgcttcaagtgtggtaagattggtcattttatcgctaattgtcccgataatgatagtgaccaggaacaagagaagaagagggaaaagaagaagaattacaagaaggctaagggcgaggcacatcttggcaaggagtgggactcggattgctcgtcgtccgactccgacaacgaaggactcaccgcctcggccttcaacaaatcgtccctcttccccaacgagcatcacacatgcctcatggcaaaggagaagaaggtatgtactcgaaacaatactacttatgcttcttcaagtgaagatgaatctagtgatgatgaaatagactatgcatatttgttcaagggcttagatcgaactaagattgataaaatcaatgaattgattgatgccttgaatgataagaatagattgctagaaaagcaagaggatcttttgtatgaagaacatgataaagttgtagaggcacaaaaatctcttgctttagaagtcaaaaggaatgaaattctttcttgtgaactatctacttgccatgagaccatttctagtttaaaaagtattaatgatgacttgaatgctaaactagaaatagctaataaatcaacctcttgtgtagatcatgttgtaatttgcaataggtgtaaagactttaatgttgatgcttgtagtgaacacctagtttgcatttctaaattaagtgatgaagtggctagtcttaatgcccaacttaagactagcaaaagtgaatttgataaactaaaatttgcaagggatgcctacacgattggtagacacccctcaattaaggatgggcttggctttaagagggaagccaagagcttaacaagtcataaggctcccatctccgccaaggagaaagggaaggctcctatgactaatagtagtcaaaagaatcatgctttcatttatggtgataagagatattttagaaatgttcataggagttgtaatgattcaaatgctatgtttgcttcaagttcttcctatatgcatggtagagatatgcctaggagaaatgttcatgttcctaggaaaattaatgaaccttctacaatttatcatgcttgcaatgcttcctttgcaatttgtagaaaggataagaaggtttatgcatccgggggatcaagctggattatcgacagcggatgcacaaaccacatgacgggggagaagaagatgttcacctcctacgtcaagaacaaggattcccaagagtcaatcatattcggtgatgggaatcaaggcaaggtcaaaggactagggaagattgccatttcatccgagcactctatttctaatgtgtttttagttgagtcacttggatataacttattgtctgtaagtcagctttgtaatatgggatataattgcttattcacaaatgtagatgtgtctgtctttagaaggagtgatggttcattagcttttaagggtgtattagacggtaaactctacttagttgattttgcaaaagaggaggccggtctagatgcatgcttaattgctaagactagcatgggctggctgtggcatcgccgcttagcacatgtggggatgaagaaccttcacaaacttctaaagggagaacatgtaataggtctaacaaatgtaaccttcgaaaaagacagaccttgtgcagcttgtcaagcaggcaaacaggtgggaagctctcatcataccaaaaatgtgatgaccacatcaagaactttggagttgcttcatatggacctcttcggacccgtcgcctatctaagcataggaggaagtaagtatggtcttgttatagttgatgatttttcccgcttcacttgggtattctttttgcaggataaatctaaaacccaagggaccctcaagcgctttctaaagagagctcaaaatgagtttaagctcaagaaaaacggtgtggtagagaggaagaacaggacgctcatagacatggcgaggacaatgcttggagaattcaagacacccgagcggttttggtcggaagccatgaacacggcttgccacgccataaaccgggtgtaccttcatcgcctcctcaagaagacttcgtatgagcttctaaccggtaacaaacccaatgtttcgtactttcgtgtatttgggagcaaatgttacattctagtaaagaaaggtagaaattctaagtttgctcccaaagctgtagaagggtttttgttaggttatgactcaaatacaaaggcgtatagggtcttcaacaaatcatcgggtttggttgaagtctctagcgacgttgtatttgatgagactaatggctctccaagggagcaagttgttgatcttgatgatgtagatgaagaagaagttccaacggccactatacacaccatggcgattgtagaagtgaggccacaggaacaaaaggagcaagatcaaccttcttcctcaacaatggtgcatcccccaactcaagacgatgaacaggaagagctcaataacttcaagagaaatgaagtttggacaatggtgcctcgtcctaagcaaaacgttgtgggaaccaagtgggtgttccacaacaaacaggacgagcacggagtggtgacaaggaacaaggctcgacttgtggcaaaaggttatgcccaagtcacaggtttggactttgaggagacttttgctcctgtagctatgctagagtcaattcgcatgttgttagcctatgctactcaccattctttcagattgttccaaatggatgtgaagagcgctttcctaaacgggccaatcaaggaggaggtgtacgtggagcaaccccctggcttggaggatgaacggtaccccgaccacgtgtgtaagctctctaaggcactctatggacttaagcaagccccaagagcatggtatgaatgccttagagactttttaattgctaatgctttcaaggttggaaaagccgatccaactttattcactaagacttgtgatggtgatctttttgtgtgccaaatttatgtcgatgacataatatttggttctactaaccaaaagtcttgtgaagagtttagcagggtaatgactcagaaattcgagatgtcgatgatgggcgagttgaactacttccttaggttccaagtgaagcaactcaaggacgccaccttcatctcccaaacgaagtacacacaagacttgctaaagcggtttggaatgaaggacgccaagcccgcaaagacaccaatgggaaccgacggacatgtcgacctcaacaaaggaggtaagtccgttgatcaaaaggcatatcggtctatgatagggtctttactttatttatgtgctagtagaccggatattatgcttagcgtatgcatgtgtgctagatttcaatctgatccaaaggaatgtcacttagtggctgtgaagcgaattcttagatatttagtcgctacgccttgcttcgggatctggtatccaaaggggtctacctttgacttgattggatattcagactccgactatgctggatgtaagtga

SEQ ID NO: 98630 - DNA, 1060 bp, Zea mays
  Clone ID: MRT4577_21460C.1
ttctcgctcacgcagtcggcactcgtcgcggcagtcggcgctgtcccctcccctcccgtcccctcccgccggtcgctgcagtcggcgcccaacccgtccatccgtccgccagagcacatctcacgctgcgggtcgaacagcccgtccgtcaatcaggtttcaggccgacggcggcacgatggcctgccccgccgtcaccgccaccacggctcgcatcggggcgcggagaggaccgtgcctgtggaggagcgagaggagggccagcttcctcgtccgttccacgtgcctgctcccggaccgcccggtccgggacacgagggcgcgcgccgcctcggagctgcagcaagcgcctcgaccagcctccgctaccgtccccgctcacaaggtcaccgtccacgaccgccagcgcggggtcatccacgaattcatcgtgcccgaggaccagtacattctgcacacggcggaggcgcaggacatcaggctgccgttcgcgtgccgccacggtttatgcatccgggggctcaagttggatactcgacagcgggtgcacaaaccatatgactggggagaaaagaatgttctcctcatatgagaaaaaccaagatccccaacgagctatcacattcggggatggaaatcaaggtttggtcaaaggacttggttgctgcacaagctgtgcagtccgaataaaatcaggacagataaggcagcctgaagcacttgggatatctgcagaactaaaagataagggctatgctttgttgtgtgttggtttcccatctggcgatgttgaggtcgagactcaagatgaagatgaggtatattggctccaatcaggacagataaggcagcctgaagcacttgggatatctgcagaactaaaagataagggctatgctttgttgtgtgttggtttcccatctggcgatgttgaagtcgagactcaagatgaagatgaggtatattggctccaattcgggagatactttgcacgagggccagtggaaagagatgattacgcgctagaacttgcaatgggagacgaatgagctgtgcctaa

SEQ ID NO: 98631 - DNA, 270 bp, Zea mays
  Clone ID: MRT4577_21461C.1
gtcatcaattattagatcaagaggcgagtaccatatgtgtaacacgtacttctttagcagactagaagccatagcaacaaagaaggacaagatcactgatgttctgaaattgagaagatggtggaagggtgtagatatatttcgaacggcatatatattgatgcctgtgcatgcagaaacacattggagcctcatcataatatgcatgccaacaaaagaagatcacatcggtcccatcatacttcagttggactcactgaagtttcatag

SEQ ID NO: 98632 - DNA, 318 bp, Zea mays
  Clone ID: MRT4577_21462C.1
tggcattgtcttgtttggtatcagggactgagtgcaacatttagtgggcttctcatcgtgaataccactgtgtgctggaaattgatagtttcatattcttggcacatgttctgtggattagataatctcttggatgaagatttgtgtgtctccgcactctacagatgtcttatgtccttttaattagttcatattatcagattgagtgaatgaggttctagttagacaactgcggccaactttctgaaatgtcttggaagtcaaggatgaatttgtgtattaaggtgaaaatttgagaggaagagaagtttacatgtg

SEQ ID NO: 98633 - DNA, 826 bp, Zea mays
  Clone ID: MRT4577_21463C.1
attcggctcgagctactacatccatgatgaaaagtctacgtacaaccacgcgttgaagcgcccgtggggtaccatctagggctggacgaaatactcgtggctcgctggctcgctcggttcgtggtcagctcggctcggatcggatcggctcgtttaaattttttcacgagctgagctaacatcctagctcggttcgttaatgagccagctcggttcgttaacgagccagctcgcgagctaaacgagctaccatattccagcaaaacgaaactatatgcatatcatttacaaaataattgatgaacatgttatatatatgtgaggtgtctatagcctatgaattaaactaatgattaatgaactatgtctatgtgttaatttggtttatgcaaatataattatgggttaaactgatgaacatgtatgtgaattgtgaattaatgagtgatgaattgtgctaatttggtgttatattgacatggtttgtgaaactatgagtataattactattttctactgttaaattagtttgaaattaactaaaaaataattattatatacattttatttttttctgctctggctcgcgagctaaacgagccagctcgagctcgtaaacgagccgagccgagctgactctgtggctcgttaccttaacgagccgagccgagctggctcgttagcttaacgagccagctcgaactcggacgagccgagccgagctggctcgttatgcacccctagggtagatacagagctactaatatactaccatagcattcatagaaaattaagctagagatagattgattgattgatagattga

SEQ ID NO: 98634 - DNA, 595 bp, Zea mays
  Clone ID: MRT4577_21464C.1
tccaaacagagcaccattggctgtttttcagagtttcagctctgaaccactaagtccccaatacactgacagttcatttttaggcaagctttactccaaattttgcatgggatcatgtcaagatcacttaaggaaagtgattcaccaacatatggtcttcaatacctttatggatctcttagcccaaatacttagggattagtcacaaacaagcgcccaaaactgctatcaaacactaacttcaggttcagttactgttgtaagtctgaaaactcagaaatctgccaatcaatctttggactatcttttctaccagtagaatatagctttggggctatatcacttaataagaattgttcttctatcatttctctacgagtttggtatagtgttcattaaccacaaccccctggattccaaaatatcaaggcccaaagttggatccaaatactgaaattcagcctctgaaatctactaagtctgaaatccagaaactctgttagctctactttggactaattttactccaagttccatataactttagagataggtgacttaacaaaacttgtactcctcatgtggccctataaat

SEQ ID NO: 98635 - DNA, 423 bp, Zea mays
  Clone ID: MRT4577_21465C.1
cggactcgtggacagactcgtgtgctccgactcgcgcacccggttccgcgtgcatttgggcacggactatctcggctctcgccagccaatctagggtttcggtcccagcgtgcttatccgcccacaccggacatgtctaatcaaggaggtaaagccaatccgctaaaagcgcccaatgccgacaataatgagtacgacgagacagatcttgcatatctgcagacgaagaatgaccaggataaagcactgaacgatctcaaggccaatgcacaaaaggtcgcgattggatgctcgggtctgaagaaaagtggaaagaaatgagactggtcacccgtctccattacctataggatgatccagcaactgtctatctgtgatgcgcttcactacgtgtgattgtaacaatggtacctattgtgttct

SEQ ID NO: 98636 - DNA, 260 bp, Zea mays
  unsure (1)..(260): unsure at all n locations
  Clone ID: MRT4577_21466C.1
atcccaaacgcccaaaccaaatccaagcgcaagatggggcgaagccgcagaggggggggcggccaggggccnncanccattacttactgggcctcactcccacaccaaccaaccaacctgctctgcctgccgcgtctcctgctgcgggcgggcactgcggcaactgctanagggggacatccgcgtccattactgcgcctgcggaggggcgggggaaccantgncgggggcgtcnattttcggcgggcgcgataaatttc

SEQ ID NO: 98637 - DNA, 271 bp, Zea mays
  Clone ID: MRT4577_21467C.1
ctcgctgcctccattcttcactaaccggcactgtgagagaggggcgcggccccttgtacccagatagtgggaattccttcagcggtttcggacctgggccccgctgtcctccatggaccgcaacgtcgccatggaaaacgtcgaccacgacgccttgagatgcgactatgcagtccgtggccagatctacatgaatgctcagggcgtgctgctacaactaccaacacaaccatggaccgttgagtttgacgagagcctggtccgcaacatt

SEQ ID NO: 98638 - DNA, 4263 bp, Zea mays
  Clone ID: MRT4577_21468C.1
atgaccgacgccaccactcctgcccccgctgtgattgtcgccccctatgcgacgatcaatgtcaagaaccacatcccggtgactcttgaactggcaaaacccaacttcaaccagtgggaaccattcttcacctctctctgtggaaaattcgctctcctctcgcatatcgacggactgcaggaagcccgtcccacagatccttcttggggcatcgccgatgcctgcgtccgcagctggcttctcggctcggctgggcccgacgtcatcggcctcgccgcggctccaaaccagactgtgcgcgagctctgggtcgccatcaagcgcctcttcgaggccaacaaggctccacgcgccatcttcctaagccacgagtttcactcgatgactcagggcgactcctccatcaatgactatgcccagcgtatgaaggccaccgccgacgcgctccgtgatgtcggtcacaccatcaccgacgcggagctcgtcctcaacctcctccgcggcctcaacccacgtttcgccagcaccgccgacaacattgccgactcccacccgctgccggacttcgccaccactcgcgagaagctcgtgctgaaggaactctgcctcgccaatgaaggcacggttgcggcccagacggcactccacgcatcgtgcggtaccaactgccgcaccaccccaccaccaacggtggcggctccactgccagtagacagggcggtcacggcagtagctccagcagcggcggcaacccagccctggcgcccgccggcgccaacccctgcctggcgcagtcctggcatcctcgaccccttcactcaggctcaggcgcacactgcgctcgcccctgttcagtcccccgacaaccctgctccacctatggcagcgcagggcggttgggatcaggctggcctcatcgccgcactgaatcagatgtccctccaggggtcctccccttgggtcctcgacactggcaccacagctcacatgtcttcttcggctggtatactcctgtcccacctcccccctccttcattcggcatcaccgttggaaatggcaccaccatacccatcacctgccgtggcacatctacactatcctcccccacctctacctatcgtcttaacaatgttctagttgcacctacacttgtgcgcaatcttttatctgttcgtcaattcactcgtgacaactcttgttcaattgaatttgacgcttatggtttttctgtcaaggacaaacagacggggcacgtgactcttcgctgcaatagtggtggcgacctctacacctacccctccaccacaactccctcctgcagcctcgccaccacgtcgtctctgtggcatcatcgcctcggccaccctggtccctccagcctcgccaaacttcgaagcatgtcggtcatttccttcaataaaagctcgccatgcctctgccatgcctgtcaacttggcaagcatgtgtgccttccatttagtcactcgacatctgttactcatgctccgcttgatttacttcactgcgatgtatggacatctcccgtgctaagcaattctgggttcaagtattaccttattatactcgatgattattcccattactgctggtccttcccacttcgtcacaaatctgaggtgcaccgccacatgattgaattcattgcatacgctcagacccagtttagtaccacacctaaatccttccaagccgataatgggaccgagtttgtcaaccgctccaccacttccttccttgctagccacggcatcactctccgcctttcctgcccctatacctcaccacaaaacggcaaggccgaacgcatgctccgcactaccaacaacaccatccgcaccatgctgctccatgcgtccatgccacctccatactgggctgaagccctcacaacagcaacatacctcctcaataggcgcccctcctcctccatacaaaaccaaataccttaccaaattcttcacggcatactccctgattacgcttcccttcgcatcttcggatgcctctgctatccgaacctcactgccacctcccctcacaaactcgcccctcaatccactccttgtgtcttcctcggatacccatcctctcacaagggctatcgctgccttgacatgtccactcgccgcatcattatctcgcgccatgttatttttgatgagtccgtgttcccattctcggctgcaccatcggcggcctccatgccgtcgtcacttgattttctgatgcaggacctcacctcctcgacggctcctgcaaacacccatccgtcgctcgctgccagcagcgaggatgatctccaggtgttcctggacccggccatacttcagctcggcccccgggttcaccctgcgggcgggccacaactgggcgctcatgggccccaagtggggcagccggcggctcccccgactgatggtcagcgctccggcaacacctacacccgccgcgcccagcctccagcagcaccggtcaccgcagaggtggcccctgtggctgctgcaccttcagcgccaacagcagctgcaccaactttgccaccagcggctccagcagctcggctcctctctactgcagcgaaccggcctgtgacacgctcacagaccggctcccttcgccctgtccagcgcttcggcttctccgcctccgtcgcctcgccaatcccggcgaactatcgcagtgccctggccgatctaaattggcgtgctgcgatggcggacgatgcgaacattgtcactggcaagtggctgttcaaacacaagctccactccgacggctccctcgcccggcacaaggcacgctgggtcgttcgtggcttctcccaggaggaaggcgtcgactacgacgaaacattcagcccggtcgtcaagccggccacgatccgcaccgtcctcagcattgctgcgtcccgagactggcccatccggcagctcgacgtgaagaatgccttcctccacggcaacctcgaggagactgtctactgcgagcagccgaaaggattcatcgaccccgctgcacctaactctgtctgtctgttgcagaagtccctgtatgggcttaagcaggcaccacgcgcttggaatcagcgcttctccagcttcattcgcagtattggcttcaccacctccaaaacggatgcctccttgttcatctacaagaatggagacgccatggcctacctcctcctctacgttgacgacatcatcatcactgcatcatcgtcggctcttcagcacgtcacctcccgcctatcgtcggaatttgccatgacggacctcggggatcttcaccacttcctcggcatctcgacgggacagcagtgggctgttcctctcccagcggcattgtctgcctccgagggcgctccagtcgccaacccctcggaataccggagcctcgctggtgctctccagtacctcactctgaccaggccggacctggcctatgctgtccagcaagtctgcctcttcatgcacgaccctcgcgagccgcatcgtgcgctaatcaagcgcatcctgcgctatgtcaagggctccctgtccgcaggtctgcacttgggacctggcgccgttgatcagctcacagcctactctgatgccgactgggccggctgccccgacacgcgtcgctccacctccggcttctgcgtctacctcggcgacaatctggtgtcatggtcgtccaaacgtcagacgactgtctctcgctccagcgccgaagcagagtaccgtgctgtggcccatgctgttgctgagtgctgctggctgcgtcagcttctacatgagctgcacatcttcatcccgcgtgcgaccgtggtctactgtgacaatgtgagcgttgtgtacatggcagccaacccagtccatcaccgccgcacgaagcacatcgaaatcgacattcacttcgtccgtgagaaggtagctttggggcagttccgtgttcttcatgttccgtctacacaccagttcgccgacatcatgaccaagggactgcccgtacagctcttcactgaatttcggaacagtctttgcgtccgtgatcctcccgctcagactgcgggcgggtattaggatatgtatctatcaggatcaatcagagcctgattagcaattgattgtaatcccctagattggctagctgccttgtatagactaggattaccttctatctatagcctaggtctgtttccttgtacagggaatagccttccttacatgtaccttccatgcatgcctattggc

SEQ ID NO: 98639 - DNA, 247 bp, Zea mays
  Clone ID: MRT4577_21469C.1
ggaattcggcttcggcttcgccgtcgaagcgcacggtgatgtggcccagttcgcgcagattctgcgtggcgacgctgccgacggcggtgatggcgtagcgctgctgcgccagctccatcacgccgccgacctgcagctcgccggcggtcgcaccgtggcggtggatgaagcagaactcttcgatatccgccggcgcaccttcacggaaagtgatcagcatgttgtccagcaacgcgtcgcgggcgca

SEQ ID NO: 98640 - DNA, 5337 bp, Zea mays
  Clone ID: MRT4577_2146C.1
atggatcctaagggcaaggggatggtggtcaatgataaggagaaggagtcattatttgtcaatgatccaaaggaggacaagcctactgactcgggctcgagccacaaaagaaaagatgggaggaagaagaaaacaaggcgtatcaaagagatagtctactacgacagcgacgaatcctcttcttcccaaaaggacgacgacaacgtctacgagaataagaagacagttaattcatacttctcttttgattattctcatattcctcaaactaccaatgctcatttactctccattccacttgcctcattgtgcagggacgagtaccataaggtgagcggcttggacaatgccaagcagatctgggacaccctcaagatctcacatgaggggaacgacgtcaccatgctcaccaagatggagttggtggaaggcgaactcggaagattcgcgatgataagaggggaggagccaacccagacgtacaacaggctcaagacccttgtcaacaagataaggagctatggaagcacgcgatggacggaccacgacgtcgtccgcctaatgctaaggtcctttactgtacttgatccacatctggtaaacaatattcgtgaaaatcctaggtacaccaagatgtcgcccgaagaaattcttgggaaatttgtaagcgggcggatgatgattaaggaggcgagatacatagatgatgcgttgaatggcccaatccacgagcctcaaatcgttgctctcaaagcaacaaggagcaaggaggcgctacctagcaaggtggcgcaagttgaggcggccgggcttaatgaggaagaaatggccctcattatcaagcggttcaagacggcgctaaagggtcgcaaggagcaccccaacaagaacaagacgaaggggaagcgctcctgcttcaagtgtggtaagattggtcattttatcactaattgccccgataatgatagtgaccaggaaaagaagagtggaaagtgggaaaagaagaagaactacaagaaggcgaagggcgaggcacatcttggaaaggagtgggattcggattgctcctcgttcgactccgacaacgaaggactcgccgccaccgccttcaacaagtcatccctcttccccaacgagcatcacacatgcctcatggcaaaggagaagaaggtatgtactcgaaacaatattacttatgcttcttcaagcgaggatgagtctagtgatgatgatgaaatagactattcatgcttattcaagggattagatagaactaagattgataagattaatgaattgattgatgctttgaatgataagaatagattactagaaaaacaagaggaccttttatatgaagagcatgataaatttgttagtgcacaaaattctcttgctctagaagttaaaaggaatgaaatgctttcttgtgaactatctacttgtcatgaaaccatttctactttaaaaggtgttaatgatgatttaaatgctaaactagaagtagcaaataaatctaactcttgtgtagaacatgttatgatttgcaataggtgcaaagattttaatgttgatgcttgtagtgaacacctagtttgcatttctaaattaaataatgaagtggctagtcttaatgcccaacttaagtctagcaagagtgaatttgacaagctaaaatttgcaagggatgcctacacgattggtagacacccctcaattaaggatggtcttggcttcaagagggaagtcaagaacttaacaagccataaggcttccatctccgccaaggagaaagggaaggcccctatggctagtaatgctcaaaagaaccatgccttcatgtatcacgataggaaacattctagaaatggttatagaagttatgatgctcttgattctcatgccatggttgtttctagttcttctattatgcatgatagaaatttagcttggagaaatgttattaatcacatgcctagaagaaatgttgttcatgtttctaggaaaataataaatgaaccttctacaatttatcatgcttgcaatgcttcatttgcgatttatagaaaggataggaaagtgattgctaggaaactaggggcaaaatgcaagggagataaaacttgcatttgggtccctaaagatattatcactaaccttgtaggacccaacaagagttgggtttatgcatccgggggatcaagctggattatcgacagtggatgcacaaaccacatgacgggggagaagaagatgttcacctcctatgtcaagaataaagattcccaagattcaattatatttggtgacgggaatcaaggcaaggttaaaggcttaggcaagattgcaatctcaaatgagcactctatttctaatgtattcttagtagagtcacttggatataatttgttatccgtaagtcaattatgtaatatgggatataattgtctattgacaaatgtagatgtgtctgtctttagaagaagtgatggttcattagcttttaagggtgtattagacgacaaactctatttagttgattttgcaaaagaggaggtcggtctagatgcatgcttaattgctaagactagcatgggctggctgtggcatcgccgcttagcacatgtggggatgaagaaccttcacaagcttctaaagggagaacacgtgataggtctaactaatgttactttcgaaaaagatagaccttgtgcagcttgtcaagcagggaaacaagtgggaagctctcatcgtgccaaaaatgtgatgacaacatcaagacccctggagttacttcatatggacctcttcggacccgtcgcctatctaagcataggaggaagtaagtatggtcttgttatagttgatgatttttcccgcttcacttgggtattctttttgcaggataaatctgaaacccaagggaccctcaagcgcttcctaaggagagctcaaaatgagtttgagctcaaggtgaagaagataaggagcgacaatgggtccgaattcaagaaccttcaagtggaggagtatcttgaggaggaaggaatcaagcacgagttctccgctccctacacaccacagcaaaatggtgtggtagagaggaagaacaggacgcttatagacatggcaaggacgatgcttggagagttcaagacccccgagcgcttttggtcggaagtcgtgaacacggcttgccacaccatcaaccgggtctaccttcatcgcctcctcaagaagacttcgtatgagctactaaccggtaacaaacccaatgtttcgtatttccgagtttttggtagtaaatgctacattctagtgaagaagggtaggaattccaaatttgctcccaaagccgtagaagggtttttgttaggttatgactcaaatacaaaggcgtatagggtcttcaacaaatcattgggtttggttgaagtctctagcgacgttgtatttgatgagactaatggctctccaaaggagcaagttgttgaccttgatgatgtagatgaagaagacgttccaacagccgcaatacgcaccatggcgattggagatgtgcggccacaggaacaaaatgagcgagatcaaccttcttcctcaacaatggtgcatcctccaactcaagacgatgaacaggttcatcaagaggaggcgtatgatcaagggggagcacaagatgatcatgtaatggaggaagaagcacaaccggcacctccaactcaagtccgagcgatgattcaaagggatcatcccgtcgaccagattttgggtgacattagcaagggagtaactactcggtctcgattagttaatttttgtgagcattactcttttgtctcttccattgagcctttcagggaggagctcaacaacttcaagagaaatgaagtttggacactggtgcctcgtcccaagcaaaatgttgtgggaaccaagtgggtgttccgcaacaaacaagacgagcacggggtggggacaaggaacaaggcacgacttgtggcaaaaggttatgcccaagtcgcaggtttggactttgaggagacttttgctcctgtggctaggctagagtccattcgtattttgctagcatatgccgctcaccattctttcaggttgttccaaatggatgtgaagagcgctttcctcaacgggccaatcaaggaggaggtgtacgtggagcaaccccctggcttcgaggatgaacagtaccccgaccacatctgtaagctctctaaggcactctatggacttaagcaagccccaagagcatggtatgaatgccttagagactttttaattgctaatactttcaaggttggcaaagccgatccaactctttttactaagacatgtgatggtgatctttttgtgtgccaaatttatgtcgatgatataatatttggttctactaaccaaaagtcatgtgaagagtttagcagggtgatgactcaaaagtttgagatgtcgatgatgggcgagttaagctatttccttgggttccaagtgaggcaactcaaggatgggactttcatctcccaaacgaagtacacacaagacttgatcaagcggtttgggatgaaggacgccaagcccgcaaagactccaatgggaaccgacggacacaccgacctcaacaaaggaggtaagtccgttgatcaaaaggcataccaatctatgctagtgtctttactttatctatgtgctagtagaccagacattatgcttagcgtatgcatgtgtgctagatttcaatccgatccaagggagtgtcacttagtggctgtgaagcgaattcttagatatttagtcgctacgccttgcttcgggatctggtatccaaaggggtctacctttgacttgattggatattcagactccaactatgctggatgtaaggtcgataggaagagtacatcggggacgtgccaattcttaggaaggtccctggtgtcatggagttctaagaaacaaactttcgttgccctatccaccgctgaggccgagtatgtttccgcaggacagtgttgcgcgcaactactttggatgaggcaaaccctcagggactttggctacaatctgagcaaagtcccactcctatgtgataatgagagtgctatccgcatggtggataatcctgttgaacacagccgcacaaagcacattgacatccggcatcactttttgagagaccaccagcaaaagggagatatcgaagtgtttcatgttagcaccgagaaccagctagccgatatctttactaagcctctagatgagtcgaccttttgcaggctgcgtagtgagctaaatgtcttagattcgcggaacttggattga

SEQ ID NO: 98641 - DNA, 376 bp, Zea mays
  unsure (1)..(376): unsure at all n locations
  Clone ID: MRT4577_21470C.1
gctttcttatttctgggctgcctctttcctcgggcccccnccttctttcttgggctctctctcctggtgtgtctcctggtggcctcctcccntgctgggttgttggtnggcccctgctgggtttgtccctgcccgttggttgactggccgcgcttgttgctgttgtccgtgggtgccagcgtttggcgcctcgtgctggttgaacggctcctcctgcggttgtgtcgtgagggttgctgggctctcaccctctggctggctgcntggtcgtagttgttgctgctgtgcttcgcgggagcgttctctgctgctggttggttgactggttcacgttgctgggggtgggcggcgggttgctggctgcttggtcgttgtt

SEQ ID NO: 98642 - DNA, 436 bp, Zea mays
  Clone ID: MRT4577_21471C.1
tcgatcacttctacatctctcggtcgcttctcacatactcaccaagcgtcttcaccaatggcttacgaccactatgtggactactgctcggatgacgtgaggtccgtggccccggccggcttcggccgccacggaggcggcgtccagcaacacgtcgtcaaggagaagttcgaggaggttgacacggtcttacgcgcctgctcctaccaccaccaccaccaccatggtcaccactgcggccaccgcttcttggtgcgcgagaccagggtctatgaggacatcaacacctgctccgtcgaggtccacgatcgcatggagagcttcctcgccagggcttactgagccgccctgcggacggcatccacgcccgttcgtgcctgcctgcgtgccttatgtatgcccgcggttgactggttttacaaggtcatcgtacttg

SEQ ID NO: 98643 - DNA, 301 bp, Zea mays
  Clone ID: MRT4577_21472C.1
gcgaaaggcatatgcatagcgttggaataaatgtttgggaaaaaaaaagaagtttgccggaaaacagattgcatgcgacttctttaattggatagaaagatggccccattttacagagaagtattttctctgtttcaagcgattttttgcttgataattggtttcgttctgttgtatatatatttttaatgttgccgtttggctttaggaattgatagactgggctttaaaaaaaaaaaaaaaaaaaaataaaaaaacaatattaataaaaacaacataaaaagcaaaaaacttactattg

SEQ ID NO: 98644 - DNA, 705 bp, Zea mays
  Clone ID: MRT4577_21473C.1
aatgccaccgccaccgccgtcgccgccgtcgctgccgtccgtgtagcgtccccgcggcgatgggcaacacctgcgtcggccccagtgccgctggccgcaacggcttcctggccaacgtcaccctgtggcggccccgcggcgacgaccccgcgccagccccagccctaccgccgcccccctcccccgcctccgacaaagcgcccgatcccgtcaccatcccagaatctgagcattcctcccaccactcatcccgatccaccgacctgccaccggcccctgcctcccagccgcaggacaaccctacggcgaagaagcccgcgcccaaggtcaagcgcgtccagagcgcgggcctcctcgcggactccgtgctcaagcgcgacgttaacacggctcggctcaaggacatctacaccattggcaagaagttaggtcagggtcaattcggcacaacctacctctgcgtcgagaaggccaccggccgggagttcgcctgcaaatccattgccaaacggaagctgctcacggaggaggatgtcgaggatgtgcgccgcgagatccagatcatgcaccacctcgcgggtcatgccaacgtcgtctccatcgtcggcgcctacgaggacgccgtcgccgtgcagctcgtcatggagctctgcgctggtggggaacttttcgacaggatcatccagagggggcactattccgaga

SEQ ID NO: 98645 - DNA, 131 bp, Zea mays
  Clone ID: MRT4577_21474C.1
ctcacgcgtgcgtcttaatagagcctggagaacgttggtagattgtcctgacgtggggcacctcaacttcttcctgtggagaaaggggcgatgacactacacacatgtccaatattgcgcacgataaggcg

SEQ ID NO: 98646 - DNA, 1709 bp, Zea mays
  Clone ID: MRT4577_21475C.1
ctcgaggccggccgggagctcaacagccaccggagagcacggaggaaaagcatctccaaaaaccctagctcccatcccctcgctgggaagtctcgtcggcggcggcggcggagatgggcaaggcgaaggggaagcagcgtcaggacaagttctaccacctcgccaaggagcaagggtaccggagtcgcgcggcgttcaagctgctccagctcgacgcgcggttccgcttcctcccgacggcgcgctcggtgcttgacctctgcgccgcgccgggagggtgggtccaggtggccgtcaaccatgctcccgtgggtgccttcgttgtcggcgtcgacctcgttcccatacgccccatccgcggggcccactcgctcaccgaggacatcaccgccaccaagtgccgcgccgcggtgcggaggctcatggactccaacggcgtctccgctttcgacgtcgtgctccacgacgggtcgcccaacgtcggtggtgcctgggcgcaggaggctacatcgcagtcggcgctcgtcatagacgcactgcgcctcgctaccatgttcctcgctcccaagggcgccttcatcacgaaggtttttaggtctcaagattacaacgctattatgtactgtcttaaacagttgtttgagaaggtcgaggcgactaaacctacggcaagtcggtctacatctgctgaaatttatatcatttgcctgaaatacaaggctcctgcaaagattcaaccagaacttctcgatataaagcacttgttcagtgtggttccagaacagaccaaatctagggatgttatggatggtaggaaaaaaagacaccgtgatgggtatgaagaagggaatacaacattacggaaagttggtttggcatcagactttatatggtctgacacccaggcgccactagagtttttgggctcttacaatgcaatttcattcgataatccagaatccctggccataaagaatcatgagcttacaacagatgatataaaaaatttctgtgaggacttgcttctgttggataaacatagtttcaagcatattttaaaatggcgaattcgtttacgaaaatcactgtcagcgtcatcacaagtcaccccaaaggtcaatgatgctgtggagagcacaaaggtcatggatgatgatgtacttctacaggaaatggaagaattgactagtgtcattgatagaaagaataaaaaaaaaaaaaaagcgtttgtcaaagcgtcgagcaaaggataaagcacgcaaggccacaggaatgcagattgatgctacaggagatgattatggtgatcctgacttgttttctattagtgtaatcaagggtggaaaagaacttgaagctgttgaatcagcagaggttgatgtgcaaaatgaaattggagacagtgagaatgaggatactcaagctcgtgaacactctgatgaggaaatggattctgatgaggaacagcagaggtatgatgcccagcttgaggagatgcttgatgaagcttatgagcgctttgtaactagaaagggtggtgaaataaagcaagaacgcaagcgtgcaaaacgaataaatcctgacgctgatgcagaactgttagagggaggtgaagatgatggtgatgttgaaatggatcaagattttgatgaagatcaagatcaagaggccaacccccttctgtttgccctagatgaagcagagccaac

SEQ ID NO: 98647 - DNA, 796 bp, Zea mays
  Clone ID: MRT4577_21476C.1
aggagcaaagatctccaaaaccctagctcccatcccctcgctgggaagtctcgtcggcggcggcggcggagatgggcaaggcgaaggggaagcagcgtcaggacaagttctaccacctcgccaaggagcaagggtaccggagtcgcgcggcgttcaagctgctccagctcgacgcgcggttccgcttcctcccgacggcgcgctcggtgcttgacctctgcgccgcgccgggagggtgggtccaggtggccgtcaaccatgctcccgtgggtgccttcgttgtcggcgtcgacctcgttcccatacgccccatccgcggggcccactcgctcaccgaggacatcaccgccaccaagtgccgtgccgcggtgcggaggctcatggactccaacggcgtctccgctttcgacgtcgtgctccacgacgggtcgcccaacgtcggtggtgcctgggcgcaggaggctacatcgcagtcggcgctcgtcatagacgcactgcgcctcgctaccatgttcctcgctcccaagggcgccttcatcacgaaggtgaagggttctacagaagaagaatgtcaatgttgcagtcggcactctgcattggctccagtttctaattcagcgtcatgcttattttccttgttctatgtgaattgtgaacgcaaaatatctttgttgagaatacactataaaagtgttctaaatgagtggcagcatgatatcttgacattttcatccctaggcaggtgtatgtttatatgcatatatatgctccttattagcttgtgcacctagccacc

SEQ ID NO: 98648 - DNA, 480 bp, Zea mays
  Clone ID: MRT4577_21477C.1
ccggccaggatgtcgcggggctttgcaccaccacaatgatatagggaggtggagtgcgccgccggggggccgcctccatggaagcctcgcttgcgaaaccatttgggtcaaaaggaccggccatgatggcccacggagtcccttgggtggtgtccatggcttcatcgagggattcagatgagtaatccatcggtgattgctcgccgttgttgggccacgactgtgtggccgcggagcactgtggctaggaaaatttgtgccacaaaacctggtcaagagcaggtacaacaagatgtggagcgcgaaggatgctgcgatgagttcatgagaggtctaggccatcgtctcccagtcaactttggttgtgaaggattgttgtcttcatatggtgtaattatttagttattttgtatagaactcctattatatagtaaagatgtgacatttgtttccaaaaaaaaaaaaaaaaaaggggcggcc

SEQ ID NO: 98649 - DNA, 437 bp, Zea mays
  Clone ID: MRT4577_21478C.1
caggtttttaggtctcaagattacaacgctattatgtactgtcttaaacagttgtttgagaaggtcgaggcgactaaacctacggcaagtcggtctacatctgctgaaatttatatcatttgcctgaaatacaaggctcctgcaaagattcaaccagaacttctcgatataaagcacttattcagtgtggttccagaacagaccaaagtatgttgagccacgtgtctgaatcatctgtctagtttttttctctcttcttctgctagcataccttgattttggaaatgttttgtgctctgcagtctagggatgttttggatggtaggaaaaaaagacaccgtgatgggtatgaagaaaggaatacaacattacggaaagttggtttggcatcagactttatatggtctgacacccaagcgccactagagtttttgggc

SEQ ID NO: 98650 - DNA, 201 bp, Zea mays
  Clone ID: MRT4577_21479C.1
ggagactggcaatggtgaataattacatttcattttacaggattttcgggcttgaaaaaaatgggaaacaaacaggctttaaattcaataccgcactgaaaagggggagttgaactcccacttttggaattccaatttgaattccaaattctgaaactatttctgggtttctggaatataaacaaacctttcctggggttt

SEQ ID NO: 98651 - DNA, 625 bp, Zea mays
  Clone ID: MRT4577_2147C.1
gatgttgtcatcacatttttggtgtgatgagagcctcccacctgtttccctgcttgacaagctgcacaaggtgttctttttcgaaatgtacattggttagacctatcacgtgttctccctttagaagcttgtggaggttcttcatccccacatgtgctaagcggcgatgccacaaccagcccatgcaagtcttagccattaagcatgcatctagaccggcctcttcttttgcaaaatcaaccaaataaagtttgtcgtctagtacacccttaaaagctagtgaaccatcacatcttctaaagacagacacatctacatttgtaaatagacaattatatcccattttgtataattgactaacggataacagattatatccaagcgactcaactaaaaacacattagaaatagagtgcttggacgaaatagcaattttacctaacccttttaccttgccttggttcccatcaccgaatattattgaatcttggggatccttgttcttgacataggaagagaacatcctcttctctcctgccatgtggtttgtgcatccgctgtcgataatccagcttgagcccccggatgcataaacctgcaaggcaaattcaggcttgggtcttag

SEQ ID NO: 98652 - DNA, 603 bp, Zea mays
  Clone ID: MRT4577_21480C.1
ttttggtaaaaaaagaaaaactttattcctcgtatttatttatttattagctcgtgaagagaataagatgacgatataccttacataaatcaaacatactacaatacaagtaaagaatgagcaggcgatgaaaactgattccgttaaccaagccaatcacaccgtagttcgcgtagttattaccacatgaagtacagatcgaagaggagtcatcaccgtaattgacaatttgacacacagtaataaaatgaacaagatgacgagcgagcggtgattttacaacgacggcacaggctaatacacgtgcgcgggcggaccatgcatccatcaaaccgacgaccggcgggcgggagcagtatcactataaggagcggcgtcggcggcggcggcgcggcctcggctgccagcgccaccgtcatcatcagcggcaataacatccatgggcatggcatcatccagcagctgcatctcgtcggcggcgatggcgtcggcgagccaggcctcggcgtcggccatgatgccggggctgaggcgcaccatgaggacgcagaactcggcctcgctgagcgcgccgtcgccgtcggcgtcgccctcgcgcaccat

SEQ ID NO: 98653 - DNA, 259 bp, Zea mays
  Clone ID: MRT4577_21481C.1
gcaacttgtagtgtttgttaggtactagagtaactggattccactactcaacacagaaatgcatatcatcccattcatcaaatcttagccatgctaagcaacctgactccctgctatctaactaccatatcatggttgctatcactattttttaaagcaagaaccagtgcattaggtggagtattccttagtaatccaattttgggcggcccctgtgtgtgaaatatcatgaagcaaggattatcatagataatctttc

SEQ ID NO: 98654 - DNA, 696 bp, Zea mays
  Clone ID: MRT4577_21482C.1
ttgggtacctcgaggccggccgggatccatctcctaaaagcgcggaggtcgcctgacatttctaaacaatggcgaaggatgctgctgtgcttggtactaataatggcgccaaggtgaccatcttcttcacccaaaagggagatggccctaccactgtcaccggaagtgtctctggcctcaagcctggcctccatgggttccatgtgcatgcacttgaaagacaccaccaatggatgtatgacaactgcaccacactacaatcctgctagcaatgaacatgaagcaccagaagatgagaaccaccatgccggtgatattggaaatgtgacaactggagcaaatggtgacgacaacattaatgataccgacagccacatcccactgactgcggcaaactcaatcattgacagagatgttgttgctcacgctgatccctatgatcttgaaaaggttggacacaagctcaggaagatcaccggaaacgctgccgcactggttgcttgtgctatcatcgaactccaaagatgaactgaaacaaatggtcgatggacttctgccgcgcctgggagtgccgtcaccagcaggctaaaataacatctcgaagacatcctgaaacaataataataaagagtgcctggaatctgatcagtggtgtactcgccattaaagatctgagggaacccaatgagctgaact

SEQ ID NO: 98655 - DNA, 271 bp, Zea mays
  Clone ID: MRT4577_21483C.1
ctccactccaagcagggctcctccgaccccggtctttcctcctcccttcagcgcatcgcacccacagcgcaccgttcttggctggcctgctggtgccgacagccaagtccgcaactgccaaagatggccgagctgctcccttcctcccgtgcttactcagcgacccgcgcggggccacctgcctgcccgaggggtaccgtatcgcacgccgcgtgtctgggctcggcgaccacgcgtcggcgtgacctgggcgacgtatcatctacgccta

SEQ ID NO: 98656 - DNA, 328 bp, Zea mays
  Clone ID: MRT4577_21484C.1
gagagaaaccggactaggccccgggaacttgggattggaaaaaaaaaaaggggctggcgggccctcaacattggggttttaggaacgggttttcttgggggctgcctataactttgcagcccggccacttggggtttcaaaacaaacagaatagaccctggggggcccttaacattaaactggcagcaacgggtttgctggggggttgcctaaagctttggaggtaggacaaaaatatttccgggtataaaatcccgggggggggccaaaagaaggggcaaaaaaacacaggctctttttggatttaaacccccttccagggggggga

SEQ ID NO: 98657 - DNA, 394 bp, Zea mays
  unsure (1)..(394): unsure at all n locations
  Clone ID: MRT4577_21485C.1
cccacgcgtncgagacaaatatacttcatagggaccaaaatacttaacgcgatgaagcaggtgagtggttgtgacattgcttcaccaggcgtaccttctatggcttcgcagtgtatcccttccacaagtcgttcgacatctccatcaggtgcaatttcggttgatagatccatgttggaagctgcacatgaaagggagaaagagctgctgaatgaggtcttggagctgcaatggcggttactatgcacgcaagatgaggttcagaggcttaaagcaaaggcagcgcagatttgatgctgaagctgctaagggagctttaagggcgcgtcgtgacaagatgttctgttgatgcggtcttcaaatggctatttaacatagaagagagatccaaaaa

SEQ ID NO: 98658 - DNA, 216 bp, Zea mays
  Clone ID: MRT4577_21486C.1
tctttcgatttcgatctcgcaaccacctttggggtgttctgttgtggaggtaggggttcgaggagatatgcactttgcacttgcattggacacgaactcaagatcttatcatataagattttgagagtgtgatgtgttttataattctgcttggattataatattatttttaatatatcatatatcttttgtaatcatataaatttatttcttaaa

SEQ ID NO: 98659 - DNA, 1048 bp, Zea mays
  Clone ID: MRT4577_21487C.1
tttttttttttttttaactcctgaaatttgacacctaccctttgttgtcagttcttcagatcataaaaacttgaacttgcaaaccttgccagttactagaaatattacacaacttgtgaaccgcagattccacaaggctaaatgcgaactgcagattccacaaggcaggggagaagggacaaggcggctgagaaggttgggggcggggatttcgcgacgggatgaccccgagaacggcaatgggagggagaatgcgtgggccgactgttaacgctcgagataggggaaaccagaagagatggaacgcagcgagatgtattggagaagaacatagaggatggcggcatcttggtgctccatcacggaagatcggggtcgggtacccacagcagcaagcggatctttttttttttttttttttttttttttttttttttttttttttttttttttttttttatggaacgcagcaatatgtattggagaataagaacatagaggaagtgtttgcgtgcagcgagttcaggttcttcttgggggatagctttcctactacacattgggcaccatatattcctctttcgggccaacctacgacgcacgcgcttacaaagcccagtaatcccagtctggcccagttacccggaacactcgcgcgcctccgtttgggtggcctcgcgacatttggtcccattctccatggttcctgcctccgaaagccagtacctcatgtttgcctggagcagctgtgctgacattctcctccccttcaaattatgcttgtccccaagcatgggcttggggaaaccgggtcttcaatgcttcagcctcttccccagttgacatggagggcgcatgcctgaccaggctgaattcaaacttagttgagcgtccaacaaactcaatagctgttgccaaaaagtgcttttgaagactgtcgcaatcggaaataatattggtccgatcagtaaagactttgaattgagacagctgtccttggatgcctgaggtgccgagtcgtctgatatcaacagtaattccactactg

SEQ ID NO: 98660 - DNA, 1807 bp, Zea mays
  Clone ID: MRT4577_21488C.1
aaaaaaaaaaaaaaaaaaaaacagtccaaatcccggtaactaattactttgcacgaaaacagattaaaacagtaaaaccaccaccaccacctcgacctcgactcctccgccccatcgccgtcgtccccgtctcctccgccttgctgtctgtccgctgctcacctcccctaaaaggaggcacccccggccattgccgcaccaagctccccttcctcgaatgccccaggcccggacaccacgacgccctgccccgtgctcacatggctagcggcgtcctccaccgctccgcctcccgatgtctccgccctgccgccgcgccaacccccgactccggccggggccacggcgcggttatgatcggtgattcggggacgcgcggtgttgctctgcggatgggaggatctagccggagagagttattatctgtcacaatggcctccagagatcacactggcttgacccgacaacttttggattttcaacatgatacaatagatgaggtaggtgcagaacacggtccattcatggatttgaaagcgagattcatggacttcaaacagagaaactatgtggagaatttttcaaattaccaaaatcttgctgagcagcaaacaccaaagttcatggtgattgcttgtgctgactccagggtctgccctaccgctgttttggggtttcagcctggggaagcatttacagttcgtaatgtggcaaatttggtaccaccatatgagcatggggggacagagactagtgcagcactagagtttgctgtcaataccctccaggtagaaaatgtactggtgataggccacagtaggtgtgggggcatccaggcactaatgagcatgaaagatgattcgacctccggaagcttcattaaaaactgggtttcaattgggaagagcgcaaggttaagcacgaaagctgcagctggaaatatgagttttgacatacagtgcaaacattgtgaaaaggaatcaataaatagttctctgttgaacttgttaacatacccatggattgagaagagggtgaatgaaggcactttgaatcttcatggaggctactacaacttcgtcgattgcacatttgagaaatggacattgttgtaccgtgaagggttggaaggtggaagcaagtatgccataaagaaccggtccacctggtgttgaccaacgaaggtcgtgtttacttgggtaaatttcactctgccccccgctgttcagcatggtttcgctttgccactacgttgtccatttcccattgcacctttgctccattgtggcatcgatgttctccgggtcccggtatcaaataactgtggcaaggctgttggcatgccagcttgaactgcgtgttgtagtgtcgcatacacatgcgcaggcacgtctgcatcgtagcagttatttgatacaggaactttttgatactgtagaagcacaataccacaatggagtgaggtgcaacgcgcgatggacaatatggttgcaaggtgaaagtctgtggaactgccgctgttctgatactgattatactccatatctctggaatagaggtgctgctttgatgttcaatatggttgcaaggtgaaagtctgtggaactgccgggggcaaagtgaattttatccaactatctgtaatatgtgtgctgttttccggttccacctattaagaaaaaaataggaataagctgcaggatcggtcgtaatgcgtgtaattgtcgccacatttggcattaccttgctattgtaacatttgtaccatttgttgtatcattataactgagatatatacggtctcgtc

SEQ ID NO: 98661 - DNA, 392 bp, Zea mays
  Clone ID: MRT4577_21489C.1
cccacgccgtccgaaaaaaaaaaaaaaaaaaaaaaaaaaaaaaaaaaaaaaaaaaaaaaaaaaaaaaccaaaaaaaaattaaaaaaattaaaaaaaaaaaaaaaaaaaaaaaaaaaaaaaaaaaaaaaaaaaaaaaaaggggcgggccgttttaaagagaacccaagtttacttccccgtccttccaacgtaatagtttttttttagggccaccaaaattaaattaactgcccgccgtttaacaacgtcggaactggaaaaaccctggctttcccaaattaaatcgctttgaaaaaaatccccttttccccagttggcttaataccaaaaaggcccgcaccaatcccctttccaaacatttgcccaccctaaatggcaaatggaacccccct

SEQ ID NO: 98662 - DNA, 628 bp, Zea mays
  Clone ID: MRT4577_2148C.1
ttgatgtcgtcatcacatttttggtgtgatgagagcctcccacctgtttccctgcttgacaagctgcacaaggtctatctttttcgaattgaacattagttagacctatcacatgttctccctttagaagcttgtggaggttcttcatccccacatgtgctaagcggcgatgccacagccagcccatgcaagtcttagccattaagcatgcatctagaccggcctcttcttttgcaaaatcaactaaatacagtttgtcatctaatacacccttaaaagctagtgaaccatcacttcttctaaagacagacacatctacatttgtaaacagacagttatatcccatattgcacaattgactaacagatagtaaattatatcctagtgactctactaaaaacacattagagatagagtgatcattagaaattgcaattttacctaacccttttaccttgccttgattcccatcaccgaatatgattgaatcttgggaatccttattcttgacgtaggaggtgaacatcttcttctcccccgtcatatggtttgtgcatccgctgtcaataatccagcttgaacccccggatgcataaacctgcaagacaaatttaggcttgggtcttag

SEQ ID NO: 98663 - DNA, 216 bp, Zea mays
  Clone ID: MRT4577_21490C.1
aaggggggggattctaagcgaccaaatttgggagaagaataggttgacaaaaagatttttattgggccatagattgttgtgacccaagcctgggcagacaaactaaaacctggttttccaacaaacgaacagccaaacattagattccctcccccccccccagcttaagcatttgttagaggtgtttccctcaagagtccatcgggcgcgtgggtt

SEQ ID NO: 98664 - DNA, 355 bp, Zea mays
  Clone ID: MRT4577_21491C.1
atcgtacatccttagccaacattctacactttctaccaatcaaaccaacaaagggatccgtggtacatggacccagttcttcaccgcacttctacagttctgcgccctacggctacagggcctgccggtggaacaactactcgctcaagaactaatgccagatcacccacatcgtccatacccaacttaagctcgtataccttacgctgtgcccggtgctggcctcgatcactgtggccgcttacatgcacaatgtgtggaacattgtatgtacgcatacaatgctcgggtgcgggtggataatcgcatggctcttgttgctgccggtataccaagagaggaagatgtatttgct

SEQ ID NO: 98665 - DNA, 298 bp, Zea mays
  Clone ID: MRT4577_21492C.1
gttgaacctgcacaggatgaagcaatcaataaaaaggatgctgataggaggatttcacctgcttcaacgttggagtcgtcatttgaggctctcaatgtaaagaaatttgatgttgctttcacggtggatcctctataccatcaaactaccgctcagtttgatgaaggtggggcaaagggccttttgttgtataaccttggagtttatggtagctgccgtgtgctgttcgattcatttgaagctccagacaaatgcatcttaagtgatatgcaaactgagcaggctgagacaattgacc

SEQ ID NO: 98666 - DNA, 1865 bp, Zea mays
  Clone ID: MRT4577_21493C.1
cattgggtacctcgaggccggccgggcccttccgtgcccggcccttcttccccgactcgcccggcgctgaataagattcccctgtattctgttccagagatgagctgatcgagcagcccgtcgccaagccaaccggacatggtgagcgacggcgcgcgcgggctgctgggcgcgtacgagctcgggcggacgctcggggagggcaacttcgggaaggtgaagcaggcgcggcaccgcggcagcggcgggcagtttgccgtgaagatcctggagcgcgccagggtgctgtcgcagcgcgcggacgagcagatatgccgcgagatcgccacgctcaagctgctcgcgcaccccaacgtcgtccgcctccacgaggtggctgccagcaagacgaagatctacatggtgcttgagctcgtcaacggcggcgagctgctggacaggattcaggcggccagtgagggaaagctcccggagcaggaggcaaggaggctcttccagcagctggttgatggtgtcagctactgccatgaaaagggcgtctgtcacagagacctcaagctggagaacgttcttgtcgaccggaagggaaacatcaagatctctgatttcgggctcagcgctttaccgcaacatctcgggaacgatgggttgctgcacacgacctgcggtagccccaactacattgcccctgaggttctgcagaacagagggtacgacgggtcgctatcggacatctggtcatgcggggtgattctctacgtgatgctcgtagggcacctcccgttcgacgaccggaacatcgtcgttctctaccagaagattttcaagggcgatgctcagatcccggagtggctctctcccggcgcacggaaccttctccggaggatccttgagcccgacccggcggagcggatcgccatggcagagatcaaggcgcacccatggttccaggagcactacgtccctgtccttcctccgtacgacgacgacgacgacgacgacgattcagtgaagcaaatcggtgcgggtagtaaaaccactcatcacatcaacgcgtttcagttgatcggaatggcgtcgtccctagacctctcagggttttttgaggaagaggacgtgtcccaaaggaagatcaggttcacgtccgcacaaccgcctgaggatttgttcgccgagatcgaacgctctgcgactgacatgggcttccatgttcacagagggcatagtaagcttaggctgacgcgaaactgcgaccggtcgaagaatcagaagaaccctatgtcgtcgtcgtcgtcgtcgtttctagtctgcaccgaggtttttgagcttagcccctctttgtatgtcgtggagctcaacaagtcccatggcgaccctgcactgtacaggcagctctgtcagaggatctgcggtgacctaggtgtgctcgagatggaccagatctttgggacgaggccgccggtcgccgacgatctcgcgggcttggccttggcgttggagagacgatctgcgacgcctttggttgcgttgtgacgaaaggctgcccccgccggcccccctgaccgtgatgtttgtagcgtcagattatttagtgacgacgaagcagttcagctgcaacgcagctcggaacggttgtgtgatccctcccagaaatagaggacaaggtaaaagagtgtagccgtacacgtgtaggatcatgctccaatgtaaataaagtggtagtagccaccgatgtaaaactgaatgtaaaatctaagaaataaatcgtttatccagtacacagaagctctatagtgacggtactagagctatttgtactaacgtttttcagtgcaaaaaaaaaaaaaaaaaaggcccctagggcc

SEQ ID NO: 98667 - DNA, 687 bp, Zea mays
  Clone ID: MRT4577_21494C.1
cgagccggccgggccccgactgcccggcgcggagataagattcccctgtattctgttccagagatgagctgatcgagcagcccgtcgccaagccaaccggacatggtgagcgacggcgcgcgcgggctgctgggcgcgtacgagctcgggcggacgctcggggagggaacttcgggaaggtgaagcaggcgcggcaccgcggcagcggcgggcagtttgccgtgaagatcctggagcgcgccagggtgctgtcgcagcgcgcggacgagcatatgccgcgagatcgccacgctcaagctgctcgcgcaccccaacgtcgtccgcctccacgaggtggctgccagcaagacgaagatctacatggtgcttgagctcgtcaacggcggcgagctgctggacaggattgtaagccgccccggccgttcgttcttcctcccttgtgatcagtcaggctacactccttgtccgatgccgttaccactcccatacagctatactacgcgtctgatccccctcctgtcgcttcccttttgctgcaacggcaactgaccagcaggcggccagtgagggaaagctcccggagcaggaggcaaggaggctcttccagcaactggttgatggtgtcagctactgccatgaaaagggcgtctgtcacagagacctcaagctgggagacgttcttgtcga

SEQ ID NO: 98668 - DNA, 226 bp, Zea mays
  Clone ID: MRT4577_21495C.1
cgtcgtctctagcggtggctcactcgcacgatccggctgccggtgacgcgccgccgaatcaggtgtgctaggcgatggagcgtatgtgccgtgcgggccggatcatctcagacatctggctgggcgcggaccgacttctcgaggccctgttcgtctccggagacgcgcccacgtacagcgtgcgccacagcgtggacaggatggagcacattatatcaaaggagga

SEQ ID NO: 98669 - DNA, 417 bp, Zea mays
  Clone ID: MRT4577_21496C.1
attttttttttttttttttttttttgggtgtttttttggttttttttcggttttttttttttccccgggaatatgaaatagcagcctcctttcaaggggggggacttcaaaaggcactaaacagttccctaaggggggttccagctaaggcaaacccccaaaaaaaatcccccaaacgggacacaaaattccccgcctaaacgcgggggctcagttctccggggctccatcatcggcatgggcatcaccatccaaattatcatcgggggggggggcaaaatcttcttcatctccttaaaaatcattttaaaccttattggtgaagtccttcaaaggattaggccccaagtcttccttgaagaactccgccacctaattttgcacaccatcagcaagacttttgggctctgtatcact

SEQ ID NO: 98670 - DNA, 1533 bp, Zea mays
  unsure (1)..(1533): unsure at all n locations
  Clone ID: MRT4577_21497C.1
ccccggngtcgacccacgccgtcctttgaaaaccgaaattggacacaacggtttgctttcaaatcatacaatccgaggtctcaaagtcgaagagggttaatcccctcccgttccactgttgcccaagtccaaccaccagcgagatggcggggaccgtgaccgcgaccgcaaccacggccaccaccgaggtcgggaccacagtgaccgcagccacctccgagatggaggccaccgcgaccgcagccacctccgagctggaggccaccgcgaccgcagccgccatcgggccgccttcagccatccccgataaatatatgcataaaaaccggttgcagtcatttgctgaacgaacatataagaaaacgccaatctacaaggttgagtctgaaggccagtctcatcagcctaagttcacatgcacagtggaagtgggtgatcaacagttctcatcaactggtagttttagtcgtaagaaggaagcagagcaggacgctgcgagagttgcttatgagatcttgacaacagttagtgagagtgacgttaaggaggcatttgagctaattgatcaggatgcagttttctgcaaatcaattctcattgaatttgctgtcaagacaaagaccactttgccctcttactctgtagtttgtgtttgtctcaaaaagcctttgaccctgttcgctgcaattgtggtgtttgatggaaatgcatatcatggtgaatctgcacccaacaagaaagatgcagagcagaatgcagctcgtgttgtgatcaagtcgattttagctaagcatgacacttgtatggtgagaattgttagatcgaagaaacaacttataactgctgtcagatcttctggaaacaccccagctacttttactcctatacagtttacacggcctgtttcatatgcagcatatggcagaccagatgatacaacacctgttttgccaaatgaatcttcctcattagctgttcaacgaggcatcaatgttgtacctgcagttgggacatctgtgaacccatcgtcagcaaatgtaagtcgctcaaagaagcgcaagggcagagttgaaggagcaggaggcaacgacacatgggttgccaagggtcattaacttctcagccatcaacatctaggatcctgtggtcaaccttttggcattcgattcgtcttggtacctctgcctgtcatgttgtttgctcaaaccactgcatatcgttgtaggttgcttttttaaccttaactttaattcgtaaccactgcattttgtaactgcataacaattcggctggatcagtttccaccaaagatataacgaacgaatggtaacagcctttatctaagaaaaaaaaaaaaaaagcggccgaacttccaaaaaacaacaaaaaaggggggcccgtgcgaacacgccttttgactttgctccttgatctggtcattcaccatcttttcatcttatgagcaatgacacaggtgcatttttcagtggtaatatgcatgcacttgtgcattttttagtggctacacaagtg

SEQ ID NO: 98671 - DNA, 295 bp, Zea mays
  Clone ID: MRT4577_21498C.1
ggtggtacaacggaacccaccaccggttgcttacaagatctatcctataccgctgaaaactttgtgttccatttcctcttcatcttttcctgcccctatatttctccccctcagtttcaggggttcagtcctcagatcagattttgtacatcatacccacctccaacgtggaggccttcgggatagaaaccgcgtttttgggaccccggctggtcctccccgggaagtcacaacaaaaattggtcaccaacccgcggaggaagctgaacccgcttttcggcttcacgtgcgagtg

SEQ ID NO: 98672 - DNA, 1418 bp, Zea mays
  unsure (1)..(1418): unsure at all n locations
  Clone ID: MRT4577_21499C.1
ggggggtggtgtacatcgccggntggtcgcgtgacaccgncgtggtgctggtgcgcgacccgcgggaaccgtcggcgtcgtccgagagtctcggcgagctgctcatccggaaggccgacgagggcgtcgcggtgctgatgctggtgtgggacgaccgcacctcggtggggctcggccccatcaagcgcgacgggctgatggccacgcacgaccaggacacggcgagcttcttccgcgacacgcgcgtgcagtgcgtgctctgcccgcgcaaccccgacaaggaccggagctacgtgcaggacatcgagacggccaccatgttcacacaccaccaaaagacggtgatcgtcgacggcggcggcgcgccggcgccggagacgccgccgggcctcgtgagcttcctcggcggcatcgacctgtgcgacgggaggtacgacacgcaggaccacccgctgttccgcacgctgggcaccacgcacagcaaggacttccaccagcccaacttccccggcgcgtccatcagcaagggcgggccgagggagccgtggcacgacatccactgccgcgtggaggggcccgcggcgtgggacgtgctggagaacttcgagcagaggtggaagaagcagggcaagggggacaacctcctggtggcgctgaacaaggcgtgggcggagcgcgaggcggccccgcggggcgacgccgagtcgtggaacgtgcaggtgttccggtccatcgacggcggcgcggcggcggggttcccggagggctccgcgaacgcgccccgggaggcggcggcgctcgggctggtgagcggcaaggaccacgtgatcgagcgcagcatccaggacgcgtacatccacgccatccggcgggcgcgggacttcatctacatcgagaaccagtacttcctggggagctcctacgcgtggcggcagaacgacggcgtgacggtggaggacatcaacgcgctgcacctcatccccaaggagctgtcgctcaagatcgtgagcaagatcgaggccggcgagcggttcgtcgtgtacgtggtggtgccgctgtggccggagggcgtgccggagagcggctccgtgcaggccatcctggattggcagcgccgcaccatggagatgatgtataaggacgtgacgctggccatccgcgccagggggctccgggccgaccccagggactacctcaccttcttctgcctcggcaaccgcgaggcgccgagccccggcgagtacgtgccgccggagcacccggaccccaacaccgactacgagagggcgcagcaggccaggcgcttcatgatctacgtccacgccaagaccatgatagtggacgatgagtacatcatcgtgggctcggcgaacatcaaccagcgctccatggacggcggccgccgactagtagacatc

SEQ ID NO: 98673 - DNA, 1645 bp, Zea mays
  Clone ID: MRT4577_2149C.1
atgacgtggctggcgcaccggacatgtccggtgtgcaccggactgtccggcgactttcagaagggaatcgtgatcaacgacaaggagaaggagtccttcgtcaacgagccaaaggatgacaaacctattgactcggggtcgggccacaagcgcaaagatgggaagaagaagaagacaaagcgcatcaaggagatcgtctactacgacgatagcgatgagtctacttcttcccaaaagaacgacaacaacgactacgagaaaaagaaaacggtcaattcgaacttttcttttgattactctcgtattcctcaaagtacaaatgctcatttattatctattccacttggtaaacctcctcattttgatggagaggactacggattttggagtcacaaaatgcgtagtcacttgttctctctccatcctagcatatgggagatagtagaaagtggaatgcattttgatagtagtgatagtcccatgtttatcaatgagcaaattcataaaaacgcacaagctactactgtgttgctagcctcattgtgcagggatgagtaccacaaagtgagcggcttggacaatgccaagcagatctgggacaccctcaaaatctcacatgagggcaacgatgtcaccatgctcaccaagatggagttggtggaagacgaacttgggagattcgctatgataaggggggaagagccaacccaaacatacaaccggctaaaaccccttgtcaacaagataaggagctacggaagcacgcgatggacggatcacgacgtcgtccgcctaatgctaaggtcttttactgtccttgatcctcatcttgtaaacaatattcgtgagaatcctaggtacaccaagatgacgcccgaggagatacttggaaagttcgtgagcggacgaatgatgatcaaggaagcaagatacgtggacgacgcattgaatggtccaatcaatgagcctcaacctattgctctcaaggcaacaagaagcaatgagatgctacctagcaaggtggcacaaattgaggcggccggacttaatgatgaagagatggctctcatcatcaagagattcaagacggcgctaaaaggtcgcaaggggcagccaagcaagaccaagacaaaggggaagcgctcatgcttcaaatgcggtaagcttggtcattttattgctaactgtcccgacaatgatagtgatcaggatcaagggaacaagagggagaaaaagaagaactataagaaggcaaagggcgaggctcatcttggcaaggagtgggattcggactgctcctcgtccgactccgacattgagggactcgccgccactgccttcaacaagtcatccctcttccccaacgagcgtcacacttgcctcatggcaagggagaagaaagtaagcactcctaatactagtacttatgcttcttcaagtgaggatgagtctagtgatgatgatgagatagattactcatgcttattcaagggattagatagaactaaggtagataaaattaatgaattgattgatgccttgaatgataggaatatactgttagaaaagcaagaggatttgttgtatgaagaacatgaaaaatttgtagaagctcagaaatctcttgctaagagtcgacctgcag

SEQ ID NO: 98674 - DNA, 674 bp, Zea mays
  unsure (1)..(674): unsure at all n locations
  Clone ID: MRT4577_214C.1
gccggccgggctcgggccgacttntgtcaaaaaaaaaaaaaaaaaaaaaaaaaaaaaaaaaaaaaaaaaaaaaaaaaaaaaaaaaaaaaaaaaaaaataataaaacgccctgttccaacccaaaattaaaaccccccgggtcccccccttttcctatacagttttttaaaaaagggattccccccgggggggggccgggaggaaaaaaccttttaaatgcctccggatttggggggggtcccggccccgctttttttccccggggtggggggaaaaagggggggttaccccactactttttaaattgggaaaatctcggaaaaaccccggggggcccaaattgaagggttttgaaccaaatcccctttcccaaaattggtttaatagagtgggggaggccattgggagacccaaataattggggaaaaacctggtggccccttggctaaattacccttatattttttccgccaaattgcgggggggagtttggccaaattttacccctttttttaaacacaagacaaaaattgggggaaatctccttttttttatttaaaaaatataagtccttaaaaagttttggaatttttatttccaacggttccaaaaacaaggcctctaaagggggttggtgccttccaggggaaaaacccggcaaaaacccttttttt

SEQ ID NO: 98675 - DNA, 794 bp, Zea mays
  unsure (1)..(794): unsure at all n locations
  Clone ID: MRT4577_21500C.1
cattgggtacctcgaggccggccgggagggtaatcccctcccgttccctgttgccaagtccaaccaccagcgagatggcggggaccgtgaccgcgaccgcaaccacggccaccaccgaggtcgggaccacagtgaccgcagccacctccgagatggaggccaccgcgaccgcagccacctccgagctggaggccaccgcgaccgcagccgccatcgggccgccttcagccatccccggctactgtctgtgtccagtgcaccaacatcttcctctgctgcaattattacctatactccagataaatatatgcataaaaaccggttgcagtcatttgctgaacgaacatataagaaaacgccaatctacaaggttgagtctgaaggccagtctcatcagcctaagttcacatgcacagtggaagtgggtgatcaacagttctcatcaactggtagttttagtcgtaagaaggaagcagagcaggacgctgcgagagttgcttatgagatcttgacaacagttagtgagagtgacgttaaggaggcatttgagctaattgatcaggatgcagttttctgcaaatcaattctcattgaatttgctgtcaagacaaagaccactttgccctcttactctgtagtttgtgtttgtctcanaaagcctttgaccctgttcgctgcaattggtggtgtttgatggaaatgcatatcatggtgaatctgcacccaacagaaagatgcagagcagaatgcagctcgtggtgtgatcaagtcgattttagctaagcatgacactt

SEQ ID NO: 98676 - DNA, 547 bp, Zea mays
  Clone ID: MRT4577_21501C.1
tcgcgatctagatcgcgagcggcgccctttttttttttttttttttttttttttttttttttttttttagataaagggtggtaccattcgttcgttatatttttgggggaaactgatccagccgaattgttatgcagttacaaaatgcaggggggggggggggaagtttttttttttaaagcaacctacaacgatatgcaggggtttgggcaaacaacatgacaggcagaggtaccaagacgaatcgaatgccaaaagggtgaccacaggatcctagatgttgatgggtgaaaagttaatgacccttggcaacccatgggggggtgcctcctggtccttaaactttgcccttgggcttttttgagcgacttacatttgctgacgatgggttcacagatgtcccaactgcagggacaacattgatgcctcgttgaacagctaatgaggaagattcatttggcaaaacagggggtggatcatctggtctgccatatgctgcatatgaaacaggccgtgtaaactggataggagtaaaagaagctggggg

SEQ ID NO: 98677 - DNA, 209 bp, Zea mays
  Clone ID: MRT4577_21502C.1
gtggccataaaaacactttttatggatggagaacagatatattacccaagacaaacccaaaaaagcaaggggtttaaagatggggtccacatcgagcgaggcataaaaaacaaacgggccttaaaacgttgcgtccaaaaaatcccatgtgggaactatcgggagggacagaatctgtcgactgggacacacgcggaggaaattctacc

SEQ ID NO: 98678 - DNA, 387 bp, Zea mays
  unsure (1)..(387): unsure at all n locations
  Clone ID: MRT4577_21503C.1
ctcgatcctttcgagccggtccgccatcnccggcaggctgcccgttttttggtcggcgagancaanaacgnctggcacacgcacctcaagaagcggctggagcccaccaccaagcagctggagcaggagcagcacggggcgcatgcaggtggaggcgccgccaggaagcgcagcaggcccaagcgcgcgggtgccaggaagacgacgacagacgccgtcgccccggccaccaccgcaccagcgtttcctgaacggtcggcggcctcgtcgtcagtgacccagtcgaccgagcaagagcaaggaaacacggtgacgagctctcccgagttccccaaggaggagagcttcaccttaccctcagaggccggcgaagagttccagttcgac

SEQ ID NO: 98679 - DNA, 1715 bp, Zea mays
  Clone ID: MRT4577_21504C.1
ggggggggcgggggggccaaagggacccgggccccctttatacggggtttggggcctccgcacccccccaagggggccccccggtcccccgcttaccgtgggtccccctggcttcccagggccccccaggggccccccaaaacccccccccaaccccggggaaaggtgtttcccaaggggccccaaaaccccccccaaaagcccaggaaaaggggggcccaaaggccccaaaaggttttcaggaccttctaaaccccagggccccggggggcccgggggggaaatggttgggttttcttggggggagccctggtgggcccaggggtcggaaaagaccgctttccctggtttttccggtgttaagggtcccaaaaacaccggggggttccccccggaagggggctaaaaaggccttgggcacaatagggttcctgcccgttccccggggtttggggggggttggggcggggttcccttgggggggcccccccgggccggggggtggggtggcaacgggggccccttgtggtttttttttttttttttttttttttttttttttttttttttttttttttttttttttttttttttttttttttttttttttttttttttttttttttttttttttttttttttttttttttctacgataaggcacacaaactctcaagccatacgttataaacacactatattatggatagctgcactcgtacgagatcgcggttcacaccggcaccgcacggccgcaccggacggacacacacacaccgaccgacaacattattctactatactatatacagatggacgtgtcttaaaagcagtacagggcggaacccatacaggcgactgaacccagagacttccccgccaaccacccaaagaagcactccatcacgcgagcttggtcttctcctccggtgacttccctttctcacctccgactgggacgagctcctcctcgccggccacgatccccttggtgtgcttcgcgagcccaaccaccgtcgcgcccaccgcctccaggacgtcgcccactaccgtcgtgttctcgtcgccgccacccttcgccttcgtcgtagaagcgccaccgccggtcttgacggtccctgacgctctctctttcaactcccctgcctcctgctcagcgcgccaagtgacgtcctccgccttgtcaccggcctgggcaccggtgtctctcgacctctgcgccatgccgccggccgcatcccacgccgtgtccttggcacgtacggcggtgtcgcccgccttctgaaccatggatacggccgtgtccctcatcttgtccttggcctgtacggccgtgtccgcggccttacgcgccatgtcgccggtggtgtccttgtgctgtccggtgatgtcgcgagccttattgtccgccgtctgggacgccggttccttggcctgcgcggttgcgccactccctggctcctccacctcgtcggcggcgcgggccgcgcgctccttgccttgctccgccttctccttggcgtactccgccaccttgcgcgcggtgtcggccgtcacctccgtggccttctgcgccacctgcgcgcccgtggagaccgtcgcgtccttggccttcacggctgcctgctgcgtgtacccggccgtcgtctttcccgttgccaccgctgcctccttcgccttctcggccgcggccttggcgtactccgcggccgtct

SEQ ID NO: 98680 - DNA, 155 bp, Zea mays
  Clone ID: MRT4577_21505C.1
gcgagcttctgcataccttctctagtttattctacgccacagtagtcgacaccgtgggcgagtacctcccatggccgctggtatcgtggcctgtggtgagccggatgttacgatggggttaggggatggacactagcctgaacgaggaggcgatg

SEQ ID NO: 98681 - DNA, 295 bp, Zea mays
  Clone ID: MRT4577_21506C.1
tgcaacaacgtcctagtcctattacaacaaataccattaatacatctgttcgcaaacaacatctacgcacatcaactacaacaactcctacatcgaaaccttgatgcatactctcagcaacatcagccactcaccaataaacaacctccttcatctgaacttaactatttattaccaacaacaactaccatacaatcagctagcatattcctacccccatcaattgcatacattcaaccaactatcatcatagaactttacttcttaattacaacatcaacatctaccaccattc

SEQ ID NO: 98682 - DNA, 158 bp, Zea mays
  Clone ID: MRT4577_21507C.1
cccacgcgtacggaaaatctcgcgctgatgttttctccagggtctccgtcttttcctgagagggtgctacacaagacgaagtgggggattacgagcctataacaactgatggctgtggtgctgcagccctctgacctacagggaactatggcgtgtac

SEQ ID NO: 98683 - DNA, 777 bp, Zea mays
  Clone ID: MRT4577_21508C.1
ttgggtaccccctcgagggcccggccggaaaaaaaaaaaaaaaaaaaaaaaaaaaaaaaaaaaaaaaaaaaaaaaaaaaggatccaatctttgctgctgccactcggcgatccgatcgttctcgagcaaggtcggtggccatggctcgctgccgccatcacctcctcctcctttccgtcttacttgccttggctgctgctgctccgcggcaggcgcagagtcatggggaagcctccgccgtcttcatcgatgcctcgtcgcaccgctaccttcgggaccagcaagccgaccaccaggacgcttcaatgtcgttaaatgaagtttctgcgggtgtttctgtcttgcttggtttcgcaccgtcaacatccctaccagctatttcttcttcgaagttgaacaaagttcttcttcctaatccatttgatagaccgcgtgctgttttcctcgtgcaaattgatgggttcaatgttcctagcttcgtatctgaaggcagcaacattttcaagaccaggattgaaggtgcaaacatcgctgatacagggcttacagataaggatgacttaattgtcattcattcggatgaatctctagatctctctcgatcagattatcttgataatgaactttccagcttggcaaactggttggagggatcttatcagaagtctaccggcaaactagtcattcccttggagaatggaaacagtcttactttgcaacttgataaggaagcagacagggaattcatgtccagcttggcttcccttcttaagacta

SEQ ID NO: 98684 - DNA, 406 bp, Zea mays
  Clone ID: MRT4577_21509C.1
ctataaacgacacagacgatgcacgcacacgtacgctagctattcatctcgctggtgctcacgatgacgacattaatgccacgggcgcggatcttgcgaagtttggggttgaaaaccactcctgacactactcacttcgcgcttatagaactgggaccatggccacaatctgactgtatcgcatttacgcccacacatttctacaaaatactggagccttctaagactactgctactgacagactgtactcctcaaactcgtccgatcagaggacacctagagaacttaatctacacgacctcattgacagcaagataccggattctcagaatggacaaaatgtgtacacagacctggccctataaaaagaactgctcttacatgatactgatgccgacaatgcca

SEQ ID NO: 98685 - DNA, 3283 bp, Zea mays
  Clone ID: MRT4577_2150C.1
tcagtccaagttccgcgaatctaagacatttagctcactacgcaacttgcaaaaggtctgctcatctaatggcttggtaaagatatcggctagctggttctcggagctaacatgaaacacttcgatatctcccttttgctggtggtctctcaaaaagtgatgtcggatgtctatgtgctttgtgcggctgtgttcaacatgattatccgccatgcggatagcactctcattatcacataggagtgggactttgctcagattgtagccaaagtcccggagggtttgcctcatccaaagtagttgcgcgcaacactgtcctgcggcaacgtactcagcctcagcggtggatagggcaacggaggtttgtttcttagaactccaagacaccagggaccttcctaagaattggcacgtccccgatgtactcttcctatcgaccttacatccagcatagtcggagtctcctttgttgaggtcggtgtgtccgtcggttcccattggagtctttgcgggcttggcgtccttcatcccaaaccgcttgatcaagtcttgcgtgtacttcgtttgggagatgaaggtgccgtccttcagttgcttcacttggaacccaaggaagtagcttaactcgcccatcatcgacatctcgaacttttgagtcatcacccttctaaactcttcacaagacttttgattagtagaaccaaatattatgtcatcgacataaatttggcatacaaaaagatcaccatcacatgtcttagtgaaaagagttggatcggcttttccgaccttgaaagcattagcaattagaaagtctctaaggcattcataccatgctcttggggcttgcttaagtccatagagcgccttagagagcttacacacgtggtcggggtaccgttcatcctcgaatccagggggttgctccacgtacacctcctccttgattggcccattgaggaaagcgctcttcacatccatttggaacaacctgaaagaatggtgagcggcatatgctagcaagataccaatggactctagcctagccacaggagcaaaagtctcctcaaagtccaaacctgcgacttgggcataaccttttgccacaagtcgtgccttgttccttgtcaccaccccgtgctcatcttgtttgttgcagaacacccacttggttcctacaacgttttgcttgggacgaggcaccagtgtccaaacttcattgcgcttgaagttgttgagctcttcctgcatggccaacacccagtccggatctagcaaggcctcttctaccctgaaaggctcaatggaagagacaaaggagtaatgctcacaaaaatttgccaatctagaacgagtagttactcccttgctaatatcacccaaaatttggtcgacgggatgattcctttgaatcgtcgctcgaacttgggttggaggtgcctgaggtgcttcttcctcttcaacttgaacatcctgtgctcccccttgatcatgcgcctccacttgaggtacctgttcgtcatcttgggttgggggatgcaccattgttgaggaagaaggttgatcttgctccaaatgttcctgtggtcgcacatcgccaatcgccatggtgcgcatagcggccgttggaatgttttcttcatctacatcatcaagatcaacaacttgctctcttggagagccattagtctcatcaaatacaacatcgctagagacttcaaccaaacccgatgatttgttgaagaccctatacgcctttgtatttgaatcataacctaacaaaaacccttctacagctttgggagcaaacttagagtttctacccttctttactagaatgtagcatttgctcccaaatacacgaaagtaagatacattgggtttgttaccggttagaagctcatacgaagtcttcttgaggaggcggtgaaggtagacccggttgatggcatggcaagccatgttcacggcttccgaccaaaagcactcgggggtcttgaactctccaagcatcgtcctcgccatatcgattagcgtcctgttcttcctctctaccacaccattttgctgtggtgtgtagggagcggagaactcgtgcttgatcccttcctcctcaaggtactcctctacttgaaggttcttgaattcggacccattgtccctccttatcttcttcaccttgagctcaaactcgttttgagctctccttagaaagcgcttgagggtcccttgggtttcagacttatcctgcaaaaagaatacccaagtgaagcgggaaaaatcatcaactataacaagaccatacttacttcctcctacacttagataggcgacgggtccgaagaggtccatatgaagcatctccaatggtcttgatgtggtcatcacgtttttggtgtgatgagagcctcccacctgtttccctgtttgacaagctgcacaaggtctatctttttcgaaatgtacgttagttagacctatcacgtgttctccctttagaagtttgtgaaggttcttcatccccacatgtgctaagcagcgatgccacagccagcccatgcaagtcttagcaattaagcatgcatctagaccggcctcttcttttgcaaaatcaaccaaataaagtttgccgtctagtacacccttaaaagctagtgaaccatcacaccttctaaagacagacacatctacatttgtgaatagacaattatatcccatattgcataattgactaacagataacaaattatatccaagcgactcaactaaaaacacattagaaatagagtgctctgatgaaatagcaattttacctaacccttttaccttgccttggttcccatcaccgaatattattgaatcttgggaatccttgttcttgacgtaggaagagaacatcttcttttcccccgtcatgtggtttgtgcatccgctgtcgataatccagcttgtaccctcggatgcataaacctgcaaggcaaatttaggcttgggtcttaggtacccaactcttgttgggtcctacaaggttagtcacaattgtcttagggacccaaatgcaagttttatctcccttgcatcttgcccctaacttcctagcaatcaccttcttattttttctataaatggcaaaagaagcattgcaagtatgatatattgtagaaggttcattaacttgcctaagaacattaacaatatttctcctaggcatattatgaacaacatttctcctaccaacatttctatcatgcacataggcactacaccaaaatagtaaacttcc

SEQ ID NO: 98686 - DNA, 268 bp, Zea mays
  Clone ID: MRT4577_21510C.1
aaaaaaaaaaaaaaaaaaaaaaaaaaaaaaaaaaaaaaaaaaaaaaaaaaaaaaggacagacacacaaaaaaggtaaagggttcaaaaggcgtaaacgcttacatcatcatgggtctaaggtgcaaccttcttctaaattgccaccccgttgcttttcaatggctttacttggaaaacctcgtcattgcaaaactcaggcggtttacaacctatccccctttgcacaaaatgccttttacccaaccggccgtaaacgatatcgggtcc

SEQ ID NO: 98687 - DNA, 461 bp, Zea mays
  Clone ID: MRT4577_21511C.1
gcctgcccggcccggaccggtcttgccgggccggcccacgcgaccggtctcgtttgcgcccacgcgcacgagctcttcctggccgatggactggcatctacctatactgactagtctgagccccgacctaacgcctggtgcatcttcacagagaacactgaccaccagagaatggtggtcacatggaccctacctcctagcgaccgatgtcttactttcacgaccatgactgcgtcctcctaccctggctgatcacgatatcttcggcgaacctaccatgccaaaccatgtccggatgactagtggagattactacaggcagccccaccgatagcttgaggtgccatgaaagaaagcctagctgtactgtgacatggctgacttcaacctattcaaggcccgtactctgcacatgatagaccatcattctgatcatgctcgaggcgggcttaaaaaaagat

SEQ ID NO: 98688 - DNA, 496 bp, Zea mays
  Clone ID: MRT4577_21512C.1
atgcaaaaaaatatcacacggggtttccccaaaacggcaaaggaagggagggggagggaccaagccgtgttcgggaacatgttggcggggaaggaggaaggtacataaccacaaggtgttgttttcctcctggacgggaagaaagggaaaacgtacccatcgacacggggatggggggggggggcccacaccccccgggggcggatttattgggcggggctgggggaggacccgatcttgccgggggtggctctgggggcccccagggggccggcggcgggaattgtggggccgatcagggggcccacccagaagagggggggggggtcccaagccttgtccttggtgggggggaccgttgttcccaacctcctcagggggccccccccaaagcccgtggtggggccgggggcctggcgctccttgaacacggcgagccccacaggtacaggggccgattccggcacgtggcggttatggggactgggcccggggc

SEQ ID NO: 98689 - DNA, 864 bp, Zea mays
  unsure (1)..(864): unsure at all n locations
  Clone ID: MRT4577_21513C.1
gaaactcatacaaatcctatcaaaaactgtaacaccaagctcactgtcgtgtacgcaaggtaaagaagacagctntngtagaattctgagtattcttgacgggccttatgatactgtgaacacacccagtaataggtaccatgtacagaaggatcaacatcaaccatgctgtccaaagtggttttgccttcttctagcagattcttacaatccttttgattccctttctcaagaagaaatgttgcaatctgcatctttacatacagaatgggctcttcaacccgcgattcacgggtatcacgtagttttgaaattacgccttcaagataatttataccagcattcttgtccaaatactggtgtgaaactacgactgtgaagtgagcaaatttaagaagactgatctttgtctcaaaatcagagatgaaatgattataaagatgaatcagagcatcgcctgcgacgacggcgagggcgaggaactgctccagcttgagggctggtttggtgaccggggatcccaagcggaagaaatccttttgctattcaaaattgaattgcaagggaattcctcccccatggatcccctagggatccctaatcaccaaatcagcccagggtgagctggtgccatagctttcgctggtacaggtcggcgagcgccgcgtaccattccgcgagctcggctgggtcgcgccctgcgcctccaggaactccaacgccgctgccatcgacagccaaagtcccccttttctttcgtcccggccaagaagacgagcacgggaagaaccgaagcacgaatgcacgacggaacgatctgctcggtcgcggtcgggctccccgccggcctcgcggtacccaatg

SEQ ID NO: 98690 - DNA, 366 bp, Zea mays
  Clone ID: MRT4577_21514C.1
gtgggcgaaaataaaaacgcagggtggcgaacaaaaacttttttagaaaaagctaaaagccccgggcagaaaccaaaattaaagggggggggcaaaaaaccaaatggaaaaaaaaccaccccggacgggaattgttttttttttttgggtaaaaaaagcaggaaaaatgcatgcatgaccccgggaaaacactccatcagcataaggggggaaaaatcccccatccaaaaagaatacttgggtgaaacccgggtgggaaaaccaaatttaaagcgctggcgttgttgctggtaccggggcccccagcggggtcggggcccccaccgggctttttttaaaccttttttttccggaacccgggggtaa

SEQ ID NO: 98691 - DNA, 275 bp, Zea mays
  Clone ID: MRT4577_21515C.1
tttacaactacagtcaaacgatctaatcctcctactaaatcaataccatcaaaatgtcttggcgtgacgacgaccacaaccagcagcagcagttcggttcttgcggtaacactgatcactttagctccactggagatcaatttgggtctagaccatatacctacggcaccggcaatcgccgcaacgattagacctcactcggatccagcggccaggagtcctatggccaaggcaacacattcggctcacggaacgacgacctcagatccagcggt

SEQ ID NO: 98692 - DNA, 552 bp, Zea mays
  Clone ID: MRT4577_21516C.1
cagagcaagcaagcaagaaaccttcacagcatccaagcaagcagcagacagtgatcatcatccatggcggcgcaccagcagcaaccgcagtcgcagtcgcagcagcaggcggtggggttcgaggactacctgccggtgatggcggagcggctgggggaggaggggctgatggaggacctggcggcggggttccggctgctcatggacccggcgtcggggctcatcaccttcgacagcctccgccgcaacgcgccgctgctgggccttgggggcatgtccgacgacgacctccgcgggatgctcgccgagggcgacttcgacggcgacggcgcgctctcccagatggagttctgcgtcctcatggtcaggctcagccccgacctcatggacgagccccgcaggtggctcgacgacgccgtcgcgcaggcatcccacttcctcttcaccagctaggctgctgctgcatcgatccgataggaaaattaatcttcttcttccttgtcgtttcttcttctctccgctgttcatagagtcaggattcaagaaaagaaa

SEQ ID NO: 98693 - DNA, 350 bp, Zea mays
  Clone ID: MRT4577_21517C.1
attcggctcgaggctgttgtgggttggcttttctggatcaaatggactacttaataacgggggaccgtgctgacctgcatgatcttttcatggtcacaactgagcccatgtgtctagatgcatactcataggaattgcaaatgccatagactcaacagatcgactgcttccaaagctgggatccttaaattgcaagcctctggatgcgactcttcgcgcatattgtaaggatcaaatgtatgacatagctagtcataggctacaggaccttgaggatgatgtttttgaaccactagctttggtgtcttgtgcttgaaaagctgcagctgactttgatgacatgagaaaag

SEQ ID NO: 98694 - DNA, 596 bp, Zea mays
  Clone ID: MRT4577_21518C.1
attcccctccacagcagagcaagcaagcaagaaaccatcacagcatccaagcaagcagcagacagcgatcatcatccatggcggcgcaccaccagcagcagcagcaaccgcagccgcagcagcaatcgcagcagcaggcggtggggttcgaggactacctgccggtgatggcggagcggctgggggaggaggggctgatggaggagctggcggcggggttccggctgctcatggacccggcctccggcctcatcaccttccacagcctccgccgcaacgcgccgctgctgggcctgggcggcatgtccgacgacgacctccgcgggatgctcgccgagggcgacttcgacggcgacggcgcgctctcccagatggagttctgcgtcctcatggtcaggctcagccccgacctcatggaccagccccgccggtggctcgacgacgccgtcgcccaggcctcccacttcctcttcaccagctagattccggccggataggaaaattaatcttcttcttcttcgttgttgtttcttctctcccccgctgttcatagagtcaggattcgagaaaagaaaaggcactgtcgattggttgac

SEQ ID NO: 98695 - DNA, 238 bp, Zea mays
  Clone ID: MRT4577_21519C.1
gggggagcaacacgggcagggaaaatattaatattgacccatctctgacttggataccacgagggcccgtgttcaacatgccgtatgggagaaagctaggaccccttatcgctcgatgctttctggacacgtcttggtgcatatcatactagaccgctccccacgtgctgatggatgccagcagaggaatgaaactttacagttataccttgtagagtgctcacccccggacatttga

SEQ ID NO: 98696 - DNA, 1821 bp, Zea mays
  Clone ID: MRT4577_2151C.1
atggatcctaagggaaaggggatggtggtcaacgacaagacaaaggagtccatcgtcaacgagccaagagatgataagccttcggactctggctcgagtcataagaaaagagacgggaataagaagaggcgcatcaagaagatcgtctactacgacagcgacgagtcctcttcttccccaagagacgacgacgacgagaaaaagaaaccggttaattcaaacttttcttttgattattctcgtattccggttaactccaatgctcatttactttcaattccacttgggaaacctccgaactttgatggagaagactactcattttggagtcacaaaatgcgaagtcacctattctctcttcatccaagtatttgggagattgttgaaaatggaatgctttttgatagtactgataaccccgttttaattaatgagcaaatccataaaaatgcacaagctaccactgttttgctagcatccttgtgcatggacgagtaccacaaggtgagcggcttggataacgccaagcaaatttgggataccctcaagatctctcatgaggggaacgacgccaccatgatcaccaagatggagttggtggaaggcgaactgggaaggttcgcaatgatcaggggggaggagccaacccaaacgtacaacaggctcaagaccctggtcaacaagatcaggagctatggaagcacgagatggatggaccacgacgtcatccgacttatgctcaggtccttcagcgtccttgatcctcatcttgtgaactcgattcgtgaaaatcctaagtacacgaagatgacgcctgaggaaatacttggaaagtttgtaagcgggcgtatgatgatcaaggaagcaagatacgttgatgaggcattgaatggcccaatgcccatctacgagcctcaaactgttgctctcaaagcaacaagcagccgggaggcactacctagcaaggtggcgcaagttgaagcggtcgggctaaatgaggacgaaatgaccctcattatcaagcgcttcaagacaacgctaaaaggacgaaaggagcatcccaacaagagcaaagcaaagggaaagcgctcctgttttaaatgtggtaagactggtcatttcatagcaaattgtcccgataatacaaatgaccaggaacaagaaaggaatgggaagagggagaaaaagaagacctacaagaagatgaagggcgaggcgcaccttggcaaagagtgggactcggattgttcttcgtccgactccgacgacgaaggactcgccgcctcggccttcaacaagtcgttgctcttccccaacgagcgccatacttgcctaatggcaaaggagaagaaggtaaacgctcgagaaactcctaagtactctacttctagtgatgaggactctagtgatgatgaagtagattacactagcttgttcaaaggattagatagagctaaagtggaaaagattaatgagttgattgatgcattgaatgaaaaagatagactgctagagaggcaagaggacattttgtatgaggaacataacaaatttattagtgttcaaaagtctcttgccttagagattaaaaggaatgaattactatcttctaagttatctatttgcaatgaatctatttctagcttgaagattttgagtgatgatttaaatgctaatctagaagtcgttaataaatctagtccttgtgtagagcacgttgtgatttgtaataggtgtaaggatttcaatatagatgcatgtgttgagcaccttactgaaagggaaatgtgcccttgggctatttctaatatattttggtga

SEQ ID NO: 98697 - DNA, 712 bp, Zea mays
  unsure (1)..(712): unsure at all n locations
  Clone ID: MRT4577_21520C.1
atggtgcattcctcgtgtaccagagattctgtgctgctgaatacgcatgatgatacctctgctgaatgtgctttccactgctttgacggcgacaactcgcagagagctcctcctcctatgaagaaggactacaaactgcgtaatcttctatgctagacagtgagggaaacgaatagccatgggcaggagagaggcgaccagcagattcgatgagtcaagaccnggcttcttcgtccgcatagttcgtttcatgagttgcttattttatatctgcgcaatttcgtggctgaccgatgcctattctgagaagcaggcaagacaagatattgttatgaaaatttgccagtctgtaagcatgtcgaacttccgacgctgcacacatgctggatcagtctgaataaggaaccatgcagctgtactgggtcaactgcgtctaccacaatgacaatgaacgtatggagaactatctgggaatccattatgatgatgaataagatttgctttttcgaggtatatccaatgccacgcaggccctggaggatcttccctccccatttttccccagccgacctttcccatagaagtcgcactacctgaatcctgcactctgggacatcgctgcccctcatccatggtacacatcatgccggccgtctcctacctccccatgccatatattcatcacgacaccttacctccatttctctcttcc

SEQ ID NO: 98698 - DNA, 1780 bp, Zea mays
  Clone ID: MRT4577_21521C.1
ggggcgcccaccctctggtgtctctcggcctaacccacaggttcgagtccaaatatgtaacagtcgtcctgtacaaacccatcgaacgatagcaatagcccgcgcctgaagagcggaagttgacaactcactgtgggagcagcgatgaacagcgccgaagtggtacatgcttgtaaaagcggttgaggtccaggagtatttttttcccgtgcccttagcttgcacaacctgtggtactctggtggttagctgtacatgctgcgctgtcatgatggttggtttgctgttacagagagccaaggcgtccttgattccgaagtacacgtacgtttgtcgtcgtcgttcctccccccatcccatcccaggaatgaaatgtttgtaggtgtcactgaaaaccgtgtaaatccacataaatgctatgagacatagattataccatgtgattcctaaattttagtttgtttttttagcactggccacgcgtccgactagttctagatcgcgagcggccgctcgcgatctagaactagagcacgtgcggggcgcgtgctcggtgggtgtcgtaggttacggtggaggcgccgtgtaggaacccatgtatctgtggcagtagcacgcgccaactgggaatcaagaaaagccatgcaaaaatctgggaaagatcattctcttttgctggtactcccagcaggaggttaccgatacagatttgttgtagatggagaaaggagatgtcttccagatctcccctgtgaaatcgatgcaatgggcaatgcggttgactgtgtatatgttaaaggatcatgggataactggaaatcaagaaaagccatgcaaaaatctgggaaagatcactctcttttgctggtactcccggcaggagtttaccgatacagatttgttgtagatggagaaaggagatgccttcctgaccttccctgtgaaactgatgcaatgggcaatgcggttaaccttcttgatgttaatgattttgtcccagaaagtgttgagagcgtggtagaatttgagccaccgctttctccagactctagctacagtttccaggcacctgaggacaaggacttcgccaaggagccacctgctcttccagctcaactccatctcggcgtccttaactcacagaactcggaagaaagctgcgcgcggccgccgcacatagtcctcaatcacctcttcatagagaagggctggggcgcccaccctctggtggctctcggcctaacccacaggttcgagtccaaatatgtaaccctcgtcctgtacaaacccatcgaacgatagcaatagcccgcgcatgaagagcggaagttcaatgcttgacaactcactgcgggagcagcgatgaacagcgccgaggttgtacatgcttgtgaaagtggttgaggttcaggagtattttttttccgtgccctgcttgcagaacctctggtagtctggttgttagctgtacatgctgcgctatcatgatgttggccttctggtttgtttacagagagacaaggcgtccttacaatttttacatgtccgcttgtcgtcgtcgttcctctcccatcccatggcagattggcaggaatgaaatgtgttgaaatccacatgaatgttaggtgccggagatagatcaagggattcctagatttttatttgttttttgactggtcaagaagatgttgttgttatgtactaaactcaagaaatttttacaaatgagatactagtgttctcaaaaaaaaaaaaaaaaaaaaaaaaaaaaaaaaaaaaa

SEQ ID NO: 98699 - DNA, 271 bp, Zea mays
  Clone ID: MRT4577_21522C.1
acgctatctgcgcatgatgattctgaccggttgcttcactttttcggtagacagtttcggctagttctagctccatacgaagatgctcagctgtatataaacagttctccacgtctctctactgcatgcataagctatctggaaaatcctcgtgagatgctcaatgaagcggcgaaagctgcagaggaagatctatggtaaaacgtgttgagatgctcaatgaaggcttttgcgaatcacttgaagcggtagtacttatgtgaatattttg

SEQ ID NO: 98700 - DNA, 846 bp, Zea mays
  unsure (1)..(846): unsure at all n locations
  Clone ID: MRT4577_21523C.1
cacctcaccgctggccggccgcgcgggcagtcgacaacgaccgcggacgacaacaacatcgaaaatggtcaacctccgcactcagaagcgcctcgcggcctccgtggtcggttgcggaaagcgcaagatctggcttgaccccaacgaggtcagcgaaatcgccaacgccaactcccgccagactgtccgcaagctcgttcaggatggtctcatcatccgcaagcccgtcaccatgcactctcgtgcccgcgcccgggagctgaacgccgcccgacgaattggccgacaccgtggtttcggtaagaggaagggtaccaaggacgctcgtatgccaagccaaatcgtctggatgcgccgtctccgtgtcctccgccgtctcctcgtcaagtaccgcgccgccggcaagatcgacaagcacctctaccacgagctctacctcctctccaagggtaacaccttcaagcacaagcgtgctctcgttgaacacatccacaaggccaaggccgagaaggcccgcgagagggtcatcaaggaggagatggacgccaagcgtgcgaagaccaaagcggctcgcgagaggaggcaggagcgtatccagcagaagcgccaggctcagctgggcgacgaggagtaaagaatggatgtcgtgacgaacacctggcgtgagtcttttcaaggttaaaggagggcgtcaatctcctttttatctgggcatatgcggtcatgtttcatgttacgtctgtgaaggactcttctcgtcatgcatattcgaccgacaggggtgcccctctctgattttcgatgctatgactgtaccanaaataaagggatatgagcatcggcaac

SEQ ID NO: 98701 - DNA, 1541 bp, Zea mays
  Clone ID: MRT4577_21524C.1
ctccccaacaatctctcgagtctcgccagtcgcctcagcttgcccctcctccaagcgtccaagccccacccggccattgcctcctcctcctgccggctgccgcaggcacatggcgccgaccaggcacgcggatgagggcgggcagctccagctcatagacgccgccagcgtcgacgaggaggaggagtgctttgagtccatcgacaagctgatttctcaggggataaatgcaggagacgtgaggaagctgcaggatgcagggatttacacttgcaatggcctaatgatgcataccaagaagaaccttacaggaatcaaaggtttgtctgaagcaaaagttgataagatctgcgaggcagcagaaaaacttctgaaccagggcttcatgacaggaaatgatctccttctcaagcggaagtctgttgttcggattacaaccgggagccaggcacttgatgagctgcttggcggggggattgaaacactttgcatcacagaggcattcggggagttccggtcagggaagacccagttggctcataccctatgtgtctccactcagcttccaatccacatgcatggggggaatggaaaggttgcctacattgacactgagggaacattccgacctgaacgcattgtgccaattgctgagagatttgggatggatgccaatgctgttctcgacaatatcatatatgctcgtgcgtacacatatgagcaccagtacaacttgctcctgggccttgctgccaaaatggctgaagaacctttcaagcttctgattgtggattctgtgattgcactgttccgtgttgatttcagtggcaggggtgaactagcagagcgccagcaaaagctagcacagatgctgtcacgccttaccaagattgccgaggaattcaatgttgcagtgtacatcaccaaccaagtgattgctgatccaggtggcggcatgttcataaccgatccaaagaaaccagcaggcggccatgtgttggcgcatgctgccaccatcagattgatgctgaggaaaggaaaaggcgagcagcgtgtctgcaagatcttcgatgcacctaaccttcctgaaggagaagctgttttccaggttacatcaggtggaatcatggacgtaaaagactgattcgggttttcagccagagtttctgccgaagaagattgttcatgtttctgcagtgaagttcacatagcttgcataggtacacatcgagcgaagttacagcagtggtgtactctgttttatcattgacgtaggaaaaataaataggcgaaactctatgttgcttaggcctcccattgggtagttttttgccacggattacatgtttccttatggagggagtatgttaccgtgtcctttgctttcccaaatgagtgctaggcactaggcagagaccatctactgttagttgtttaagcatgctcatctccatgcttgcgtataaataacactgttctttctcattaaaaaaaaaaacaaagggcggccgaagactagagagccaatcgatcaatacagt

SEQ ID NO: 98702 - DNA, 755 bp, Zea mays
  Clone ID: MRT4577_21525C.1
ggcctcaaagaaatataagattgcttacaacaagaaacgttctggatgagcggaggatatttttaagtgggaacatacaattcggactggtgttccaattgacttaagagggtattttcttcgtaccaccttctcagccgtttaaatttgttctatgataatcattgtataaaatatagttggcaacatattattctataggcttaatatcagctacctcgttctacaagctatgaccatatgggtaaatgacaaacgaatggaatttgttagggtgagtgtagtacgttcgtttcatgttcaaaacatacattccggtcatataatacaaattgacgttttgttctcttatctccttgtctgtaagatgcaaagattcttcgaaggaattttgtgattgatctgttaagttatgaggacaattcgggctgatatgtcatccctgcaaaacatacaacagagacttatcgatatcgctaaaaaggattagctgattagtgtacggttgtcgacacatttgtctgtaatttaaaattctaaattaactttttaaaaataatttgtgtgatatttataatgatttgatatttataatgattttcacacgtattttgcatattatagtgatgtttgtcgttcagtatcaatgttttatataaatttttttacttccatcgcaatgcacgggcacatatctagttacttcaataaccaatcaccaaccaatagaagttggtgacatgtacaataactcc

SEQ ID NO: 98703 - DNA, 365 bp, Zea mays
  Clone ID: MRT4577_21526C.1
gggggggtttttttttttctaggttgtgggtggtgcgggctgagccaggcacccgggagcagtctgcgcgggaagagagggggatggactagtacaagggccgggcggggggagacggggcgtccccacatgtttaaccccacccgcgccagcggggagggggcccttgcacgggagggccctcccgagcccggggagggagggcttcccaggggggcgcccgtgaaggggccgacccggaagaccaaagggcgctgcatgcccgcccccggctgctgacgacggggggactatgggcgctagacggggtgggcccagggccaacgagggggggggagccaggtgttaccagggacaccgcgaac

SEQ ID NO: 98704 - DNA, 1632 bp, Zea mays
  Clone ID: MRT4577_21527C.1
ccggccggggaggcccagcaaaatttccccgttcttgcttcccctccgtgtccactctcgatcttcccttccccctcggcgccggtctccaaacccgcttccgcaattcgtaccgcttccggttccgggggcgggcgggcagcaccgtctcggctctcggatactatggcttccggcgaggggtgggaggcggcggtgcgggcggaggtgggcgccgttgcctggtgggacgacctggacagcgccgacctccgcgccaggttcaaggccttcacggggcagcgcagcgactggcctcagcccacggtcctcttctggaaggaccttctcctccgcgtcgccaggcgactccgcgtctgctccgcccctgcccaccacgtgacgagcgcttggttcgcgcgccccggggggctcacgccgctatgcttgccgcaagttctggaagagatgcgtgcggatggggacgtactgctgaaatccgagctgattgatccatcctcaacgaacctgcaccagctggtcaggagggtgagactcatgaccatcagctccaggaaggcggtttggcaggaggatatcctcgtgttcaaattgttgattgaggaacgagctgccgatattgctaggcaattgagtgactctcattggacatcgacatgtgttgtcacgattagcaaattcaatagcttctttgttgacatggatgatgctcatattgcattatgttttttgacgcaacatgggaaagctaggtacctttcgggcaggaaacaagaccctattgaggctcgcgccgttgcactcactgcttcgcaagttcctgctgtatccaaacttgaccatgacaccttgcacttagtctggacagaagagaagttgcaagaacagcttgatgtgcttgatcgacgatgggagatttcaaggcgaagggcattggcatccttcaagtctggagataaactagctgcttatcgttatgtgaggcagtctaaattattctcacaaagccggagcagatgcacacagttgttggaaaggattgaagaagtcatcagcctaattgctagtgctgaatcaaataagaaggtttatgaggcaatacaaattggtatcctggcaatgaaggacaacactgtcagcatagatgaggttaacatccacatgaaggagattgatgagcttgttgctgcacaaagagaagttgatgctgcccttgtaccactccagtcgttagatgatgaaggagatattgatgaagagttcagcaagcttgaagcagaattgcaggatgacgtccctcatattcatgttcaagaaccaatggcaccttccaacgaggaatcacctgatgaagtggttgaatcattgagccataacatgtcaagaattagactggagcccatctaaatgctccattttacgtttaatcaatttgacctgtacatagtgtgatctagtcaaatcatctagtcccaacaatgtgtcttatgtttcttgttacaccatccttataaaagggcaattctgttgcagatattcctcaatgttgcctgctgttttattgagcctccatggttcacctcctacatttttttgaaaacgtggttttcataccctaaaaaacttagttct

SEQ ID NO: 98705 - DNA, 320 bp, Zea mays
  Clone ID: MRT4577_21528C.1
caaacccatgatctatgttagggggtaaaaaacagggatggcaaaagaacaatcactttggacccactcaaaaggaattccccggggaaaaaaaaaaataatcacgaaccaccctagttggttagatctacaaattttacgccgcccccggggggggggtttacatgggccttgaaccaaaggcataaaaacctttgttttggttgttgttccagctggacgggctaaaacccgccgggaaattttggttgccgaacgccatccgttgaaacagcctgttctgggccgggttcgcaacgttaaacatctggtttttgcct

SEQ ID NO: 98706 - DNA, 270 bp, Zea mays
  Clone ID: MRT4577_21529C.1
gccggtccggaacggccgggttggccttcgcgaccttccattcgtgcgcccacgcgcccgcagagaggagcgtcatcttttcagtcaattccggcaccatcccacgactctagtggcccgcctccgttccataataaaccagctgcgtcctacccatatttcctatcgtcttctacctagaacgatcagcttgcgcaagccagcggcgaccatgagtctacgaggacaccatgcatacgggcatcggccacatcggcaatgggactggac

SEQ ID NO: 98707 - DNA, 299 bp, Zea mays
  Clone ID: MRT4577_2152C.1
ctccaccctcaacagtggcaagaagagcctggagactgaacacaaggccttgaccagtgagattgcactgctgcagtccaggctgaagacagagggctctgatctgtgcgacagagtgagcgaaatgcagaagctggatgcacaggtcaaggagctggtgctgaagtcggcggtggaggctgagcgcctggtggctggcaagctcaagaaagacacgtacattgagaatgagaagctcatctcaggaaagcgccaggagctggtcaccaagatcgaccacatcctggatgccctgtagc

SEQ ID NO: 98708 - DNA, 504 bp, Zea mays
  unsure (1)..(504): unsure at all n locations
  Clone ID: MRT4577_21530C.1
ccnccaggcgcccgagggcatgaagagcctcggcacgtcgtactccatgaccagcctcggcatcggcaacttcctcagcagcgcgctgctctcggctgtgtcgcacatcacggagcgccccggccggaccggctggatcctcaataacctcaacgcctcgcggctggacaagtactacgcctttttcgccattctcaactgcgccaacctcatcgccttttttttcgtgtgccggttttacgtgtacaaccccgaggtatcccgcgtcgtcgcccccgggagcagcaagcagaagcgggaagtggcgatgcagccggcggccgtgggcgcagtggaggcccccctatagtagctactagtgttccattacaaatgtagctgtcatactcatacgtacgtgaaaagctctgcgtgtacattgcgtaaaaaaaaaaaaaaaaaaaaaaaaaaaaaaaaaaaaaaaaaaaaaaaaaaaaaaaaaactcgaggggggggcccgggtac

SEQ ID NO: 98709 - DNA, 273 bp, Zea mays
  Clone ID: MRT4577_21531C.1
aaggcaaaaatgtgagcctgactgatttgttgggtcaagtgaaccgggttccagatagaataggctacacacattcttttttggtatacacatgctggtggtcgaacaccggagttaccggttgcccttccagcgatactcaaacggaagaagtaacggaaacagcacatgctagatcactggcaaagcatatatggtggagttacatttaccgttcttcctaaacgtgttcaaatattacagacagttgggaccagtttgggaaacacagtg

SEQ ID NO: 98710 - DNA, 2033 bp, Zea mays
  unsure (1)..(2033): unsure at all n locations
  Clone ID: MRT4577_21532C.1
cattgggacctcgagccggccgggatatacgcctcctccctgaactagagagcagctcactcccgctgcccagtcctcgccaccgcccactccgtcgccaaccaatggcctccgccatggagctctcgctcctcaaccccgccgcgacgcaccgccaccgcggcggcctcgccggcctgcccctcgcgcggcgctccgtggtccgcttccgcgtgtccgcctccgccgcggccaccgcgccgcccaagtcctcgggccccaagaagcggggcaagacggagatccaggagacgctgctcacgccccggttctacaccacggacttcgacgagatggagcgcctcttcaacgccgagatcaacaagcagctcaaccaggcggagttcgacgcgctgctgcaggagttcaagacggactacaaccagacccacttcgtgcgcaaccccgagttcaaggccgccgccgacaggatggagggcccgctccgccagatcttcgtcgagttcctcgagcgctcctgcaccgccgagttctccggcttcctcctctacaaggagctcggccgcaggctcaagaaaaccaacccggtcgtggcggagatcttctcgctcatgtcaagggacgaggcgcgccatgctgggttcttgaacaaggggctgtctgacttcaacttggcgctggacctggggttcctgaccaaggctaggaagtacaccttcttcaagcccaagttcatcttctacgccacctacctgtccgagaagatcgggtactggaggtacatcaccatcttcaggcacctcaaggcgaacccggagtaccaggtgtaccccatcttcaagtacttcgagaactggtgccaggacgagaacaggcacggcgacttcttctctgccctgctcaaggctcagccgcagttcctcaatgactggaaggccaagctctggtcacggttcttctgcctctcggtgtatgtgaccatgtacctgaatgactgccaacgcactgcattctatgagggaattggtctggacaccaaagaattcgacatgcatgtgatcatcgagaccaaccgcacaacggcgaggatcttccctgctgtcctagacgtcgagaaccccgagttcaagaggaagcttgacaggatggttgagatcaaccagaagatcattgccgtcggagagtccgacgaaatccccctagtgaagaacctgaagaggattcctcttgtcgcctctctggtgtccgagatcatcgccgcatacctcatgccccccatcgagtctggctcggttgatttcgccgaatttgagccccggctcgtttactgattctgtacaaagatttatccttgagttattcaccctgaaagacaagctgctggtgctttctgccgaaggggccttgaatgaatggtgaaaaccgctggatggttagaggatctgcatcttcttgtgttcttctgtaaaatactgagacttgggcagcataaaaagcttggcaaatttctgttgtgtggcatctccatgtaagtaacagtggactgcatgcagaagcgagcgttccagttttgcgacagaagggggcgtccgaagttgttgtactgctaatgaacgtcgaactagcatgataaatgtatcccagcacatttggttgattgtgtaacactagaaagccattgaacagcgtttggctatgatgctgtaccatctgaatttacatagctccttttgttttagcgatgtcattgtcatgcatcatgagtgacgtctacaaacatttgtaagaaaatcgtggtagaagattgtcagtattagcataaaaaaaaaaaaaaaaaaaaaaaaaaaaaaaaaaagcggccacatttttagaagagggaaacaacacgtatgttcaatgtaacaaattgaattcatatacatggttatctatactatanaaaaaaacaaaaaaaaaaaaaaaaccgcgctcaggagcattcgataagccgaagaatattcgaagacgaggagcagctacactgcggacggact

SEQ ID NO: 98711 - DNA, 467 bp, Zea mays
  Clone ID: MRT4577_21533C.1
accaaaaggcaggggggcaactggggctaatagcaagaagggggagggggaaacggggagcaaacaggagcagagggggggggggacacaaacaccggcacaaacctcacagcaaagcaagcatgcaactggtgccacatggagacgaaccacggcgaggggggaggcccaaggtggagacccaaagcaagaacgaccctctcgtctcggtctttggctggacgaaaccccaaaggggggactcaattccaggaagaggaaccaagtgggcccggcgcacctctgagcacggcccgagtagccaacgccggtagacaggtggaaaacaggaccgaacccgaacttcggggcgctgggggggaagacgaccacctcgcccacaaaaggggtggcgtcgcggaagaaaaacaggtgctggtgctggaccggcgcccgggggagctgggggtgccggtgccggaacaagc

SEQ ID NO: 98712 - DNA, 1461 bp, Zea mays
  Clone ID: MRT4577_21534C.1
ttccccatctcccagatccaattcgcgagttctccctcctctgcggccatggcgctctctgtggagaagacctcgtctggacgggagtacaaggtcaaggatctctcgcaggcggacttcggccgcctcgagattgagctggccgaggtcgaaatgcccggcctcatggcgtgccgcgccgagttcggcccgtccaagcccttcgccggcgctaggatctcggggtctctccacatgaccatccagaccgccgtcctcatcgagaccctcaccgcgctcggcgccgaggtccgctggtgctcctgcaacatcttctccacgcaggaccacgccgccgccgccatcgcgcgcgactcggccgccgtgttcgcctggaagggggagacccttgaggagtactggtggtgcaccgagcgctgccttgactggggcgaggcgggcggccccgacctcatcgtcgacgacggcggcgacgccacgctgctcatccacgagggtgtcaaggccgaggaggagtacgagaagaccggcaagatccccgacccggagtccaccgacaacgctgagttcaagatcgtgctcaccatcatccgcgacgggctcaaggctgaccccaagaagtaccgcaagatgaaggagaggcttgtcggcgtctctgaggagaccaccacgggtgtcaagaggctctaccagatgcaggagaccggcgccctcctcttccctgccattaacgtcaacgattccgtcaccaagagcaagtttgacaacctgtatggttgccgccactcactccctgatggtctgatgagggccaccgacgttatgatcgccggtaaggttgccgtggtctgcggatacggtgatgttggcaagggttgtgccgctgcactcaagcaggctggtgcccgtgtcattgtgaccgagatcgaccccatctgcgccctccaggctctgatggagggtcttcaggtccttcccttggaggacgttgtctcggaagctgacatcttcgtgaccaccactggcaacaaggatatcatcatggttgaccacatgaggaagatgaagaacaatgccattgtctgcaacattggccactttgacaatgaaattgatatgctcggccttgagacctaccctggcgtcaagcgcatcaccatcaagccccagactgaccgctgggccgttgtgtgctatgaagttcgctacactggcctgtcagttatcttttgcatgcatatgcattatcatatacgcagtcgcgtagcaggtttccttttgctgaagaataatggtgtagtcggctggggtgaggcgatgtgcgttgccagatacagttttgtcttgttgactctacttatctgattatcatttgtaagcgatttgctcaagttatttgtcgtttatgaataacttgctttcctcaagagcatacttaaagacggatcctgatttgcgttg

SEQ ID NO: 98713 - DNA, 275 bp, Zea mays
  Clone ID: MRT4577_21535C.1
tcgcctggctattgtcgggtccttaataaagagcagcagcgcaagaggttggtagagcgagcgagaggaaggcaatggcttgccgagagcttcctgttcaccgttgagtacatgaacgaggggcacccagacaagctgtgcgaccagatgttggacgctgtgctggacgcctgcctggcgcatgaccccgacagcaaggtggcctgtgagacctgcaccaagacaaacatgggggtggtgttcggcgagatcatcacctacgccagcgtgtgact

SEQ ID NO: 98714 - DNA, 267 bp, Zea mays
  Clone ID: MRT4577_21536C.1
ccctcccaatgataccagcgtatgaattcttaactcgattctctaatgccatgccagcagaaccataatccattttaccgctcatcagtgtacatctctctctctgtaaaaaccttgggctgactcagctgattgcacaagcaaaacaagacatttatcttacatcttctaatagcgaatcagatcaaaactgcccacatgcttaacatgcctgcactcttaatgccactgcttacccaaccccaatgcgcccatctacttcagctg

SEQ ID NO: 98715 - DNA, 509 bp, Zea mays
  unsure (1)..(509): unsure at all n locations
  Clone ID: MRT4577_21537C.1
acagtggcattagtggtgatacaagcacacttgaatatggcaaacccatagatggcgctagcacaaacagcataagagagggagcacgcaagcatattggttatcatggatggggcaatcttgattcctatatataatgtaggaggtttgcgcgaactgacaaagcacctcgcctcgacgggcgatttaaagggcaatggccagcacacttaggggctccactatcggatccaagctcggcgccaagatgggcatagttatggccagagctaaattctgagtcaaacacaattccactcacaataccacacaacatacataaacggaaaaatctggggtgaataatgagggacctaacgaacgagaaaagtgacatgaatcagtgtcgcgcttactgtccggaaaccatgtcggaaacctgtattgacgaatgcatcaatgaaccgggagaggcgcgttgagaggcnggtcgctgtttcgcttgctctttcactgactcgctgacttac

SEQ ID NO: 98716 - DNA, 445 bp, Zea mays
  Clone ID: MRT4577_21538C.1
agcaagttattcataaacgacaaataacttgagcaaatcgcttacaaatgataatcagataagtagagtcaacaagacaaaactgtatctggcaacgccagggtaggtctcaaggccgagcatatcaatttcattgtcaaagtggccaatgttgcagacaatggcattgttcttcatcttcctcatgtggtcaaccatgatgatatccttgttgccagtggtggtcacgaagatgtcagcttcagagacaacgtcctccaagggaaggacctgaagacccttcatcagagcctggagggcacagatggggtcgatctcggtcacaatgacacgggcaccagcctgcttgaggggcagcagcacaacccttgccgacatcaccggaacccgaaaaccacggcaacctttccggcgatcataacgtcaggggccctcatcagaccca

SEQ ID NO: 98717 - DNA, 510 bp, Zea mays
  Clone ID: MRT4577_2153C.1
gcacagaccacaatctcctcgtagagtactagttcacggaattggtccaaagaacagcatgtatttaaaaaaaggtgggtcgcgcatgcataagcgccctcgtttctctttgccagatgattcagatgattcccttcttgtggatgagccggacgagggcccatccatgccatggatgcgcactgggaggggaagtatgccatggttgatgggtgggttggacatgcatagtccagcatcatggggcctgagtgttggagcatctggttggggtcatcagggtgacacttctacttcactcatgcctggggtgcaaactgctggaccaagttctacgggaggagccgacattcaacctctgcaggttgacgagaatgtgagctttaaagatataggtggactttcggagtacattgatgctctaaaggaaatggttttctttccattattgtatccagatttttttgcaaactatcacatcactcctcgcagaggtggtctgctttgtgg

SEQ ID NO: 98718 - DNA, 521 bp, Zea mays
  unsure (1)..(521): unsure at all n locations
  Clone ID: MRT4577_21540C.1
ttgggaccctcgaggccggccggggcaagctcttcttgcttgaacgcacaacctatgcttgattgtaccctcactgcttgatgacctcactatgagatccatgtaactgctcccactgagtagagatcccggtcattgcgacttgtagctgccaccgtgtcatcgacaaacatgaatgatgcttcgcaacgtgcatactcatcctcctactactccgagcatgagggcagctgtcacgtgtcctacatgcaagatggaaataccctcctacctaatcatccgaatagcttagtccacatatcacatctccacaatccaatgatgccgcccatacttctgcaaagatgctacatgagatgacacacaatgatcacaataaatccataaatattaaatcatgacactgtatcctacttatacaagaagatgctgcgcgcctaccttgtaggtcgattatgattatgagttcttagattattggtgacgataacatatatatngaatgacgcagtgtatgtacg

SEQ ID NO: 98719 - DNA, 647 bp, Zea mays
  Clone ID: MRT4577_21541C.1
gccccggtccccaattccagccacgacccacgcgtgcgcccacgcgttcgcccacgcgtccgctcttggaacggcagctttcttcgaacctgtctctctctctctctcatctccgaacactactgccaagaaagctgtgggaagaaatgacataacagggactctggaattatattctgtagctagtcagatgtgatgttaattggccatacatatatatgcaaacgtaagttacttcttcgaatccctcgtgctttgtgatgagtatatccactaactactcgtgcagcttggtttgattttgtccgagtgatgcggatcggttttgctttcttcttctccggcctataaaattaacgcggcggcgccgagagcctctctcctccgccacaccactcagcactcagcagctgagcccttcgtagctccagctctctccctcacactatcgttaagcagcacacgggccggggccgatcttactcgtcgagcaagagagctccgtacgagcttcagcttccgtccatgacggacgacgggacgagcagcagccagcctctccttccatcacacacctgcatgcatatgacagtaaacccatctgatataaagcacaaaaacatctatatcccacaaactcgccagca

SEQ ID NO: 98720 - DNA, 473 bp, Zea mays
  Clone ID: MRT4577_21543C.1
ccaaagcaatatgacaagtgctctgcaaacatacctgaaatggggttttcataactaaaagatttacagatccatgaaccttttttttttatactgatacaagcaactactaataatacctcaacccacaccctaaaagaaaggaacctataagaacactggaactacaattacagttaactacaacggcggccacagggctcgtccttatccatgtttacatccctaggcaacaagcacaggattttacaaatcaacctaaataaacttttgatgactcttcttttggaccctcacaatcatacataggtttcagcagggcatgaaccaaggatgtacccattaaggcctacatattactcaacagaatcattttacttacaacaatgtaacggagggactacttggtattatatttggccgcattaacgcccatagctttaacttacaataaggacacatcttattcaaat

SEQ ID NO: 98721 - DNA, 258 bp, Zea mays
  Clone ID: MRT4577_21547C.1
ctcgcagctgcttaacttccaaatcagatcgactgattgttcgacgcatattttgatcgcacactagatggactcatcagattatgcactaatgttatcctcctatgtcacatcactgattgttgcaggaatttcacataacacttctggaatcatattcgcgtccgatcgttctctagaaccggaggcgactagatcacctacagatcaggctatattctcgtgggggcaataactggggatgattttcaatgaacc

SEQ ID NO: 98722 - DNA, 595 bp, Zea mays
  Clone ID: MRT4577_21548C.1
gaggataagactaagtatgctcttgagaaaagcaaagttattcataaatgacacataacttgagcaaatcgcttacaaatgataatcagataagtagagtcaacatgacaaaactgtatctggcaacgcacatcgcctcatccaagccgataacaccattattcttcagctgaagcaaacagccccttacctcaccgcatcccccctcagctcgtatatgacaatgcatatgcatgcaaaagataactgacagccggtgtagcaaacttcatatcacacaaccggcctagtgagctggaagtcgtgctgggctgcctagtaccggtagtgggcaggcttgtaggggccctcgatcggcacgctgatgtagtcagcctgggatttggtgagcttggtcagcttggcaccaagcttgcccaagtggagagcagcaaccttctcatcaaggtgcttggggagcacatacaccttcttctcatacttgccagagctcttctccttccagagctcaagctgggcaatgacctggttagtgaatgagcaggacattacaaagctaggatggccagtagcacacccaaggttcacaaacgac

SEQ ID NO: 98723 - DNA, 247 bp, Zea mays
  unsure (1)..(247): unsure at all n locations
  Clone ID: MRT4577_21549C.1
agcagtggtaacaacgcagagtactttttttttttttttttttttttttttttttttgnncctgcctccttacccgctttccaaaaaccctatctgtcattgcgttgccggggtttcgcgcctcctacgccaatgcttgcttaantaaattctcttgggatgttgggctgcgggggggttgtctcccccttgtcgttttggggggggatggtcgtctgtcccttcttctcgttggtttctggttgtc

SEQ ID NO: 98724 - DNA, 4053 bp, Zea mays
  Clone ID: MRT4577_2154C.1
atggatcctaagggaaaggggatggtggtcgacaacaacgagaaggagtctatcttcaacgagccgaagaatgacaaggacgagtacaataaggtgagcggcttggacaatgccaagcagatatgggacaccctcaagatttctcacgaggggaacgacatcaccatgctcactaaaatggagttggtggagggcgagcttggaaggtttgcgatgataaggggcgaggagccaacccaaacatacaaccggctcaagacccttatcaacaaaataaggagctatggaagcacgcgatggacggaccatgacgtcgtccgactattactaaggtcctttaccattcttgatcctcatttggtgaataatattcgtgagaatcccaggtacaccaaaatgtcgcccgaagaagtcctaggaaaattcgtcagcgggcaaatgatgattaaggaagcaaggtacgtggacgacgccttgaatggaccgatcaacgagccacaacctcttgctctcaaagcaacaagaagcaaggaggcactacctagcaaagtggcacaaattgaggcggccggacttaatgatgaagagatggctctcatcatcaaacgcttcaagacggtgctaaagggtcacaaggggcagccaagcaagaccaagacaaaggggaagcgctcatgcttcaagtgcggtaagattggtcattttatcgctaactgccccgataataatagtgaccaagaacaggaaaacaagagggaaaagaagaagaattacaagaaggcaaagggcgaggcgcatctaggcaaggaatgggactcggactgctcctcctccgactccgacaatgaaggactcgccgccaccgccttcaacaagtcatccctcttccccaacgaacgtcacacatgccttatggcaagggagaagaaggtgagtactcgagactccacttatgcttcttcaagtaatgatgagtctagtgatgatgatgacatagactattcatgcttattcaagggattggatagaaataaaattgataaaatcaacgaattgattgatgcattgaatgagaaggataaactcttagagaaacaagaggatttattgtatgaagagcatgataaatttgtagaagctcaaagatctcatgctctagaagttaaaagaaatgaaatgctttcttgtgaattatcttcttgccatgagacaatttctaaattaaggagcattaatgatgatttgaatgctaagttagagattgctagtaaatctacttcttgtgtagaaaatgttatgacatgcactaggtgtaaagatattaaccttgatgcttatggtgaacacctagcttgcatttctaaattaaatgaagaggtagctagtcttaatgcccaacttaagactagcaaaagtgattttgagaaactaaaatttgctagggatgcctacacggtcggtagacacccctcaattaaggatggacttggcttcaagagagaagtcaagaacttaacaagccataaggcttccatttccgccaaggagaaagggaaggcccctatggctagtagtgtgcaaaagaaccatgcgtttatataccatgacaggagacaatctagaaatgcttataggagttataatgcttatgatgattttgactctcatgccatgtttgcttctagttcttcctatatgcatggtagaaatatgtctagaaaaaatgctattcatcatatgcctagaaagaatgttattcatgctcctaggaaagtagtgaatgaaccttctacaatttattgtgctttaaatgcttcctttgctatttgtagaaaggataagaaaatagttgctaggaagttaggggcaaaatgcaagggagacaaaacttgcatttgggtccctaaggatatttgcactaaccttgtaggacccaacatgagttgggtctatgcatccgggggttcaagctggattatcgacagcggatgcacaaaccatatgacgggggagaagaagatgttcacctcctacgtcaagaataaggattcccaagattcaattatattcggtgatgggaatcaaggcaaggataagtctgaaacccaagggaccctcaagcgcttcctcaggagagctcaaaacgagtttgagctcaaggtgaagaagataaggagcgacaacgggtccgagttcaagaaccttcaagtggaggagttccttgaagaggaagggatcaagcacgagttctctgctccctacacaccacagcaaaatggtgtggtagagaggaagaacatgacgcttattgatatggcgaggacgatgctaggagaattcaagacccccgagtgcttttggtcggaagccgtgaacacggcttgccacgccatcaacaggatgaagaagatgttccgacggccgctatacgaaccatggcgattggagaagtgcggccacaggaacaagatgaacgagatcaaccttcttcctcaacaatggtgcattcccctactcaagacgatgaacagggtagaagaggccttgctagatccagactgggtgttggccatgcaagaggagctcaacaacttcaagaggaatgaagtttggacgctggtgcctcgtcctaagcaaaatgttgtgggaaccaagtgggtgttccgcaacaaacaagacgagcacggagtggtgacaaggaacaaggctcgacttgtggcaaaaggttatgcccaagtcgcaggtttggactttgaggagacttttgctcccgtggctaggctagagtccattcgtatcttgctagcatatgccgctcaccattctttcaggttgtaccaaatggatgtgaagagcgctttcctcaacgggccaataaaggaggaggtgtacgtggagcaaccccctggcttcgaggatgaacggtaccccgacgacgtgtgtaagctctctaaggcgctctatggacttaagcaagccccaagagcatggtatgaatgccttagagatttcttaattgctaatgctttcaaggttgggaaagccgatccaactcttttcactaagacatgtgatggtgatttgtttgtgtgccaaatttatgtcgatgacataatatttggttctactaataaaaaatcttgtgaagagtttagctgggtgatgacgcagaaattcgagatgtcaatgatgggcgagttgaactacttccttgggttccaagtgaagcaactcaaggacggcaccttcatctctcaaacaaagtacacgcaagacctgctgaagcggtttgggatgaaggacgccaagcccgcaaagactccgatgggaaccgacggacacaccgacctcaacaaaggaggtaaatccgttgatcaaaaagcataccggtcaatgatagggtctttactttacctatgtgctagtagaccggatattatgcttagcgtatgcatgtgtgctagatttcaatccgatcctaaggagtgtcacttagtggcagtgaagcgaatccttagatatttagttgctacgccttgcttcgggctctggtatccaaaggggtctacctttgacttgattggatattcagattccgactatgctggatgtaaggtcgataggaagagtacatcagggacgtgccaattcttaggaaggtccctggtgtcatggaattctaagaaacaaacctccgttgccctatccaccgctgaggccgagtatgttgccgcaggacagtgttgcgcgcaactactttggatgaggcaaaccctcagggactttggttacaatctgagcaaagtcccactcctatgtgataatgagagtgctatccgcatggcggaaaatcctgttgagcacagccgcacaaagcacatagacatccggcatcactttttgagagaccaccagcaaaaggaagatatcgaagtgtttcatgttagcaccgagaaccagctagccgatatctttaccaagcctctagatgagaagaccttttgcaggctgcgtagtgagctaaatgtcttagattcgcggaacttggattga

SEQ ID NO: 98725 - DNA, 404 bp, Zea mays
  unsure (1)..(404): unsure at all n locations
  Clone ID: MRT4577_21550C.1
tcggacagcattgcaactctcctggcttatttacagcagcaaacgaactacttaccattgcagggcagtctacgctgagtgtgagcctctgcttaccttcgttggacacaatccagcagcttgttgctcgtatctacacagcagcgtctgcgtcctaacgcatgagcacactgttacaatctgcaacacattgcttgtcattcgaaccaacttgcttnagacaaacgccagcatgcattctaccaacaactccatcatatggtggtgccactattcgtagattctcttatgagtctatnagttcaagtaataagagtctttttagtcatgatgtatcgtggccttcccatgaaataagtacagtacagtttctagaattcctcaatgcagaaacaaaaaggtga

SEQ ID NO: 98726 - DNA, 383 bp, Zea mays
  Clone ID: MRT4577_21552C.1
cttcacataagcttaaccgatatgtttgggtattctcatgttctatgtttgattagtaaccagtattacatatattaattgttctgtagtttcggggctatatcatgtttctacttgttctgtttatcaaataaataaataggtgggtggtggctatagtttatgtgctcaccatgattcatacttcaattttgtaatgtttcatcaatatagttgaagcaacatggaggtgaaagactgccatgtaaccgatgaagatatgaaactgatgaaggggaagaagcataaggacatgggtcagggcctcaattttgttagcttatgtgccaggaaccatatcattgatatggagcaagcttgtgtgtcagccaagatggcttaag

SEQ ID NO: 98727 - DNA, 252 bp, Zea mays
  Clone ID: MRT4577_21553C.1
caaatttgatcattatattaatccactttacactcatggatattaaggtgcgccgccggaatttactattgttcgagattatcccccaccatatgtaagaagtataccatctgggagaggttatggttctccacatgtaaaggattttattaatattaatgtataatttgttcaccgaaatgacccaaatctcttttcaagacaatctgataaaatatgctagaaccctaattgcttaaatatcaattttac

SEQ ID NO: 98728 - DNA, 404 bp, Zea mays
  Clone ID: MRT4577_21554C.1
acacgaagggtggcttagctcgcaacagaagaaaaacgcggatatttgatttaaaacaaaaacataacagaaaatttatggaataaccttttggcctaacggaaaagccccccccatgggcccatccagaaaaacaccgcttacttgatatttaaagaccagcggataacaggcggacctggaggtggcccttccttttaaaagctttattactaaaaggccatacgaaacggaaccacttaacacacggtgcctggcgggggtggcctatccaccggtgccgcaacggaaggatggaggcgccaagggcttcacgaggcgacctccttcatcgattcatgccgccgagggcccccccggtggatttcttttagccccatgggcacacattgcagggggaactc

SEQ ID NO: 98729 - DNA, 687 bp, Zea mays
  Clone ID: MRT4577_21555C.1
acctttcccgcgcgctcgcacgccgccacagattaatcgttctggcattcccgttcctcctccgtcgtcgtcgcactcctctgctgggccagcatagaacagagatccacccgggcttggaggattggtttcttcggtgctgatgcaaggtgtttgttgtatctgagaattcagaatatgggttctcggtttccatcccaccaattaagcaatgggctttatgtctctgggcgacctgagcaaccaaaggagaaggctccggttgtttgctctgcagctatgccatacactgggggtgacatcaagaaatcaggagaactagggaaaatgtttgacctccatgctgagaagtcacggaaatctggccctttgggtaatcaaccttcaaggaatacttcatttggtggtgctgcttccaattctggaccagtatctagtgctgcttctcgatccaactactctggctctatttcagcagcagttcctggcactggaggttcggcaagggcaaaatctaattctggaccgctcaataagcatggagaaccaacaaagagatcctctggcccccagtcaggaggagtgaccccaatggctcgccagaattctggccatctaccgcctattcttccgacaactgggctcatcacatcaggacctatctcctccggacagttgaacttctct

SEQ ID NO: 98730 - DNA, 440 bp, Zea mays
  Clone ID: MRT4577_21556C.1
cttattcatgtgaaaattttttttttttttttttttttttcgcacaaaacagtagcaaaccgcccgaggccacaggtgctgaaaaccacacgtcccttttgttctgaggaaaacttaccccgttccactaaaagcactattagcaaggcttacttacacggctggtattttcttttggaacaatatttggaactttactttaaaagactccatagggccctgcttccttgccttgttctcttggagaagggaaggggtgagccaaaccaccttctgttggttttccaaaaagtttcccaaaaacaaaaggccttggtgagtttgtttttttatcattcccacacaggccaagggcgggggcgtcctttgccccatcgctgccagggtggctcgaagattttaccataagcccatcacacccgggagggtgagggtttcca

SEQ ID NO: 98731 - DNA, 277 bp, Zea mays
  Clone ID: MRT4577_21557C.1
ccctccatgctgggcgggggacattttacggccctacaccgcggtgcaaccctgcccaaaaggggccaccagtgaccagtgcatgaggtgactcgcgccgaacgcctagacatacaccatggcggtaaagggctacaagcctgtagcagagtccgcaccattgaggccggcaagcagcacgagcggcatggagggcccacaggaagcaaccatgacatgcaagactaggatagctacggagcaccgaccgaaacggtagaagcaggataccaccgcc

SEQ ID NO: 98732 - DNA, 821 bp, Zea mays
  unsure (1)..(821): unsure at all n locations
  Clone ID: MRT4577_21558C.1
actaaaagcgctcgtcccgatctcatctccgatctccctgccgccgactcttcctagccgctgcccacgtacgaactcgttcggtgccgccgccgccgtccgaggggagacaccgccgccgcgtctccagggcaggacggcttgaattcctatcaccgggatcgcccccgccgaactccgggccatggcgagatccagcaggccgtggcggcgatcagcaccgggacaggaccaggaggccgccggcgtctccctgatccgtgaccccgatgccatggagctgctcgtcaaggttcgacgcgcggttgctgctggagcggctgcgcaacaagaggctgatcttcgtgggggactcctgaaccagaaccagtgggagtcgacggtgtgcctggtgtcgtcggcgatcccgtcgcgcgaccaaaagtccctggccaagctcgtggggcccaacggctctctcaacgtgttcacggcagcggagtacaacgcgacggtggagttctactgggcgccgttcctggtgagctccaactcggacgacccccaggcgcacagcgtggtggaccgcgtcatcgcctggctgtccatcgccaagcacacccggcactggcgcgccgcccacttcctcatcttcaacacctacatctggtggctcaacaacttcgagatgaaagtgttgaagaatcctcgggcgttgccggacaagtacacngctggtggatcggccggtggcgtacaaggaggtgctcaagacgtgggcaaattgggtggaccgcggcggaggagacgagagaagccaccgtagaagacgcaggcggagg

SEQ ID NO: 98733 - DNA, 1267 bp, Zea mays
  Clone ID: MRT4577_21559C.1
cattggtacctcgaggcggcgggatgtccagtgtccacgccccccaacacactctaccatccacacacactgacaccaccatccacaaggatctctcctctccacgctacagcggctacatattgcagttgcaagctagcgaggcaagtgtgtaacaactaagatgaagggcaaggcgtcgaggttcctgaagcagatggtgtcgaccatcgtggcggtagtcaaggccaagtccacggcggtgcgcgtcaagaccagcgccctcaagacgcgcctcctcatcttcggcatcctccgcaacaagaagctgctcgtcaccgccatcaaccacaagatccacgccatcatggggcagcagcagcaggaagcagcagacaacggcgccggccagcagcagcgcgacagcagcgacgaagacggcggcggcggcggcggcaggaataaggccatcgtgctctacaagccccccagctacagcttctccgcggagctgggcgcccacgaggcggagccgccgccgcaggaggaggaggaggaggacagcgacgactacctcacccactcgctgttcgccgacgaggacgacgagctggtcaacgcgccgggctcggtcatcgacgtcatgcgcgacgccagggcgcgggaggccggcgacggcaacgccgccgagttcagcctcgaggacgagatcgaccacgtcgccgacgtcttcatccgccgcatccaccgccagctcaagctgcagaagctcgactccttcaagcgcttctgcgagatgctcgagaggagcaccgcctgacgcccatggccaccgcatcgtgcatgcatcttcattcacatccatcgtccatccgtgctgccaagtgccaactaatgaattaaccagcaacacttaattaagaggtagtgtgcatggtgaaacaaaaattattaacatggcttctagctgctactgctactgctactagcaatttttgcctctctggtctggtctgccaaggctaccgctgctgtatgaataacttggagatcgaccgaaaaattacatgcatgtaagtagaaggggttaataaaggtggtatgcagacgaagatgcttttcttgaactagggtttaagtagctagaaatggatgggaactgtactttaagtaattatgttctttgttctttggggaacattgctcttgtgcttaaccttcaataaagaggtaaaagaagagtacgtggatcggaaaaataaagagcttggaaagcaaaagggcggtc

SEQ ID NO: 98734 - DNA, 350 bp, Zea mays
  Clone ID: MRT4577_2155C.1
aggagggcgtgcaggccagaaaatggagggaattataaggatggagagtacatagttaaggaaggaaaaggaaaaggaagtttcaatgctgatacatatgacataaaaagataattattagtatcctcttttgaaggaggaggttgaagcacaatggtaaaaaagctaaagatgggagaatatatagtacaatcacttatagattaagtagaaaaagaagacaattaaaaatgaaaaaatatttatctaatgcacaatgtcaaataatcaaagaacatagtcaaaggatcatactgagattactaaaaataaggatactgtgtacaatgcctaatatataaaaaaaacaa

SEQ ID NO: 98735 - DNA, 461 bp, Zea mays
  Clone ID: MRT4577_21560C.1
cccacgcgtccgacagcagcctagtaactgaaggatcactagtgtacaaggagaccaaacatggtgtaccagacatgtgcaagcactgtgtttcctgaaacagcattactccagaactgcggaaacaataggatttggtgatctacgtgcttacgagatgatatgcaatcagatgaacttgacacactccagcttaggggtagtctgaccaactctagagtatctgccgcaccattgaatctaatttgcaagaggctattgcggtgttacacaactatattgagctgatgtgttttccgaatgacattcttgagatcatctctagcgaaaagggccgtacacaaatcgcgccttatgccttgcacctttgcttatcaccatatagtattaaacaggcgacccgctaatgcactactgtcggccaggcattccctactacagtgtgcactgcttacacctag

SEQ ID NO: 98736 - DNA, 756 bp, Zea mays
  Clone ID: MRT4577_21561C.1
agcacggcgtaggcgaaaagacaggcggcttcgtactcgcctatctccgcgtctcgaaggtgcttgcattgcaaacgacgccggtgagaacaaccgctttccgtcaacaccgtgaaggagcgcctctccatggaggtagatcgagaacgtggtccaggacggagagaagtgctgggaggtggattgggacgacaatgagatggaggacgatgagaactcgctggaggactactcctacgacatgggcaacacgttctaggacgacaagcatgacggcaatgtggcgggcgatgacaagcaataagatcgaggtacgccatcgcacgcggccattggctgggtggacgccaaccatgtcgccgaggcggcacgagctcgaggataagatgaaggagctggagagcctctgtaaccccatcatcgtcaagatggaccagggagcgcgtgaagacatgagtggtgatgggggcatggacgcaggacgcccctgtcggcagcggcggccctggccccaagatcgtaggaggtggactaagcggtttgttgtcagacatgagtgtgctgcagttgctggctgtgccagctgctgccgagagatatcgtcagttggtgcggcgtgtccgcttaaactttatttggtggccggttggtacttattgtgggtggatattttttttggacctcgtggatagccggctcgcctcaatgttatccgcgggtactggataaccttaagtgatacggtattcatcttgc

SEQ ID NO: 98737 - DNA, 336 bp, Zea mays
  Clone ID: MRT4577_21562C.1
aatactggcaacaaacaattccaaagggcgagcgaacaaatacattttttgctccttttttataaagacctggtttggcactaagagagggcatatttattggatgaatttaaaaatttttaaggaaaaactatgcatggataaggaaactccaggtcttaaaaacaagggccatacctgtttggcgtatttggcttgcgggcctattgaactaccaataaccaacagattgctccttcttatatttgcaacccgtgaattaaatttcagacatatggcgcatacccttaagagaatcccccaaaccctctttgtgcatctgtagcattatgtggg

SEQ ID NO: 98738 - DNA, 257 bp, Zea mays
  Clone ID: MRT4577_21563C.1
ggcgattgggtacctcgaggccggccaccgttgcttcctcgccgccactttctaatcgcgtccgccattaacgaagcacagagagatttgagagttgccgctgctcgggcgctttaccggcgtcgcggtcccgagtctggcatgtgggcgggcatgtcacttggacctcctgcggcggatctgggcaatcccgtgtggagtcatcggccagggcaagacgaaatcgcccgccggaatcgtacccccgccgcgcggcc

SEQ ID NO: 98739 - DNA, 277 bp, Zea mays
  Clone ID: MRT4577_21564C.1
ttggtgggttttttggaggacgcgcagggttatataccacagccaccaagtgggaactatacccaccatgacaccgaaacaggccggagctgcccaacaacggtgtacacagcattgacacggagccggcggcaacatcactgggcttaaaatacgaacaaacctagctaggacccgaacaaactgccggtgcgcggacactggcaacaccaaaggcctcagctaccaagacaggggggaacggctcttgcccctcctattggggatcgaacgccac

SEQ ID NO: 98740 - DNA, 558 bp, Zea mays
  unsure (1)..(558): unsure at all n locations
  Clone ID: MRT4577_21565C.1
ggngggcgctgtgcacgtccgtccagcgggacgacanaccccgacacgacgccagtaccaagaagcgccggccgcagcaggacgcgcccagcccgtgcggcaccgccaccggcttcttctccgccgtcaagagcgcggccaccggcagcagcaacccgtccacgccggtcctccgctgccgcaccaggccgacgaggacgacgaggagcagggcgccgcatccgagttcaggggcttcttcccatgcccgaggagtcgaccgccttgtcatccacaaacagagaatgacgaatggagaatggggaggaagaagagaggagagagctcaccggaacacctcatgagcggggagatctcgcgagcggtcggcggcgacacacaacacggcgaattgacggacgacgactgattcggaacggaggcggcctaatgattgtcctcagcggctaatcaagattttgagtctatttcgtcggctgaacgtactcttgtcaaaaaccaccgcaccgtaccccgccgcgccgcgccgcgctacctccactcttctcatctaggcgt

SEQ ID NO: 98741 - DNA, 974 bp, Zea mays
  unsure (1)..(974): unsure at all n locations
  Clone ID: MRT4577_21566C.1
ggccgcttttttttttttttttttcagagggaataaattctgtattattatagggtgtacttatacaatagtcagtgtacatgcaaaataaagaatacaaaaatattctctagcataattattataggctataaaattacatacatatatggtctaatattagggacggaaatgataaataggaatactagtaatgtccagcataatgtcattctaacaattagtatcagataccaacctttcgagaataaatagaagatgatttttggagttgttgcttcctcctcttagagaatttactgggaagtgaactttgatgatcaggctcctttaaatcaatggcatgagttgttgaatttggttggcttgagtaaatcttggccaccggtatagatttcctttttccaccatggccttgacttttctgtttgctcaagggtacctggccataattcttcttctcgctaaacttgggagataacttagaatagtttttgtcatggacatgttccccttctttgtcatcatttattggactgaggtcatatacaacgttagaagcagaagaaacatccggtcccaaaccaacagcagccttggccgccgcacgggtgactcggcagtgctgcgcctgcgccccgccatcaacctgcgcgccggggcggcagcacttgccgaagcgccgctccagctcgctgcgcggctcctcggaccgttggtggaggcccggagacccccgccgtcgctcgtcgtcgtccgatgacgccgccatcgcgacgcccgacgcccgcgtcgcggcggggtcggaggaggcgccatgagagaagtaggacagaaacacgctcttccagtcgatgtcgtcattcctccgccccatcgccgccgcagccgccgatcgatcggcctgcgatgatcggggaggtttttttttttttttttttttttttttttttttttttttttttttncccggc

SEQ ID NO: 98742 - DNA, 678 bp, Zea mays
  unsure (1)..(678): unsure at all n locations
  Clone ID: MRT4577_21567C.1
acagctcagtcagttaaattcttacttttcctctagagcactagagatgaagtttcagagccattcccttctctcatgcccttcgtcatcaaaccctagttgtccaccgtcgattacaacggcggtggttacctataattcctgaactcttgtatggcgctatcccagatgagcttttggatgagcctacattgctttcctgccgtacacaatgggtgtttaatttctttgtcttcttgatggaggatggggaaacccttatgttagtgactgccaggctcttggccttgcaagggcgaggttctggcttagtgcactgcaggcagggctgctgatccacggtgataggctcatctcctgtatcgactatcccttctgagcttgtaaatttcgttttagcatttaaattttattaaactctctttctttctctctcactcactctctctgtcagtctctctctcgctctctctcttcttcgtgcatttggtagtgttttaatttctttcggctagtagttctggaggtggtgttagttttgtgccttctgctgtgcacagcaattctacaatgctactagaatttggcatttggattgacatactttctactcttgntttctttccttttgncgatgacgattttagtccacaaatccgatacactgagagtgaattt

SEQ ID NO: 98743 - DNA, 286 bp, Zea mays
  Clone ID: MRT4577_21568C.1
accacgcgttcgaacacgaacttattgggttttactggacgattggtcttgcagggaagggcgcaatgctaatggctgtgatacgagaccaaccttcaacagtgccgagtcagtcaatgcatctgctgaaaaacatggattggatactgacgtacagaaacagtatacacctgttatgaaacctaaagcctactctcacaacttcaagtgtaaaggccccatgtacgcggtatatgcatgagctcaaggacactaccagcatgtgaccctgacaccggaatgaagc

SEQ ID NO: 98744 - DNA, 348 bp, Zea mays
  Clone ID: MRT4577_21569C.1
aaaacaaccaaaaacccccggggggggtccaatttggccccaaaacggggggacaaaaagcttattggttgttaaaaaagggggcccccaaaaacttttggggcgctttttaaaaaaaaacaaaagaaaaaatttcccgcaccaaaacctaagccccccccgttttgaatttggccccgatcaaaaattttaccccggtttttccctgacggtgaattcccttgaaaaaaacagaacccccccccgggggggaaaccctccccctggtcttggggactgccctcctccccccgacgtgggaggagggggggtttccaagcacagggccccccccgttgggcgttttaa

SEQ ID NO: 98745 - DNA, 951 bp, Zea mays
  Clone ID: MRT4577_2156C.1
ttggccgggaaaaaaaaaaaaaaaaaaaaaaaaaaaaaaaaaaaaaaaaaaaaaaaaaaaaaaaaaaaaaaaaaaaaaaaaaaaaaaaaactcgaatccggccgcgacccggccagctccccacaaaaccgtcagttctcttttcccctgtaaatcgcaaattcgtcttccctgcccatctatcgcttggacacctctgcaaggggagcacatggctctcgagaaggccaaggagatcatcgcgtcctccccggtcgacctagctctccgaaaggccaaggagaccgtcgcctcccaccccgtcgtcgtcttcagcaaaacttactgccctttctgcacccgagtgaaacaattgctagcaaagttgggggcaagttacaaggctattgagttggatgtggaaagtgatggcgctgagctgcagtcagctctcgctgaatggactggccagagaactgttcccaatgtcttcgtgaaaggggagcggattggtggctgtgacgcaaccatggcaatgcacgacggtgggaagctggtgcctctgctcaccgaggctggagcaattgtcactgccagggctactgcaactactaccactccgtctttgtagacatgttttacagcgctgttccgctcgcttcgtggctatatgcaagagtgttgtacggagtactaaactcatacgtggtaaaagatgaataaagacttaaacatttctttcaaaaaaaaaaaaaaaaaaaaagaaaaaaaaaaaaaaaaaaaaaaaaaaaaaaaaggggggggggggctggtgtattggatagcgaaaaaaaaaaaaaaaagtattggacggatctggccaggtgctacgggctacagcagtacggcaccaccccgtgctggcacattggattattggacggaatcagggaagagcagagctagtgtagtagtgtacgcccgacagcaacg

SEQ ID NO: 98746 - DNA, 758 bp, Zea mays
  Clone ID: MRT4577_21570C.1
ttttttttttttttttttaggcggccaactgtcggattcagagatctgtacagtcatatacttccttggtggctttttcttttctgttgcttgctctttctgcttctgttgtcctgttcaacccaaaaatcatgcttctttctgtacactcaccaagttacaaaaatgacactagtcctaggaggcatatacaacctaacaatcctcaccaagcacatgaaactttcaagaggcgcatcgaaaggtaataaacattgacgcacttcgaaacttcacagatagtacaagtagagacacactacgtttgcagttgcaacgttgcttctaccgttcctgcccatccatgggcatcacctggtccatgccaattgtcttggcatgaaaacctgtggtaacttggctctatttcatcttttgctccatgcaagaacagggacacaaaggtctgatcgatgcaatcacttctgaaacatcaggagccgaaatcgctttggggaagagccagctactcactccagctatcgtcgtcatcgtcatcagcaacagcctggcgaatcgcatgggctctctctagaatggccaccacttgtaagttagtttttggaccacccattacatttggtctctttgcaagaacaggcttcaagttgaaagactagttctttatctgttccaatagtgtgttcttctcatctgcaagcttactcgaaggctgaaccaaagttggtcgcttcgataacatgcttgtggcgtgagaa

SEQ ID NO: 98747 - DNA, 284 bp, Zea mays
  Clone ID: MRT4577_21571C.1
cgggagccgggccggaatataggctggatcgcgagcccattgtcggcggccgccccaccgtttaaagattgggggttgggcttacaagaggctagctgatcaatacatgacaactgacaccctaaatgatgttagttagctggcccatcagctgtggcatatacagcccagaccgactaatgaccttgagtccctcaatgcaagctagacgcatggcctcagttccagggagacacccaaaaaagaaggcgatatatgaagcttcggcaacaagatcgggtatc

SEQ ID NO: 98748 - DNA, 363 bp, Zea mays
  Clone ID: MRT4577_21572C.1
ccggccgggaacatacacacatccccttttgctgtaatctttctgctgaattgcgagtgctatccactctgtaataagcatcgcgccatccgagagtctggctagccagggtctacactctccggggctccttgcgctacgcccacacaggagcggccacgcgcgcaagatcacaagatgtatcacttttacagaataagcctgaccagaagctgaaacccgctgcgcaatcgtgctcttctccatacatcagcgacgagctcgccaaatggtatggtcctgacaggaggatatacctgccggatgggctgttggaacggtcgcatgtgccggagacctcaccggagagtccctgtatgatat

SEQ ID NO: 98749 - DNA, 1217 bp, Zea mays
  Clone ID: MRT4577_21573C.1
gcggccgtttcaagaccagttgcgtcgtcgcccggccgctgtgcgtgcgtgcgtgcgtgctgtgccgcctttctttctcgctttaatttctttccatccatccgctttccccccctcccaatcccaatccctccaaaaatccgctccgcgcgcgcaagcgcggccggcctttatcgatccctcccggcctctagcgctgctccggcggcggagtccggccccaggaaacaaaggccgcgcgcgccgaccggaccgaccggggggccgtccagttccagttccagttccaggccgcacaagcacatgagatcatgagctcggaggactcgctcaagtcgctgtcgctggactacctgaacctgctcatcaacgggcaggccttcagcgacgtggccttcagcgtggagggccggctggtgcacgcgcaccgctgcgtgctggccgcgcgcagcctcttcttccgcaagctcttctgcggcctggacccgagccaccagccgcccccacccaccgccggcgggcgcgcgccggacctcgtcatccccgtcagctccatccgctacgaggtgctggtgctggtgctccagttcctctacagcggccaggcctccgtcgccgctcccaagagcggcccgctcccgggctgcggcgccaggggctgctggcacacccgctgcggcgccgccgtcgacctcgccctcgacaccctcgccgctgcgcgctccttcggcgtcgagcagctcgcgctcctcgtccagaagcagctggaggccatggtgaaggaggcgtccgtggacgacgtgatgaaggtgctgatggcgtcgcgcaagttcgagatgcaggagctctgggccgcctgctcccacctggtggcgcgctcgggcctctccgccgacctcctcgccaagcacctccccatcgacgtggtcgccaagatcgaggagatccgcgccgccgccaataataagtcccccggcggcgccgccgccgcgggcggcggcgggccgcgctcgccgttcctcctcacccaccactacctccccgtcaacggcgcgtcggcgtcggaggccgagcgcgaccacagggtccggcgcatgcggcgcgcgctggacgccgccgacatcgagctggtgaagctgatggtgatgggcgaggggctggacctggacggggcgctggccgtgcactacgccgtcgcagcactgcggccgctcata

SEQ ID NO: 98750 - DNA, 108 bp, Zea mays
  Clone ID: MRT4577_21574C.1
gtgagtcgtattagatctcacggacgaccttcacgtgtcagcggtagacatagtggtcttcgtctacgccgtcgatatggatgtctcgggctcctagatcgctgcagg

SEQ ID NO: 98751 - DNA, 396 bp, Zea mays
  Clone ID: MRT4577_21575C.1
taccgttcggaattccaggcacgactgcctgtcccagatggatacggctacagacgctgcagtttcgaggctgacaaatgaatctctgggactgtcttctcagatgtcccacatcctacacaccttactcaaccgccacaccctgtcgatactcatggatctttgcaacctctaagccaaccccgatgcattggcctccctcgtacgctagctctcctgtgctgctcctccaaccttcaccgatggttacctccttcttgagcaacgtcgaccagtaatcagactcgtcaattacgcccacgtactcctacggccttcaccgttcctactgagctgctaaaaagtctgaatgcaaccggtgtagttgttcaagcatgacaagatcttgctgctgga

SEQ ID NO: 98752 - DNA, 1008 bp, Zea mays
  Clone ID: MRT4577_21576C.1
attgggacctcgcctcgaggccggccggggccgactgtctgggcctcccggcggaggtgaaggcggggcacagacggtgaagccgggggcggattccattccaaatccgcagtccgcagacgagagtggaagcggggcacagacaggaagagaagccaatggcgctgtccctctccctcgcgcgccccgcgcccctcgccgtttccgccggcgcaggagccaggaagctacccgcagccagcctcgcattcccggcgaaatccttcttcggcgcgccgctggccgccaccgcggcctccgtcgcgtcgccgctcccgcgcaagccggccacctccaccacctcgctcgaggtcgtcgcggcggggaagaagggctacaagatgaagacgcacaaggcgtcggcgaagcggttccgggtgacggggaggggcaagatcgtgcggcggtgcgccgggaagcagcacttgctcgccaagaagaacaccaagcgcaagaagaggctctcgaagatggtgcaagtcaacaagagtgactacgacaatgttacgggtgcactgccctacctcaaagtgaataggaaagcaaactgagagctacgtggtcttcaaaaaatcattaagtttcgttccaccaaattgtaattttgtgtatcttccactgtatttccttctcaaaaatactgaggcatcatttcaaagcaagcaaaaaacaactcctggtatcaacagtatagcgatatttcagaatgaggtgcactgcttgctatagttgttatttagtcgcaaatatgtgcaagtaagagtggcacttgagccattagctcctcttaggatatggccagcagatcgtgtatatggctgtgcaagacactgttttgcaccattttatatatagactgcattgtttacatgatgaagcttgaaataggatatgggatgagtgcacgagatacctcagggagctaaacttttcactggtctgtcttaaaccttaatctaatggttttca

SEQ ID NO: 98753 - DNA, 408 bp, Zea mays
  unsure (1)..(408): unsure at all n locations
  Clone ID: MRT4577_21577C.1
naaggtaagcatggtgggtgttcgatggttctcctgaccagtttgtctggttctccacttctcctcatgtgttgtgtcctgcacggcgacaggttcatccccgacaggtcggcgatggacatggacatggcacactatctgctcacagcgcctaggaaggataaggagaacgtggcgggcatggtggcatccccgtccaaggaggcatataggaggctgctcgcggtgaagctgttcaacaaccggacacagatcctcgccttcaggaacaagctgccagaacccgagaacgtgtctatcaccaatgtcgcttcctccaacctgtaggccgagccngccaagcagcggcgccacattccctaggtatgtgtaatagctcttctgattccgcatctaggccatcttatg

SEQ ID NO: 98754 - DNA, 589 bp, Zea mays
  Clone ID: MRT4577_21578C.1
gattctgtctcagtatcatatcttcagttgtacatggagatgatacaagatctccttgatcctgtaaatgataatatagccattgtagaagacccaaggactggggatgtttcattgcctggagccacagtagttgaagttagagatcaaaaaagctttgtggatcttctaagggtgggtgaggctcatcgtgttgctgcaaatacaaagttaaccacgcggccgcctcgaaggcatgccttcctcatggtgaatgtcaggaggtctgtaaaaggtagaactgaaatggatgtcagcatttctggtgaaaatgggctctcatcgtccttggtggggtctttgagaccacctgttgttaggaaaagtaagcttgtagttgtcgacttggctggatcagagcgcatagacaagtcaggaagcgagggtcatacgttagaagaggcaaagtctatcaacttgtccttaagtgctctgggaaaatgcatcaatgcgcttgctgaaagcagtcctcatgtgcctgttcgtgattctaaacttacaagattgcttaaagattcatttggaggtactgcaagaacatcattggtgg

SEQ ID NO: 98755 - DNA, 779 bp, Zea mays
  Clone ID: MRT4577_21579C.1
gaaaatgaatcttctgaggttcatattggtcgaatgctgcaaatccttagggaaacgagagacgacccagtcctcagttcatacgtcattgatgatatttgggatgacatgaaggcgatgagagattggaggtgtatgatttctgtgcttcttgatgaaaatcctgcaattgagcttactgacattgatggaacaaatctagttcgcatgctgcgagcctctgcaaggaaggctgttggggaaagaatagttcctgcagtggacaacagaaagttgtattacaataaaggcgaaaaggaaatattggaaaataacaggcgtgaaataacaagtgccttattgacaaggtatccacatcttttaagaaaattcatatctgacaaagctaagatatcgcccatagttgatatgatgactcttttgaaacttgagttgtattcatacaaaaggcaagagaagcatttcatgacagccatagatctcatcgcagatgccttcttcaagcatggtgagaaggacccactgagatcttgcatcaaggcaattattttctgttgcactgagtgccaggctgatcttaaagattatgctgaaaataaacttaagaatcttgaagatgagttggtcttgaaagtcagaactgcaatcaaggaagtagaggcaggtgatgatgaatactccctcttggttaatttgaagcggctttatgaacttcagctgtcaaaacctgttaagaatgatagtttatttgaggatatgtaccgaatactagctcatct

SEQ ID NO: 98756 - DNA, 335 bp, Zea mays
  Clone ID: MRT4577_2157C.1
gaagccaaaccaaatatcaaattctaagggacgaaacaaccatggagggcacccagacgttatgacgtttcttaaaaacccaaaggccctagcaggggcggacactatttagaagatcgaacatagtttaagtggacataaaccataagggggacaataagcggcatacagggcgaacggacatccatgaaaggtacccacagaccaaaaaacgggcatggccttcacgagagtgcaaaaactaactaacaaccactaggtagtgcttatgatgcgttgacagatgatgaagggccttaaagagaggaccttcctcaataactggtccgtcataa

SEQ ID NO: 98757 - DNA, 503 bp, Zea mays
  Clone ID: MRT4577_21580C.1
ccgggctccccaactcgccgcatgccttgtgcgcctccattttggactatgggccttgcaaggctaacgtgacctccagccgtggggaacgagaagtcccacaataacatcgcgggtatgtggccatgtggactctgccatggcgaccaccacaggacaccttatctacaagcttgaagggattgacaagcgtgtgatctataggttcaagaaggaggctggtgtaatgaacaagcgctccttcaagtacgcgtgacgtgctggacaagctcaaggctgctcgtgagagagggatcaccattgatatcgctctgaggaacgctgataccaccaggcactactggacggcgattgatgcccctggacacggggactgtatcaagaacatgatcactggaacctaccaagctgattgagctggccttatcattgtatacaccactggtggacctgaggctggtatctccaaggatggccaaacccttgaacatgctgtccttgcg

SEQ ID NO: 98758 - DNA, 391 bp, Zea mays
  Clone ID: MRT4577_21581C.1
aaacaaatggtttcttcacaattggaaggttaccagttcaccatttccttgtggccctgttgttaacaacattatacaaatctcacttttcaaaacctctgatgccgcaaacctaactgcttcaatggaaaaaataaaccgctagtacctgaaagtcaacactagcgtacaaattttgcctgccaatatctttaatgccggcaaataactgcttgaaggacacaaacacacaccaaactattactcctatgctttagctcacctactggaagctctactgataacaaactttagactataacataaactgggtcacaaactatcaacttctggatccaacagaaggcctctcgttgttacttctgtctaaagcaccataaaaaaacccccg

SEQ ID NO: 98759 - DNA, 295 bp, Zea mays
  Clone ID: MRT4577_21582C.1
gcgctctcttttttttttttttctccctataggctccgacacgaccatatcattaaatggggactgatgtcatgaagaaggagacgccatgacctgagaaggcactccctgttcccaccatgggaaagaagaataatactgacttgagcatgtcttaaaacaaaatgaagccgccatgtcctgatgataccagatcactccatacatgaatgatctcaacctctagaatcctactgtactataagccagccgggaacacccttcgttgaagacctcaagcgtataggaggagcag

SEQ ID NO: 98760 - DNA, 663 bp, Zea mays
  Clone ID: MRT4577_21583C.1
tttttttcttctaaaaaacacaaacatttcggggtttccataactcccaagccagcaggattattaaggaattaaggcccttgtgagcttcttttggtgatgttgcaatcgtgtttctccaccattctgaaaaacagacagccgtaggttgtggtgctaactgcatcactcctaaaagttgcaaaattatggtccagacttcacaggcaaaaacacaccctatcaatagataatgtattgtttcatcctcctggtcacaaaaagggaaagcctccggatggggtagattcctcttggctagtcgatcagctgtccacaatcggttatgatgaggctgttctccatagaatatgtaatgtttctttttacttgatatcccatattttataaggctgtcctccatagcatatgtaatgtgttattatatctcatattggacccacaactattaacatgaacataaaatctaaaatcatgaaaggccacaacttcatatttgataattgaattcatttttaattattttttgtttatctattgttgatgtggcaagagcaaccttttagaagcgtgcgaaataccataccttagatgttaaaaaatgatttctatcaacttgttgaattaattgatgcctttccctttctagcatcccttcttttt

SEQ ID NO: 98761 - DNA, 262 bp, Zea mays
  Clone ID: MRT4577_21584C.1
aaattatatttttttaaatttttttaaaaattaaaatttggacacaattttaagagtatgaaatattaaaacaacattcatttcaagacgccaaaaaaaatagaaaatttcaaaatactggcttaagctttgcaaaaaatactgagcttacaaatccatggagtcctgaatggcctctcaagctgtgggaagcaagcaaaaatgcattgaaacaaactatttaataaaaatgtacttataatttttaaagaaccggttgaac

SEQ ID NO: 98762 - DNA, 128 bp, Zea mays
  Clone ID: MRT4577_21585C.1
aaggacggaggccgggcccacggcgaagaaggcgagctcgctgcaacaacgaccacgcacgctccagacaccccaaccaatccctagcaccaaccgacggccaacgacaacaccgagagaacaacaac

SEQ ID NO: 98763 - DNA, 285 bp, Zea mays
  unsure (1)..(285): unsure at all n locations
  Clone ID: MRT4577_21586C.1
ngatctctccccagcacccaccccacctgcccacttcttcttcttcttcctcctctcgtctccttgcgttctccatcgcattgcatctgtagcgcgcagttctccctggtctttcgcatccgtgtctgcccattctgccgctcctagttaaacgagagaggctgttcttgtgtgagagagagctggacaccgtctccccacccattacgccgtagccaaacctggagaaaaacctgtgaagcatgtaactccagtccctgtccaaaatccaaacccaagcccccg

SEQ ID NO: 98764 - DNA, 180 bp, Zea mays
  Clone ID: MRT4577_21587C.1
ggcttttatccaagctcaggaaggctaacagtggggtgggatccaatcttagtttattcaaagctaagaattggtttttggtaggaggattctaattacttacaagcccgcgagacaaaaggccctgcccaggagaagaccggtcaagtgattggggcgcggcacgagaaaagggggggg

SEQ ID NO: 98765 - DNA, 554 bp, Zea mays
  unsure (1)..(554): unsure at all n locations
  Clone ID: MRT4577_21588C.1
cagcggctgagaggagggccggctttccccctcctctattccattccaccacgccgcctgcctgcccctcgcctcgggggcgaaccacgagaaggggattccggctagggtttcgcggatcgagagagtcagggaagaagcgggaggggagagaagagggcggcacctagggtttccgcgggcggcccccccgcatggcctcgccagcggcagcggcggtggcggcggcnccaccgncgttcgtcaccgtgaaggcgctggactcggtggaggcaccggctccggcctacatgcagctctcccgttctgctcagctcatgcgcgcccaggaggatgcggccacctgcttccgtcgttgccactacgccgttggccacgtgattgctgtcctgtgccttctccggatgaggtagcttgcagcttcttgcactggtctccatggcttcctcgtcttcaacgctgctggtggaggaacgggctctgggcttggctctctcctcctggagcgcctgtctgttgcctatggcatggagtccatgctcggtttcaccgtg

SEQ ID NO: 98766 - DNA, 459 bp, Zea mays
  Clone ID: MRT4577_21589C.1
agaaaaccaaaattacccttctgggcaaacaaagctttagaggccacaaaaatttcatcagttcactactaccggggccctaagggggaaagcaataaaggctaacccaaagtttttaggcacatgccgtacatgataataataagttacaataaaaacagatgggccaagccttttgcccttggaaaccttatactgggataagaacacaaactcctattttattttataagttaaaggctccctaccccgagataggagccgagcccacaagggacccctttgccactttttttttgatcaccacccctccggggggggcgccaaaaccacatttggaaaaaaaataaaaacccgcaatttggtccacaactaaacacctacctagaaggggtctccatccgggtttgacttttggcacaaccaacaaaattaaaacccgacccctgggccgacccc

SEQ ID NO: 98767 - DNA, 260 bp, Zea mays
  Clone ID: MRT4577_2158C.1
cggattctaatcttggacgggacaatagagctgcatcactaggagacaagatattttggctccttatgctcctctggctggatctggcaatgctaaatacagcaacgcctcatacgcgcagcgatcagaaagctgcacacttgtcgagcttgttgacgtctggacgaatgacgcccaacagtcatgctgtatggtcaaaaccaccatggaacactgctactggatacgactcgctaatcacatctggcatcttaccttta

SEQ ID NO: 98768 - DNA, 402 bp, Zea mays
  Clone ID: MRT4577_21590C.1
gggaaactcaccctcatttttttataaacaattaatgttccttgttccctaccaaggaaggtggcgggcaccaacatgatcatcctaacatgacggggggggaacattttcaagacgattttttttaaatcgggaagaacaatcaatttgaacccaaattaggtaaaagggggtccttttccctttttggtggggggcttactttgaaccgtaaaaaaacccgtgcattttaacatcccctttaatttggcagaggtctaactcaaagccattttgatcatggatgccgagttgtgtgaaacaaaaccgcctttatttactaaaaggctattttttttacctcaatctactaaaaggcaaactgttaatttaagtgcaaaaaataagggcaaaatgaaaagc

SEQ ID NO: 98769 - DNA, 879 bp, Zea mays
  unsure (1)..(879): unsure at all n locations
  Clone ID: MRT4577_21591C.1
ccggcctccataccaccgtctcaccagtacagaccaaaacgccaagcggagagagatttggagtagaggggagttggtttcttgaggtacttccaagtgaagcagctgccgaactttctcttggcttcaccagtgctttctctcgcggtttattctattgtccattacgcaaaactgcttcaccggtgttttcaaagaactagcgtccacaagcagattatcactgctctagagaaaaggccagttgtgtcgtatagaagatctgatgacgcgacaattttgagtgaacctcctgctggacgcaccaagaaagcacaagggagctctatggctacacatagaaaaccagttgctaccgagatggcttctgcagcattccatgacgccacgccagctaaccaaaacatcgaagaggatcaggacgcgtgctccatatccatactactactcccattcgttctgcatctggccttcatggcattcacagccttgttcgtgatgcacgtccaggtgtccacacggttcctatccgctagccccccggtttactgggctgccgcgcacgttctggcttctccgagccgcgccaacagacgatggggctacctgatctgtgtctatttcatcgcgtacattcttctaggtagcctgctcttctccaacttctaccctttcacgtaacgtaagaacggcggtggattttctcgaccagctttgcctgaaggtttccctaggntggtaanngggtaaggtgttttcctttggttcagtaaattgagcgttggctactcgaatcgcttggaatctgctcgnctgatgtatctttgggggggtcgatcttctccaattttatcatggcactatctatctccatttgac

SEQ ID NO: 98770 - DNA, 313 bp, Zea mays
  Clone ID: MRT4577_21592C.1
gatggtcaaagtacaaacacctcaagaatctcctattctccttctcttctcccagcaggccccgtccgttcagctgttcccactccattaccatacacagacaggggtacgtagggcccagcaccaacccaaactcctaatccagaggaccaagctaaaaagctagtaataatgtagggatcaatctactatataaacaacatgacctgctacggccttacacgtcggatcggacctagctcagacaatgccctgcgccgccgggccgacttctcccgcggtggcggtggcggcggcggcggccacctggttc

SEQ ID NO: 98771 - DNA, 403 bp, Zea mays
  Clone ID: MRT4577_21593C.1
cacacaattaacaggccttccaactcagaatatcacgggacggtgaccccttgctttgatatcctaacctgcagggcctgtaaagagacctttgaacccctagcccacggcctttggaaagaaaacaaaaaccttttggtgcaggggcggtgcagattgaacagaaagccttgggtaagggggcagggcagctcatacgaatgtgaaggctaagtaacagaggattccatcttaaactgaaggctacctaaactttgctttgcggggggtaatctagggcgacttgggcttaaccttagccgggtttatataccctgaatgtgctagaaagattcccactagggccccctccagtgccttttcatgcttaaacaaaagggcagcctgcctctggctcttcacc

SEQ ID NO: 98772 - DNA, 762 bp, Zea mays
  Clone ID: MRT4577_21594C.1
atctggccttcatggcattcacagccttgttcgtgatgcacgtccaggtcagtaatatgatcatcttcctcgttaaagcaaaagcttgtgtgggagggagcactgttgggctgagtaccaacttaacttgcgttcgttttcatgcaggtgtccacacggttcctatccgctagccccgcggtttactgggctgccgcgcacgttctggcttctccgagccgcgccaacagacgatggggctacctggtctgtggtctatttcatcgggtccattcttctaggtagcctgtttttttccaccttttaccctttcacgtaacgtaagaaccaacgagtggggggtgttccccgatgcgttattcagtagcgagccacttccggcgtggatggctcatctgtttatcaggtggattatctcgaccagctttgcctgaaggtttccctaggttggtaggtgcttcactggttcagtaattgagcgttggctactcgaatcgcttggaatctgcttgcattcggttatgatgtggccacgagctttttcatatgttttcttagaatcagaagttggagagcagaagacataataacatcagtcccaactcccaactcggaagatcacaaacttgttcttctcagagcaacatgtatgcaaacatcttgggggggtcgatcttctccaattattcaaatggcactatctatctccatttgacgaaataacgccgctggtttcaattggtggttggttcgttttcgtcc

SEQ ID NO: 98773 - DNA, 655 bp, Zea mays
  Clone ID: MRT4577_21595C.1
ctccacgactctcgcactcagatatcctcggtctctccccatcatactgaactaaccgaagcaaaatgcagatacctagccgcagaacttgcagaatgaacgcgcaaccatccgacgtttactgaactccagccgcaaccgaagccttgctgacttaagggacccctgcctgggccgcacgctcctcttggacgaggcgctataggacaagaactcacgccacaaccccaatgccggcgcattcccagacctgaaatcgaccacgtggacggcgggagcaacaacaacaacaagcgacagggccgaagtccgacgatgtaccatcccaagctgcttgtcactctaacggttctgcgcaaaagacacactccccatgatgtattctccaacgttcttcatgcatgaaaaccaatcgtccacctatacacataccgcaacttgtcctctcatggaaggacaggagaagaaccattgctgaagattgaatggcacagttcacatgtcgacaaaaggatccaacagtgttcaggaatgaaggtaacttgcctgatgtctaccgaaaatccaataggcactactggcaaagctgatggtgagcgcatcacctatgaccacctagctctccatgctccactagcaaagaacacaggccacg

SEQ ID NO: 98774 - DNA, 1714 bp, Zea mays
  Clone ID: MRT4577_21596C.1
gggcacaggactcacgatttgattgaaattaattattaactttcgcaagttggagcttccgaaaagctcagattcatccagccagcagaatgacctgtaatttgcatagctatcttattacacgctttcacaaacaagctccatacaaaaccaaaccccacgccaagctcgcttacaaacacaaaatttttacaacactatttttttctcaatagaaaccaaatataaccgaagtcgcatgtatagcactgcatcaaaaagaatgacaaacgcggccttaaaatcaggaaactgtcagcacgccgtcctccggggtagcagcgacaatgatcctgatattcgcgacgagtgcccctatgtaccagtccacttcaacgtaaatctgccacttgtacgagatggatctgcagtcatagcttggctaataccgcgaatggtaaggcgctgcaggctgtactgatgttgctgccagtctgtggcattgtgtagtttactatcaattgttgtgtcttctgtgggatgatataaagagacgatgaacgctgctgtctgttcaatggtcagcatgacactcctttttcacgttggaacctctatttggagatggagttttaccacagccagctaatctcatcactctctccctctcaagttcctggtccaactcttctttccacttcctctgcctttcggtgaagctgatgcttgggctatcttgggcatcaagatggagtttatcagcaaactcattgagttgaggagaagcaatttctctcaaaattcggctgctctccaccacactgcttctaggaaattgcttgctgcagctttcaggagctgtgtcattcaaagtatcacatgcacctacacgtgtcttgcatggaggcgactttcctcgagggggcaattttggactaattgggagttttcccttggaagtttgatcagctccctgaaaactccctccatgcacagtgttgtagaactcctcatacaaaggtgtttgtagctttttcaggtcaagagccttctcctcaagaaatgcctttatttttgactctgtaagtacatcatcatcttcacaacttcccccaacagggaacgtaaaatcattcccagttatgctgctttcaacatgtttggccaattcaccaaattccattggttcatgagaactttgctctgggcttgtgtcaaacttgttttcccagttatcaaatggttctgacataggattatagctagatcctactggtgcatattcatccttgtctgcaaactcacacatgtcaacatcatcacagctcccctcccataagggcttgatttttgatgatctattggagttcatggtcgaccagttggaagaatgattcaaacccaagccatttggcatatcatgtgcatgaatttcattaaaacagtccttgtgtgcagcatgattgagtggctgcaggtcatccaattctccagtgacaaaaggatgctttaataagtctggtgcagtagacctcagctctggttccttctgcaggcactttagcagaaaatctttggcttctggcgatagatgttcaggtataggtggatgcgattttgtagttccaacatgaaatagaagagcaacttcttgatactgctggctccatggtggtttgccagtggccatttcaatgactgtgcaccctacactccatatatctgcagaactgag

SEQ ID NO: 98775 - DNA, 1738 bp, Zea mays
  Clone ID: MRT4577_21597C.1
cctcgaggccggcggggtgagtatctgggacaggtgccaatagctgaaatctctccacggatcgattctcctccctgccgcgcatgcgcgtcaatggcgccgccagtcgccggcgtcgtgcgtcttgccgcggcctcccgcgtattagttctgtccctctacctgctcgcccgcctcctcttgtgcccctacgacacctccgctactctccacccaccctgcctctcctctttctcctcttccccggatcccaacacgcccgtctccgccgctatctcgtcgctggccgtgtgggacggtgtccacttcgcccgccccgctgagtgcggctacgagtacgagcagtccttcgccttcctcccactcctccccgcctccctcgtgctcctcgcacgatcgttgttcgcgccgctagtaccgatactagggtacagggccgtgctcgtgctctccggctatgtcctcaacaacgtcgcattcgttgctgctgcggcctacttctacagattgtctgtgctgattttgaaggaccagaaagctgcttaccgagcatctgttctgttttgtttcaaccctgcttctgtgttctactcatcattgtattcagaaagtctttatgcacttttttctcttgggggcatcttctacgtgttttccggccttgctacaagcatatgatgctactgtacaaaagaaaaggcccttgttggcaattcaggcccttgtggctggagctttgcgctccattttcatatttctacctttctttgctttccaagcatatggatatttgaacatatgtgtacatgggagctcagacgaattgaggccatggtgcaaagcaaaagttcccctattgtatggcttcatccaaagccactactggggagttggtttcttgaggtacttccaagtgaagcagctgccgaactttctcttggcctcaccagtgctttctctcgcggtttattctattgtccattacgcaaaactgcttcaccggtgtttccagagaactagcgtccacaagcagattatcactgctctagagaaaaggccagttgtgtcgtatagaagatcagatgacgcgacaattttgagtgaacctcctgctggactcaccaagaaagcacaagggagctctaaggctaaacagagaaaaccagttgctaccgagatagctcctgcgacattccatgacagtaccacgccagctaaccaaaacatcgaagaggatcaggacgcgtgctccatactactactcccattcgttctgcatctggccttcatggcattcacagccttgttcgtgatgcacgtccaggtgtccacacggttcctatccgctagccccgcggtttactgggctgccgcgcacgttctggcttctccgagccgcgccaacagacgatggggctacctgatctgtgtctatttcatcgcgtacattcttctaggtagcctgctcttctccaacttctaccctttcacgtaacgtaagaacggcggagtggggggtgtccccggatgcgttatccagtagcgagccactcccgcagtggatggctcatctgtttatcaggtggattatctcgaccagctttgcctgaaggtttccctaggttggtaggtgcttccctggttcagtaattgagcgttggctactcgaatcgcttggaatctggtgggctgattgtatccttacgtatgtacgtatacatatattttttttcctttc

SEQ ID NO: 98776 - DNA, 345 bp, Zea mays
  unsure (1)..(345): unsure at all n locations
  Clone ID: MRT4577_21598C.1
cattgtgtggtgggtgtggtgaagtgtgtgttaggaggcgccttgaactacataatacctttcnnttctcttcctgttgttacccaccttcctcganacaacctcttgtcgactctctctctattgcgctnncacttcattgcgcttcttcttttgtttttctcttatatcccaggaagtccctgcagcgtgtggcggggggcggttnntctcacctttgnngttgaatcctggcctttttcttgtgagcggttctgtgggttttatcgattactgcatanntttcactgtgtgttctgctaatccaaccaacaatttggggcttgctgagaagaagacaactcc

SEQ ID NO: 98777 - DNA, 148 bp, Zea mays
  Clone ID: MRT4577_21599C.1
gttgcggtaatacataacccatcatgtatttcaaaatttggggtgtcagcacactcatagcactctggcacagcgctctatggagacaagatcctaaacagcagtgcggacgccgctgctcttggtggatatgctagaaaagcgaatg

SEQ ID NO: 98778 - DNA, 1422 bp, Zea mays
  Clone ID: MRT4577_2159C.1
gtgtgaggctagctgtgaccgacgaagcagcagggtggcaaacatggctcttcttctcacaggacgcgtgctcgtggtggcgtgcgtcctcgtcgcgtgctcctcctcctgcggctgccctgtagcggcggcggcggcgatgacgacagtggacggcatcacggccatctacagcttcggggactcgataacggacacgggcaacctcgtccgcgaaggcgccaccggcatgctgcgctacatcggcagtcgtccctacggcatcgacttgctgcgcggcggccggaccccgaccggccgctgctctaatggatacctcatgatcgatttcctcgcgaagtaccttggccttcccctcctcaacccgtacctcgacaaggcggcggatttcacgcacggcgtcaacttcgcggtcgccggagccaccgccctcggcgcgacggcgctcgccgagagaggggtcaccatgccccacaccaacagctccctcgacgtccagctccagtggttcagggacttcatggcctccgccaccacaaactctagccaagaggtccgaaggaagctagcgagctcactggcgatgctggagatcggtgggaacgacttcaactacgccttcctccagctccagacccggccaacgggcgtcggatacggcagcggcaacgtcacccgtatagtggaaatcctagaacaggtcggggcgctcgtgcctcaagtcgtgcaatccattacaaacgcagccaaggcgttgctggagatgggcgcggtccgcgtggtcgtcgccggcaacctcccgatcgggtgctcgccggcctacctctcgggggcgaacgtcacggagctggccgcgtacgacgccgacggctgcctggccgtcctcaacggcttcgcggagctgtacaacgcggcgctgcgggccgccgtcgcgggcctgaagcgggcgcacccgcgcgccgtcgtcgcgtacgcggactacttcgccgcgtacgccagggtgctccgcgaggcgcgcgcgcgcgggttcgacccggccaggacgcggacggcgtgctgcggggcacgggaagccgcggcgtacggcttccgactcggcaggttctgcggggcgccccggacggccgtgtgcgcggaccgggcccggtacgtgagctgggatggcgtgcacccgacgcagcatgcgtacgaggccatggccgagctgctctaccgcggggggctcgcgtgcccgccgccgatcaactggccagggcagacgatgccgggggcgaacgcaccgttgaattgataccatatgcatgctctctctctctctctctctctttgatagtgtatccgtgtttgttgcaaatgttatacctaccggtgtcacgtttctcatcactaatttcggttttcaagggctttggttaaggtgtt

SEQ ID NO: 98779 - DNA, 327 bp, Zea mays
  Clone ID: MRT4577_215C.1
tgcctcgagcatggcattcaggctgatggtcagatgcccggtgacaagaccattgggggaggtgatgatgctttcaacaccttcttcagtgagactggcgctgggaagcacgtcccccgtgctgtttttgttgaccttgagcccactgtggtgggtgaggtgaggactggcacctatcgccagctcttccatcctgagtagctcatcactgggaaggttgatgccgcccacaactttgccctctgtctctactccattggccctgctattgttgacctatgccttcatcgcttctgctagcttgcccacgcctttgctggccttcgg

SEQ ID NO: 98780 - DNA, 288 bp, Zea mays
  Clone ID: MRT4577_21600C.1
atgtcgtcgagtactccgtcggcagcgacagaggaggccccaactgtgctcgcccccgccatcgaggtcgacacggggggcgcgttcagctccatcctgccgcccactccggaggggacggagatgatttttgggcgacagctccggtccggcgccgagccagaagcagcgccagttcctctcccccgggtgctgtctcgcgcccatcaagccctccaggagactgaggcggtgatcctgcgggagtgggaggcgctcgaggctgagcaccagcgcctcggcgattag

SEQ ID NO: 98781 - DNA, 312 bp, Zea mays
  unsure (1)..(312): unsure at all n locations
  Clone ID: MRT4577_21601C.1
cggccgcgccacagctgcgcgcgctgcatggcactcgtgtccgcctcctcgtcctccaccaccgccgtcgcggcgctccccaggaatgggcagcagcgggcgtcgtcgtcgtcgtcgtcctcctcctcctcctccttcctcgncggcaagacgctgctgaggcaggccgaggcagcccggccgtcgttcgccgtgcgctccgctgcggattccgacaggccgatctggttccccggcagcacccctccaccgnggttcgacggtagccttnccggngacttggggtttggtccctggggcctnngatctgac

SEQ ID NO: 98782 - DNA, 750 bp, Zea mays
  Clone ID: MRT4577_21602C.1
ttctcccttccccccgttccattacatacatacatccatccttcctctcctctcatcaccaccctccaacctccccccgtctttctccctctcctctcctggtctttgccagattttcctccacccattctctccccgctcctctcctctccacccgcatcgatctctccgaattccgtccctccctctccgcccatcttcctccagggaagggattgattggttcttcctccgtttcctgggccgattcttcctccctctcctcgctccagaggatcggcaggaatcaagacggtggatgcgaacgagtttgatctccgcttggattgtgcttctcgcgaggcgttgaaaatcttctcggtcacacttgaattgctggtgaagaggtgaacagcatctgacatgctattgctgcagaacaatctgtagaaggaccccctttaccctttcgataatgcaagggcagaggaattctgtcgaacagctagctgacgtcttcgggtttgatcatgggtctggtccaggcaaccctgtcatggaccagcaggcgtactggaacaacatgcttggagcagcagactcgcagaacctccaaggttatgagatgaaccgcggcgacggggccattccgtatggaagcgaggcacatcaagatggccagttcttaggcttttgggggtcaggtgaagctagttcaagcggcaatgcgctgaactatgggagctctaacgcgatcaaagctgagcatct

SEQ ID NO: 98783 - DNA, 116 bp, Zea mays
  Clone ID: MRT4577_21603C.1
ctttaacaacaaccaccaatatattgtttagagacggtttctgcctagtgtacaacttgagtggtctgactctaataactggttttgaactgtgtgactggtattatacaatttgt

SEQ ID NO: 98784 - DNA, 665 bp, Zea mays
  unsure (1)..(665): unsure at all n locations
  Clone ID: MRT4577_21604C.1
gggtacctcgaggccggccggngatcacttctctagctagccatcactagtcaggttcgtccaccatagacaacaatggtcatggagacgagcttcagagcgcgtgcgatgcatggccccgctgggaggaaggacagggtcctcgtccgcaacctgatgctgacgctgaagcgggagctcgcgccggtgtccgtgggccgcgacgccacgcgccagcagtgggaagtatgccatcccaagaacccagtggacgaacatgtgctggtgcactagaacaactgccacggattggagatggcgcgcgagacttcgccgctgtggcattctcgggcacctggatgcggatccttgccgaatgatcgcgccggtgatcgacgagcctgggcaaggactacacccgcaacatcacatgctgcaaggagaacacggacgatagtcctaacatgacgactacctacatgattacctatatctgccaccagactcatcatcatgggaggctagaagaaggacaatgtgatcggggccagcccaaagttcacaatcaccaccctcatcagcaagcacatcgactagatatgagcatgtgatgccatgccatggatacgtgcatcgacgactaagctcatatgagcatctctatgatgccttggctacgggatatg

SEQ ID NO: 98785 - DNA, 168 bp, Zea mays
  Clone ID: MRT4577_21605C.1
cggccgatggagacaccaaccgacaggccctggctgagggcagctgcgcgggcttatttattaacaggataacccttgaatgtagcagccccgggagggcggcacaggtcgggcgcaggattcagccggagggaagggacggggaagccgagctccagagcaacgacc

SEQ ID NO: 98786 - DNA, 423 bp, Zea mays
  Clone ID: MRT4577_21606C.1
caagaccttctaccggaactcgcagctggttttccaccaaagaactcacagccgggagacgtacttccagtgccccacctgccaaaaggccttcctgcggagctccagcttcatgaagcaccagcggatccacacgggggagaagccctgcaagtgcgactactgcgggaagggcttcagcgacttctcggggctgcgctaccacaagaaaatccacacgggtgagaagccctacaagtgccccgtgtgtgagaagagcttcatccagaggtccaacttcaaccggcaccagagggtgcacacaggtgagaagccctacaagtgcacccgctgcggcaagagcttcagctggagctcgagcctcgacaagcatcagagatcccacctgggaaagaagccccgcccgtagccgggctctctgag

SEQ ID NO: 98787 - DNA, 309 bp, Zea mays
  Clone ID: MRT4577_21607C.1
ttcatataaaaagggacagacagagagagaagcaaaacaaattaagatctctcattgtgtgatgggcatggcacggagatgctttgcattgttagagtagtagtctctgtgagacgaggaggagaggatttgctttaccggtaagctgatggcgactcgtgccgcattatttagttgcctgatgaacatatgcgacgaccgtccagcttttaatctggtgcccagcccagcggccctcatgttcgtgtgccaaaccggatacttagcttactggtatgttgacagaaacattgagaccggcaacaagtg

SEQ ID NO: 98788 - DNA, 1201 bp, Zea mays
  Clone ID: MRT4577_21608C.1
tatactcaaaaagcatgaagtcaacttgctaatatagctgagacatccaaatgttgtccagttccttggagcagttacagaaaccaagcctctaatgctaattactgagtttctacggagagaaggatgatgaagggctttggcaatcgccgctgcactcaacccacttaccgctgttaattttgcactggatattgcaagaggaatggcatatcttcataatgagcctaatgttgtgattcaccgagatttaaaaccaagaaacattcttctggtgaattctgctgccaaccacttgaaggttggagacttcggccttagcaagatcatcaaagctcagcatgcgaatgatgtatacaagatgactggagagacaggaagctatcggtacatggcccctgaagttttcaagcaccggaaatatgacaagaaagttgatatcttctcttttgccatgattctatatgagatgctggaaggtgattcacccttctccaactacgaaccttatgaggctgctaagtacgtggcagatgggcatcgtccggttttccgtaaaaatcataccactgagttgaaggatttggttgagctatgttggtctggggatatcagtctgagaccatctttcttggagatcctcaagaggcttgagaagctcaaggagcattattcacacgagaaccactggcatttgttccagtagcagtgcgcatataatcatacagtatatttttttactatgactgttgtcatgattggggctttctcgggagatctgacattgatgaatgtacaaaattgggtgcctctagaaaggtccactgagactgaaaaatcttcatgctgttttaggtatatttcttggagatcctcaagaggcttgagaagctcaaggagcattattcacacgagaaccactggcatttgttccagtagcagtgcgtatatttttttactatgactgttgtcatgattggggatttctcgggagatctgacattgatgaatgtacaaaattgggtgcctctagaaaggtccactgagactgaaaatcttcttgctgttttacgtttatgctatttctggtaaaaaaaacagaagctttctttgtaccacatcctctacaactttgtctttaggcttctctccgtaaatgatggaaaatcttgaactaaaaaaaaaaaaaaaaaaccctgca

SEQ ID NO: 98789 - DNA, 1693 bp, Zea mays
  Clone ID: MRT4577_21609C.1
ggggcgcgtccgggatttccagagagacagaaacaaacggagacgcagagaaaccctttccacccagattcgttcggttcggttccgaccacgcgggagcgggggcgggcgcgggagagaggggggagatgagcgcggctgcggaggacgcggctgcggccgatgggggatccggaggcgggagcagcggcgcggggtcgtcggaagggggcgcgcggcgccggttcgacgacaagggcctcgtcgcccgcacctcgctcatcctgtggcacacgcaccagaacgacgtcggcgccgtgcggaagctgctggaggaggacgccgcgctcgtcaacgcccgggactacgacagccgcacgccgctccacgtcgccgcgctccacggctggcacgacgtcgccgagtgcctcgtcgccaacggcgccgacgtcaacgcccaggaccgctggcagaacacgccactagctgatgcggagggcgcaaagaggcagcccatgattgagctgctcaaggagcacggtggattgacatatgggaaaactggaagccattttgaaccaaagacgattccaccacctctaacaaataaggctgactgggagattaacccacttgaattggacttcacaaaagcaactgttatcggaaagggctctttcggtgaaattctgaaagcaaattggcgaggaacacctattgctgtcaagcgcattcttccatccttatctgatgacaggctggtgatccaagattttaagcatgaagtcaacttgctaataaagctgagacatccaaatgttgtccagttccttggagcagttacagaaaccaagcctctaatgctaattactgagtttctacgaggaggtgatcttcatcaatatctgaaggacaaaggtgcactcaacccacttaccgctgttaattttgcactggatattgcaagaggaatggcatatcttcataatgagcctaatgttgtgattcaccgagatttaaaaccaagaaacattcttctggtgaattctgctgccaaccacttgaaggttggagacttcggccttagcaagatcatcaaagcgcagcatgcgaatgatgtatacaagatgactggagagacaggaagctatcggtacatggcccctgaagttttcaagcaccggaaatatgacaagaaagttgatatcttctcttttgccatgattctatatgagatgctggaaggtgattcacccttctccaactacgaaccttatgaggctgctaagtacgtggcagatgggcatcgtccggttttccgtaaaaatcataccactgagttgaaggatttggttgagctatgttggtctggggacatcagtctgaggccatctttcttggagatcctcaagaggcttgagaagctcaaggagcattattcacacgagaaccactggcatttgttccagtagcagtgcgtatatttttttactatgactgttgtcatgattggggatttctcgggagatctgacattgatgaatgtacaaaattgggtgcctctagaaaggtccactgagactgaaaatcttcttgctgttttacgtttatgctatttctggtaaaaaaaacagaagctttctttgtaccacatcctctacaactttgtctttaggcttctctccgtaaatgatggaaaatcttgaactatgtt

SEQ ID NO: 98790 - DNA, 290 bp, Zea mays
  Clone ID: MRT4577_2160C.1
cccacgcgtccgaccacacgtagacgagttacatcaacggacgcgtgcacgtactccgagaggactccatgatgaacaaggccatccgcatggacgcacatgacaagctagacctgagccccatagggaagcgcgaccctcgccactactctgaagtcaccaacaccatggacaaagtccagatctgataacaatattctggacgactccctttacaacactcagtgttatgctgggccagcttaatgtcttggtcattgacatggtctacgagctttacatgcaacact

SEQ ID NO: 98791 - DNA, 327 bp, Zea mays
  Clone ID: MRT4577_21610C.1
gggtcggtccacgcgtccgaccaagcgtccgcgaacgggatatgagctgtcagatatggatatactgtttgctgaggggattacatcctcagatggggtagcatcaactgacttctctttccctcagctgtcgttgggtggactgggtgttgatgacctcgatgcacaagacactttgctaaggtagcagttgatcaggatatacagtagaggtttgcatgggaactgcaaatgggtgcacatgttcgatgacgttaggcttgttagcttctgtgttgctgctagcgactacgatgagtactccgaagatgcaaacggtatcattgt

SEQ ID NO: 98792 - DNA, 246 bp, Zea mays
  Clone ID: MRT4577_21611C.1
attcaaagggatcgacttctctataaatttcgaattccaagctctaaatagcataagagcaccttacactattttctaactataaagctttaatatcacgcggacttgatagcattggacacaagctttaactctaaggacacaagactcaatgcatataggagtaatgcaatcaaactgcatgactctatgaatacttacatgtaagcattcatcacatcggattaccaattacaacactggatg

SEQ ID NO: 98793 - DNA, 242 bp, Zea mays
  Clone ID: MRT4577_21612C.1
acatggaaaccagctggaccaggacaatgagacgtaaacgcccacatctacctggaatatacaagcggaagggcaccaaaggaatacagaaaccccaacgaactgaacgttcaacttggggaacggaacctccatgcaccgaggtactgcatgcaccgaggggacgacttcgccagcggatgcagaggctgcggtgtgccacgcacggctaggtggcgagcactggctgccatatcccgaga

SEQ ID NO: 98794 - DNA, 1531 bp, Zea mays
  Clone ID: MRT4577_21613C.1
ctcgctggctgcaacacggatccagaggccagagcacaccagctgagctcgagcgagctctagtcgttttagcaccggctccggtgtcacccatggccatgaggggagcggcgcagcaggtggcacggttcgccatggggccacacgtccctcacgttattgcgcccgctgagaggagccttcatgcgtccgccgggagcaagaagatcgtgggcgtgttctacaagggcggcgagtacgccgacaggaaccccagcttcgtcggctgcgccgagcacgccctcggcatccgcggctggctcgagtcgcagggccaccagtacgtcgtcaccgacgacaaggacggccccaactgcgagctggagaagcacatcgcggacgcgcacgtgctcatcaccacgccgttccacccggcgtacgtgaccgcggaccgcatcgcgcgggccaagaacctggagctgctcctcacggcggggatcggctccgaccacgtggacctggccgccgccgccgccgcggggctcaccgtcgccgaggtcacgggcagcaacacggtgtcggtggcggaggaccagctcatgcgcgtcctcgtcctcacgcgcaacttcctgccgggccaccgccaggccgtcggcgtggggtgggacgtggccgccgtcgcgcaccgggcgtacgacctggagggcaagacggtgggcaccgtcggcgccggccggatcggccgcctggtgctgcagcgcctcaagcccttcaactgcaggctgctctaccacgacaggctccgcatagacccggcgctggaagcggagatcggcgcccagttcgaggcggacctcgacgccatgctgcccaagtgcgacgtcgtcgtgatcaacatgccgctcaccgagaaaacaagaggcatgttcgacaaggagaggatcgcgaggatgaagaaaggcgtgatcatcgtgaacaacgctcgaggcgcgatcatggacacgcaagccgtggcggacgcttgcgccaccggccacatcgctggatacggcggcgatgtgtggcaccctcagcctgcgcccaaggaccacccgtggcgctacatgcccaacaacgccatgactcctcacatctccggcaccaccattgatggccagttgaggtatgcggccggggtgaaggacatgctagagaggtacttcaagggccaggatttcccggtgcagaattacatcgtcaaggaaggcaagctcgcgtgccagtaccagtgagcatacatgaagatgcagctgcattgagcgaagcttgctgctggctcagcagtcctcagcgactatacatatgtcaatcacctttacttcaaaaacacaatcccaatcaccataaataaaagtcgcgacctttacacattctcgtcagggcggtaagggatgagaatctgttccgtttccaagctttcctcccccccctttatttggtggaaatttgcaacgactgaatgacctttgatacaaggactaagacaacagcattgctctgtgggcctttattt

SEQ ID NO: 98795 - DNA, 750 bp, Zea mays
  Clone ID: MRT4577_21614C.1
cattgggtacctcgaggccggccgggaggatctcttcctgacgctctcctcgccgtcgctgcttctcccccgtcgcgcccagcactactacctcctccgcacgctcctcgccggctacaggaacagattggtgtccactccgtctccgacgacgacgacaccgcaggtgaagtgctcgccatgcatccaacactggaaggccaagatatggaaacacgagtccctacggccgaccagcattggctaatcttcggcaagagagctagtttaggacccacaggccctcactaatgacaagatcgagaaggagaccaccctctacctggtgctccgcctaagaaggggagccaacaagggaaaaaagaaaacgaacgccatcaagcaagaagatcgactatatcactggatgagaaaaagatcgcagagctgcagtatctatcgctgctgacaacagaaccgaggaaggagacaccagctacgaaaatggctgctcgagaccagagagcggtgatggtgacttcgtgtgataccactacaacagactgtagtgcacgaagagggtgctctgctataacgaccagctcagggaaaagtcacgtgggctaatctgcttctgctgcttaattatcacctatttagctgctacatactctatattgacatcattcttagcgagggaatgtaagaacataccgcttgtttcacagtctgatccaatgccggaactgtttttttaccaccgactctcat

SEQ ID NO: 98796 - DNA, 923 bp, Zea mays
  Clone ID: MRT4577_21615C.1
gtaccctccgggctcggccggaaggggggtcggaaggaaggaactgcagcaatcgacgtctatgcccatggccctctcgagctcgctccgtggcctggtggccctgattccaccggccctccctcccgctcgcccgagcggggcagcggcggcggccccggcaccccgcgcgcggggtcggacggggagaggggcgggggtcgtggcgctggcggcggcgctgccgtcggacgcgcagtggctggagcggctgccggagaagaagaagcctctgtacacgcacagcctgccgtgcatcgaggcgtggctgcgcagcctcgggttcacgcagtcccgcgaggaccccgccgtctgggtcgccgagaagccgctctggcacgcgcgtctcagcctcgatgtcaccgacctccacatcaggtacttgaaaagcggccctggaaatcttgacaaggatatggagagaaggtttagctacgccctaagcagagaagacatcgagaacgccatactcggaggaccttaagctgaacacatggccaaggggctcagagctaggaattgcttagtcgaggttggcactgaagaaataatcgctccagtgatctgcgtgctaccattacgccattgtaagagcaaatggatcatgtgtcgagaaataatattcatgagcaataatctcgaactaggctggaaatgttggatgcctcctggtgacatgcgcctggtttgttggcctcgttgtgtcaaatctgcctttgagccgaaacttgctcatttgtgtacggcagaatagtgagcttttctactctccggtgatgtgatcggtggcactagaacccatgtaccaaacttggatcagtctaacaagaacacgtgcagaagtagcacgtttttacccaaaaaaaaaaaaaaaaaaagcggcc

SEQ ID NO: 98797 - DNA, 371 bp, Zea mays
  Clone ID: MRT4577_21616C.1
ccaagctaccggtccgacggcatatttgatttttgactgcacctggacatgcaccccacggcggatcctaggcctttaccagctatgggtgcctatcatctgcttaaaatgacaccgttacccgacccataaccacgcctgactgttgctgaactgctgaaccacccctggatcggaaagcatggagaggccccagataagccacttgacattacggtcatcagaccaatgacacacttcacggcaatggaccagctccataaaggtgccttgaacggtgtcgcagataaaccattccaagaagagatgattggaccacaagaataggtcataaccgtgcaaactgataacagcgcgtgcattttctcaag

SEQ ID NO: 98798 - DNA, 315 bp, Zea mays
  Clone ID: MRT4577_21617C.1
attcggctcgagcaaacacatgacgcttttttctctcatcttccaccaggcaactgcggggcatttattgagccatatacgcgttcatcctaatcacaaggatcgcggatgctcctacactcttgtctgtggaaccttgccttgtgccagcagctctcccagcacatggagatgatccgtaaactgctccggcggatgttccagctggactacaacgactacattcgtttgctgcggcacacttatacactcgctcccttggaagctcttgaggagactctattaatcgcctaccttctggtgcggtcctgccat

SEQ ID NO: 98799 - DNA, 285 bp, Zea mays
  Clone ID: MRT4577_21618C.1
tttttactttttttttttcttctttttttttattaaggggttttcaaaataggcaagcttttttcccaccaatcccccaaaccgggaagggaaaaaatctcttacaccgccctttcgagcccaaaaagaccaaaaaggtttgaaagagactaaacccccccccttagaatagaacgaaaactaatcccccccaattcccttggagacagacacaaccaaacaagccctaataaggggggagccccatgaaattacccacgggagcatgggcccttattctgcaac

SEQ ID NO: 98800 - DNA, 884 bp, Zea mays
  Clone ID: MRT4577_21619C.1
gagatacacaaggaactacccggcctaaagaagtagagtctttgaaaggctcaagagtgaaatgtgtggcatgtgggccatggcacacagctgccattgtggaagtgatcagtgatttcaagagcaattcaccaagaagcaagctgttcacatggggcgatgcagatcgggggaagctgggtcatgctgacaaaaagatgaagcttataccaacatgtgttgattcactcacagactatgattttattcaggtgtcctgcgggacggcactcactgttgctctctctgttactggtgtggtctttactagtggcagttcgatgcatgggcaattagggaacccctatgcagatggtaaaactgtttctgctgttgaaggactacttaagagcgagtttgtcagacatatatcatcaggttcttcccatgtagcagtggtgactacaaatgggaaagtgtttacatggggtaaaggcaaggaagggcagcttggtttaggtgacttccttaataggagcactccaactttagtagatgcattggaaggtaggcatgtggaaagcctatcttgtggttacaactacactgcagcagtatgtctgcataaagtaatctcaaggaaggacctctctgtatgtagtggttgcaagatggcttttggtttcactagaaagaagcacaactgttaccattgtggatccatgttctgtaattcctgtagtagtaacaaggttgccaaggcagcacttgcaccagataagagcagaaggtatcgtgtgtgtgatgggtgtttcagtcagctactgaaagttgtggattctggtaaggtaaagtctgaactaaataccagcaaaggagctgaaattataaggtcatacacacca

SEQ ID NO: 98801 - DNA, 187 bp, Zea mays
  Clone ID: MRT4577_2161C.1
gaggcaaaggggaccttgtttaaccggggcccaaaaaatgggattttttttcattggagacaaaccccccgtccggaacccccccattaaaccccaaattttcctgtccattccgtttcaggtcacgtaccctttaaaacattgccacctttttgggcaaaaaccttggtcattcaacccttttttt

SEQ ID NO: 98802 - DNA, 585 bp, Zea mays
  Clone ID: MRT4577_21620C.1
gtcgacggcggaggcctcttccatgaaactgagcaccatgcggtccagccccagtgaccccgcggcgtccgcatcgtcggtcgcgggcggcaacggcggcggcggcggcggcagcttctcgtccttgtccctgtccttcccatccgcggcgaacttctccgatgaagacacccgcccgagcagcctccggagcctcgacaccctcggcgtcggcgcaggctgctgcgtcgtcggcggcggcggcggcttcccttccatggcggcgccgtggtggtggtgaccggtcttgagctggaacggcatcgatcgcatgagggatgaggcgcagcgactgcctacatccacaaaatctcgctcgcacaagtaaccaacccagagccaaccgcaccaacacaccaccggcctaaaccaaccaccagtcccagcgtgctactgcccgtacgccgggcgttcgccggaggcgacggccattctcggtgaacggctgctgaggggaacactctctctctctctctctctttctttctgctttttccccttccccactcctctttttcacagtctatacacgcaacgcgaggggcg

SEQ ID NO: 98803 - DNA, 238 bp, Zea mays
  Clone ID: MRT4577_21621C.1
atactgcgccagcattaaaaataaatgcgaaactggatcccttaataattatattaaattaataattggaaacactgattctaaaaaaagttttctaaaaccatgttataaatcacatcaattttattggatttgtccattaaaaaaacatattcatatttttgttcacacaaacatagctaaattcctttctgtgaaaaggtcattaatttataccattacttgaactcatgacctc

SEQ ID NO: 98804 - DNA, 385 bp, Zea mays
  Clone ID: MRT4577_21622C.1
ttttggggaaggtgggacccccggcgggacccggcccggatttccggggtgaaccacgccttccaccctttttattaagtttttattgaaaattttagggcaattatggttgttcttttgaggccccagaaatttccgaaggtggatgggaacccaggacctcacccccaaattaaccctcgcgattcctcgagaagaacttttggccatggaccttagggtgattggtaattaaggaagggtcattggaactttggattccaggtagaactgggccagaaaaccttgcctttacaaagggtttcaggatttcaatggcttgaggtttaccattttttggggaccaaaccaaggttggacaggaggggttaaaaccttcgtgggg

SEQ ID NO: 98805 - DNA, 275 bp, Zea mays
  Clone ID: MRT4577_21623C.1
gtggggggggggaaattttgcgggggggcaccccagatggggggctgcgggggggtatatcccccccaaagccggcccgggagaaagaaaatcccggcggtttttatcactggaaaaagcagtcgggggagggggtagaattatgcaaaaaaaaagcccgggggggaaacaaagggtgaggtttatccgctgctccccccggggggacatgggtgcccccccacggttaaatcctcgggagcaaagcgggcaggcctcttgttcgctcttagggg

SEQ ID NO: 98806 - DNA, 328 bp, Zea mays
  Clone ID: MRT4577_21624C.1
gccgggccgggacagcaagcacgaataccattcaccttccacgctcttcgtctccgctggtgcagcctgaccgaacaccagagccagagacctatagtaaccctacagaggcatacacccgtcgaggaatggtgtactaccaactgcaaggacgactgctggttcatgatctcagcaaactggaacaatgtgaccaatgctatgaacgctaattctgctagtaactcaagctctggtgtctatcaactgccaagaatgctaccgataattccgataatgcaccctaaaggagcaatgccacctgcacgatggacacaaacttactcac

SEQ ID NO: 98807 - DNA, 585 bp, Zea mays
  Clone ID: MRT4577_21625C.1
caacaaaaacaaaaacccatagtggcggggacttttaaaaacagttaatggacctttttagggaagaccaacaggcaaaggggaaggggaaaacatggttttcatcggccccaggcacccttgggagcattaaatttatccctaaaaaacatccaaacaaaaatttattttggacccataaaaaaaaaacaaatggggaaacaggaacaattaaacaaaaaaggccaagcccccaaccacaggggggggggaccaatcaaaacaaccttggggggcccccccagaaggaccttttaaaggaggtctgaagggccctgccccgtcgaaaggcccggggcccttgtttcgccaacggttatgtaaaacccctcctgggggcccataaaaatctcacccgtttccagggaatcacccccaagttggggaaattttgatcccccagggatagcacccccatgggaaaaagccagttgttccttaattaaacaaaaaaccttggggacggtttcctttttagccaaacagaaaattttgacccaaaaaaaactgggtcttgaacggagggatacaaaagtcttccggggg

SEQ ID NO: 98808 - DNA, 380 bp, Zea mays
  Clone ID: MRT4577_21626C.1
ggggccccaatttggttaagccttaaaaattggcctaaaaaccaaactggcaaattgcccccccaaccagaattcaatttattgggtccaaaccccaagccaatgtttaaattaaaaccccagggtcaaaggggggggggcaaaattgtttaccacaggaaaatttttgaatttattacaacccaaaccccctcgggcccaaaaactaaaggggccccctcaaattaaaaccaattgcccccccaaaaatctacgggcccccccccccttttactcctgggcctccctagagggccccccccctagggcccttttttggtttttccgtttaaaccttccgggaggacccccacccaaaggggtggggaaggaaaaaacaa

SEQ ID NO: 98809 - DNA, 3166 bp, Zea mays
  unsure (1)..(3166): unsure at all n locations
  Clone ID: MRT4577_21627C.1
cccacgcgtccgctcggccggacgtttcttcccatctccatcttcctcgcagcttcgacgctccatcttccgctccctcccttacccgcggtcggcacgcaggcgacgccggcggcgccggcggcgctcaggctcgggctctcatctactgcgtcagcagcttcccctcccgcatctcgccagtcgcctcgcgctctcacctccggtcttccgcacactggccggtgaccctgccttataatattctgccacatcactctgggtgaagcaagattgggtagctttctggtgcctacttcattcttgagtttgtcaatataagccactgaagccaaggatgcatgaaaattaacccaatgaaataaatgctcctacatgagtccaagcatttacctatcaaacttgataatgctggatgctattctcaggcagacctatatggtgatcttgccatttattgtcgtgtttctatgttatggaaattttaagagcgctgatgttacctgtagtgctctttaaatttggaacatggaacatggagcatgtgctgattagtagaaggtttccaactgatcctgctctctaaatttggaacatggagcatgtgctgagtagtagaaggtttccaactgatcccaatgagtataagttatatgaggaaattggagatggtgttagtgccacagtataccgagctctttgtgtcccacttgacatcttggttgccatcagagtgcttgaccttgagaaatgtaacaatgacctggatgggataagacgggaagtgcaaactatgagtttgattgatcacccaaatcttcttcgtgcatattgctcatttacaaatgggcaccagctttgggttgtcatgccttacatggctgctggatctgctctccacattatgaaaacttcttttccagaagggtttgatgagccagtcattgctactcttttgcgtgaagttttgcaagctcttgtctacctacattctcaaggacatattcacagagatgtcaaggctggaaacatcttaatagatacaaatggggctgttaagctaggagactttggtgtgtcagcctgtatgttcgatactggaaataggcaaagagcaagaaatacatttgtagggacgccttgctggatggctcctgaagtcatgcaacaactgcatggttatgattacaaagctgacatttggtcctttggaataacggcattagaactagcacatggtcatgctccattttcgaagtaccctccaatgaaggtgttgcttatgaccttgcaaaatgcaccaccaggtttagattatgagagggacaagcggttttcaaagtctttcaaggatttggttgctacatgcttagtcaaggatccacgcaagcgtccttcgtctgaaaagctgctgaagcattctttctttaagcatgctcgctcagctgaatatctggcacggagtattcttgatggcctccctccattgggtgaacgctttagggaactgaagagcaaagaggctgagttgcttctcaataacaaacttggtcaggagagcaaggagcagctatcacagaaagagtacataaggggcatcagtggctggaacttcaatctagaggacttgaaaaatgcagctgcccttatagacagttcaaatggcacttgttatttagatgtcagggagaacagagttaaggatgactcacaaaaagcttacaatggcccagaacatatttaccaggaaaggctcaaccatgttgcttctagaaggcctgaagaggatgagatacaagaagttgaagccttgaatgatgctgtctcctcttcgttttcaagccgctcccttgaggcactaaaatcttgctttgatgtttgtggtgttgatgatccgagcccaactgctactgattcaagagcgcaaccaagtgtcggaactttacctttccagcagttgcaaaaattggagcattgtaaaagtggcgactgcaatggtgaaagcttggaaagaagcgtttctgtacctacgaatctggtcactagtggataccacaagcattcaagtggttctcttatacctgagcaagttctttctccctacttgagcagtgatttggaaagggatggatttcgtcagaaaaacttaagcagcaggaactgtagtggccctttattgttccgccaaatgaaggattcacgcacacatcaatctgttgcgccagacgagtcgtcggaaggaaaaattatccatcgaagggggcgcttccaggttacatcagatagtatttctgaaaaggtagctacatcatcctgcaacagcagcaggataaatctaccaattgatgcagcacgttcaagtcccaagttgtctgcaattcttccaactttgcaattcttgatgaagcagaatactatgcaaaaggaagtactcagtaggctgatttcttcaattgaggaaacatctgatgattctgaagcaaccggaagcagttcatatcagtcttctggagggcctgcccgagaaaaggaattgcatttgtatgttctccaattgcagcgaagtgtcaccgaacttgctgaggaagtgcaaagattaaagctccaaaacaataagcttgagcatcagatcaatatattgtcaagaaaagatgaaaggtcgtcaacgcaagataactgacaatgatgatatgccccttctaccacactgtaattcgattacccaattttgctttgttagaaagttatttgtattctgcctgcagtcagagttgtatcattgtaagctgtaagtatttagcgaagtgtgaaatcatagtaattttgatctgtacagctttgtttggttaaccatgaagatataattgtgttataagtaatgtgctgataatattgttttgcgtggaagaatgtgaaagtttatatgagcaaaaaaaaaaaaaaaaaaaaaaaaaaaaaaaaaaaaaaaaaaaaaaaaaaaaaaaaaaaaaaaaaaaaaaaggggggngcggttttaaaggatccaagtttaggtccccgtgcttgcaaagtaatagtttttttttggggccccctaaattaaattcccgggccgtggtttaacaacgtcgggactggaaaaacccgggggttccccaattaaatcgctttgaagaaaatccctttt

SEQ ID NO: 98810 - DNA, 210 bp, Zea mays
  Clone ID: MRT4577_21628C.1
ctcacactcgctctcgtcgccgtcgtctaccgttcgcaacgccacgctacccaccgccgaaatggcgccgaagcgaggtggcatggcaccgatgccggccaagaagaagacggatccagtgacgaaccctctgttcgagagcaggccgaagcagttcggcatcggcggcgcgttgcctcgcaagaacgacctgcaccgattcgtcaagtg

SEQ ID NO: 98811 - DNA, 217 bp, Zea mays
  Clone ID: MRT4577_21629C.1
attattttttttttttttttgtattttaataggaggaaaacctaaaaaatgtattattacggacttgtacacaaaaccaatgaagcattaaactcacctaaaaattaaaaatctgtatcgttaaacatactggaaccataaaaaaataaaaacgatgcccaacctcttactttggggtaacattctttcagtatgacattaaaaaaaaggattacat

SEQ ID NO: 98812 - DNA, 272 bp, Zea mays
  Clone ID: MRT4577_2162C.1
ggtgtgggtgtgtttttttttttttttttttttttttttttggtttttttttttgttattttctttttttcatttttttttttttttattacaaacgcccagccggaagaggggacccatatgcttatccaccccttttatacggagaaaacaggggggggggggggacccttgccccaactaaaaacaaacgggctgtggctagggtgtgggaaagcactactaaaaagtgggtcacatttttacccacatgggcacgtcccaaaaacccc

SEQ ID NO: 98813 - DNA, 402 bp, Zea mays
  unsure (1)..(402): unsure at all n locations
  Clone ID: MRT4577_21630C.1
atatactctccggacaatgaaccataaccaatactaccaatgcaatactcatccattaataatcataatggctatagcagtaaaactaggaatagccccctttcacttctgagtcccagaggttacccaaggcacccctctgacatccggcctgcttcttctcacatgacaaaaactagcccccatctcaatcatataccaaatctctccctcactaaacgtaagccttctcctcactctctcaatcttatccatcatagcaggcagttgaggtggataaaccaaacccagctacgcaaaatctnagcatacncctcaattacccacataggannaataatagnagtnctaccgtacaacccnaacataaccattcntaatttaacnattatatnatccnaa

SEQ ID NO: 98814 - DNA, 852 bp, Zea mays
  Clone ID: MRT4577_21631C.1
agaactccaggtgctcgccgtggccacaagcgtgtagtcccccgacgcagagaagaggaagggcatgtggcgtagtcagagggatctgaaccctagcggtcgtccgcccgtccagatctgtgacccgtccttctcgacgcttcggtgacatgagtgcctggaaatctagggaggcgaaaaggtcagagttcagtcatgtcatgcttgatttgagttctgtgccagatcaaagcaagtagtagtacgtgagaagttaaccattgaacagacaccctttttctctttgtgtatcacagattttgaaacttgctgagagggaaaaacaaatttatggggaaaaaatgtgacactgaaagccatttgcttccagcagcttaagaattgttgcggtagatgcaactgaagagggtcttcaagtaagtaaatcaactactacaatggctcactaaaaatggtcgacaggacagtttcggaaccttattgttgttcttcagagagaacatcgacaaaggaacttgaagctccgtaggcgaaaggatctctagaaacgactaactaaattctcctaggtactactctagggaggatgctgaagatgctgtcaaatacattagtggaacaatgcttgacgatcgtccaatccgtgttgatctcgatcggggctttgaagaaggcagacagtggggccgtggacgaagtggtgtacaagctttacaaaccatgatgtccgtgcgttgtagtagtaagaaagaactaatgttcccagttaaaaagtgtggaatgagaaccgacattaaaataggagaatatatataatgtgggtttcatacatatgttctatgtttccccacc

SEQ ID NO: 98815 - DNA, 202 bp, Zea mays
  Clone ID: MRT4577_21632C.1
tttttttttttttttttctttttcccctttttttttttttttttttttttttaaacttctcaagtctccttcaattctatacaaccgaaaacacaaagagtggaaggtgaacagctactaaaattctattgacggtggacgacagacggcactgggaattcacatctggaaatgaaagaaaaaaaacttgtgtagtcatcag

SEQ ID NO: 98816 - DNA, 989 bp, Zea mays
  Clone ID: MRT4577_21633C.1
tgggtacctcgaggagcagaagcaccggccgggtgaccgccgccgccggccgtttcgattcatttgcgggccgctgcgcgtccctcatacctcaccgccggcgccgcgccgtcctctcacctatcgccacgcgcgttcccgcccgccccttcgacctccatctactgcctcgcggcgttgcttcccgatgtcgttccgaggtcgtggaagagggggccgagggcgagggagaggtgggggcttcgggtacgaccacccggccaagcacgtgccacacgaggactttccggacatcgctctgcctgagatgaagtgcgccaaggcgagcaacgaggagaaagcgctgattgtgtccaccttgaaactcgaggagttctggaggagttcctgctactacctggaggaggatgctcccaagaaaaagaatgaagacaaagagattgaaagattttctgataggaaacgtaagacacaaagcaaacgtgaaggtcttgcgtcatatctcaaactagctccttcaaatttcccttctgaactggtgcaaggatctagaagagggcaagcaaccaacaagaaactccggtgggataaggagtcagatgagcaggcatttgaagcatttgagaagcttgaacaaaagcacaaggatggaagcaaggtggagaaggaaggtgatgacgaggatgagcaagaagaggaagtacaagaggaggaggaaaattcagacgatgactataatcaaaatatcgagtttgatgacgatgatgatgactggaaccaagaggatgaagcacaggaagacttctacgattaattatggatgagcatattttttctccttttttcctctccttttcacttgtgacttcacccagcaaaattattagagagcaatctttattctggtatttctagtcacgatggtcacgtgctttgttagaaactcaggaatatcagaacagtgaaagacgacgttgctaacttgcatt

SEQ ID NO: 98817 - DNA, 218 bp, Zea mays
  unsure (1)..(218): unsure at all n locations
  Clone ID: MRT4577_21634C.1
ggccggngatctcatatcatcatcaagcatatctacaaagcttaacaagcccctaaatcttcaacaaatatctntttgtttctctcactcaatctatcaccacatacaacaacatcacaatggataaggccaaggcagctatcactgacttcatgtccaagtctggacaccacgacacaactgtccatgaggctgttgcacctgctgtccagcatgag

SEQ ID NO: 98818 - DNA, 411 bp, Zea mays
  Clone ID: MRT4577_21635C.1
gtcacgcgagaagagacgcattgacacactcgcacacgaacttgttagcgatagctgtggtggtgtggatcttcacgatcaacttaacgtcgacaggaccgtgtcatttatcgccagcgctgactcacaacatataagcgcaaaatggtgaacacagcatgcacacggcaatcagaagatcatgaaccacatgacctgtataaaagatatagtgcgccgctaatgcaacatgaactatgacaacgtcgacttcgacacgtacactaacgccggcgagcaaacacctgaagagctgtatctcatgcagacagaagctgtcatccataagctgatcacagtgtctgactagatcctcaacaggtataaggattacgaggacagaatgatgtcacatgtcaggtccaacatcct

SEQ ID NO: 98819 - DNA, 2053 bp, Zea mays
  Clone ID: MRT4577_21636C.1
aattcggcacgaggatttcttccctggctgaaggcgtgggtctcgagagctgcttaaaaagctttgcacaaaaatggcttcgttggcgatctcgaggccgcccgggacgtcccatcgcgccgctcccttcgtcctggggtgtcctcctccatggccaccgccaccgccgcctgccgctcgcccacggccgccgccgccgcgccctgacgctgctgctgctgctagactgctagaggaggaggccggggcaggcagctcgcgagctcgatcgcctggcgggcccgagctggagtcgatggtgctggatctcaatgccgagtcgccgacgcccggctcggcctcggccgcctcgagctccagcgtcgtagtgggcgggggcttcttccggttcgacctgctcggagggacacccgacgaggagggttgctcgccctcgccacccatcgtgacgcgccagctcttccccttgccgtacccggacgctgcaggtagcaccgccgcctcgacggcgtcgaacgggtcgccgccgccggaggtggcggtggcatgggcgcgccgcccagcggatctcggggcgccggcgctggcacaggggaaggtggtgtctgcgccttcgtcgcccgcggttgtgtctcctgccgccgggaagaagagccggcgggggcccaggtcgcggagctcgcaataccggggcgtcaccttctacaggaggaccggccgctgggagtcacacatctgggactgcgggaagcaggtctacctgggtggatttgatactgcgcacgccgcagcaagggcctatgatcgcgctgccatcaagttcagaggccttgacgccgacatcaacttccagttgaaggactatgaagatgacttgaagcagatgaggaattggactaaggaggagtttgttcacatactccgacgtcaaagcactgggtttgccagggggagctcaaagtaccgtggtgtgacactacacaagtgtggtcggtgggaagctcggatgggtcagcttctcggaaagaagtacatctaccttggtctatttgacagtgaaatcgaagcagcaagagcatatggtagggcagctattcgcttcaatggaccggatgctgttacgaactttgattctgtttcctatgatggagatgtcccacttccacctgcaattgagaaagatgtggttgatggggacatccttgatctgaatttgaggatttcacaacctaacgtgcatgatctcagaagtgatggtaccctgactggttttggattaagttgtaattctcctgaagcttcaagctccattgtttctcagccaatgggcccccagtggcctgtccatcctcacagcagatcgatgcggccccagcatccacatctgtatgcatctccttgtccaggcttctttgtgaacctcagggaggcgcctatgcaggaagaggagaaccggtccgagccggcgtgtccccagccgttcccctcctgggcatggcaaacgcagggctcccgtgccccagttctccctgccaccactgcagcatcatcaggattctctaccgccgctgccaccggcgtggacgcggccacagccggccacagcgtgccgccgccgtctggtagcctccggcagttctcgggctaccaccagctccgcttccccccaaccgcctgacggagacagaccacctcctgttgagttggcggcggcggcggcgtctcatagctggccggtggttggctggctgcccatgcaacgccacgccggtgggtgcgggtcggtattcggtaacagtcgccactgttgggtatggttttgtgggactacagaggatgcagtgatctctcgctgctgctgtgtgctgtctctctcgctccctctacccacccacacctgtttgtaatatgaatttatcgccctctcgcgctcgtgattcgtccatcttcgtttcgttttgatggccaccggatgggatcatgagcgtgttgcgagaaattgtgtaataaaccatgcgtatttttatttatatttatttattgtgacgatggt

SEQ ID NO: 98820 - DNA, 305 bp, Zea mays
  Clone ID: MRT4577_21637C.1
cccccgcggacccagggtggatacccctaaagggggaaggtctaaatccccacctggtcaaagccttacagattaagcaaccaaatcgcaattatggatcgatcgcatgacaacgatcataccaaccgcaagcaccatcaagctgaggacagggaggatatggtggagcagcagcagccgaagagggccccgaagctgaagtacctggactttgtacaggtggcggctgcccaagccgaggagtgcctcgctgggctctacggactcgacaaggaccacgccggaccgttactgcccagcgatga

SEQ ID NO: 98821 - DNA, 386 bp, Zea mays
  Clone ID: MRT4577_21638C.1
gggccaaagcttccaaagattttaacggggttccacacaagggggggaatggcccccattaccggggggaaacgtaaaaaggggggcccctcccgggttcaggtggaaaaaaccaaaaaaaggggggggccttttttccccccccccccataaaggatagggggccccatttatgacaggttttttttcccttaaaggttacgggccattttaaacccgggggggccggggggaccaaacaggggttttaaacccccccggccacccccttttttttacaccttttacaggggaggggtttttaaggggggtttaaaacccccgggggggtaatccccgggggggggcccattatttagaaaatttccccggggggcttttttttt

SEQ ID NO: 98822 - DNA, 730 bp, Zea mays
  Clone ID: MRT4577_21639C.1
cggggcatggcctagtcgactcggaatgggcgtctgggatgaacggatcgtggaagtcttcttggattgcctatacctcttctccgaggacgaggagcaaagcagcgcttcgcgctgagctacccagcgcaggtcttgtgcgaacgacgccacatcgcatgatttgcgggcgatggactgttttatgggtctcatattcattagcgggacagaccgatgggaactgattccagcttgacctttttggctattacttctgctgtgccgaagcagactggcatgatagctcttcacgccatcaagggagccactgggccactcacggcccaggctcctattgaagtgtcacaatattctccagcatcgtgattcttctgctcgggcgggactggttcttgggcgaacttttcactattttctttttgtttacggtacgggtacatgacatctaacgcatagacgcaaggccgaacgggccacgggagttgggcgggacacaggtatacaaatggctgcagtaatcgcatgtgtctgcagcaaaggtcctcacggatctggcacaaacgatgttatgggatattgctatgggttgggatggtgaatatttccgtcggagcgagactctcatcgctcttggcttcagtcatgcaatgattgcgatacccacgactgagggatctgtccaatggtactctagatctatctgaagcgttttcctcgtgtgcccaat

SEQ ID NO: 98823 - DNA, 379 bp, Zea mays
  unsure (1)..(379): unsure at all n locations
  Clone ID: MRT4577_2163C.1
tgaataataagggggaacaagctgtgctcttgttattttctttaaaaaaaaaaaaaacaaaactataagtaagctagttgagatccacataactcacatggaagaaagaaaggcgttcctccgtgcattatggatccgaacggggtgggggggggggcgttgctcgaatgtnttcgtggcgtcaactctgcctacgnatcatcgacaacgatgtgttggctgcgaatacactggtcaggcttctgtgtgtgtggatgcaaatcgtgacttcggagacaaagggccttaccacaagggtctgcacgtgctgctcttagggaattcatgcacgctttttctagatcccgagcttcctgcctatcgttgggtataggctgct

SEQ ID NO: 98824 - DNA, 364 bp, Zea mays
  Clone ID: MRT4577_21640C.1
caaaccccaaaattgggaccataggggaccaacaccaaaggggggggggttcaaaaaaaaacaagccctgggggggttacatgacccatttcctacaaaaccaaaccaccccccccagaaaacccagcaacttttaactccaacccagggggaacttcaccccaagaaaaccctccaaggggcgagcgtccaaccctagggggggggaaacttgggaacggccttgggcccctaaaaaacggggtgcttggcaagctccccggggagcacaaggcccccgggggtttggatctcgcgggaggggagggggggctttttgtttaaccccccaagcttgggggcctccccggccccacccttccgg

SEQ ID NO: 98825 - DNA, 594 bp, Zea mays
  Clone ID: MRT4577_21641C.1
aacaaaaaaagaacataggaggcctttttggcctttaatccccggggaacccttaacccttcacccttaataagggtataataaaaggggagataaaaacccgggggcgggccgggcacagggggacacacccccacacccaataccttttttttttttttggtaaacaaaaaggaaaaacaccccaacgggagaccccactgtggagccaacagccaaaggggcggcgcacggggaccgcggtaataccaccgcccggcccccaccacaaacacaaaaaacacaatcccacgccgtattacacccatttgttggggcgggctccgcccggggcggatagggccacgggagaaaacagccctttacaaggaccttgaaatgagggggggcgcgcggtcttttttttgtgccaggcgcaacaaagggagggcggttttaaaaaagggggccccgaaaagggggcccggcgggccttaatggggagaaaaaggggcctttgaaaaacaacccggggtcgcggttggcaaaggcccgaaaaacccaacacggggcgcttgtatcctccggggccccgggactggaagggcaccttga

SEQ ID NO: 98826 - DNA, 583 bp, Zea mays
  Clone ID: MRT4577_21642C.1
ccttatcgtgttcgaggtcgagaacatgctttcttcaacaattattattcctattacagtaaaaacctaaggtgcttttatagccgcaactcataaggaaacaacaaactacgaccacccgagctagggaagcttgcttaatactgttaggatcatcaaatcatgtcgttcaaacgactacctgcgttgaactctgcttatggattcccaacaacaacaactaccattgaaccaactagctgatgtctacccgcagcaagatagttccattgaacccactggcataattgatcaatggtgcttattgacagtagctgcaactactaccatatatccatgttgccggtgggagcactgctgacttcttgacacaaccacagtagttgccggtctaccatggacgctgcgcctaacgctggcaccatcttacaactgcaacaattggtggcattaaaccaacaagctttgacaaacccaacagtgttataccaacaacccatcattggtggtgccctcttttacattgcttatgagtgacagttcaataatcaagagtttctgttgatgcgggctgatgattgtt

SEQ ID NO: 98827 - DNA, 369 bp, Zea mays
  unsure (1)..(369): unsure at all n locations
  Clone ID: MRT4577_21643C.1
aacaggctggattgcacagcttggtgggctacaacgtcgtaacttaccggcgactcaatgatggcgaggtgctgtgatttcacatttgacattaggttagatgctatggagtctgtcgagcttgactatttggggctttcgatagccccttctagcttgccaagcacgtactgttcatttatctaagacgtgctggatatagactctgatacagcctaagtgcatgaatacgccgactaatgcgtataacggctaacacagggcattttgtgcactcaaaacattcactgacctggtggcgagattgactagtactgtacattagctgataggggaagtgctaggaggaggagagcanatggccgggga

SEQ ID NO: 98828 - DNA, 228 bp, Zea mays
  Clone ID: MRT4577_21644C.1
cccacgcgtccgcaatttctcttgagctatcttcatccaaacgggaacagtgaacagagtattaatcagtattctgaacattcagggcgtgcctattccttttgaactccaaaaaaaaaaaaaaaaaaaaaaaaaaaaaaaaaaaaaaaaaaaaaaaaaaaaaaaaaaaaaaaaataaaaaaaaaaaaaataaaaaaaatttatttatttggtataatataaatttat

SEQ ID NO: 98829 - DNA, 359 bp, Zea mays
  unsure (1)..(359): unsure at all n locations
  Clone ID: MRT4577_21645C.1
cagatatgctacattcttccagcctgaagggggccatattggttttgttggggcagaaaacacacatntgggcaccttcaggctgctagaacgttgcattagcgcccgctccaacacaagagcaaacatgaagctggcatacaccaccatttaatatacctactgcattctatatgccaactagcatccatctgtcgacaaagaagcagccgcagccatggaaataccccactcaaccacctgaatttagcccatgccaagagaaaagatcctgcggcgtctgcagcgtaggcagcccgttactgggccatagcagtcgagttcctgaggccaccagtgcaacccggcggcgacgccct

SEQ ID NO: 98830 - DNA, 490 bp, Zea mays
  Clone ID: MRT4577_21646C.1
tgttgtccattaggaagcaactaccatattcttttgcttaattttagttggtacaaataagtggcatcattacttaagtttttatgttaatagaccatcgctgggaattcaaatgcacagaccagtagtttttggacttcaaggtattgtacttagcagggctgtccaaacaggaccttgtccaaaccttgttgctattttatttggagagaaggcatccatgcactccaatgatgccatgaaattcagttcactcaataagaacttggatgattcatcggttactatttaaaatgcttcctttgttggttcattcaataagttatgtttatctatattttggtccacacacggtatgaggtaatgaaaatccataagctaaagcattggtgatttcagtgcttcctttaactttcaccgaggccgccgccgcgctgcgcgccatgggcagcgccgtcgccttcgcgaagcgacagcaacggaattcgag

SEQ ID NO: 98831 - DNA, 1444 bp, Zea mays
  Clone ID: MRT4577_21647C.1
aggatgaatatgtgtgagcagcagcaggcttgttaccttgcttcacacacaacggggtttccttgttatgtatatgatatgatcatacttgggttcagttttcacaacctttcggtaaaacaccagatcggttagtgttgcctctatcaaaggaaaatcatcttcagacatctctctctctcgcttgcatctcaccatctactgccgcgagttagtaatcatcttgaaatagaaaaagaaaaggtagctaggcaaccctaaaccatgtattgcatccccacctgcatcagcctcgtgtggggtatgctcagcgtcgcgatgcccctcctgcagttcctcctcaggaaagcatagaaatagttgatcaccagcttcttgacgaagaacgactctttccgggccctgatgtctccgtgcccaagaaggtacaccacgcccgactccttggccttgtggatgaaagatagctcgttgtccatgcttgatccctcctccaacgacatgcttgatcccagggctgagttgtcagcaccgcctgactcgtcaataactcttgatgatgaagaagcaatctcctcttcagagtctttgtcgtcattatggtcgctctccagggagcgttccagggagcgttcctgggcctctcggcgtatgaacttttcaaggctttctatcagaagctgttcgaatgcttggtggttctccttgcgtacatccttatacccatacctagcaatacagcggaacatatggtagttctttgggcacacacgacggaagaggaacctttcattctgaggcacaactggaactgggacccatttgatgcagacaaaaatgatcatcgaatgcatggctggcagtgtagtgaggaagtgaccaaagattgcaggaacacccctgaccagttcattatagagcaatccaataccaggcgccctcactgtaccaagattgcagcctagctgtatcaataaatccattgaaagtttttgcttgacttcagtttcgtacttcaatttggttccatagttccatatgtacattaccaaatacaatacagctgcaaataccaaaagcacccaacttccatctgctgcacttcccaaaactgaggaaaagaaaaataactccagccccagaaagaggttgagaaagcatagaactatgacgatgttgacctgccatatcagaagcattataatggtgaccaggacagtggtcatcatcatgaccccaagttctgctatgccatatgcatttccaatctcatttatgctcccaaatactgcgacaaatgccagacaagaaaccagcaagaaccagttcatcaccgggatgtatatttggcccatgaactttctagaggtgtggataatcttgaggcgtgggaaacagcccagagctgttgcctgctttatagttgagaatatagcagttgaga

SEQ ID NO: 98832 - DNA, 634 bp, Zea mays
  Clone ID: MRT4577_21648C.1
ctccccaaaagcgaatcacggccgtccatacaaaccctcaccagcaaatccccaccatccacttccacacagagggatacataacccaccaggagcgccgcccgctagggttttctctccccttcctggttgcgcagctcaccccgaacccccagcccccctccccggcgccgccgcagcagcaagatggtgaagggacgcaccggccagcgcgtgaggctctacgtccgcggcaccatcctcggatacaagaggtccaagtcgaaccagtacgagacagcgtcgctggtgcagatcgagggggtgaacaccagggaggacgtggcctggtacggcggcaagaggatggcctacgtctacaaggccaagaccaagagcaacggcacccactaccgctgcatctggggcaaggtctcccgcccccacggcaacaccggcgtcgtccgcgccaagttcacctccaacctgcccgccgaggccatggggaaaaaggtcaggatcttcatgtacccgagcagcatctaaaaggttagaatcgatccgttgctggttatttgtttactatctcgaatgtgttgttgcctgatgcacaattttctaaatcgaattgtcagctattcatgattcatccatg

SEQ ID NO: 98833 - DNA, 1309 bp, Zea mays
  Clone ID: MRT4577_21649C.1
gccgccacagcagaagccgccaatgccgcaacagcaaagcatggacattgtcatggtgccggccgagacgacgccgcacgccgacatcccggtgcacgaggggtccagtggcggcgcggcgtcctcccggtggcccaaggcggaggttcacgcgctgatacagctgcggagcaaccttgacacccggtaccaggaggttgggcccaaggggcccctctgggaggagatctccgccggcataaggcggatgggttacaaccggaacgcgaagcggtgcaaggaaaagtgggagaacatcaacaagtacttcaagaaggtgaaggagagcaacaacagccggatcgtctttcctgggcatggtccagtgatcgatccgtctgcgcgcacccaggcattatcccccggtgactctcatcctcctccacttctccatggcttcttttctttctctcgctcgcatgtgacatttgtgtctacccacctgtcgcctccatgcatgctcgtccatatctctagttctctacacctctaaaccaaaaatcacaagaactatctccctcagctcctccatgctccggcaattctccattcctcatatatgcacctagcaacacctcgatccatgtcgtgtcgtcgtcgctgctgcatgcctacccccctttttttgattcgttgctgtgttaattatagtggtcgcctctttagatgttacagtaaaaaaatattggcggtgatgcggttatttattgatttgttctggtaattaataagaaccctcaagctttggggtgttcacggagaggttgagttgatgcggtgaaaacagcacgtgaaagggtaatgagagatcgatcgcgcggttaaggagacaaggtgacaagaaaggcagatgacgcagtgggtgtttgcactgttactgcggtaaattttgtgcatgcggctactactctacagtgggctagtttgttgcaagggagctgcggaaaaaaatggaaaagaagagcttgctcgtcatgtgccatgaagaacagtcagtttgatgcatgcgggatttttatatttatccttgttttcccctctttttcatttttcaccatttcttttatgttctgcaacaagtaaactgtccattaagtattacctaagttttttctttctttctttctttctcaaactgctgttaccgaaatttacagtgtatacttgagaaatgttatatgttaaaattcttgctgttaattataaaaaatattgcaattgctttcaaaaaggattttataaaaaaaaaaaaaaaaggtggagtctccag

SEQ ID NO: 98834 - DNA, 287 bp, Zea mays
  Clone ID: MRT4577_2164C.1
cctcgaggctggccgggttttgtcgccagcagccgtagctaaaagattgccctgtctttaattttggatcggtgcaattgtgttccttccgcgtacgaatttggaccagcatctctgttgttccaaagtggttgctctcgatctactagtactacatggaccgaaaaaattaaccatttgtgcatcttgttgaatgcaacagttctatgtatctttgattagtttatttctctctaccagtagtaggtaaccgtcagaacataaataatgcaaaatacaatttgact

SEQ ID NO: 98835 - DNA, 341 bp, Zea mays
  unsure (1)..(341): unsure at all n locations
  Clone ID: MRT4577_21650C.1
aattcngcacnaggagcagtgagggggggggaggcacggacacacgacacgagcagaggaagcggagctcttgcgtgtgcctgcagtcgtctgcagccgctgccgacgagcggggcgcccgcccnctacgggacatcggggcccgtgggggccatggggatctacnagcgggagggggggggggggcccaccggggtgtggggggaaccgttccgggtcgacgccgacgccgggggcatgcgcctgcgcctgggcgcgtgcccctcggggaccgggggcacgccggggccggtcgagcggggcnagccggaagcaggggagatcaagctcgggaaacgact

SEQ ID NO: 98836 - DNA, 385 bp, Zea mays
  Clone ID: MRT4577_21651C.1
cttgctcctagtgccattattcgacagttcctaccaacagttacttaaatggggttggtacacctacatatgcaggccaacatgcaccatcaagcgctcgctgctagcgtcttacatcaaccaattgcccaatctcatcatcaatcgcttccacatctaacatatacaagccatcacaacgcagcagcatcaacaattcgcactagcactgaaccacctagccatagtgaaccctgaacgatacttgcaagagcatctgcttgcattcgatccacttgctgtggccaacgtagttgcataaccacacagcaacatctacttacaacagtgcatgccaacgatcagtctactagccatggtgaaccatgtctactacgtacaacaa

SEQ ID NO: 98837 - DNA, 285 bp, Zea mays
  Clone ID: MRT4577_21652C.1
gctagctttccaatcgccgtgccggcgcgcatggaaacgcagccacctcgccgcggcgccggcgctgtcaaggcccaccctcctagcggcgtccggggcttcacgcggtgttccctgcgcctccacgccctttactgccgtgccgcgcctctctcaaggcgctcgaggtcccggcgacggcgatctggctccccgtcccatctcctagctctctatccaggtccccgccaacgcgtcggagggcctccccctagtagcagccttgttgccgcctcggctggacct

SEQ ID NO: 98838 - DNA, 473 bp, Zea mays
  Clone ID: MRT4577_21653C.1
ttgtgttcttcatgaccggaacaatctttttggcctgcagtttcatgtcctggacaaatattatgacaaaaagctgcatgacttcttttcgtgcactcttgacgtgagggacggacctggttctgaagattactgcaagctatgggccagatgggagaaatccgtcaaggagatagctgtgtctgattgctctgctttttggaaattcatcgcgacaaactggagccaaaacacccagaaacttctttctggctgtgccaaagttcctgtatgtactgacggaaagatcattttgacaaagaaggaggacgtgttcattcctgacgatctactactcacggacctgttcagcaagctaacccagcattcatttttcatctggtatcctgcttctatcctcccttccatgtctcgagctagacttaaccacatctatgacaccatcggtgtccaaagaatctccaaagcagcca

SEQ ID NO: 98839 - DNA, 284 bp, Zea mays
  unsure (1)..(284): unsure at all n locations
  Clone ID: MRT4577_21654C.1
cnttcncttnnnnnnaaaaaaannnnnnnnggggggnccaataagggggcaccccgccaccccccgaaaggagangagancccaaacacaggnganccagaggacagacacaagacaccaccagaaacccaaaaggcagcagcccaggaccaggcccccccccggaggcagacacccccaccnccccgcgcaagcaggcggacaaangggggaacaccagccacacaggggccggccggcngacgcaaacaccacccgagaaggccgcgaagcaccgcacccgg

SEQ ID NO: 98840 - DNA, 364 bp, Zea mays
  Clone ID: MRT4577_21655C.1
caagaaataactccacgcctcgttttttaagaggcgagcttaacatttatgatgcacaataagtataattacattaagcacgataaacttcctcataataaaatatattctctataataaacatactagagatataaatgttgataacagatgcgcagttattttttgagactggaggaataacctgttgtgtgctcgcaatttcctaatgcggcaggtggctgcggtgcgtgcgtggtccttatctccaagtacaacccggccaccgacgaggcgaccgagttctcagcgagctcctgcctgacactgctccgtagcattgaccgctgctcagtgaccacgagcgagggcattggcacccggg

SEQ ID NO: 98841 - DNA, 327 bp, Zea mays
  unsure (1)..(327): unsure at all n locations
  Clone ID: MRT4577_21656C.1
gggaagggaaaaatnagntaaaaaacttattattgaantataanttataagaaatntaaaagaggggannatctttgatgggttgttggnagaaaaatgntgggtttgttaaaggaagggggttgaatgggagnaattgttggagttgtaagagggtgnnagtgttaggggnaangtggtggtagaaagggaanaantgtggttgtgtnaagaaggtagnagggntnaaaaaagntagntggntgaatggtagtagttgttggtggtgtaaataagnnggagagttnaatggtgntagttggttggatggaagaaattgntgggggt

SEQ ID NO: 98842 - DNA, 367 bp, Zea mays
  Clone ID: MRT4577_21657C.1
gaggctaacttactgagatctaggcgacactctgcactatgatcaatgacctagctgcattaacggagatgattgagactgtcaaacagcacgttaacgatgctaaatctcctgaactaaaagacactcgcatgctgcgcgatgtgctcattgaggctgttcattgatctgggaagaaccatcgacagaattctaatgcagcaccttgccaattcaaaccatcaactgagcttttgaatgctttctgcacgagtggccgactcatactggaactcatatacaaagcacacacacagtgctatgaggatgcttatctgatgcaagctgttgctgaaatcataagaacactgcatgaccaagatgtcct

SEQ ID NO: 98843 - DNA, 714 bp, Zea mays
  unsure (1)..(714): unsure at all n locations
  Clone ID: MRT4577_21658C.1
cctcgagccggccggaatagaacagccggccgaccaagaacggagtcgcatacacgtctgccgccggccgcgcgtccatcgaacttcgaagccaagattgccaagtcatttcccccaaattcctttccccttcgatcctcccctgcaaaccaagtctcaacgaccatggacgtcttcccctgaccgcgccccactgccccagacgccgtcgcctacatccatgagacttcccgatcttcctgcggccgaggatgtcccagcgcgacgtcgactacagttgcggattctgtggataccctctaaacctttcatcttctaaccgaagcacgtctgaagtaggctcctcatataagaagtctctgaagaagggattgatttcattcatttctgttgatctaagccgatttactcaggtggacaaggtatcttgctttcccctcacctggcgcagttacaggccaaaaactaagcttctctgccgaaaatgcggagcatcgatcggctatgggatacggtgggccagctggctttgtgcagttttgatccagcaagttcatcttcctccagtacatcccagaagtatttaataaagatccaagcactccaaccttcagacgggacccagtaagtcagatatggaaagagagacaatagtgaatcgtanatatacaaatgagctgagcttatgtaaaaaaaaaaaaaaaaaagcggccc

SEQ ID NO: 98844 - DNA, 520 bp, Zea mays
  Clone ID: MRT4577_21659C.1
cccacgcgtccgccttggtctgttccttacttggagaattaagcacaagaatgaggatgccatttggctctggggcatgtctgttgtctgcgaactctggtttggtttttcatggctgctcgaccagctgccaaagctgtgccctgtgaaccgggccaccgaccttgccgtcctgaaagacaagtttgagaccccaacgccgtccaaccctactggacggtcggatttaccagggcttgatatatttgtgtctactgctgatccggagaaagaacctccactggtcacagcaaacactatcctgtccatccttgctgctgactaccctgtggagaagctttcttgctatgtttctgatgatggaggggctctcctgacttttgaagccatggctgaagctgctagctttgctaatatgtggggttcctttcttgtcgcaagcacaacattgagccttgcaatcctgaccgttactttaatcttaagaaggacccatccaagaacaaggttcgccggattt

SEQ ID NO: 98845 - DNA, 721 bp, Zea mays
  Clone ID: MRT4577_2165C.1
aagacactgcacttcctccatgctatactatatgtaaaaattcctaagttttatatgttaagaatagttatgtgttcctagaataattcaatggttgcacattatataatttttcttgcttatttacacaaattatcttacctatcttcattggtatgttttttactttttttttggttcgttgtaaagaaaaaatatgagaggcttctcacgcctatttcctcatgtggtttatgcccttttgcttagtcttgctaatcgaccagtgctttacgtttggctataaaattatgctaatgatgtctggtgcacatagctcggtgggctcgacgcctgtggccaggaggaaaccaggattgaggacagagagcgatcagccgaagaagtcggtgcgctgccgacggttgtggtggtggatcatattcgcttccaagaagacacgaaatatcatcatcctcaacgcctcacagtcatctatgtttaggccacctaccaccttaaaggtctatacaatgatgtcaaaatcagtgtaagctcaaacagcgccagtgagaagccaatgctctagatgtggcatctaaatagcacgtgtccgaagggtacaatcccaatcataagaaagaaagaagatgacttgctccgagcagctccattaagcgcatgccatagcgtgtgccgagggcgatgaataatatggtgcaaaatccagcattaatgtttg

SEQ ID NO: 98846 - DNA, 2203 bp, Zea mays
  Clone ID: MRT4577_21660C.1
ctctgctccgtccacctttcaaagccgaggcgccccggccggtcttgggttcctcctccacggctccacctccaccccagtccacagcacccctcccctccggcctcccttcccgcaccgcggaggacaagtcaaataccgcgcgtgtgtaccacttggagccatccggcaccacgccacgagtccacagtccgcgcgccccccacgggccgtcgtcgccccggcttctcctctccttcccggcttcccccaacccctcgcgaaagctcgccgctgctgcgtccgcgccccgtggcggcacggcgcggcacctcgtggggaaaccgacggaggccttcgccgagcctttgggggccggcgctttttcctggtgccgtccttctgtactgcctgcgggtgggttgttccgatcataaccgacaaggcgcggcgtgctctcttccctcgcgttgtagactctcgcgggatctgtctcggcggcggcggcgggggtgggggtgggttactgggctcgcttcatcctcccggatcacggcggcggtttgttcagaacatgttagaagccagggaagatcggtgaaatgcttgcattgatataataagtccaggctgaagttattgagctgacagcactaagatataatagtttgagaatctcaatgggttgcttttctacattttgcaagaaaagaagggcaacgcggcaaccaagttcccaccataatgaagacgtacctggctgttcaaatataacaaaatacacttacaaggagctagtaagggcgacaaataactttaacccattgaacaaaattggtgagggtggttttggttccgtttacaagggacagctcaggaatggtacagttattgctgtcaaggtcctttcgtcggagtcaagacaaggagtaagggagtttctgaatgaactcgtggcaatttccgacatctcacatgataatcttgtgaaactttatgggtattgtgcggaaggagaccaaagaatccttgtttacaatcatcttgaaaataatagccttgcacaaacacttctaggctccagccacagcaatatccagtttgattggaaaacacgagtaaatatttgccttggcattgcacggggattagcatacctccatcatggtgtcagtccccacattgttcatcgagacattaaagcaagcaatatacttcttgatagggaccttaccccaaaaatctctgattttggtctagcaaagcttcttccaccaaacgcaacacatgttagcacaagagttgcaggaacactgggttatttggctcctgagtatgctattcgaggacaggtgacacgcaaatcagatgtgtacagctttggcgtgctgcttctggaaattgtttgcgggagatcaaacagcgatacaagattagcatacggagatcagatactcctcgaaaagttcccacccacgcgtccgcggacgcgtggggaaaagacatggatgcactacgagcaggggagtctggagaggatcatagacaggtccttgggcggcggcgacctggacgtggcgcaggcctgcaggttcctgaaggtcgggctgctgtgcacgcaggacgtgacgaggcaccggcccgacatgccgagggtcgtcgccatgctgacgggcgagtgggacgtcgagccggagacggtcagcaagcccgccataatcagcgacttcatggacctcaaggtcaggagcacgaggaaagcgagcgacaacgtggccacgccgcctacgtcctcctcgacgttcctgtcctccctcatggcgcactcctcgcccttgctgtcgaacgagtccacgcaggcctccatggcgttcaccggggtgtcggatcgcgagtgatccttgatcccttcgtcaaagactggtcaggctggctggtagtgacctgagttggttggaggtgtggaagacatgtgtagtgtaggctaggcaggcacagatggatttaattgcttcgtttgtaggcgcaacatcattgttgagtcaaaaggttcaagtacatgtgagaaaactgctttgtgtgcaattttggattaaaaaaacgattcttttttccacggtgtaagtacaagcaagcccaaaagaagaggttaccgcgtccggcccaagaacaagaatgtatctggcccagattgggtttctaatacaatttcccttctctactg

SEQ ID NO: 98847 - DNA, 1732 bp, Zea mays
  Clone ID: MRT4577_21661C.1
aattcggcacgaggccgaagccaaaacccacgcgaagccacctccccgaattccccttcgccacgagcccgactccgctgatcccctccccacgcaaccctcgccggatcccggcatgccgccgtggaagcctctcgctggcggcaagctcaagaagccgctcactgacaagcagcgcgctgccgcggagcagcgcctgtcccacctccgcgcccacctcatcctgcgctccctcgactccccagctggcggggcccgttccctaccgccgccgcaggaggcggcgctcgatgccctcggcctgctcatttttttccgcctcgacctgcagtccggcgccccgcgccccgacctcatcgctccgctcgtcgcctactacgaccctgtctgcaagcgcagcttcgtccgcggcgtccgtgtcggcgtctcgcgccaccacatcatccgcgcgctctgcctaccctcgaagcccgcctctgcggcgccggccccagcagacgtcgatcccgcagcggtggtcgctgccgttatgcagctccttcaggattatgtcctgctcccgttccagggggacgacaggtgcatactaccgcagcaggtggctgccgcagagcagatggtcagggagggggcggcgcatagggttgattggggagagctgatctggggcctcgtcgagaaggagatgctcgagctgcccaagagggaagactgggtgtgctactacgggccgcacctacagcggctcatttatgcccaaaagccacatctgttggagctggtggaggaagggcctgttcaggagccgtctgctaatgtggatttgaaaaggaagagcatggtggagctggagcaaggggatggggatagagaagcgggtaacaatgtcaaaagcaagagcttgaatgattcagaatcggggaaggctggtgcaaggaatgatggtttggacgagttggagttggctgatgctgttacgaggaacaaggtcatgggggagttcggtttaggggatgtagatgctaggaagaacagcatagtgaaactagaggttgtcgacgaagatgcaaggtgcaagtgcttgaatgaaattcaggctgtggatgctatcaacaacaatatagttgaattggatgcggccaatgaaagatgcaaggtgtaaaagcttgaatgatgaatcagagccagtggaagaggatgttaagggtccaagcttcgatgacatgaacaccgtggatgagcacgtcgatggcacaaacacggatggatcatgtttgggatttgtggcagttgaagcggtgcctgctgtaaatgtagagcctgacgttgttccagattatccagtcatcccaactgcttcaccaacaaacataaagaggttgaagacgttccacaaacctagtactaacacgaaatcaaacattggtcaaaatttttctaggttgctagaagaacacccgaaaatagcatatgatatttgcaatggtccaataaatatgtacaagtgtactaagaaacttttggagtgtggtttcacaggcaaagtacttcacattgcaatcaaaatactaaaagaagattgggaagctcgtcagatattcatggcattagatagatctgaatctgtaacctttatttccaatgccgttggcgattatagctagatgatgttgtatggatgttgaataatgtgaacaataatgtagtgaacatgaactctgagttatgaact

SEQ ID NO: 98848 - DNA, 1688 bp, Zea mays
  Clone ID: MRT4577_21662C.1
gcggccggccaggaggtgacaaagcatggatgctcacaccactcacattgttgcaagaaagaacacttcgctttcattcacctcaaatgagctcatggatcattttcccttcgcttggttacccatggaccccttcacagccatggcgctcagcggtaccctctcaccctcattctctaccacatctaccaatgataccatgtacaaccttaacccagcgttgtatgcatccctcgtgccaccaataaggaaacctgcaaccccgaccacagtagaggtagggaggcaatgcaaggaggaggaggatgcatccattcgcctggtgcacctgcttatcacttgcaccagtgccattgagactggtgactactcgatcgcacaaggaaacttgtctgaggcacgcaagattcttggagaaatcccaacttcgaccgggatcggccgtgttgggaaacacttcatcgacgcactagttcaacgcctcttcccggcatatccgcatgcagcaccaccttctccatctccttctacatcgatcgatctgcacaacaatttttatgatgcaggtccctacctaaagttcgcctactccactgccaaccaagcaatcctcaaagcaatcaaaggatacaaccatgtacacatcattgacttttccctgatgcaaggtctccagtggccggcactcatggatgtcttctccgcccgtgagggtgggccaccaaagctccgaatcacaggcattggcccgaacccaataggtggccgtgacgagctccatgaagtgggaattcgcctcgccaagtatgcacactcggtgggtatcgacttcactttccagggagtctgtgtcgatcaacttgataggttgtgcgactggatgcttctcaaaccaatcaaaggagaggcagttgccataaactccatcctacaactccatcgcctcctcgttgacccagatgcaaacccagtggtgcccgcaccaatagatatcctcctcaaattggtcatcaagataaaccccatgatcttcacggtggttgagcatgaggcagatcacaacagaccaccactactagagaggttcactaatgccctcttccactatgcgaccatgtttgactctttggaggccatgcatcgttgtaccagtggtagagacatcaccgactcactcacagaggtgtaccttcgaggtgagatttttgacattgtctgcggcgagggcagtgcacgcaccgaacgtcatgagttgtttggtcactggagggagaggctcacctatgctgggctaactcaagtgtggttcgaccccgatgaggttgacacgctaaaagaccagttgatccatgtgacatccttatctggctctgggttcaacatcctagtgtgtgatggcagccttgcactagcgtggcataatcgcccgttatatgtggcaacagcttggtgtgtgacaggaggaaatgctgccagttccatggttggcaacatctgtaagggtacaaatgatagtagaagaaaggaaaaccgtaatggacccatggagtagcaggaagaataaccatgtcatgagcaaatcgatcaagtaataaaatgcactgatgacatgcatggtgatctaaagtttttttgcgtgaatgtgcaatgacgaattgttcaatttgaataacctaatcatgagactc

SEQ ID NO: 98849 - DNA, 364 bp, Zea mays
  Clone ID: MRT4577_21663C.1
atgggtatgaagaaatagctttctgtatacagagcgggagttcagcacgaattacgtggtcgcactggaacttattgcttaagggaacttggtgtaaaaactacgatgactgtcaagtagaatggtcctttcttatcggttgatacgtgtggaacaggcactaatatctagcgtggtttactgccatatgtgcgctgtgtctgtgcagcagagtgtcgggggagacggcacagaactcgtgtagggagtcaagatgtcatatatgatttgatctaaagcacaataagctaccgagtaaagtcaatgagcatatttggcgatgctatactgatgacttgtcgtggaaactcagacaattacacac

SEQ ID NO: 98850 - DNA, 1063 bp, Zea mays
  Clone ID: MRT4577_21664C.1
cctcgaggccggccggggtactgcgttctcgactctaagcttatcctttgttccgtactgctcgtctgctccccgttcacccctctccctctctctctctctctctctccactttcctttcctggcagcgacgagtgacgacagtggcaggcgggcgggcgggcgagcgtcgacggcgttctctaggtcttcgttgtccccttcaccggcggctgccaacgccctttgccaggtcttcgttgtcaccttcgccggcgactgtcacggccccttcgccagctcttcgtctgccccttccccggtaccgggactgaagataagatggctgccttgccattggccaccgcagaagcatgtgatgctaatgctgctttaattatgaatggtgatcttcgttctctccaacctatcttccaaatctatggaggccggcagatttttgctggccctgttgtgacactgaagatctttgaggataacgttctgctccgcgagttccttgaggagaaaggtcacggcagggtcctggtggttgatgccggtgggagcatgcgttgtgcagttttgggtggcaaccttgcccagctgatgcagaacaatgggtgggctggaatcgttgtcaatggctgcatcagggacgtcgacgagataaatggctgcgacgttggtgtccgggctctgaactcacaccctatgaagtcaaacaagaagggcgtcggtgagaagcatgtccctgtgacctttgcagggacaagaatctgcgatggagaatggctctatgccgattccgatggcattctcatctcaagatcagaattgagtgtgtaggcctgttcttatgttatgtgtgaacttgtaataatgtatagctgaattacatgactagcgggaatactttggacgttttgtcagtatcgtttgggagatatacatttgaaaatcattgcatcagtcatgtgaattgtgaataaactgggtatctcaccatatttcgtttgggagatacacctttgaaaatcattgcatcaggcatgtgaattgtgaataaactgggtatctcacc

SEQ ID NO: 98851 - DNA, 1177 bp, Zea mays
  Clone ID: MRT4577_21665C.1
ccggcccccggctttgttataacggattttttttcccgacacggctggtcggctgccatcgccatgtgcctcgccgccgcgtgcgcgtccgccaccctcgcccgccgcctctcgccctccaccgcgctcccgcgccgcttcctcctcggcgcccccacgaggccttccccgccaccgcctctgctgcggcgctgcctcccgttccacttctaccatatggcgcaatattggactcaaccatcactggacaggaacaaagctatggttgagtacctaaagcagtatggttctgttagaactgataaagtgaaggaagtaatggaaacgattgatagagcactatttgtaccagagggtaccccttacattgacagtcctatgcctattggtttcaacgcgacgatatctgctcctcacatgcatgcgacctgcttagagctattgaaggatcatttgcaaccaggaatgcatgctctggatgtcggatcaggtagtggctacctgacagcttgttttgccatgatggttggaccagaaggccgtgcagtgggaattgaacacgttcccgagatcgttgcttcttctgttgaaaatgtgcaaagaagcgctgctgctccactactgagggatggatcgctctcttttcatgttacagatggcaggcttggctttccagacgcggcaccctacgacgctatccatgttggtgcagcggcacccgagatccctcagcctctgcttgatcagctaaagcctggcggccggatggtgataccggttggcacctactcccaggacctgcaggtggtggacaagaacacggatggatcattcagcgtccggagcgacgcggctgtgcgctacgtcccactgaccagccgcgccgcgcagttgcagggcccctaaataaggttctctatgttctgtacctcgaaatgcctgtacatatatatatatggtggtcgctacgttcttacctgttcgtgtttcttcttctgagtagctaggtggtcttagtccgttcgtgtttcacgaacgacgacggtgaaaaaagagtggttttactgtaataagaaggatcgctagcatgtttctggtcggtggatgatgttttgaacgaacttccatctgtccgccgctgaggtgtgcatgtacaagtacaaactagccttgcacc

SEQ ID NO: 98852 - DNA, 274 bp, Zea mays
  Clone ID: MRT4577_21666C.1
gcaagaagcgacgcccggccggcggcgaagcacaggcacagcacatcacaggtgtgtcagtgcagtgcaggcacagcgctcggtctgcactactgcaggattgtataattagacaagacacgattcgtgtacgttaattagcagctggtcatggctacaggcccaatcggatggcgtgcatgttcgtccagatgacaacacaccgctggccatgttgctaggtgccttcttcctcctccctacctctagctacgcacgcagtatacctaattaa

SEQ ID NO: 98853 - DNA, 205 bp, Zea mays
  unsure (1)..(205): unsure at all n locations
  Clone ID: MRT4577_21667C.1
gacccacgggaccggcacntttggagccaaggccangcacagggagcgcggggcgcaaaggaacaaacaaggggggggggccacggcagcaagggcaggcaaagcgccagacgcgcggagccccaccccgaaccgggaggngggcgccacggccagcgccagcggaggcaacggccgcacgccgaccccgnccacccgggggggg

SEQ ID NO: 98854 - DNA, 588 bp, Zea mays
  Clone ID: MRT4577_21668C.1
ctctcgtctccgagccagattccggcgaccctagcagcagcgtctccgtgtccggcgggcggccatggcggtggcggcgccggggcagctgaacctcgacgagttcccctcctggggctcccgcggcgtcgactgcttcgagaagctcgagcagatcggcgagggcacctacgggcaggtgtacatggccaaggagacggagaccaacgagatcgtcgcgctcaagaagatccgcatggacaacgagcgcgagggcttccccatcacggcgatacgcgagatcaagatcctcaagaagctgcaccaccagaacgtcatccagctcaaggagatcgtcacctccccaggcccggatcgggacgagcaagggaagccaatcgatggtagcaagtacaaggggagcatctacatggtcttcgagtacatggaccacgacctcaccgggctcgccgacaggcccgggatgcgcttcaccgtgccgcagatcaagtgctacatgaagcagctgctcacgggcctgcactactgccacgtcaatcaggtgctgcatcgagatatcaaaggttcgaaccttttgatagacaatga

SEQ ID NO: 98855 - DNA, 253 bp, Zea mays
  Clone ID: MRT4577_21669C.1
gtcaactagcagcttatcaaaatataagggggatgacagtacataacattagagcaaactgcaaatatatgcggcgacccaaacgcactgctacaaacaaagccaaatttataactccttttcaatgtgtgagtgtgtgtgttttcttggcctatgctactgctgagctgcaaaccaaagtgtgaggctataagcgagtgacagttctgtacaatataacaataatggaaaatgtccaatgaggggagtctaa

SEQ ID NO: 98856 - DNA, 1520 bp, Zea mays
  Clone ID: MRT4577_2166C.1
ggccgcttttttttttttttttttagttttagcattcgaaactttgtagatgaagctgctgcagaggttgaacaaattcagacactgccgtgaaaaaacagtagttaatgggtcagtgaccagatgctaaaacgctggcacgttactatcttcttggtgccgctgacaggatgccggggaggcgttcgatctccttcgggttggttagcttgcgaccctgttgttgctggcaccagtcggcctgggattgccgcctcaccaagacgtgcctcgcccagccctatcttctcccgggcattcggctgcatcgtctcctgcaccttctgtggctccactggcagcgcctgcgcctccgctctgcgctggtgcgctgtgttgttgcgccacagacacaacaccaccaccagtcgtgctccgtggcgaatcatactcagcagcgtcacccgttgggagctggaaccggcagacaggacaggtgttcctgatggcaagccacgggcggatgcactccccatggaagtagtgcttgcaggggagcctaaggacactctgccccgccacaacgccgtccttgcacacagcgcagccgtgcgaggcctcctggtcgctgagcgcaacctctggtaagccgtccaccaccgcacgggatgccggcagccgccgtgtagcctccccgacgcggcgcgcgagcgcgtcgacgaggttgaggtcggcgtcgtcggagtcggtgtcctcgccgcccaccaccattcggaagggccgcgtggcgtgtcgtggcgctcggaggtcgaacccgctgagcatgagcccacccacctcgcccacatcgtcgtcgctggtggcctcctcaacggcgtccaccgggccctggaagccaccaacaggcggccccgaatcgagggtaaacccgttcagcatgagcacgatcccgtcctcgtcgtcgtcggcagtctcctcatcgaccgccccccgctcgaattcggaccctacgccgcccagagcatttcgggaaatcatctcctcctcctcctcctcctccccggaggtgtcctcgacgagttgcgatgcaggaaagaggtgggggtagaaatggctgagacctccgtcggagtcgaatgattggcctagggtttcgagaatgggttcgtcgtgggaggacaggggtccctggcgctggcccacgaggacgtcgcctccgtctccttcgccgccgcggaaagcgaaatctgagatgcgatactgcccgccgcccccgtagttgagcgcaaagtggccgccgacaagtcccgcgtcctcgtcctcgtccccgtcgccatcgcagtcttcgaatgggtcgtagcagaccgggtcgtcgttcccggagtcggagtcggagtcgaaaccgaagggatcgtcgccggcgatacccgccattgggaggaagcacgaagcaggcaatggcggaagtggttcttgacaagggtggggtgggggtgacgactgggcgcccggccggctcgaggtacaatgaattatgagtg

SEQ ID NO: 98857 - DNA, 308 bp, Zea mays
  Clone ID: MRT4577_21670C.1
ggcccccgggaccggccggaataatccgggcgattgctactatcggcggcgccctttaattttttttttttctttcacacagcctgataccccgtctaatactgtgccgctgttattttaaacaacggacaataaaaagaacgagcgtagttcattttaaactaaaccattcaaataaaaagaaggaaggagtacttaattaaaaaaccattctcaaactaattagaaaacttgacgacaactaagttctcaaaacaaaagtgcaaaaaagctccctttttattttgtaacacctgcacttatcatcg

SEQ ID NO: 98858 - DNA, 837 bp, Zea mays
  unsure (1)..(837): unsure at all n locations
  Clone ID: MRT4577_21671C.1
ttgggaccctcgaggccggccgnggaggaacccaaacagccgacggaatctcacctgctctgctctgctcgccggctccagcccatgccttcgctcttcgctgccccgagccctccgcgtcccgccgtcacccgcccgcgccgcgatgccggcgtgggcccaagcggcgctcgtgctcgcctcgccatcccccgcaaccgtctcctcgaccacgtcgacatttggcgtcaggccgctcgtcgccgtggaatcaagcaggttcttctgcaagaaatgaaatgcgaccatggcacgacgaaggtgttggctgtgaatcccaaggtgccaaccgtgacaacagagatcggtggtggctatgcaaagggaccagggaagttcttggtgactgatggacttgccattgctccattctcgctaatcaacgtcttgaacgaactgaaggccaaggaactctccgtgttagaccttgagacaacagaggtcacattcacacaagtgaaggcactcgacctgttgagggctgcattggtctctcgcggtgcgctgaccctcgcctgcctgccgaccaaaccaaagagacggcctaatcatcgctactagttccaaagacgaggcagggagagttcttcctgatggcaatttcagttcattgcagtcttttgcacgttttcggaaagtatatgcattcctttgtggcgaatttgaacttgttccaggaaggcaattgaagtttgagtctgggctgagttttttgtgtttgttaccttgtgtttgtcttcataggtctaatgtctttatatttatataaagtgctcagcccttaaaaaaaaaaaaaaa

SEQ ID NO: 98859 - DNA, 314 bp, Zea mays
  unsure (1)..(314): unsure at all n locations
  Clone ID: MRT4577_21672C.1
ggcactcgcccatcatgcaccattgcccgtccgtgccaccacatccaggagtngggggggaggctcnccaaacacgcgccgtcctcctcctccggctccggccgccccaggctcacgctcatccggaacgcccccgtcttcgccgcccccgccaccgtcgtgtaaacggcccggcggccagctgcggagtcacacgagagagaccgagagggggaagggagggcatccaccactcgtcggcgataagaggggaggagagagaggccagacaagaggaggagaagaagaagaaaatgacgcgctgcctctgcctt

SEQ ID NO: 98860 - DNA, 404 bp, Zea mays
  Clone ID: MRT4577_21673C.1
cacccacgcgtccgaaaatactgatctaactgcaccagaattgatatttttaaggcacgcccgcccaacgtcgtggagtgcgcaatgatgactctcggcctatcactcctctgcgctgaccgcggccctgccgtcgagcagaactgcggctgcacagccaaacgtatgctgcagcaagtatggctactgcagcacgaccgacaagtactgcggcaaccggtgccagtcaggcccatgccgctcgggcggcggctgcagcaatcgcggcagaggtgcgaacgtggctagcgtcgcaaccggctccttctttaacggccataaaaaccatgcctggagccggtgcgaaggcaataacttctacacccggagcgcgtttctgagcgccgtcaaagcgtacccaagct

SEQ ID NO: 98861 - DNA, 333 bp, Zea mays
  Clone ID: MRT4577_21674C.1
tttttttttggggtttttttttttttttttgtgggtataaacattatctttttttttttttattattattttttgaaggggaaaaaaacttttattccaaggaaaacaaaattccttagaatttgtccacccagggttcccgaccaaaaagcgtatccgaaaaaaaaccaggcaaattgctttaaaacagggaactacagattcaacaaaaaaattagggggggaaaaaccattcttgcaaaacagggaaatcaaatcctggcgcactgcagggtgagggcaccccccgggccattaagagggtcaacggaaaaaaacccccctggtttttcc

SEQ ID NO: 98862 - DNA, 2123 bp, Zea mays
  Clone ID: MRT4577_21675C.1
tgggtacctcgaggccggccgggactaaagcagagaatacatcgcaaacacatactcagagacgcttgcttgagacagccgacaagagtgatgatcaaacaggaagctcagaaactcatgaaagtgattcgggggcaaagcagcagccactgttgaaaatagtgaacccctagacgaagatgcagatgcatcatttgacttgtttcgggacccagaagatcttcctgatgagtacaattatgattatgatgactatgttgatgatcgcttgtggggagatgaggattggaaagagcaagaacatgagaaagaggaagattatgtgagcatagatgcccacatcttgtccaccccagtaattgcagatattgacaaagatggtgtacaagaaatggtgattgctgtatcatacttctttgatcatgaatattatcgtgattcagatcatgcgaaagaactagaaggaattgacatgggaaaatatgtcgcgagcagtatagttgtttttaaccttgacacccggcaagttaaatgggctgcagatcttgatttgagcacggatgctgtaaatttccgtgctcatgtgttttcctctccaactgtggttgatttggatggtgatggatatttggacatccttattgggactgcttatggcttgttttatgttattgatcatcgtggtaaggttaggaacaaattcccccttgagatggctgagattcacgcaccagtcattgctgcggacatcaatgatgatggcaaaatcgagatggttaccactgattcccatggaaatgtagcagcatggactgcagagggagaagaaatctgggaagtgcatctaaagagtctgattccacagagacctactgttggtgatgtcaatggagatggccacactgatgttgtggtcccaactgtgtcaggaaacatctatgttcttagtggaaaggatgggtcaaaaatccaacctttcccatatagaacacatggaagaatcatgagtcctgttctacttctcgacatgagcaaacatggagacaatgcaaaagggctaactcttgcaacaacgtcctttgatggttatttatatttgattgagggatcgagtggctgtgcagatgttgttgacattggagagacctcgtacactatggttttggctgataacgtggatggtggagatgaccttgatcttattgttaccactatgaatggcaacgtcttctgcttctccactcaatcaccacaccatccgcttaaggaatggaggtcatcaaaccaaggaaggaataatgctgcatatcagtacaaccgtgaaggtatctatgttaagcatggttccaggaccttccgtgacgaagagggcaagaatttctggatagagtttgaaatcgttgacaagtacagggtgccctatgggaagcaagctccttataacgtgacggtaactttacttgttccggggaattatcaaggagataggcgcattgttgtcagtggtgtgtatcatcaaccagggaagcaacggatgatgcttcccactgttcctgttagaactactggaactgtggtcgtggagatgatcgataaaaatgggctgtacttctccgacgagttctcactcaccttccacatgcattactataagctgctgaaatggcttctgctactgccaatgcttggaatgtttggtgttctcgtcatcttgaggccccaagaaggtgcgccgctgccatcgttttcacggaatatcgactagtggtgaaatgccggtgacccattgaagctgacgaagtgactccccaacatctccatgacctaaatgtcttgttcagtgtagtatcccaacagttaaccatttcatggattatagttatattttttacaatgtacccatttagttctgcagaacaattttgtacacagccattttcaatattggctcacccaaagaacaagcatattgtcaccattgagagtttacagtaggccttggaaacggtaattgtcagattctaagagaagcgaccctcggagaggagaagcaaaactctcggatactgtgtcaaaacgctcttcataactattagtagaaaacaaacctataataagcctgt

SEQ ID NO: 98863 - DNA, 196 bp, Zea mays
  Clone ID: MRT4577_21676C.1
gccacgcgaccgaacatgcgtacgtgccaacgtcttcagctccgatcggccattcgagacggggccttgtacacgtacggcggatccatgcatgactacagaccgacggaataagtaaactcaccctaaaactagtcagagctcactcgcacgctgacgctcacacttatactacacgtgctcagtaagaccacag

SEQ ID NO: 98864 - DNA, 219 bp, Zea mays
  Clone ID: MRT4577_21677C.1
acctggagtaccacaccgagctcaagggcctgcgataggcgaaaacggtcgacctcgacggggccctatgcggggcctcctacctcggtggaatgcacctcaactactcccaggcgccacacggtgttctgctggcgacaggcttcggaacgatcaccggcgccgtgctgtgatcagaggtagtagtccactggtaccagcaataacaagatggacaag

SEQ ID NO: 98865 - DNA, 403 bp, Zea mays
  Clone ID: MRT4577_21678C.1
cgtcagggcaaggaggcgggccagagcgccatcgacgctgtcagggcgagggtcggcgcggactgcctcgtcgtgggcgaggagccccggccgccgcgcgtgttccgggaggccgggcctggcgaccgtgaccacggcggcggccttgggctggtctacctcggcaacctcgtgaagcggaacctgtacaacctcggcctcatcaagtcgtgctcgtgaagcgggatgctcggctcggctcggccccaagaaaaagacacgggcggtttctcaaggagacccacccgccattgacgtactgtgtacgtacaagatcgaggaaccggcgccgacggcatcaactaaacaccgcgacatgtagcgccgcgcaagcagggtgaaattcgggtcgggcatgatgttg

SEQ ID NO: 98866 - DNA, 627 bp, Zea mays
  Clone ID: MRT4577_21679C.1
aaaaaaaaacggaacatggttgatttacccggccccaaactggcttttatggggggggatagaccgagaacatggagcaaaacaaaaaccccggttgggggggcacaaaggggggaccggcccccttttcccccaccggagcagaggaggcccattttttttaccccatgtcccttgcaggccccaccggggcttggttttttttcaacacacaccttggtccccaaagagggggggggaaaaaccgccgcgttcgggtttaactgaacaaaaggcgccagcgcgcggaaagggattggaaccccaccccccccccctgaaacattgatttcccccccccttgtcccccccccgaaggggcgatcggggcacggccttatttgttgggcttttgggccacctcagggggggggtgggccttttggggctcctaaggggggggtttaaccgccgggggttttttaagaaaaaaaaaagccttgggcttagggggggggggttttgttttttttttggggggggggcctggccctttttttcttaactttttaacccccgccgggttcgggtccgggttccacctttttggcggtttttttttttttggggggttttttcccccccccc

SEQ ID NO: 98867 - DNA, 280 bp, Zea mays
  Clone ID: MRT4577_2167C.1
acaaaccccacggctgtcattatagagactgtttcattaacaaatacacatctatcctttccattcatcacatatgttgcatacattaatattaaaatctgatagcgtcatttagaggaaacatatttaataacactgtactactctttattgatgcaagcacattccttcggtgcttgattatttccgaagaatctgtactttgcattgcattccaacaaaactttaactctatctccctgtacatagatagctacatcttccgttcagcgtttatcta

SEQ ID NO: 98868 - DNA, 659 bp, Zea mays
  Clone ID: MRT4577_21680C.1
ggccgcttttttttttttttttttcttttttttttttttttttttttttttttttttttttttttttttttttttttttttttttttttttttttttttaattatttaataacaaagaacacagacctaccaaaaaagaaagaccaaacagcaagaagccaaaaaaaggaagggacaggaaagaaaaagaacaccgaacgaccagcggacgggggaaaaaacgaccacccaaggaacaagaaacgggcacgggccagccacagaaaacaaaccaggcagccaagggaagcaggcgggagcacgcgggaggcaacgagcgacaggcggggggggggggcaggggagcagcacgggggccgggagccaaacaagggcgaagcccgaggaaagagcaaagccccgggggaacgtaaggaagaaggggggaaggacggcccacccacaacggacgggtgatggaagggaagggggtcggtatttctggcaggagggaagcagcaggcaaccggaaggtaaaccaaaagagaatcgctccccgctcaccaggcggggaaagcaagaaccccccacagccccggacagaaaacagaacgcggcatgccccgtgccaggaaccagccaggacacggccgcatgcaaaccacaaaaaaagcagagcg

SEQ ID NO: 98869 - DNA, 524 bp, Zea mays
  Clone ID: MRT4577_21681C.1
ggtacacggcccccccccgcgagctcccccccccccccccccccccccccccccccccccccccccccccctttttttttaaataaaccaacccctggctggctggcttgatccccccatcctataccccaggagttggaaaaaatttttccgggggacccccgattagggaataaaaaccggggggcccaggttttttagcagcttcccagcccagcccagtggaaattcagtctccttccaaaacacctttggaacgtccgggctacaaattttactttaaaaacctttgaccagcggggcaggggatctcagcagttcatcccctttcccccggggggggaccagttagttttctccccttgcccgggttaacggggctagcgggttagccctgggggaaaccgaatatcgggaaaataaccccgggaaaataggcgaggaaggggaccaggaggcaaacccaaatttcccccttgcacccaaccttgaggaaaaccccaaaaggcggaaggataatggca

SEQ ID NO: 98870 - DNA, 1571 bp, Zea mays
  Clone ID: MRT4577_21682C.1
acggttcttacttggtactccaggaatggttgctcttgacctagatgcgacactgaaaggcctttttcagcaagtcctccattgtctggagaacattccaaaacctcagggggaaagtgttcctgacattaccgctgacttggctgatttacgtaagcactggctgtcaattttgatgatagtcacatcttcacgatcctcgataaacattaagcccacggattaggctactgtgtctactgggaaggagggtttggtgtcagaaggcaatgctgcatataattggtcaagatgtgttgatgaacttgagagccaactctccaaacatggaagccttaaaaaactctacttttatcatcagcatcttaccacggtcttcagaaatacaatgtttggcccagaaggtcgtccacagcattgttgtgcttggcttggagccgcttgcagttttccagaatgtgcttctgcaattattcctgaagaggttaacaaaattggcagagattctatctcttatgtggagtcccttatcgagtctatcatgggtgggttggaaggtttgataaatattctagattcagaaggtggatttggctcattagagatgcagctttccccagagcaagcagctcttcgcttaaataacacaagagcaaagggtgtttcaagcttgttaactccaggatatgagagctatcctgataacagttcatcaattaagatgctggaagctgctatgcaaaggctgacaagtttgtgttctgttctaaatgacatggagcctattggtgttctcaaccatgtttttgttctacgcgagtacatgagagactgcatcataggaaatttcaggagaagatttcatagtatgattagaactgagaactgcattcagcgaccatcaatcatagaatctcttctaagaagacatctgggcatcatccatctagcagagcagcatattagtatggaccttactgaaggcatacgtgaagtgctgctagctgagagttatactggtccatttcccaatcttcaaatgtttgagactccagtggggacacaaggagggggatctgccgttgagatgatatgcaactggtatattgagaatgtagtaaaggacgcttctcgcattggagttgcttttgatgcaatccaaaattgcttcaggagctcacagcctattggtggtggatgtttagctgaatcatttacagataaaagagaaatgaaatcacttgttcgtctttttggtggctatggaatagataaaatggataagatgctaagggagcatacgtctgcgcttttaaactgtatcgattcagcattgaggtcaaatcgtgatgccttagagggcctagctggaactgtaaattccggcgataggattgaaagggatgtgaacctgaagcaaattattgacctcgaaacactggctgacctctgtattcaagcagggcaagcaataactttccgtcggctgttggttgaggccgtcggagcagtccttgaagagaaagtgcctctgatatattctctgctcaaaggattagccttgcagttgc

SEQ ID NO: 98871 - DNA, 616 bp, Zea mays
  Clone ID: MRT4577_21683C.1
cggtccgtccgggactctcgtttcttctcctcccttctgttctgttcgagagaggcgacagaggaggcgtctcgggcccggcccgatcccggatcttcgccgccggcgacgccggtcggagaggagatgggggaggagctcggagcgccgctgtagatagtagatgtagcctagctgtttccttactggagtttggcctcgtgccggagtttggcgtcatgccgatggggaccttgccgccggcgcgcccgagccgcgtgcggtggttttcggaggggctcctgatggtgtggtgattggttcgctgctgctggtcggaatcaagccggagtcctcggaaataaagctcgtgggtgtcccagatctggagctcaagctccttcttccccacttcttctcgagctgccatggaggtggactggaagaagagggaggaaggggatttagttgctctattctttctgcgtgtccttggagcctaggttttgcagcaaatggtgggggatctcggtgcaaagagcatcaggaggttctcgccgctgcgccgctgcaccttctggtcgaaaggcgaccactcggagttccggcgacggcgtccagctcctctatttcctcc

SEQ ID NO: 98872 - DNA, 352 bp, Zea mays
  Clone ID: MRT4577_21684C.1
gccagataatacccctattcaaatgtaaaagaatcagagcccaaagccaaaacagcatctagggggaaggctctcaaaggggggtacccacgccagctgccatcagcaaacctggaaactctaagaaatgcaaattgttgggctcaccccctcaaatcagaaaatttcaaatatctgtaactctacagtcttcccttcaaaatcctttactcattcaaaactcattaaaatactgtctcatgactagtgggaattacaacaaaaagattctcatttccatgtgcttctgctctgtcatgtctgattctttgtgaccccatggactgaaaccaccatgcttctctgtccatgg

SEQ ID NO: 98873 - DNA, 696 bp, Zea mays
  Clone ID: MRT4577_21685C.1
attcgaggcagagatagatagtatatagataatgggtaaaatacaaaagtaccctaagtctaaaaaaactcggccttaaataaaagctgaaagagttaaaaataaccaagatggagattatgctactgaggcacccaacaatcacgacttacaatactctaatattgttctgaaaaaattattgtgtaagacccaaaagcctgtttagcgcaacgctgattgatgcgttgagttctaactttctgtttttttttctgaattctctgtgaggaaaaagcatcaaacaaacacaataaacagcgagccgagcgtcgtgctaagagtcatcctcagagtcctcgagttcatcgagatccccgtagtcgaaggcgccgactaactccacgtcgctgcccatagtctcgaactcaatctcatcataaaaatcaccctcttcctcgctcaccgccttccggtccccgccgccgcgtgccgcgtaaccgcgccgggtgaacaaagcagcagttgctgccgcggtcgtaggcagcagaagaaatccggtgttggtggcggccgccgcagcaaccggacggaaaggggcgaggagggacacaggtctcggagccgccaccgtcgctgcggcggcgaggcggcggagtgcgagcgcggcggcgcggtgcatggccatcggctctatgaagtggattgagggggaag

SEQ ID NO: 98874 - DNA, 505 bp, Zea mays
  Clone ID: MRT4577_21686C.1
ggcgcgtgcgttcgtagtctgtgccggtgcgtgcgtggcgtagtggccgctggcgtacgtgatccgtgcacccagtatactattacgacgccggcggacatggggaggtactcacaggggaggaatgcgccgtggcaagggctccgctcgaaacatgtgctgccatggcggtgagcggtgtggagtgggagataatcattagcggctgcggtgaggactaggcaccgaggcccggcaccaccagccacggcacatataatcgacctgcggatagacaacatgcttatgttgtttggcctagtgctcagctacttgatacactcggttgacgcgtgctccctgtacaagctcttctgattactgcgctttttagtttgggcatgcggttaatggcgctataggataatgagctaggcaactttctaatgagaggttgggaggtttaggataaagatatcaggcatttgatcttgcttggtatgatgtataggaagtttgaaatgaa

SEQ ID NO: 98875 - DNA, 229 bp, Zea mays
  Clone ID: MRT4577_21687C.1
cccacgcgtccgcccacgcgtccgtggactcgtgggtgctgctcctgaggagccggagggggccagcgagtgaggcgcgtgcgcacgcagcggcggcggccagggcccaggccccatgggatcggcgtgcgcgcgtggcggtgtagtctctcgcgcgcgtacatggcattatgacacgggattttgctgttcagtacgctacgggtactggcgtgtctctgtgtgtgtg

SEQ ID NO: 98876 - DNA, 587 bp, Zea mays
  Clone ID: MRT4577_21688C.1
gcttccaccctcagcggatgataatctcaagacaccttccgagcgtcagctcactccccttccaccctcagctccaccctcagcagatgataatatcaagacacctgccgagcgtctgcgggggccgcttccaccctcagcggatgataatctcaagacaccttccgagcgtcagctcactccccttccaccctcagctccaccctcagcagatgataatatcaagacacctgccgagcgtctgcgggggccgcttccaccctcagcggatgataatctcaagacaccttccgagcgtcagctcactccccttccaccctcagctccaccctcagcagatgataatatcaagacacctgccgagcgtctgcgggggccgcttccaccctcagcggatgataatctcaagacaccttccgagcgtcagctcactccccttccaccctcagctccaccctcagcagatgataatatcaagacacctgccgagcgtctgcgggggccgcttccaccctcagccgatgataatctcaagacacctcccttagctactcaggaggctgaggcagaaaaaccacgcaaaccca

SEQ ID NO: 98877 - DNA, 384 bp, Zea mays
  Clone ID: MRT4577_21689C.1
cttttagattgcttatgagggcaccaccaaagatgccttcctcgcagaccccggtggcgctactatgcacgacccgtctgaaatccacaacctgctcatctacatcgactttgcccgcctccagcattggctcgttgaccgcaagcgactgccgcacgactgtcggaagcgcctcgacgatattagcgccctaatcgtgcccgctttctcacccctgccgctgaacctgcacccctcactcctacacctcgatccagaagaaattgtctaccttgaatcaaagaagatatacagcattctcctacaatccaacaccgacagtcgtaacatatttgaccaacttacggtatccccatttgaatgctagtcaattattaaagctta

SEQ ID NO: 98878 - DNA, 268 bp, Zea mays
  Clone ID: MRT4577_2168C.1
aatctgatgcatcaataacttgctgacatcatgcaggtgcattgtcctctgacaacggcctatatgaaagccattgtagctcaccgccacaggcggctagattgaacaagactagctgactaagtgctagcagaaactgttacaggtaatgatggcgccagggttgcatcttcttttgactaaaccacgtagcgtgcatgcaaaacggtgatgtctgaagctgggtacagcaaccaccatggctcacatgactcaagctgcctataac

SEQ ID NO: 98879 - DNA, 763 bp, Zea mays
  Clone ID: MRT4577_21690C.1
cggtccggaattcccgggtcgacccacgcgtccgcgactcattttaggttcgtggagcaacttcggcatcatgaatgcagcggccaaagctggaaagctggctcgagcaccagccgacctcgggaaaggtggggtcccgggagatgcagttcccggtgccccagtggccgccccgctggcgaaagaaattccggaggtcctagtggacccacgcagccggcggcagtatgtacgggggcgctttctgggtaaaggaggcttcgccaaatgcttcgagatctcagacgcagacacaaaagaggtgttcgcaggcaagatcgttcctaagtctttgctgctcaagccccaccagaaggagaagatgtctatggagatctcaattcaccgcagcctagcacaccaacacgtcgtaggcttccatgactttttcgaggacagcgactttgtatttgtagttttggagctctgtcgcaggaggtccctcctggagctgcacaagaggaggaaggcactgaccgagcctgaggcccgctactacctgcgacagatagtcctgggctgccagtacctgcaccgcaatcaggtcattcacagggacctcaagctgggcaacctcttcctgaacgaggatctggaggtgaaaataggggattttggcttggcaaccaaagtggaatatgaaggggaacgaaagaagaccttgtgtggcactcctaactacatagctcctgaggtgctgagcaagaaagggaccagtttttga

SEQ ID NO: 98880 - DNA, 542 bp, Zea mays
  Clone ID: MRT4577_21691C.1
gggcccacactcgtccactcaccccctctttgctctgcctcgccgcgccgcagagcagagcatggggcccccacgccctctcctcgacgccgtcttcctcgacgaggcggttctgctactcctttctccaggagaggcggggacagcgggcgtgaactacggacgcggggcgaacaacctgcccaaaccacgggcgcctgtgcaactgctacagcaacaaggcgctgcgcaacagaaggtgcacgatgccggccctacgcgtgctgctaggccttgcgatcaccggaatcgatgccggagcgggcggaagccaaccaacagcgacccgagcagccagagcacgctcacgctgctcgacggcgaaggcgacgcgccgtgcgacgagcgctccggccacatcaagacgacggacttctacggctacgccatgaaggctgtggtgaacgccgtcatgccggccatccgcacctacgtggacctgtcgcccgacgacgtcgactccgtcgaggacatcatgatgctgaacgagggcgggatccaga

SEQ ID NO: 98881 - DNA, 352 bp, Zea mays
  Clone ID: MRT4577_21692C.1
tccacgcgtccgtccacgcatttaccaaatgggggtctttaacgctacctggggttcttccatgggactgaccatggatacaacctacgccggacgggaatacaaggtcaaggatctctaccaaacagacttagtcctcctagagattgacctggccaaagtacaaatgcccggacacatggtgtgactggccacattctgcccgtccaagcccttccccgtaactaggatctgggggtctttacacatgaccatccaaaccgccttcctcataaaaaccctcaccgaacttggagccgaggtccactggtgctcctgcaacatgttgttcacgcaggaacacgccgtcggc

SEQ ID NO: 98882 - DNA, 223 bp, Zea mays
  Clone ID: MRT4577_21693C.1
ttttggggcatgccaagggcatatcggtacttagacccgaaaagagtacagatgcttgcctccatattagattagaacgccacgcctaaactcaaacgttggcacggaaacagctaggcagaccaaacccatctggggttggacatggcgtttcacaagggagaagcggttccccagtcgctagaggcagggatgttgaatttgaatagaacacgattgctta

SEQ ID NO: 98883 - DNA, 300 bp, Zea mays
  unsure (1)..(300): unsure at all n locations
  Clone ID: MRT4577_21694C.1
ccggccnccccgaaanaagcggaaagggcaacccggnccacgggacggagcccccaaaccgaacccncccgagcacgcccggcgaaggggancacgagcaggccggagccgcgggacagccngcnggggnaccaggagaacaacgcggaggngncgaacgcggcgccggcggggcaggngcgggcggcgcaggagaaccgggaccagcaggccgcgcagcagcccgggggcgcgggagcgggcgcggacgacgacggcggggaccggcacgcggcgacgggccccggcccgggcccgggc

SEQ ID NO: 98884 - DNA, 2553 bp, Zea mays
  Clone ID: MRT4577_21695C.1
cattgggtacctcgaggtcggccgggaaagcagatcgccacgccaccaggaccccagctcactcgtgccgtgcactcgtcccgtccccctccaccctccaagacctcgcattgccaccgccgccgccgagccaggggagaggagagaggccagccgcgtcgcggcgggcggaggaggaggacgagcgggagagcggagcgagccggccgggcaggatgttcgggcgggatccctggggcgggccgctggagatctccaacgccgactcggcgacggacgacgaccgcagccgcgacctggaccgggcggcgctgatgcggcagctggacgagacgcagcagagctggctcctggccgggcccggcgaccaggccggcaagaagaagaagcggtacgtcgacctcggctgcctcgtcgtcgaccgcaaggtcttcatgtggaccgtcggcaccgtcctcggcctcggcgtcttcatcggcttcgtcatcatgatcgtcaagctcgtcccgcacaagcgccccccgccgccgccgcccgaccagtacacgcaggcgctgcacaaggcgctcatgttcttcaacgcgcagcgatccggcccgctgccgaagcacaatggcgtgagctggaggggcaactcctgcatgaaggacggcctctccgacagcaccgtccgccggagcctggtcggaggcttctacgacgcgggggacgccatcaagttcaactaccccatggcatggtccatgaccatgctcagctggagcgtcatcgagtacagggccaagtacgaggccatcggcgagctcgaccatatcagggagctcatcaagtggggaacggactacatcctcaagaccttcaattcgtctgccgacacgatagacaggatcgtcgctcaggtgggtgtaggtgacacctctaaaggcagcagtcagcctaacgaccattactgctggatgaggccagaggacatcgactacaagaggccggtcaccgagtgccactcctgctcagatctagcgtcggaaatggctgccgccctggccgcagcttccatagtgttcaaggacagcaagacctactccgacaagctcgtcaagggcgccaaggccctgtacaagttcggcaggctgcagcgtgggcgatacagccccaacggatctgaccaggccatcttctacaactccaccagctactgggacgagttcgtgtggggcggtgcgtggatgtacttcgccacggggaacaactcgtacctcaccgtcgccacagccccgggaatggcgaagcacgctggagcatactggtttggaagtccaaactacggagtgtttacctgggatgacaaacttccaggagctcaggttcttctcagcaggctgcgactcttcctaagtccagggtacccttacgaagaaatactgaggacattccacaaccaaaccgacaacgtcatgtgctcgtatttacctgtattcaattcattcaacttcaccaaaggaggattaatacagctcaaccatggaaggcctcaaccgcttcagtacgctgtcaacgcagctttccttgcttctttatacagcgactatcttgaagcggctgacacgcctgggtggtactgtggaccgaacttctacaccatagaagtcctccgcaagtttgccaggtcacagcttgactacatccttggaaagaacccattgaagatgagctacgttgtgggtttcggaaacaagtacccgaagcgccctcaccacagaggtgcgtcgatacctcataacggcgtcaagtatggatgcaaaggaggttacaaatggagggacacgaagaaggcaaaccctaacatccttgttggagcaatggtggctggccctgacaggcgtgacggctacaaagatgtccgcacgaactacaactacacagagcctacccttgcggcaaacgctggtctggttgcagcactgatttctatatctgatatcaaaaccggacggttcggcatcgacaagaacaccatcttctctgcgatccctccgatgttcccaacacccccgccgccgccatcagcatggaaaccatagagaggcaatacctctgaatatccgccccccccccccccccccaaaaaaaaagcatcaacacagggaagtggagcaaacatatgatcagttggtacagcaaaggccaggaacaggaaagcggacagcataagcttatagagcttctatttctgtaccagtgtgacagatcagtataaaatcctctgtcatacatagaccagaagttgtgtgcatcgcgtgaaagctaatttttgggggtcttgttgctattggcactccagctcatgtgtgaagttattttttgtagaaattgtacctttacaaattgttttataggagtgacttttcattattatagtaaagaatgtgtgtgatctctatgcttgcttcattttgatcctgttattttgtattcaaaaaatccctgtttgaggggaaatatgtttggtaaccctgggcattagattgatgtagttgtaacttaagtcgattg

SEQ ID NO: 98885 - DNA, 2791 bp, Zea mays
  Clone ID: MRT4577_21696C.1
ggtaaacggtcgttccccgctctccttaggtgcacaacgcgcagtgccgtgccgcactgctgtcctagaatctcccataaactcactcgcctcgcctcgcctcgcccacccgcccgcctgtccctccccaaggccgcagctcactcgtgtcgtgcacccgtcccctcccacccgccaagaactagcattgccgccgccggtgccagggggcggaggagaggccgcggcggcgagggagcggcaccaggcgcagggggtcaggagagccgccggcaggatgttcgggcgggacccctggggcgggcctctggagatctccaacgccgactcggcgacagatgacgaccggagccgggacctggaccgggcggcgctgatgcggcagctggacgagacgcagcagagctggctcctggccgggcccggcgaccaggcgggcaagaagaagaagaggtacgtcgacctgggctgcgtcgtcgtcgaccgcaagatcttcatgtggaccgtcggcaccatcctcggcctcggcgtcttcatcggcttcatcatgatgatcgtcaagctcgtcccgcacaagcgcccgccgccgccgccgcccgaccagtacacgcaggcgctgcacaaggcgctcatgttcttcaacgcgcagcgatccggtccgctgccgaagcacaacggcgtcagctggaggggcaattcctgcatgaaggatggcctctccgacagcaccgtccgccggagcttggtcggaggcttctacgatgcgggggacgccatcaagttcaactaccccatggcctggtccatgaccatgctcagctggagtgtgatcgagtacagggcgaagtatgaggccatcggtgagctcgaccatatcaaggagctgatcaagtggggaacagactacatcctcaaaaccttcaattcatctgctgacacgatagacaggattgtcgctcaggtgggtgtaggtgacacctctaaaggcagcagtcagcctaatgaccattactgctggatgagaccagaggacatcgactacaaaaggccagtcaccgagtgtcactcttgctcagatctagcgtctgaaatggctgctgccctggctgcagcttccatagtgttcaaggacagcaaaacctactccgacaagctcgtcaaaggcgcaaaagccctgtacaagttcggaaggctgcagcgcgggcgatacagccccaatgggtctgaccaggcaatcttctacaattccaccagctactgggatgagtttgtgtggggtggtgcgtggatgtactttgccacagggaacaattcatacctcacggtcgccacagccccaggaatggcgaagcatgctggagcctactggtttggaagtccaaactatggagtatttacctgggatgacaaacttccaggagctcaggttcttctcagcaggttgcgactcttcctaagtccagggtacccttacgaagaaatactgaggacattccacaaccaaaccgacaatgttatgtgctcatatctgcctctattcaattcattcaacttcactaaaggaggactaatacaactcaaccatggaaggcctcagccacttcagtatgctgtcaacgcagctttccttgcttctctatacagcgactatcttgaagctgcagacacgcctgggtggtactgcggacctaacttctacaccacagaagtcctccgcaagtttgccaggtcacagctcgactacatccttggcaagaacccattgaagatgagctacgttgtgggtttcggaaacaagtacccgaagcgccctcatcacagaggcgcgtcgatacctcacaacggcgtcaagtatgggtgcaaaggaggttacaagtggagggacacaaagaaggcaaaccctaacatccttgtcggagcaatggtggctggccccgacaggcgcgatggctacaaagatgtccgcacgaactacaactacacggagcctactctcgcagcgaatgctggtctggttgcagcgctgatctctatatccgatatcaaaaccggacggttcggcatcgataagaacaccatcttctctgcgattcctccgatgttcccaacacccccgccgccgccatcagcatggaaaccatagagaagcaatacctctgaatgtttttccaaagcatcgaacagggaagtggagcaaacgtgtgatcatttggtacagcgaaggccagagacaggaaagctgacagcataagtttatagagcttctatttctgtaccaatatgacagatcagtataagatcctctgtcagacatagatcggaagctgtgtgcatcgcgtggagctaatttttgggggtcttgttgctattggcactccagctcatgtgtgaagttctttttgtagaaatggtacctttacaaattgttttataggagtgacttttcattattatagtaaagaatgcgtgtgatctctatgcttgcttcaaaaaaaaaaaaaaaaaaaaaaaaaaaaaaaaaaaaaaaaaaaaaaaaaaaaataatggccatgaccggcgactggaggccctccgccaccgaccgcgccgcgagaggctccccggatacggcctgaccacgaacatcatcaacggtggtctagagtgcggcgaggaccgctccaccggcgccaagcgacggctacgacaaaggtactgcggtatgctgtacatacatgtgcggagagccttagatgatactgatctatggtgctgccacttcactctctacccaccctgagagatggtacag

SEQ ID NO: 98886 - DNA, 178 bp, Zea mays
  Clone ID: MRT4577_21697C.1
gaaagaaaagcatctaatgtagcattataaccataacgggttacttaaacccagttgcaatgggggggaataaagtctttacaacataagttgttaaccacacaacgacagatagataaaaaccgactgaaacataacactatcggagccactcagggcagatctgaggatatcagag

SEQ ID NO: 98887 - DNA, 489 bp, Zea mays
  unsure (1)..(489): unsure at all n locations
  Clone ID: MRT4577_21698C.1
tcttcgccggaacctcgtgttgtctcggagcgcagcactcacagcaatcgcagatgctccctcgcatatccacccgttggacacacttcgtctctaagatgcacatctttgcgagaatccctgactggcaagactatcacccgtgcgcggtggatgtcggtgacaccattgacatcgttaatgccaacatccactgacaaggagggcatccccccagaccatgcagctgctcatctttgctggtgaacagcttgtggactggcgctcgcttgctgattacacatacataaggagagcaccctccactttgttgctgcttattgggtaggcatgcagatatttgtgaataccctgtccgtgaagactattaccttagtggtggtgtcttctgacaccattgccaacgtgaaggacaagatccatgacatggagggtattcgtccagaccaatagatgtttcatcgtatgttgggaagcagnattgaggac

SEQ ID NO: 98888 - DNA, 721 bp, Zea mays
  Clone ID: MRT4577_21699C.1
ccgggcacgacaaattatacacactagctagatacatagaacagccaagagcgaacaaaggcaggcaagacaaatagtctgcctacgcacgctggtaggtatgcatgcgcgggctgggtcagcagtccatccgcactgattgcaaacaagcatagatagctttctttcttcgcacgtaccaccaacgaggggtgtgttatgtgagaaaaaacccatttatccatacatgaaggaacaaacaggcaaaggtagcaggtaacctacattaatcacgcttgttcatcaaacattaatcatatttaagacagtacctacgttggatgcattgatagaaacaatacaggaacaaccaccacctacaacagcgcgagctaacctagctggctacttacagtaacaaacagtagtttcattcatccaaccaactggatggaacgaagtttgttatttataagaaccaccaccaccaaccattcagccagctgccggctacctacagcaattactttctttcattcaaccgacaggaaggaacgatcctgcctgtttacagacagaacaactactaacaaccattcagctagctggcgggagcgatgcttgcttcctgacagacacacacacggtggcggtcgatcaacccgctcgctgtaacgatggctggctctctcttacgacagaatcgctggctgtcattcaactagcttggtcagacctagct

SEQ ID NO: 98889 - DNA, 506 bp, Zea mays
  unsure (1)..(506): unsure at all n locations
  Clone ID: MRT4577_2169C.1
gggcatgtgttacttctgaaatctaatgatgattttggttatgggcatcagacctacaccatcttctctctcccaactcctaagccaaaacattgtctacaatttaattcgggcataggggctcctttttaactcattttcggtcttttggctaagatcaagtgtaatatttgttttaccagttcaatatctggtatatgaacaatttgttcactttgacattaaattcattcattatgggtatttttatgtggagggtctattaagactcctaagtgtcgcttaatcacccaaccaatatcatcaaatatggttgagtaccgtcgcaacacacgagtattagactagtaattcttaatcaacgagtattcaacctctcacctataaaacacattttctactatntaaattattaaaaaaatgtttaaatgatctataagcgaatctagaggtgggacaatagggggttgagcttgagcccctcctatcgncggtaagcccaagag

SEQ ID NO: 98890 - DNA, 1471 bp, Zea mays
  unsure (1)..(1471): unsure at all n locations
  Clone ID: MRT4577_216C.1
aattcgggcacgaggcatgaactaattctgcagcaggctcaggcctcaccgcctcagctgccaccctcaccctgcatccgagagagagaggagagttgccgccggagggaggaggtcgccgcggaggggaggggctcgccggtaggggacatcgccggcgcctggagagctcgtggaggggacagccaccgtcaccgccaggagacaagcgccgccgccgctaggaatcaggagacaagcgagcgcgatggtgagctccgcactgaggcgctgtctcccctgccatgcctctctctgtcatgccttccctccccatccgctgctggccgctgccggcgtcttccgtcgttcattccagtccggggatggtgagactatggacgaattcgaagaacggttgtttgggggcaaggacacagacaaaggatcactctacgagaagctcgatagggctgagaacactggtaggagatacaattttgggttgtccaagggtggtttcactaggttaagtgacagtagcagctctggtttccctgggtttcctgcatctagcgacaggagcagttcaggatggatgaatggttatgattcttttaatgatggcttaaatgatacaattgctaatgcggcacgcaacatccaaatggaggaggacgaggacgtcgacggtgactgggaagatgactttgagttcaggcctgatgtgcggtttaggcaaggttcaacgtattctgttcgggaccttgaccttagaaaacctgcagccgcaaagaaccctcctagacgacagtttgaaacaactacagcggaggtactgaagaaggctgattttaggaatgttagattcctctccaactttcttacggaagctggaattatcatcaagagaagccagacccgtataagtgcaaaagctcagcgtaagattgcaagagagatcaaaactgcgcgtgcgtttgggttaatgccttttacaacaatgggtagaagaccattcttctttggcagaagtgcggaggagcattattgggatgatggatattttggctttgtgaagcagaaggatggtgagcctgttgagaatgaggacgctgagccaaatgtggaggctgtgtaaacattctggagcatccttttgcaagcgctccgttcggtttcttctggtgccttcatgacaagtcacacaatgctcgttttgcgtcttcagatcatagcgtagctcagcttgaataaaactgtaacatcacgcctgttttgtgaaaactcgtgccttgctcaattgtgccactttagcagacatccccagctcacctcatcctggctggagatcatatcatatgcagatatgaaatggaacgttggatcagagttttagtggacgctcaaaattttgannnnannnnnnnnncccgatagcagccctgatttcagtttctattggataatgattgtttggctgttcaccgag

SEQ ID NO: 98891 - DNA, 226 bp, Zea mays
  Clone ID: MRT4577_21700C.1
ggccgaccacgcgttcgtccacacattcgcacaaattggaataggttctttcattgccatagctgggtgttctatgggctctatcattaaggcttaagagtgaatatgagaaaatgataaagagctcatgactgccgtaaataatattattttgaccttcctctgacacaatatctgttacattcactacctacttttattcctctgttttgttttcatcatttat

SEQ ID NO: 98892 - DNA, 833 bp, Zea mays
  Clone ID: MRT4577_21701C.1
ctactattcaactatactctagtctaccactaatcgacaacccctcatcttcaatctcacttctcctctttctcgttacttcatcaaactccatcaagatgcatttcttctcagtcgtcgccgctgccgccactctgattgctggctccaacgccctgttcatccctcgcaacatccacgtcgccgatttccgtctctatagcggcgaggactgctttaccggcaatctcggtgtctggaccgtcattgatgatgacttcaagaacggcgagtgcaagagcttgaatgatgaggaggacggcgccgtgcctcactctctcagcctgacggacatcaacaaaggctgcaccttgacggcttataccgacctcaagtgcaccgagggcaagacagtcctcacccctcaacagtgctccaagaacacagtcggctaccaggcttggagcatgacctgcgactacaaggagtaaagagggtcccattccacaccgcaacttttaccagcattttcatcattttcattcatttactattacgcaaaggtggattttataatactttttcgcgaggattatctcggacgcattgtgggcacggcacgcatcaaacaggcatattgacacggacgcattacgaatttgtttttgttatcgggggaggcatggcattctgggaataaatgggcaaggaaggcaacgattcttttttatggcatgacacggtccttttactatgatacacacatatacatacatataccgatggacggattccatcaattggtaattagttaatgaaataataacagcgccagcgaggcaaactttgatatc

SEQ ID NO: 98893 - DNA, 261 bp, Zea mays
  Clone ID: MRT4577_21702C.1
gttcctgctctcgatcccatccctatagtcgccggctctacggatgctaataagcgggcgcatctagagatggagatgaacaagatagcttgagcggtcctcggcgtcgcctaggacaccgcggaactggccgggcatgagccggttccgtgagagtgaccagcggagtattgggtgccaggcagacgagcagcatctccgccgaccgcatccctgacatgaaaaagcgaatgttgccgaacctcctcctcctgggcgcca

SEQ ID NO: 98894 - DNA, 536 bp, Zea mays
  unsure (1)..(536): unsure at all n locations
  Clone ID: MRT4577_21703C.1
cgccagtgtgaggntatctgcaaaatcgccctttcgaacggccgcccgggcaggtacaagctttttttttttttttttttttttttttttttttattttttttttttttttttttttttttttttttttttttttttttttttttttttttttttaaaaaattataaaagatcccggggggggaacaactttgggggggggggggaaaaaatgggggggggttttaatgggttataggtttggaacaaaatttgggtaaaaatggggaaaaatgttttttttgggaaaaatttttttggtgtcaaattaacaaaaaaaaatagaggggagaaaaaagggtgaaaaccgggggggaaaaagggggggccaactccaataataattggggcaaccactggccagtttttaaaagggaaaaatgtggttccaccttttttaaaaaaatggccaaatcccggggaaaggggggttttgtatagggggcttttttcctttatagggaaaaaaaacgttttcccctgaatcacgggtttggg

SEQ ID NO: 98895 - DNA, 110 bp, Zea mays
  Clone ID: MRT4577_21704C.1
gcaggatggcattggccagagctgatcagctgtctgtggagatatgggatagtgctacagcagcaattggcgcaaacccctgagtagagggaggattgctttgctgatgt

SEQ ID NO: 98896 - DNA, 231 bp, Zea mays
  Clone ID: MRT4577_21706C.1
cctgcttaaacctaacatggtcacccttggagcagatcacatggagaaggcttctacataagccattgcaataaacacgctaacagtgctcacacggagagttccttccactgatactgggattatgttactttctggttgacactcctaggtggaggagacctatgaactttatgcaatgaaccataatctttactcacggcatgtgactgtcttctatgcccggactat

SEQ ID NO: 98897 - DNA, 2939 bp, Zea mays
  Clone ID: MRT4577_21707C.1
ggcctcccggccgcccggatcccatcccacccttcccatatcccaccaccacctcctctctcactccctatctgccatcccgagtgattgtctgtgcgaccaagacatggcttctgacggcggcggcagctcccctcctcccgcatcgtcgccctatggtcggccgtcaagcccactcgcggttactaactcctccccatctcagcccacacgccgctccggcggtcgccgtcgccgtggttccgctagtccttatgcttcgtccccttctctcggggggttcgagacgccgccgcaccctggccgccgcacgccgtccggagctggggctggcgcccctcggcagccgcgtcagaactcgactggccggttcccgccgacgccctccactccaatgtccaccgatgacgtccctccatcctccgaagctggggacgacgagaccgacggcggcggcggcgtcgacgccaccccggtcttcgtctggggcaccaacataagcgtgcaggacgtcaacgccgccattctccggttcttgcgccacttccgggacccgcgcgacgctggccgcgtcgacccggtcatggacgagggcaagtacatgcgcgccatccaccgcatcctcgagctcgagggcggggagtcgctcgacgtcgatgcgcacgacgtgtttgaccacgacccagacctctacagcaagatggttcgctatccgctcgaggtgctcgccatcttcgacatcgtgctcatggacctcgtcgcgcgcatcgagccgctcttcgagaagcacatccagaccaggatctacaacctcaagtcgtccatttgcttgaggaatctcaacccatctgatattgagaagatggtatccatcaagggtatgataattagatgcagctcggtcataccggagctcaaggaggctgtgttccgctgcctggtttgtggtttctactcagagcccgtcatggttgatagaggaagagtaactgaaccacacatttgtcagaaagaacaatgtaaagccacaaattctatgaccctagtgcacaacagatgcagattttcagacaagcagatcataaagttgcaggaaacaccagacgagataccagaaggtggcactccacatacagttagtgtcttgatgcatgataagcttgttgatgctggaaagcctggagatagggttgagataactggaatatacagagctatgagtattcgaattggaccaactcaaaggacagtgaagtctatattcaagacatatattgcccggatgcggttctctgaagtggtcgaggtgcgagatgttgtggaggccttcaggcttcttgaagttgccatgcagcagtctgcaacggatcatgcaactgggacgattgatatggatctaatcatgacggggatatctgcaagtgaaaggcagagacggaacgaccttgttgctgcaacccgtaacctgatcgtggagaaaatgcagctcggagggccttcaatgcatatgattgagttgctgtaagagctcaggtcgcggagctgaatggagagccatctgcacgaattcctcggggcgcttggcactatgatgacagaaggtgtgcttctgatccatggaaaaaaggtgaagagaggttgatgttaactgccatctgcagggatggttgtgtgagctccgtctaccgtttccttcaacagtcaaggttgcgaagatctgatcgactgtagggcatttgctttcagagtgctaagtagtttgtgctgagatgagtttcataagatgtcagttaatgcccgaagcatgttacacgaggtgatggaacagcagacagtatccattgcgaaggctggaataattgcatctttaaacgctaggacatctgtcctggcatgtgccaatcctactgaatcacgttacaatccaaggctctctgtaattgacaacatccacttagcgccaacgctactttcaagattcgacctgatttatcttatcttggacaaggcggatgagcaaactgataggcgcctggcaaagcatattgtttcgttgcattttgagaatccaaatttagaggagctcgaggtcttggacttgcagacactagtttcctacataagctatgcaaggaagtatattcagccacagttatctgatgaagctgcagaagagttaactcgtggctatgtcgagatgagaaaaagagggaatagccctgggagcagaaagaaggtcataacagcaaccgctagacaaatagagagtttgatccgtctcagcgaagcattagcccgaatgcggttctctgaagtggtcgaggtgcgggatgttgtggaggcattcaggcttcttgaagtcgccatgcagcagtctgcgacggatcatgcaactggtacgattgatatggatctgatcatgacggggatatccgcaagcgaaaggcagaggcgggagaacctcgttgccgcaacccgtaacctgattgcggagaaaatgcagcttggaggcccctcgatgcgcatgattgagttgctggaggaactgaggaagcagagctcaatggaaattcatatgcacgaactccgcggtgctcttggcaccctgatgactgaaggcgcggtggttatccatggagacaacgtgaggagagtttgatgtcttgacggccatctgcggtgatgcttctataaggctccaacccgccacttccttgaacagacaaggttccgaagataactgtagcacttagccgtaacttgtggtccgaggtctaaactggtccagatttgtagcagtattgctagttgtagatttttttttaaaaaaattgttatcagaattttgttctcttgctattgtccgagtttactgcaacaaggcaactatcatctcgttctctgatcagttcatctcgttcaaaaaaaaaaaaaaaaaa

SEQ ID NO: 98898 - DNA, 2186 bp, Zea mays
  unsure (1)..(2186): unsure at all n locations
  Clone ID: MRT4577_21708C.1
ctcagagcccgtcatggttgatagaggaagagtaactgaaccgcacatttgtcagaaagaacaatgtaaagccacgaattctatgaccctagtgcacaaccgatgcagattttcagacaagcagatcataaagttgcaggaaacaccagacgagataccagaaggtggcactccacatacagttagtgtcttgatgcatgataagcttgttgatgctggaaagcctggagatagggttgagataactggaatatacagagctatgagtattcgaattggaccaacataaagaagacagacaagtctaggcttcatgtggaggacaccatggatattgataattctaacgctagcaaatctactgaagaggattttcttagtgataaggttgagaaactaaaagagctttcgaagttgcctgatatctatgaaagattgactagatcattagctccaaacatatgggagttggatgatgtcaaaagaggtctcctttgccagcttttcggcggcaatcccttgaagcttccttctggagctagtttccggggtgacatcaatattttacttgtgggggaccctggaacaagtaaatcccagcttctccagtacatgcataaactgtctcctcgtggtatctatacgagtggtagaggaagttctgctgttggtcttactgcttatgttaccaaagaccctgagactggcgaaactgttctagaaagtggagcacttgttttgagtgacaaaggtgtttgttgcatagatgagtttgataagatgtctgataatgcccgaagcatgttacacgaggtgatggaacagcagacagtatccattgcgaaggctggaataattgcatctttaaacgctaggacatctgtcctggcatgtgccaatcctactgaatcacgttacaatccaaggctctctgtaattgacaacatccacttagcgccaacgctactttcaagattcgacctgatttatcttatcttggacaaggcggatgagcaaactgataggcgcctggcaaagcatattgtttcgttgcattttgagaatccaaatttagaggagctcgaggtcttggacttgcagacactagtttcctacataagctatgcaaggaagtatattcagccacagttatctgatgaagctgcagaagagttaactcgtggctatgtcgagatgagaaaaagagggaatagccctgggagcagaaagaaggtcataacagcaaccgctagacaaatagagagtttgatccgtctcagcgaagcattagcccgaatgcggttctctgaagtggtcgaggtgcgggatgttgtggaggcattcaggcttcttgaagtcgccatgcagcagtctgcgacggatcatgcaactgggacgattgatatggatctgatcatgacggggatatccgcaagcgaaaggcagaggcgggagaacctcgttgccgcaacccgtaacctgattgcggagaaaatgcagcttggaggcccctcgatgcgcatgattgagttgctggaggaactgaggaagcagagctcaatggaaattcatatgcacgaactccgcggtgctcttggcaccctgatgactgaaggcgcggtggttatccatggagacaacgtgaggagagtttgatgtcttgacggccatctgcggtgatgcttctataagctcaaaccctcgaacagacaaggttccgaagatttggtcaactgtagcacttagccctaacttgtggtccgaggtctaaactggtccagatttgtgtaacttaagtattgctagttgtagattttttttaaaaaaaattgatatcagaattttgttctcttgctattgtccgagtttactgcaacaaggcaaaaaaaaaaaaaaaaaaaaaaaaaccaaaaaaaaaaaaaaaaagggggggggggaaaacaataaaataaataaaaacaaaaaaaaaaaggaaaaaaaaaaaaaaaaaaaaaaaaaaangggacccccccccgcaacccccttaggggcaaatcccaccacattgggggccgttcttagggaaacaaaactgggacccaacttgggggaaacaagggcaaaagttgttccctggggaaaatggtaacccgttcaaaatcccccacaaaaaacgacccgaaagcaaaaggggaaaagccgggggg

SEQ ID NO: 98899 - DNA, 651 bp, Zea mays
  Clone ID: MRT4577_21709C.1
ggtctgccagtaccggtacctcctcgtcgctcgttttgcccttcttcaccgaggcgttattccacgactcgctcagtcgcatacaccgattctcgctgtccgctggtggctctatgcatcctgatcctcgattactaccgagaacgaccgggagaagctttctttctccttcctcgatcaagtcgatccaatttcgcgcgtggtccgggatcgccttatgctccaagcgacacctccaccagagatactaagtcgacgtgaagctactccaagcaagtgttatttgaagtgcgtccgataacaacttaacgatcaagtatgagctttagggaccaatatagaggcatggagtgatgggggaaggacgtcaatcgcgtactgcgatgtgtgtaagctgctaatcaacaccgggagtagagacctgatgccaacggcgggtggttggatgaattcgaggaaatatactatcatggagcgctggagcatcctctgcgatctctctcctgcgacgacaatgactctgtgactctcagcgcggttaatgaagagactaggacccattcagctccatgatcgcgtgtggttacggcatactcacaaatgacaccattggtgatgatctggacttctcccgctctgaggtctgcctcg

SEQ ID NO: 98900 - DNA, 831 bp, Zea mays
  Clone ID: MRT4577_2170C.1
cataaatttgccatcagatccgtatttagattgacccataatccatagacacagtcgcaattaaaatgaggcaaaatactaattatttcgtaccacactctctctcaacctcgtacgtactcgtacacatgtaggtacgtacccaggcgtatccacgaatgcagtgcacgtagcatagctagtacaagaggggcttcccggcgtggaggtcgcggaagtaaagccgggggttgttctcgaacgcgccccgcggcatgcgcgcgccgccgcggcccggcgcagccataaagcggcggccaccgcgcgtcctgcggcaggcgcagcagcagcagcgccagcagcagcaaagcacgagggcgaccactagggccgggatcaccacggtgacggcgacgcgcatccactgccggagcgtctccgagcgggtctccggcgggaagatctcgtccgccttctccgccagcgccgcgaagagggcagcgaggtaggccgctgcctcggcggccttcgccttgatgagctgccacaggccccagaaaaagtcgccggcgccgtccaggtcgaagctaagagcgccgccgctggccacggcggttcgtgctgcggtgaagccgcctggtacgatcttcctcgccggagtccctgggaaggccatggtgtctgtgtgtttgtggcttaaccggaggcaaccacttgcgcgaggggggccgcccacaagtccgcccacgcgtccgtacttaataaggagtatatatgtacgaaacgacgcaacgcaatcaccggctaattaaggggccgcttagttgcacttttggaccgattttattttat

SEQ ID NO: 98901 - DNA, 2325 bp, Zea mays
  Clone ID: MRT4577_21710C.1
atggcgcccaagaggaagactgcgaactcgtctgccgcagtgatccccgccatcgaccccaacagtcagttacccttcgcagggagacaggcagacgttcgtactccgagttggactgaatctcccacggaccaagaagtagccgaggcgggcgtgttgcttactgaagttggattactgaaagagagaggtctgactgccgaagctgtggtcacagattttgttttcaaaaacattcagccgctgaaagacagggcctatccggcatatctttaccgagggctggccgactcaacccgagttaccaataggagaattccttctgttgatttggtaagccgactcgaaatgatcctcaggggtaaggtttcaaacgttggtgctccagtggcatactcggcttggaacctaccttcttcccaagccttcactctttttgtgtccaatccgcccgtgacagatagcaatttgggtcttagagcgcgaccctctgctgaagaggtccgttccttagttgcttcgctcggggagatacctgatgatgaacgacagatttattttgaagtgcccctgaaccctagtgatgcagacataaacgacatgctcgatctgctagctgaggattcatcagatgctgctcctgatggcacattggcagtggtgtcccttccagaggttgatgcgaccttggatgtctcgaaacctgtcagtactcgcccgaggcgtcctagccgaaccagtcagcccgagccttctgctgatgagcagaagaagaaaagaagacgcctccggcgagtgtccagctttgacgaggatgccagtaccctggcccctgctgccgaagaaatgactgcaacgggccttgctgacattgatcccaatgggtgtgctccgcctgctgctgaccccaatgaggatgctgcttgcgctgttgcttacgttgatgcaacagaaacttgtgcagccgtgccagatgctgggttgaggtcgtctcgtgcctcgtcgaccttagagcacgatctcgagggtcgggatgatgacttggatcgtcctgatcctatggaagtagctgaaggcccgtcaaccttagaggtggtcacggcagagagcttggatcccttgaatagcgctgacatgtgcccagcccccgagggtgtcgccggggaggactcagctcaggtgaggagtgtaggccactacccagcccccgagggtgttgccgggggtgacccggctcgagtgggcagtgccaaccttgacccagcccccgagggtgtccgagcgaggtctccctcctgcacttccatggatgttcatgtgggttcacctccacactctggcggcatgatggtggctcaaactccggatcggggggtcgctttggagggcagcatccccactggtctggcgttaagctctgctgaatgtactgagctcgttcctgctggtctgctgcaagctgcttcgagtggtggtctggcacctggtcgtcagctgatttctcctgacttggggatcccttcgcttttttccaacctccaggctttggtggatggaatggtcggccagctgaagtcacagggtgcttccatcccggaggtggcttcatctcttgagcgttggaatccggtgttgcttcggggtcgtgtatctgagttggaggccactaatgctgggatgactcggcagatcacagttcttgaagaaaaacattcccaagatcaagctgaaatggctcgacgatgcgctgacttcgaggagaagtattctcaaagtcagatcgagttgagtcaggtctctgcagctttggatgatgccaacgctctgagttcttctcttcatgctcagcttgactctgagaaggaagaaaaacgcatccttgctgcttctcgcgacaacttggacagattgtaccgagattccagcaactcgctgaccatcttggagaggagccaccgttttacgatggaggagcttgacaaccagcgccgtcaactgcaagaatcctcggatgaagtggcccgccttacacagttgctatcggcaaaggatgccaccatcaagggactccgagcttctaagaaatccattgctcaggagttagaaactgctcagcaggctgttaaagttgctgaagaagctgctgtcactttcaaagctcagcgcgataaggccctggacaaggccattcgggcgggacgaatcttgatgagaagacccggcgtggttgtccctgaagatataagagccgatgtgaatgctgcccctgattcctcgaatcgcccttcttcgtcagtcgttcctgagagagacattggaaaataa

SEQ ID NO: 98902 - DNA, 578 bp, Zea mays
  unsure (1)..(578): unsure at all n locations
  Clone ID: MRT4577_21711C.1
aacgaattgaattggccgcgagtttcctacctataaaacgacccggatcccccacccccacattggcattcggctcgagcgcgtcctcgaataaaaatccagacgaaacccaaaatccccaccgaacgcaacctaaaatctccccatccctcctcgatccagccccgcggagaagagccatggccgattccgcaaccaacgacgcccccctggtcgccagcaaccagcccacggaggaggaggtgacggtggagagggccgcggcgacggaggagcaggaggaggagaggctgcggtacctcgagttcgtgcagcaggcggcggcgcaggcgctggtgctggcggccgcggcgtacgcgtacgccaagcagggcgccggcccgctccgcccggggtccatcaattcgagggcaccgtggcaccggtgtataggccccgtcgggtcggggcccccgcgtctacagtcacccttcnntcgcacngcncngtncnnccngcntgcagnacnnctncnnctncanagntntncnatncngnancncngncnanagngntntngngntngangntncccggtn

SEQ ID NO: 98903 - DNA, 1995 bp, Zea mays
  Clone ID: MRT4577_21712C.1
atgactgggcactttttgaagcggtatctggctcaagaatatcccataagagttgcgcttttagccgcctttgctttacgtgccctagttcttgcatttccgcatctggatcttctctgccactcgcctcctactctgttcgccagtgagaagcaagatggcgcccaagaggaaaaccgcgaactcgtctgctgcggtgatccccgcaatcgaccccaacagtcagttacccttcgcagctggtcggaggtgctagtttggagatgcgtcgtgggcggaagaccgagtatcttgaaaaagagaagacgcctccggcgagtatccagtttcgatgaggacgccggtaccctagctcctgctgctgaagaagtgcctgcaactggccttgctgacactgatcccaatgggtgtgctccatctgctgctgatcccaatgggtgtgctccttgcgttgttactgtggaagatgaggaggaagaaaatgaggctcctttaactcggaaaaacagtcggcagttcatcgccagcggtggaagtagtggagttccctctcctgctttgtctgccctcatcggtctgcaagagctgtccctggccaactttgatcaaactctagaggatatgacttgcgctgccgtgcctgatgctgggttgaggtcatcccgtgcctcgtcgaccttagagcacgatctcgagggtcgggatgctgacttgggttgttctggtcccatggaagtagctgaaggcccgtcaaccttagaggtggttactgcagagagcttggaccccaagaatagtgctgacacatgcccagcccccgaggatgtcgccggggaagacttagctcgggtgaagagtataagccactgcccagcccccgagggtgttgccggggatgatccggctcaagtgggcagtgccaactgtgacccagcccccgagggtgtccgagcaaggtctccttcctgcacttccatggatgttcatgcgggttcacctccacactctggcggcatggtggtggcccaaactctggatcagggagtcgctttagagggcagcgtccccgctggtctggcgtttggctctgttgaaggcactgagctcgtttctactggtctgttgcaagctgttccgggtggtggtctggcatctgattatcagctgatttctcctgatttggggatcccttcgttcttttccaatctccaggctttagtggatgggatggccagccagctgagatcgcagggtgcttccatcccagaagtggcttcatctcttgagcgttggaatccggtgtcgcttcatcgtcgtgtatccgagttggaggcaactaatgctggaatgactcggcagattgcagttcttgaggaaaaacattcccgagatcaagctgaaatggctcaacggtgcgctgacttcgaggagaagtattctcagagccagactgaactgaatcaggtctccgctgctttggatgacgccaacgctctgagttcttctcttcatgctcggcttgactctgaaaaggaagaaaaacgcatccttgctgcttctcgcgacaatctggacagattgtatcgagattctagcaattcgctggccatcttggagaggagtcaccgttttacaatggaagaactggacaatcagcgttgcaggctgcaagagtctgcagatgaagtgacccgcctcacgcaattgatatcagcaaaggatgccaccatcaagggtctccgagcttctaagaaatccattgctcaggagttagaagctgctcagctggctgctagagttgccgaagaaactgctgtcactctcaaagctcagcgtgataaagccatggacaaggctattcgggcgggacgaatcttgatgagaagacccggcgtagttattcctgaagacataaaagccgatgtggttgctgcccccgattcttcgaatcgcccttcttcgtctgtcgttcctgagaaagacattgaaaaatag

SEQ ID NO: 98904 - DNA, 663 bp, Zea mays
  Clone ID: MRT4577_21713C.1
atggccaccacccgcgaggtctccagcagcgccgccgccatgttccacgtctaccagacgataccgatgccgacgccatcgacggcagcggccggcggcggcggcgccatggtgtcggtgtcggcccccgcgaagccgggcaagaaggagggcggcggcaaggaccggcacagcaaggtgaacgggcgcgggcggcgcgtgcgcatgccgatcgtgtgcgcggcgcgcgtgttccagctcacccgcgagctggggctcaagtccgacggccagaccattgagtggctgctccgccaggccgagccctccatcgtggccgccacgggctccggcaccaccccggccgtcttcgtctcctcctccgcgccgtccacgttctcctcctcctcccactaccaccaccagcagcaggccaccgtcgtcctcggcaagcgcccgcgcgaggaaggcgacgccgcggggtccgtgttctgggccgcgctgccggcggcgccgcgggccacggaggcctggggcttctcgccgctggaggcgcaggcggcggcggccgcggccgcggcggcgtacgtcccgatggcgcaggcgcaggcgcagcaccaccacctcaacctgctcgccgcgctctccggcgccgcgaggcgcgccgaggaggagacccggtga

SEQ ID NO: 98905 - DNA, 2694 bp, Zea mays
  Clone ID: MRT4577_21714C.1
atggcgcccaaaaggaaaactgcgaactcgtctgctgcagtgatccccgcaatcgaccccaacagtcagttacccttcgcaggtaaccatatgtctgttatttctgaagctgagctcctccgtctggtctccatcggggttcttcctccgcgggaactctgttcttggcggatttgccacgggactactgtcccaatcgaagatacctacgagtcagtagtttacgctcctttccttctccgcggcctcggccttcccatctctccttttttccgtggcctccttgatttttatcacatcaacctgactcatttgaaccctaattccattctccaaatctccattttcgttcacctttgcgaagcttatctcggcgtgctgccgcatttcggtttatggaagtatctgtatcactgccgtcctgggatggccggggggcagcatcagttggtcggaggtgccagtttggagatgcgtcgtgggcggaagaccgagtatctcgagatacccctcaaagatagcattaaaggttggcgtctggagtggtttatagttgacaattatggaaattctctcccctcccggtcgggaagacagccagacgttcgtactccgagttggactgagccccccacggatcaagaagtggccgaggcaggcgtgttgcttactgaagtcggattactgaaagagagaggtctgactaccgaagctgtggtcacagattttgttttcaagaacattcagccgctgaaagacagggcctatccggcatatctgtatcgagggctggccgactcaacccgagttaccaataggagaattccttctgttgacttggtaagccgacttgagatgatcctcaggggtaaagtttcgaatgttggtgctccagtggcatactcggcttggaacctaccttctcccaaagctttcaccctttttgtgtccaatccgcccgtgactgatagcaatttgggtcttaaagtgcgaccctctgctgaagaggtctgtactttggttgcttcgctcggggagatacctgatgatgaacgacagatttatttcgaagtgcccctgaaccctagtgatgcagacataaatgacatgcttgatctgctagctgaggattcatctgatgctgctcctgatggtacgttggcagtggtgccccttccagaggttgatacaaccttggatgtcccgaaacctgtcagtactcgcccgaggcgccctagtcgaactagtcatcctgagccttctgctgatgagcagaagaaaaagagaagacacctccggcgagtatccagctttgacgaggacgccagtaccttagctcctgctgctgaagaaatgactgcaactggccttgctgacattgatcccaatgggtgtgctttgtctgctgctgaccccaatgaggatgctgtttgcgctgttactgtggaagatgaggaggaagaaaatgaaactccattaactcggaaaaacagtcggcagttcgtcgctagcggtggaagtagtggagttccttctcctgctttgtctgcccttattggtctgcaagaactgtccatggccaactttgatcaaactctagaggatatggtcccggagaacttgttgtcagaacctgtggatgttgatgtgacagagacttgtgcagccgtgccagatgctgggttgaggtcatcccgtgcctcgtcgaccttagagcatgatctcgagggtcgggatgctgacttggattgtcctgatcccatggaagttgctgaaggcccgtcaaccttagaggtggttacggcagagagcttggaccccttgaatagtgctggcacgcgcccagcccccgaggatgtcgccgaggaaggcttagctcgggtgaagagtgtaagccactgcccagcccccgagggtgttgccggggatgatccggctcaagtgggcagtgccaactttgacccagcccccgagggtgtccaagcgaggtctccttcctgcacttccatggatgttcatgcgggttcacctccacactctggcggaatgactcggcagattgcagttcttgaggaaaaacattcccaagatcaagctgaaatggctcgacggtgtgctgacttcgaggagaggtattctcagagccagactgaaatgagtcaggtctccgcggctttggatgacgccaacgctctgagttcatctcttcatgctcagcttgactctgaaaaggaagaaaaacgtatcctcgctgcttctcgcgacaatctggatagattgtaccgagattctagcaattcgctgaccatcttggagaggagccaccgttttacaatggaagaactggacagtcagcgttgcaagctgcaagaatcttcggacgaagtgacccgccttacacagttgctatcagcaaaggacgccaccatcaagggactccgagcttctaagaaatccattgctcaggagttagaagctgctcagctggctactagagttgccgaagaaactgttgtcactttcaaagctcagcgtgataaagccctggacaaggctattcgggcgggacgaatcttgatgagaagacccggcgtggttgtccctgaagacataagagccgatgtgaatgctgcccccgattcttcgaatcgcccttcttcgtcagtcgttcctgagaaagacattggaaaataa

SEQ ID NO: 98906 - DNA, 2895 bp, Zea mays
  Clone ID: MRT4577_21715C.1
atggcgcccaagaggaaaactgcgaactcgtttgctgcggtgatccccgcaatcgacctcaacagtcagttacccttcgcaggtaaccatatgtccgttatttccgaagctgagcttctccgcctcgtctccatcggggttcttcctccgcgggaactctgttcttggcggatttgccacgggactactgtcccaacagaagatacccacgagtctgtagtttacgctccttttcttctccgcggcctcggtcttcccatctctccttttttccgcggcctccttgacttctatcacatcaacttgacccatttgaaccctaattccattctgcaaatctccattttcgttcacctgtgcgaagcctatctcggcgtgctgccgcatttcggtttatggaagtatctgtatcattgtcgccctgggatggccgggggacaacatcagttggttggaggtgccagtttggagatgcgccgtgggcggaagactgagtaccttgagattcccctcaaagatagcattaaggggtggcgtctagagtggtttatagttgataattatggaaattctctcccctctcggtcgggaagacagccggacgtccgcactccgagttggactgagtctcccacagttcgggaagtagccgaagcaggtgtgttgctaactgaagtcggattactgaaagagggaggtctgactgccgaagctgtggtcactgattttgttttcaagaacattcagccactgaaagacagggcctatccggcatatctgtatcgagggctggccgactcaactcgggttaccaataggagaattccttctgttgacttggtaagccaacttgagatgattctcaggggtaaagtttcaaatgttggtgctcccgtggcatactcggcctggaacctacctccttccaaagctttcaccctttttgtgtcaaatccgcctgtgactgatagcaatttgggccttagagtgcgaccctctgctgaagaaatcagtactttggttgcttcgctcggggagattcctgatgatgaacggcaggtttattttgaagtgcctctgaaccctagcgatgccgacataaatgatatgcttgatctgttagctgaggattcatccgatgctgctcctgatggtacgttagcagtggtgccccttccagaggttaatacaactttggatgtcccaaaacctgtcagtactcgcccgaggcgccctagccggaccagtcagcccgatccttctgctgatgaacaaaagaagaagagaagacgcctacggcgagtatctagctttgatgaggacgccagtaccttagctcctgctgctgaagtagtgcctgcaaccggccttgctgacactgatcccaatgggtgtgctccatctgctgctgaccccaatgggggtgctgtttgtattgtcactgtggaagatgaggaggaagaaaatgaagctccattaactcggaaaaacagtcggcagttcatcgccagcggtggaagtagtggagttccttctcctgctttgtctgcccttattggtctgcaagaactgtccttggccaactttgatcaaactctagaggatatggtcccagaggatttgttatcagagcctgtggatgttgatgcaacagagatctgtgctgccgtgcctgatgctgggttgaggtcatcccgtgcctcgtcgaccttagagcgcgatctcgagggtcaggatgctgacttggattgtcctggtcccatggaagtggctgaaggcctgtcaaccttagaggtggttactgcagaaagcctgggccccaagaatggtgttgatatatgctcagcccccgaggatgtcgccgggaatgactcagcccgggcgaagagtgtaagccactgcccagcccccgagggtgttgccggggatgatccggctcaagtgggcagtgccgactgtgacccagcccccgagggtgcccgagcaagatctccttcctgcacttccatggacgttcatgcgggttcgcctccacactctggttgtatggttgtagcccaaacttcgagccagggggttgctttagagggcagcgtccccgctgatctggcgtttggctctgctgaaggcactgagctgattcctattggtccgttgcaagctacttcggatggtggtcttgcacctggctttggtggatgggatggccaaccagctgagatcgcagggtgcttccatcccagaggaatgactcggcagattgcagttcttgaggaaaaacattcccgagatcaagctgaaatggctcaacggtgtgctgacttcgaggagaagtattctcagagccagactgaactgaatcaggtctccgctgctttggatgacgccaacgctctgagttcttctcttcatgctcggcttgactctgaaaaggaagaaaaacgtatccttgctgcttctcgtgacaatctggacagactgtatcgtgactctagcaactcgctgaccatcttggagaggagccaccgcttcacaatggaggaactggacaatcagcgttgtaggctgcaagaatctgtggacgaagtgacccgccttaagcaattgatatcagcgaaggatgccaccatcaaggaactccgagcttccaagaaaaccattgcccaggagttggaggtcgctcggctggccactaaagttgccgaagaaaccgccgctactctcagagcccagcgcgataaagccatggacaaggctattcgtgctggacgaatcttaatgaggagacccggcgtggttattcctgaagacatacaggccgatgtgaatgctacccccgattcctcgaatcgcccttcttcgtcggtcgttcctgagaaagacattggaaaatag

SEQ ID NO: 98907 - DNA, 274 bp, Zea mays
  Clone ID: MRT4577_21716C.1
gatgaacttggcggggctttccaattcccagtcaaaaacatttgtttagccccaccggtgaaggggggttaccgctggggccaggagaaatgggcctcgccacacaccgcccgggcttactcgaagacggaggagagggggggggcgctagcgtccccacggcgggttgcgttgccgcctaggtggtgtgaccctccgaccgcacccgccgtgagcggtctttcctcccttcgagttgaccggggttgggcgccctcggggactttggtcggcc

SEQ ID NO: 98908 - DNA, 1138 bp, Zea mays
  unsure (1)..(1138): unsure at all n locations
  Clone ID: MRT4577_21717C.1
ggctgcnntttccagnacaacacttgnacttcagnncgtctgtaggttnnctctgttattgctggtaccacatatgtttggtagactgatagttattcgacatctggactcactttgtttgcaaacgggcagctagaacttgagacaccttgaatcatataaaccctagtggtggatattgcaaatcaaagttctatcctttcgccttttacttttcagattatcgaccactgttaattttaaagtactctatccagattcttccttttgaaagtagactagttactgatgccacattgttctttttctatgttaggagtggagttatctgcgtggaggactgacgacgctcgaccgggactacggatggatcaacaacatccatcacgacatcggaactcatgtcatccatcacctcttccctcagatcccgcattaccatctcatcgaggcggtaagggtttcccctactcttgcctttttcttttcttttcagtgagtttcttcgcctagatcataagacctgcttttttttggatgtggcctgcagaccgaggcagcaaagccggttcttggcaagtactacaaagagccgaagaagtcgggtgctctgccgtggcacctattccgggtgctggcacagagcttgaagcaagaccactatgtcagtgataccggagatgtggtctactaccaagctgagtcgaaaacgagcacctctgcacaaaaatccgattgacagggagtatagagcgtagcgtgttcttcatttttctcggggaggggctgtgcctgaagacctgaccagcctccacctctgattagcgtgagtgggtacgtcgactgaagaacgtaagctggcgaagtagtaccatgtatgtatggagagggttaaatgtaattctttccaatggtccaaggcggatgctgcttccaatgtagcagcatgcgattctttggacaagatgtatactattacagtgaagagtgaaaaaaagagagagttagctacatagaaagttttctgagctctatacgcgttacctccgttttcggatatttttgtcgtcagctcgatcatttttgaactaaacggcgataaataaaaaaaagaaaggaaggagtatatcttatttat

SEQ ID NO: 98909 - DNA, 2928 bp, Zea mays
  Clone ID: MRT4577_21718C.1
atggcgcccaagaggaaaactgcgaactcgtctgctgcggtgatccctgcaatcgaccccaacagtcagttacccttcgcaggtaaccatatgtccgttatttccgaagctgagcttctccgcctcgtctccatcggggttcttcctccgcaggaactctgttcttggcggatttgccacgggactactgtcccaacagaggatacccacgagtctgtagtttacgctccttttcttctccgcggcctcggccttcccatctctccttttttccgcggcctccttgatttctatcatatcaacttgacccatttgaaccctaattccattctgcaaatctccattttcgttcacctatgcgaagcctatctcagcgtgctgccgcatttcggtttatggaagtatctgtatcattgtcgccctgggatggccgggggacaacatcagttggtcggaggtgccagtttggagatgcgccgtgggcggaagactgagtatcttgagattcccctcaaagatagcattaaggggtggcgtctagagtggtttatagttgataattatggaaattctctcccctcccggtcgggaagacagctagacgttcgcactccgagttggactgagtctcccacagatcaggaagtggctgaggcaggtgtgttgctggctgaagttggactgctgaaagagagaggtctaactgctgaagcggtggtcactgactttgtttttaagaacattcagccactgaaagatagggcctatccggcatatctgtatcgagggctggccgactcaacccgggttaccaataggagaattccttctgtagacttggtaagccgacttgaaatgatcctcaggggtaaggtttcaaatgttggtgctccagtggcgtactcggcctggaacctacctcctcccaaagctttcaccctttttgtgtcaaatctgcctgtgactgatagcaatttgggccttagagtgcgaccctctgctgaagaaatcagtactttggtcgcttcgctcggggagattcctgatgatgaacggcaggtttattttgaagtgcctctgaaccctagtgatgcagacataaatgacatgcttgatctgttagctgaggattcatccgatgctgctcctgatggtacattggcagtggtgccccttccagaggttgatacaactttggatgtcccgaaacctaagaagagaagacgcatccggcgagtatccagttttgatgaagacgccggtaccttagctcctgctgctgaagaagtgcctgcaactggccttactgacaccgaccccaatgggtgtgcccaaactgctgttgaacccaatgggtgtgctccatctgttgctgatcccaatgggggtgctgcttgcgtgttcatcgccagcggtggaagtagtggagttccttctcctgcattgtctgcccttattggtctgcaagaactgtccctggccaactttgatcaaactctagaggatatggtcccagaggacttgttgtcagagcctgtggatgatgatgcaacagagacttgtgctgccgtgcctgatgctgggttgaggtcatcccgtgcctcgtcgaccttagagcacgatctcgagggtcgggatgttgacttggattgttctggtcccatggaagtagctgaaagcccatcaactttagaggtggttactgcagagagcctggaccccaagaatagtgctgacacatgcctagcccccgagggtgtcgccggggaagacttagctcgggggaagagtataagctactgcccagcccccgagggtgtcgccggggaagatccggctcaagtgggcagtgccaactatgacccagcccccgagggtgcccgagcaaggtctccttcctgcacttccatggacgttcacgcgggttcacctccacactctggcggcatggtggtggcccaaactctggatcagggagtcgctttagagggcagcgtccccgctggtctggcgtttggctctgttgaaggcactgagctcattcctactggtctgttgcaagctgcttcaggtggtggtctggcatctggttatcagctgatttctcctgatttggggatcccttcgttcttttccaacctccaggctttggtggatgggatggccagccagctgagatcgcagggtgctttcatcccagaagtcgcttcgtctcttcagcattggaatccagtgtcgcttcatcgtcgtgtatccgagttggaggcaactaacgctggaatgactcggcagattgcaattcttgaagtaaaacattcccgagatcaggctgaaatggctcaacggtgcgctgacttcgaggagaagtattctcagagccagactgaactaaatcaggtctccgctgctttggatgacgccaacgctctgagttcttctcttcatgctcggcttgactctgaaaaggaagaaaaacgtatccttgctgcttctcgcgacaatctggacagattgtatcgtgattctagcaactcgctgaccatcttggagaggagtcaccgctttacaatggaagaactggacaatcagcgttgtaggctgcaagaatctgcggatgaagtgacccgccttaagcaattgatatcagcaaaggatgccaccatcaagggactccgagcttctaagaaatccattgctcaggagttagaaactgctcagctggctgctaaagttgccgaagaaactgctgttactctcaaagcccagcgcgataaagccatggacaaggctattcgggtgggacgaatcttgatgaggagacccggcgtggttgttcctgaagacataaaagccgacgtgaatgctgcccccgattcttcgaatcgcccttcttcgtcggtcgttcctgagaaagacactggaaaatag

SEQ ID NO: 98910 - DNA, 327 bp, Zea mays
  Clone ID: MRT4577_21719C.1
ccacgcgtacgccaagcttttgctttcctgtacatataccttcgcctttgtcataacatgcacgaaacctccatcaacagtggggggagcgtactaccacattgtccttaatacctcggcaactgtttactactactaggctttcccaatcctatgaaaaagattatcccactccccaagcttccgtactatgcttgtattacgtgctccatatgatctgatgccaatattttgttatcctccaatagatgcatcattcaatctgcatctaatctatattaactattgtatctaccgatcttttcagacggatcctaaaaactaact

SEQ ID NO: 98911 - DNA, 1635 bp, Zea mays
  Clone ID: MRT4577_2171C.1
atggatcctaagggtaaggggatggtgattaatgacaaggagaaggagtccctcctaaatgagccaagagatgacaagcctaccgactcaggctcaagtcacaagaagagggaagggaagaagaagaggcacatcaagaaaatcatctactacgacagcgatgcctcttcatcttcaccaagagacgacgatgacgatgactcttcatcgaaaaagaaaacggttaatcaaaattattcatttgattattcccgtattccattcaattctaatgcttatttgctatcaattccacttgggaaaccttcacactttgatggagaagactactctttttggagtcacaaaatggatgaatacaacaaggtgagcggcttggacaacgccaagcaaatctgggataccctcaagatatctcatgagggaaacgacgccaccatgatcaccaaaatagagttggtggaaggcgagctagggagatttgcgatgatcaggggagaggagccaacgcaaagctacaacaggctcaagaccctggtcaacaagattaggagctatggaagcacaagatggatggactacgacgtcgtccgactcatgctcaggtcctttactataattgacccccatcttgtaaaccttattcgtgaaaatcccaggtacaccaaaatgacgcccgaggagattcttggaaaatttgtgagcaggcgcatgatggtgaaagaagcacgatacgtagacaacatgcttaatggtccactactcgtctacgagccacaactcgttgctctcaaagcaacaagcagcagggaggcgctaccaagcaaggtggcacaagttgaggctgccgggctaaacgaagatgagatggccctaatcatcaagcgcttcaagaccgcactgaaaggacgcaaggagtaccccaacaagaataaagcaaggggaaagcgctcctgtttcaaatgtggtaagactggtcatttcatagctcaatgccccgataatgataatgaccaggaacaagaaaagtatgggaagaaagagaagaagaagagctacaggaaggcaaagggcgaggcgcaccatggaaaagaatgggactcggactgctcctctttcgactccgacgacgaaggactcgctgcctcggccttcaacaagtcttctctcttccccaacgaacgccatacatgtcttatggcaaaggaaaagaaggatagattgttagaaaaacaagaggatattttatatgaggagcatgataaatttgttagtgtgcaaaaatctcttgctttagagattaaaaggaatgaaagtctatcatctgagttatctacttgccatgaaactatatctagtttaaagagtttaaatgatgaattaactactaagctagaaggagttaataaatctagttcttgtgaagagcatgttgttgtttgtgatagatgtaaggattttgatgttgatgcttgtgatgaacaccttatttctattacaaaattaaatgatgaagtggcaagtcttaatgctcaacttaagacttgcaaaattaattttgatcaattaaaatttgctagggaagcctacaccgttggtagacacccctcaattaaggatgggcttggtttttga

SEQ ID NO: 98912 - DNA, 2943 bp, Zea mays
  Clone ID: MRT4577_21720C.1
atggcgcccaagaggaagaccgcgaactcgtctgctgcagtgatccctgccatcgatcccaacagtcagttgcccttcgcaggtaaccatatgtctgtgatttctgaagttgagcttctccgccttgtttccatcggggttctccctccacgggaactctgttcttggcgctcttgccatgggactactgtcccaaccgaagatacccacgagtcagtggtttacactcctttccttcttcgcgacctcggccttcccatatctccttttttccgtggcatccttgatttttatcacatcaacctgactcacttgaaccctaactccattctccaaatctctattttcgttcacctttgcgaagcttatcttggtgccagcttagagatgcgtcgggggcggaagaccgagtatctcgagataccccttaaagacagcattaaaggttggcgtctggagtggtttataatggataattatggaaattctctccctacccgctcgggaagacaggcagacgttcgtacttcgagttggactgaatctcccacggaccaggaagtagccgaagcgggcgtgttgcttactgaagttggattactgaaagagagaggtctgactgccgaagccgtggtcacagattttgtgttcaaaaacattcagccgctgaaagacagggcctatccggcatatctttaccgagggctggccgactcaacccgagttactaataggagaattccttctgtggatttggtgagccggcttgaaatgatcctcaagggtaaagtttcgaacgttggagctccagtggcatactcggcttggaacctaccttcttctcaagccttcactctttttgtgtccaatccacccgtgacagatagcaatttgggtcttagagtgcgaccctctgctgaagaggtccgttctttagttgcttcgctcggggagatacctgatgatgaacgacagatttattttgaagtgcctctgaaccctagtgatgcagacataaatgacatgctcgatctgctagctgaggattcatctgatactgctcctgatggtacattggcagtggtgccccttccagaggttgatgcgaccttggacgcctcgaaacctgtcagtactcgcccgaggcgccctagccgaaccagtcagcccgagccttctgctgatgagcagaagaagaaaaggagacgcctccggcgagtgtccagttttgacgaggataccagcaccttagctcctgctatcgaagaaatgtctgcaactggcctagctgacattgatcccaatgggtgtgctccgcctgctgctgaccccaatgagggtgttgtttgtgctgttgctgtggaagacgaggaggaagagaatgaaactccattgactcggaaaaacagtcggcagttcgtcgctagcggcggtagtagtggggttccttctcctgccttgtctgctcttattggtctgcaagaactgtctatggccaattttgatcaagctctagaggatatggtccctgagaacttgttgttggaacctgcagacattgatgcaacagaaacttgtgcgggcgtgccagatgctgggttgaggtcgtcccgtgcctcgtcgaccttagagcacgatctcgagggccggaatgatgacttggatcgtcctgatcctgcggaggtagctgaaggcccgtcgaccttagaggtggtcacggcagagagcttggatcctttgaatagtgctgacatgtgcccagcccccgagggtgtcgccggggaggactcagctcaggtgaggagcgtaggccactacccagcccccgagggtgttgccgggggtgacccggctcaagtgggcagtgccaaccttgacccagcccccgagggtgcccgagcagggactccttcctgcacttctatggacgttcacgtgggttcacctccacactctggcggcatggtggtggctcaaactccagatcagggggtcgctttagagggcagcatccccactggtctggtgttaggctctgctgattgtactgagctcgttcctgctggtctactgcaagctgcttcgggtggtggtctgacacctgattatcagctgatttctcctgacttggggatcccttcgttcttttccaacctccaggctttggtgaatggattggccagtcaactgaaatcacagggtgcttctaccccagaagtggcgtcatctctcgagcgttggaatccagtgttgcttcatcgtcgtgtatctgagttggaggccaccaatgctgggatgactcggcagatcacagttcttgaagaaaaacattctcaagatcaagctgcaatgactcgacgatgcgctgacttcgaggagaagtattctcaaagtcagatcgagttgagtcaggtctctgcggctttggatgatgctaacgctctgagttcttctcttcatgtccagcttaactctgagaaggaagaaaaacgtatccttgctgcttctcgcgacaacttggacagattgtaccgagattccagtagctcgctgaccatcttggagaggagccaccgctttacgatggaggagcttgacaatcagcgccgtcaactgcaagaatcttcggacgaagtggcccgccttacacagtcgctatcggcaaaggacgccaccatcaaaggactccgagcttctaagaaatccattgctcaggagttggaaactgctcaacgggctgttaaagttgctgaagaagctgctgtcactttcaaagctcagcgcgataaggccctggacaaggccattcgggcgggacgaatcttgatgagaagacccggcgtggttgtccctgaagatataagagccgacgtggttgctgcccctgattcctcgaatcgcccttcttcgtcagtcgttcctgagagagacattggaaaataa

SEQ ID NO: 98913 - DNA, 3138 bp, Zea mays
  Clone ID: MRT4577_21721C.1
atgactgggcactttttgaaacggtatctggctcgagaatatcccataagagctgcgcttttagccgcctttgctttccgtgccctagttcttgcattcccgcttccgaatcctctccgccgttcgcctccttctctgctcgctggtgaaatcgagatggcgcccaagaggaagactgcaagctcgtctgctgcggtgatccctccgatcgaccccaacagccagttgcctttcgcaggtaaccatacgtccattatttccgaagctgaacttctccaccttgtatccatcggggttcttcctccgcgggaactctgttcttggcggatttgccgcgggactactgtcccaacagaggatacccacgagtctgtagtctacgctccttttcttctccgcggcctcggccttcccatctctccctttttccgcggcctccttgatttctaccacattaacttgacccatttgaaccctaattccattatgcaaatctccattttcgtccacttatgtgaagcctttcttggcgtgctgccgcattttggcttatggaagtatttgtatcaatgtcgccctgggatggccgggggacagcatcagttggtcggaggtgccagtttggagatgcgccgcgggcggaaaaccgagtatcttgagattcccctcaaggacagtattaagggatggcgtctagagtggttcatagttgataattatggaaattctctcccctcccggtcaggaagacagctagacgttcgtactccgagctggaccgagtctcccacagatcaggaagtggctgaggcaggtgtgttgctaactgaagtaggactactgaaagagagaggtctaactgctgaagctatggtcgctgactttgttttcaagaacattcagccactgaaagatagggcctatccagcatatctgtatcgggggctggccgactcaactcgggttaccaataggagaattccttctgtagacttggtaagccgacttgaaatgatcctcaggggtaaggtgtcaaatgttggtgctccagtggcatactcagcctggaacctgcctcctcccagagccttcaccctttttgtgtcaaatccgcctgtgactgatggcaatttgggccttagagtgcgaccctctgctgaagaagtcagtactttggttgcttcgcttggggagattcctgatgatgaacggcaggtttattttgaagtgcccctgaaccctagtgatgcggacataagtgacatgcttgatctgttagctgaggattcatccgacgctgctcctgttggtacgttggcggtggtgccccttccagaggttgatacaactttggatgtcccgaaacctgtcagtactcgcccgaggcgtcctagccgaaccaatcagcctgagccttctgctgatgagcaaaagaagaaaagaagacgcctccgacgggtatccagttttgatgaggacgctggtacctcatttcctgctactgaaagagtgcctgcgactggacttactgacgccgaccccaatgggtgtacccaaactgctactgatcccaatgggggtgctacttgtgttgtcactgtggaagatgaggaggaagaaaatgaagctcctttaactcgaaaaaacagtcggcagttcatcgccagcggtggaagtagtggagttccttctcctgctttgtcttccctcattggtctgcaagaactgtccctggccaactttgatcaaactcttgaggatatggtcccagaggacttgttatcagagccagtggatgatgatgccacagagacttgcactgccgtgcctgatgctgggttgaggtcatcccgtgcctcgtcgaccttagagcgcgatctcgagggtcgtgatgctgacttgaattgtcctggtcccatggaagtgaccgaaggcccgtcaaccttagaggtggttactgcggagagcctggacctcaagaatggtgatgacacatgcccagcccccgaggatgtcgccggggatgacttagctcaggtgaagagtgtaagccactgcccagcccccgagggtgttgccggggatgatccggctcaagtgggcagtgtcaactatgacccagcccccgagggtgcccaagcagggtctccttcctgcacttccatggatgttcatgcgggatcacctccacactttggctgcatggtggtggcccaaactttggaccagggaggcgctttagagggcagcgtccccgctgatcgggcgtttggctctgttgaaggcactgaactgattcctactggtacgttgcaagctgtttcgggtggtggccttgcgcctggttatcagctgatttctcctgatttggggatcccttcgttcttttccaacctccaggctttggtagatgggatggtcagccagctgagatcgcagggtgcttccgtcccagaagtggcttcgtctcttgcgtgttggaatccagtgtcacttcatcgtcgtgtatccgagctggaggcaactaacgctgatcaggctgaaatggttcaacggtgcgctgacttcgaggagaagtactctcagagccaaactgaattaaatcaggtttccgctgccttgaatgacgccaatgccctgagttcttctcttcatgctcggcttgactctgaaaaggaagaaaaatgtatccttgctgcttctcgcgacaatctagacagattgtatcgtgattctagcaactcgctgaccatcttggagaggagtcaccgctttacaatggaggaactggacaatcagcattgtaggttgcaagaatctgcggacgaagtgacccgccttaagcaattgatatcagcgaaagatgccaccatcaaagaactccgagcttccaagaaatccgttgcccaggagttagaggccgctcggctggctgctaaagttgccgaagaaactgcagctactctcaaaacccagcgcgataaagccatggacaaggctattcgtgctggacgaatcttaatgaggagacccggcgtggttgttcctgaagacataaaggctgacgtgaacgctgcccccgattcctcgagccatcctacttcgtcggtcgctcctgaaaaagacattgcgaaatag

SEQ ID NO: 98914 - DNA, 375 bp, Zea mays
  Clone ID: MRT4577_21722C.1
tgccggtgattgcgcctctctcgcccgggtcgcctgagggattggaaagatggcatccccgctgctgacccaaaaaatcccgaagaatcggttcaagcagttcaagaggccacacctcccccggtccaagtgcctaaagccaagctggcgtaggcccaagggtatcgactcccgggacaggcggaagttcaagggatgcaccttgatgcccaacattggatacggctgtgacaaagaagacaaggagctaccttcccaacaagttcacgaagtttgtcgttaacaacctctctgaactggaactgatgttgatgcacatcaggacatactgagccgagattgcccacaacctgttcacccggaagcgcacggaga

SEQ ID NO: 98915 - DNA, 522 bp, Zea mays
  Clone ID: MRT4577_21723C.1
gcgactttcaacgccaacgctctgagctcttctcttcatgctcggcttgactctgaaaaggaagaaaaacgtatccttgctgcttctcgcgacaatctggacagattgtatcgtgattctagcaactcgctgaccatcttggagaggagtcaccgctttacaatggaagaactggacaatcagcgttgtaggctgcaagaatctgcggacgaagtgacccgccttaagcaattgatatcagcaaaggatgccaccatcaagggactccgagcttctaagaaatccattgctcaggagttagaagttgctcagctggctgctaaagttgccgaagaaactgttgttactctcaaagcccagcgcgataaagccatgaacaaggctattcgggcgggacgaatcttgatgaggagacctggcgtggttgttcctgaagacataaaagccgatgtgaatgctgcccccgattcttcgaatcgcccttcttcgtcggtcgttcctgagaaagacattggaaaatag

SEQ ID NO: 98916 - DNA, 260 bp, Zea mays
  Clone ID: MRT4577_21724C.1
ccaacaccgataaaggatgagctcgaggtccttataccactgtgctgtttccacccttccccccgtggtacctagttccttcgcccacgtctatttagaaatgtcgttgatagcaaaagacgtcgtcgactaaccgagcgtttgagcgtgtcatactgtatcggactctaatagtggcaagacttccgagagccactgttttcaaaaatgccacataacgacgagtatcaccgaagcctcgtcacgtggtatggatctac

SEQ ID NO: 98917 - DNA, 364 bp, Zea mays
  Clone ID: MRT4577_21725C.1
ctcggggccgttttttttttttttttttctaggcgtcgtagtgatcgaacggtaacggtgataaagcattcatagaggagccactgcgcatcatagacaaaccatatgcacagtagacacatgccgaacaatgaggaagccgccggaggtccagctggcgcaatcttagttagcgggagggggcaaaaaccatcaaggctgcagaagcatgtaacactggagacacgcgctgatcatgggctggcttccggagcttcagggcacttagagcccgtaccggacccggatcacaacggaagaatccgggagcaactcgagcaaggaccttgccgagggcaggagaccgggtcgttgaggtactcta

SEQ ID NO: 98918 - DNA, 2135 bp, Zea mays
  Clone ID: MRT4577_21726C.1
tggcatactcggcttggaacctacctcctcccaaagctttcaccctttttgtgtccaatccgcccttgactgatagcaatttgggtcttagagtgcgaccctctgctgaagaagtccgtactttggttgcttcgctcggggagattcctgatgatgaacggcaggtttattttgaagtgcccctgaaccctagtgatgcagacataaatgacatgcttgatctgttagctgaggattcatctgatgttgctcctgatggtacgttggcagtggtgccccttccagaggttgatacaactttggatgtcccgaaacctgtcagtactcgcccgaggcgccctagccgaactagtcagcctgagccttttgctgatgagcaaaagaagaagagaagacgcctccggcgagtatccagctttgacgaggacgccagtaccttagctcctgctgctgaagaaatgactgcaactggccttgctgacattgatcccaatgggtgtgctccacctgctgctgaccccaatgaggatgctgtttgcgctgttactgtggaggatgaggagggagaaaatgaagctccattaactcggaaaaacagtcggcagttcgtcgccagcggtggaagtagtggagttccttctcctgctttgtctgcccttattggtctgcaagaactgtccatggccaactttgatcaaactctagaggatatggtcccggagaacttgttgtcagagcttgtggatgttgatgcaacagagacttgtgcagccgtgcccgatgctgggttgaggtcatcccgtgcctcgtcgaccttagagcatgatctcgagggtcgggatgctgacttggattgtcctggtcccatggaagtagctgaaggcccgtcaaccttagaggtggttacggcagagagcttggaccctttgaatagtgctaacacgtgcccagcccccgaggatgtcgctgggggagacttagctcgggtgaagagtataagccactgcccagcccccgagggtgttgccggggatgatccggctcaagtgggcagtgccaactgtgacccagcccccgagggtgtccgagcaaggtctccttcctgcacttccatggatgttcatgcgggttcacctccacaatctggcggcatggtggtggcccaaattctggatcagggagtcgctttagagggcagcgtccccactggtctggcgtttggttctgttgaaggcactgagctcgtttctactggtctgttgcaagctgttccgggtggtggtctggcatctgattatcagctgatttctcctgatttggggatccctttgttcttttccaatctccaggctttggtggatgggatggccagccagctgaggtcgcagggtgcttccatcccagaagtggcttcatctcttgagcgttggaacccggtatcgcttcatcgtcgtgtatccgagttggaggcaactaattctggaatgactcggcagatcgcagtccttgaggaaaaacattcccgagatcaagctgaaatggctcaacggtgtgctgacttcgaggataagtattctcagagccagactgaactgaatcaggtctccgctgctttggatgatgccaacgctctgagttcttctcttcacgctcggcttgactccgaaaaggaagaaaaacgcatccttgctgcttctcgcgacaatctggacagattgtatcgagattccagcaactcgctaaccatcttggagaggagccaccgttttacgatggaagaagaactggacaatcagcgtcgccggctgcaagaatctgcggacgaagtgacccgccttaagcaattggtatcagcgaaggatgccaccatcaagggacttcgagcttctaagaaatccattgctcaggagttagaaactgctcagctggccgctaaagtcgccgaagagactgctgctactctcaaagcccagcgcgataaagccatggacaaggctattcgagcgggacgaatcttgatgaggagacccggagtggtagttcctgaagacataaaggccgacgtgcatgccgcccccgattcctcgaatcacccttcttcgtcggtcgttcctgagaaagatattggaaaatag

SEQ ID NO: 98919 - DNA, 861 bp, Zea mays
  Clone ID: MRT4577_21727C.1
atggatcctaaaggtaaggggttggtgatcaatgacaaggagaaggagaccctctatgtcgacgagccaaaaggcgacaagcccactgacttaggctcaagtcacaagaagagggatgggaagaaggagaggcgcataaaggatgaatacaatgaagtgagaggcttgtacaatgccaagcaaatatgggataccctcgagatctctcacgagggtaatgacgccaccatgattaccaagatggaactggtggaaggcaagctggggaggtacaccaagatgatgctcgaggaaattctcagaaaatttgtgagtgggcgcattatggtgaacgaagcgagatatgtggatgatgctccaaatggaccgcttcttctctacgaaccgcaacctgttgctctcaaatcgacaagcagcaaggatacgctacctagcaaggcacaagaaaagaaacagaagaaggaaagaaagaagaactacaggaaggcaaagggcaagacgcacattgaaaaagaatgggactccgactgttcttcatctgactctgatgatgaaagactagctgcctcggccttcaacaaatccttcctcttccccaatgaatgccacacgtgcctcaaggctaaggagaagaagaatttacaacttttgacgatgtatgacctacttgagttagacaaggttaacttcacttatgtaagacccttgggtggtatacttggtaaattgggtcaaactttagctaagtggcttggtactggtgtatatctctttgcctcaaaatttgggggtcagaagtggggctctggtagttgtaagtccactggatttttattatccattttgggtatagttttgtaa

SEQ ID NO: 98920 - DNA, 407 bp, Zea mays
  Clone ID: MRT4577_21728C.1
atgtgtggggtatttttaaaattatttatagtttgtttttagtaagttttaagttatggttatgttagtacatttatataacattgttgttttatgattttgtacttaattattaacaacattcaaatcgtattaaagtctcaagacataataataattattaggtatatggggcggagggagaaaaaagagtatctgaaccaaaagaaagctttaaacaaaagtgaggtgaacaaagtcataaggagatcaaaggatgaaggtgaagtaaacggggagagcaactcgtgctggagagtaatgaatatcctttgcatcacagagaagagaggaggacaagggggggttgtggaaaatcaagggtatcagctccatttgaaagtgcgaggggaagcaaatttacctct

SEQ ID NO: 98921 - DNA, 304 bp, Zea mays
  Clone ID: MRT4577_21729C.1
gcaagagattatggcatttttccctgggatcttttttttaccagttcaaaagaaagctttgttcccggagaacacccttgccccgtcctttttcccctggtgccggtcgatcacctttttggcatcgggcggtttttccttttttactacgccgccgccggcggcgagcgcaaccggcagctgcattttggccagggactcgctgaactggtggatgcttttaacgtacatttccatgatctgccggtggatcgcgctttggtccgcctccacgttgacagatgtccccggccggggacgggag

SEQ ID NO: 98922 - DNA, 259 bp, Zea mays
  Clone ID: MRT4577_2172C.1
ctaggaaacctgacctaccttagtttgctagtactttcaaataatagatttagcggcccaattcgtgccatttacaaactccaaaacctaagtgttagactactgtatttgtatttatagtatgtctaatattggtagttagtccttgattgtaggcccttgattagaggcccttgattgtaggcatgtagggctgtgctttgccatgtgtgccacgacgcacagtctattcatactgtacatttccatggtatacaat

SEQ ID NO: 98923 - DNA, 290 bp, Zea mays
  Clone ID: MRT4577_21730C.1
aaaaatacgttgcagtccactccgaaccaagtaaatttagaccaacagaccaacacactatttgaccgcgctaccgggaccttacctgctaacagtcgactggctgaaacagaagccccacggattcaggcacttcctatgtcagttaagtaccagcacaacaaaaattcgccataaaggaccgactacgggccaagaagtgctgctgactataagtcatgggaccattggtgcacagctggggcgcactcctggtgacatcttgacaacacaatgggccagaggggcac

SEQ ID NO: 98924 - DNA, 611 bp, Zea mays
  Clone ID: MRT4577_21731C.1
gggtttgtctgccgcaatgagcagtgtattcgaaaaaaaaaaaaaaaaaaaaaaaaaaaaaaaaaaaaaaaaaaaaaaaaaaaaaaaaaaaaaaaaaaaaaaaaaaaaaaaaaaaaaaaaaaaaaaaaaaactgggccccaattgtaattttaaatttttgtttcaaaacacttttgggggttaggttgggggtttatttttttttgggggttttttttcttggggggtgaaaactttgaaaaaacacttattttggaattaacaaacaatttttgccaaaaaagaacattctttttcccgtctcccgaagggttttttttttttaacccccctttacaacacttttttttttaagtttttaacattttggcccattgaattttttttattaaaaaaaccaggtccttttaaaaaaaaaaaaaaaaaagggggccttgggcttcaatttttttttccttttaggggggttaatttgcccctttggggtaatattggaattagttttttcttggggaaatttgttttccgttaaaatttccacaaaaattacagccggaaagattaaagtttaagccttggggggctaatggggggacttacctccatttat

SEQ ID NO: 98925 - DNA, 155 bp, Zea mays
  unsure (1)..(155): unsure at all n locations
  Clone ID: MRT4577_21732C.1
ggttaatttgcttgaatgcaggcataaatgctgtttaccggcggggttttcnactgantctcaaatttctttaaacaaaagcttattttacaaaatctttggtgtcccccttaaaagttaatccaaacgctcactttgcttactttgctctttat

SEQ ID NO: 98926 - DNA, 225 bp, Zea mays
  unsure (1)..(225): unsure at all n locations
  Clone ID: MRT4577_21733C.1
accctctaaaagccattccttctctagtgctcatcanccttctgctgatgtcttacctagcaaccgttccctaccaccaaanagtttcatatcttcttgtcttagctgtcatctaccactaattctttttcattttttcgcctcctgacaaattcttcttcttacccaaccactcatcttcttcatcttcattactacacctctattactattttttcaaacaaa

SEQ ID NO: 98927 - DNA, 320 bp, Zea mays
  Clone ID: MRT4577_21734C.1
gatatcacatccctcaaggagcccgagagggacagcattaacgtcaagaccacctcggcttacctttgcggcctgggtgactatgtccacaacatttcttgtaccaagacggccccgaccttacacgtgcagatacccgggggactctcctgatgttggaggcgggggcatacgctccgtgctcaccacgggctagatcgtcgcttcctccggggacaaagatcagtttccggagatcggcagaccgatcactcttaatataggtataaggaaacaagttttcgtgatccgatgctataaccccggaccttttcgctttg

SEQ ID NO: 98928 - DNA, 397 bp, Zea mays
  Clone ID: MRT4577_21735C.1
taaaaaaaaaaaaaaaaaaaaaaaaaaaaaaaaaaaaaaaaaaaaaaaaaaaaaaaaaaaaaaaaaaaaaaaaaaaaaaaaaaaaaaaaaaaaaaaaaaaaaaaaaaaattttttccttatgtccataacccttttaaggggaaattttggagatgtggatgacatttttggccttttaatcattttttttaaagggccaatttccccttttttaaagtgttttaaaaataaaatgcccgggttttaaaaacttaatgattggaaaaaccttgccttttccaaatttaatcgttttgcagaaaatcccctttttaaaaattgtgttaaaaagaaaaaggcccgaactgttcgcttttccaaacattttttgagccctaaatgggaaagggacccccc

SEQ ID NO: 98929 - DNA, 255 bp, Zea mays
  Clone ID: MRT4577_21736C.1
aggatcgggctgtggctgagggtgagtgggagggatgatggcaacagctaaggggacagttaagctgttacttcccctgggagcttccctgcccaacgtgggactgtctgttcaccctgggactgtgttctgcctgggagaacgtcggcactgctggcggtgactggggtctccccacaggaaagcgtgtgtgtgtgattgattccgctgtgttgcttgacgccggctggcagaacctggtccatgaggtgtgga

SEQ ID NO: 98930 - DNA, 2542 bp, Zea mays
  Clone ID: MRT4577_21737C.1
cgaaatagactgatattcgaaatgggggcttccacagggcggagtaatgtgaggatggaatgccagttgatagggtcatgttttagtgctactcatgctgaagacacaaacgatcctctagggatcagatcatactcctctaaggatgttactgatagttgtagccatactgaaatggttcagtgcagcagcaagtcctttcattttaaatcagggaggaggaacataaaatcaagtaaaacaccaagctatgttgatttgactgcgtctaacagagtgagaggttctaataggcacaagaacaatggaaaagatagttcagcagtgtggcagaaagtagaaaggaatgacaagatggtatctaaagcaggccatccgagcgatacacctgttcatgataagggtgcaaatgaagttggtaagaagggtgtacaggaagatccaacaagaattcgggcaaaacataatccgaataagaaagtgtgcaaacagaagccttcaaatggagcagttgaattggagcctgccaaaggagaagatgcattgaactcatgccatacattttctggacctttctacacgaagcaagcaccctttctacgccagcaaagaaactctttttcgaaacaaggttctcagtcattgaaaaactactgtgctcctaggaatggtatccccaaggtggcaaaggattacttgcagcaagaagaattacctatgttggtgctagttcatgccaagaacaccagtgataaatcaagctcatattcaagttcagctgatgaagttggtctaactggagtcagcaacaactatccaactgagggaaatgagagttcacaacctgatattgaggtagcagcgtcagtatcttgcaacttggttccagatttggctccacaagctgcttctgatgatttccacatatcagatcctcactctttacgtcctgaaaacaagggtgcatccaacagtcggagctccaataacttgtgcacagatccttttgctgcagaagcaaaggaagctcgatgtgtgaagctactaacagagaataattcccaagaaccctgtaagtggtattctgctgctggacacttgtcacagaagtgggttcctgttggaaagaaagagacttgcaatgggatctgtttagatgtctcagctaatggtgatgacagcaacttgcctagtgaaaggacttataaactgaacttatctgaacatgctgcagcagataatgcagctgagaccgattacagcaagatgaaagaagtcatcagctatgtttacacagcacagcagcgagtggaagacatccaactttgcattggtaggcctattgctgattttgaaaattttgtttactctgcttctccagttgtgcactgcagctcgtgctctgttggctgtaaatcttgcctgcaagaatgtgtgaaggatggcttatgtttgcatcagactccagatatcactctaagaactgtctggcagtggtacgaagagcctagttgctatggtttggatgtaaaggcacaagatctctggaggtcaaaagccttgtggaatagtcattgtcagtttacaacatattttgtaccatatctatctgctgttcaactcttcagtcaacctaaaagaaccagtggtggaagcattgataaggaatcaatccatagggatgtgacatgtgaaacatctccacagctgaacctgcccccaatatttgcaaagctttttccaaaacaatctgttccagtaaataaaccatctactctgcgtactgaagatgatcaacagtcagcagatggggagctggtatttgaattttttgaatatgaacagccatactcacggcgacaattatttgacaaggtaaatgagctgattgccggtgcgaaaccgtcaaattgccaaatatctggggacccaaagaatctggaggccagcctgcatgatctccatccagcgtcttggtattgtgttgcatggtatcccatataccggatacctgatggaaaattccaggctacattcttgacatatcactctcttggccactggattcgtcggagcagctcagcaggtggggccgctgttttgccagtcatgggcctgcagtcttacaatgccaaggcagagtggtggtttgagatgagcaagtccgaatctgaaggcgggcagtcgcaggccagtgaagcatccgagattctgaaggagagatcgcgcacgctgagtgaggctgcggccgtgttgtccagggccagcgtgctgaagaatgggcagatgagtagaaacagacatccagactacgagttcttcctctcccggagctgatttggaagtgcctcttcgtactcggatttagttaggtttcagtgtatgtatgtgttgttgacactaaagcttattctgcaaccgatgactggaagctgtttgcttagcttagcttagcaatataataataatgctagtcagttctcatccaaaaaaaaaatcactgttattgaagtagatcagagatgaaacaggaaggaccacg

SEQ ID NO: 98931 - DNA, 112 bp, Zea mays
  Clone ID: MRT4577_21738C.1
tggcactgtcgaaatgggcgtgcgcaggttcatgaagccgatcctctactagggcttcatgttacagcgagtcatgcctcgattcatgagccaacgcggctacttcacccgc

SEQ ID NO: 98932 - DNA, 302 bp, Zea mays
  Clone ID: MRT4577_21739C.1
aaaacccccaaaaaaaaaaaaaaattaccgaaccaaaacagggttttaaaaacagggggcgcgaaaaaaaaaaaccgtaaaaaaagggccccccaacaaaaaaaaaaaaacccctcaacccaaaacccccacaaagtttttttagcagggcctataggaaagcaaatttactggtttggcccatcccccgaaaccccttgttttccaagcgaaccttctgaagtctttccttaaacccctggaaccgcccttttgatttcccaaaaatttaatgccccaccttttgggcctccaaccttggg

SEQ ID NO: 98933 - DNA, 1077 bp, Zea mays
  Clone ID: MRT4577_2173C.1
atggagagtcatgatctctgggcagaaagggaatcacggcttgtgggtggtgatgaggaggatggttatgatcatgcttatggtaatgtgaagcaactcaaggacggtaccttcatctcccaaacgaagtaccttcaagaccttctaaagaggtttggaatgaaggacgccaagcccgcgaagacaccgatgggaaccgacggacatgtcgacctcaacaaaggaggtaagtccgttgatcaaaaggcataccggtctatgatagggtcattgctttatttatgtgctagtagaccggacattatgcttagtgtatgcatgtgtgctagatatcaatccgaccccaatgaatgtcaccttgtggccgttaagcgaattcttagatatttagtttctacgccttgcttcgggatctggtatccaaaggggtctacctttgacttgattggatactcagactttgattatgccgggtgcaaggttgataggaagagcacatcggggacgtgccaatttctaggaaggtccctggtgtcctggagttctaagaaacaaacatcctttgccctatccaccgctgaggccgagtatgttgccgcaggacagtgttgcgcgcaactactttggatgaggcaaaccctccgggactttggctacaatctgaacaaagtcccactcctatgtgacaatgagagtgcaatccgcatggcggataatcctgttgaacacagccgcaccaagcacatagacatccggcatcactttctgagagaccaccagcaaaaaggagatatcgaggtgaaccatattagcaccgagaaccagctagccgatatcttcaccaagccgttggatgagaaaaccttttgcagattgcgtaaaatagtgagaaaagaattggaaaaagagttggctatgtacaacaaactccagctcggcttggcacaccggactgtccggtggtgcatcggacagtgtccgggcgagaagctccaacttgtggagattcctcgcaaacgggaagaagattataaggaagaaagtcgtggtattgaagttgatcattggatcacttga

SEQ ID NO: 98934 - DNA, 482 bp, Zea mays
  Clone ID: MRT4577_21740C.1
ctctctcaatcgccttcacgcatctcagagacctcggagccgcggggccgtcggtgtacctatccacctccctgccccaaggctgatagatatctaccagtggcacactgcatgaccacgtataaacaacccgactgtaatgtcataatctccagtcggcgactgtccacatgagagtcacaccatcctcatgagggtgcacgacagctaccacctatgcgcatgagacgcttactatgaatggaaatataggcacaaaggactacatgaaccagagccttgtgccgccatcaatgcctgataccgctggcatcgatggcgcatggaagcaaaacccgctctgtgctaatgttcctgctgagaaagcgcaggaaataacttcatgattcaactcctgaagtaagaagcttcagctgatgatacaaatactgctgatgctcccatcgagcgtgagatactgcttatactcaatcatgatgaga

SEQ ID NO: 98935 - DNA, 472 bp, Zea mays
  Clone ID: MRT4577_21741C.1
gggcagaaaaaacaggccaaatctgcttaagcggtgcaaacaatagacaaacctccatttttgtttaaaaaacggggggggtgttgggcccgaaataggcttaaagaaaagggggcaaccaatggaaggtttgcttgctaaaaaatcacactacggggatctaaacagaccatcaagagcagcagttggtttgctgaaaaacaggctgaccccgcatttgcacaggtgcaggcctactagcaccacttggagctgggtgactggccatcctgttctttaacccccccgccaagggcaagaaagccttttccaaattgggggcatccttggcactagtttaaaggaaagggattccaaagtaataagaaagggccttgccagccttaaaagaaactactttgttttcagccagggaacaccttgttcccaaccaaaaggttgttaaaattttaacggggaaaccaataaaatt

SEQ ID NO: 98936 - DNA, 400 bp, Zea mays
  Clone ID: MRT4577_21742C.1
tgcgtccgctacctattccttacgtcccccaagctgagaaaagaagctagctccctcggtttagaacgaatgaccacgcagggcggccacaggtctactaccacgctggtcagccggcgtggccggtgttctggccgtggccgatgcgtggttcttcgccggggtggcgaccggggaaaaagcgggcggataatgggagacggcgtgcgagtgcatgcgacccctgccgagccgggttcgagacgaacgtatccagaagacggaccagaacaacagtggaagtggtgatgacggcacttttatggcgtgcaatgagactctcagggcttgtgctacgacggaccacagccggtggtgcaagcttgagagagacctttaccaccaggaggagatctgcgag

SEQ ID NO: 98937 - DNA, 376 bp, Zea mays
  Clone ID: MRT4577_21743C.1
cttttatatcggaccattttaacaaaaattggggataataaacgtgttgttgttaaattttcccggaaaaacccacttacaacccaatattaactcaacaaaacatgctttcaaacccttcttctttttgtttacaaccaatattttatattcgacatcctaacacacctccagaactaatgatctacaataataatcacaaatacaattgatctatatgcccattaccacaaaatgaaaacttacaactacaatccaagattttccgttaataccacatcaattggacacaacaatcaaacctgaaaatgtaaatataccctctacaaactttacaaaacctcacttatttcataaaccaataccaagtattcaa

SEQ ID NO: 98938 - DNA, 343 bp, Zea mays
  Clone ID: MRT4577_21744C.1
gcccgccgtccccgctgccggcgccgtcgcggttgcctgccccatgtgccgtggcgcggtgaccggcaccgtgcaagtgttcttctcctagcaagctttaggaaaggggaaaatgctaaaagaaaaagcaagacaaaatcgttgctcctgccaaaaggaatgatccgtgaaaatggggaattgttcatgatagtccgttctctgcttctttttttttttctcttcctctctcagttgtttattataatccttctattagtatataagtcgatctcttctagtactgctaggaataggattagtgtcctgctttattttcccttggtttcttctggaaagcata

SEQ ID NO: 98939 - DNA, 773 bp, Zea mays
  unsure (1)..(773): unsure at all n locations
  Clone ID: MRT4577_21745C.1
gccggccgggccggggtattttatacaactctcattactatggcctacattacacactgcatctttgacatggatggtcttttactagacactgaacgtgtctatactgaagttacgcaacagatcctggacaaatatgcagacggtgtcaagttcacctgggatgtcaagagccagctcatgggccgctctggaaacgaatcagctgctatggttgtcgacacatacgagctgcccatgtccgtcaaggagtacttggacattacagccatcattcaagaagacctgtttcctcacgccaagctgcttcctggtgttgaaaagctgattcgtcatttacatgcgcacgatattcccattgcggttgctacgtcgtcgactcgctccaagtttgagctaaagacgtccctgaacaaggaagtctttgagctgtttgatgtcattatctgtggcgatgatgccgaaatcaagaatgccaaaccctcgcctgatttgttcttggctgctcaaaagcactttggaaaccctcctgctgagaactgtctggtgtttgaggatgctgtcaacggcgttgaagctggcttgaatgccaagatgaatgttgtttggattcctgatgaaaatatcaaggctctcactggggataatgatcatggcgctacgttggtcatcaattccatggctgattttgttcctgaagccttctcactntcatcttacaaataaagcatgttgttttattactacaaaaaaaaaaaaaaaaaaggccctan

SEQ ID NO: 98940 - DNA, 344 bp, Zea mays
  Clone ID: MRT4577_21746C.1
aaaaaaagggggggccaccccatttgggggggggggaaaaaaaaattgccatagcactcaaaaaaaaggggggggcccgggggcaaggcccacaaagggaaagaagccccccattgggggggccttttttttacaaaaacagggggggggcttttggttgcacaatccagggggaaaagaaacacacgaaacgggcaggatacgaaggggtacataaaagggccgttttctatggctggggggggggcctgggcttgggctttccccccgggggaaagggaaaatgcatggccccccttttttagccccggcttgaaaaaaaccctgccttggggccccccttt

SEQ ID NO: 98941 - DNA, 734 bp, Zea mays
  unsure (1)..(734): unsure at all n locations
  Clone ID: MRT4577_21747C.1
acagttcggccgccgcctctctccattgctcggtcgcggcctcttctgagcttcacgccgtccatggctgtcgccgctcgtgccacgcccccacctctctcccttcctcctcccactgcaaccccatctgtacatcacgtccggtgctgtctttgccttcggttgttgcagatggtggccatgggaacttgagcagtccaggtataaggtatccaccctcacagctgagcgacacatacccgcaaccacccaaatccatgtgcatcctcctgccacccacgtcggcgtggcccacgctgcatccggcccacccgccacgtgtcccgctccgcattcggcctgcccagtgcctgttgcgtcacgcgcccggcactggccatcagcttcacacagttgcaggccgcacatgttgtgttcggagacgcgggcgcgccgtcgtgtggttgtatctgccacgccggaggtggagaagaagccgcccagcacccaccaccaggtatccttcgtccgtatctgggaagtggctcactgcacggccacctacgcaagcgcacatgctctggaaacacaagaggagattccgacagtgcatctttctactcgctcaaattttttaatcttctctgatttggtctctcggttggtgatttggtgctgctagcactagcacatccggtgatacccagtatttcagtttaagatcaatcagtgggtaaattggaaaaaaaanaaaa

SEQ ID NO: 98942 - DNA, 546 bp, Zea mays
  Clone ID: MRT4577_21748C.1
ctcgaagccggccggggcgcccgtcgcccgctgccatgggacccacggaatccaacctcacccgccggctgccgctcggctgccctccggcctccgggcatcgccatcggagtgtgcaggaaccaggaggaggccggtagagtccgtgcacccgggtcccactcccctgaggccgtccgtggctccgtgcaagatggggattgcgcaagggtgcgaggtcaccatccccgcgcctggtcatcagtattgaatgcacgacaggaacattccaactttgttgtcggtatccattcttcatgaagacgtcagtatagccggctccactgaattcttcaaatggaataccttgttaattatctgcaaaattttgtaaccaataatggagcacttggaggctcatagaagctacatttactagctggatttttaaattggtttctctttggagaagtaggtgcaatcttttttgtaagcatagtcaaatttttaccctttcagaaagttcttgtgccgaaaaaaaagaaaaaaaaaaaaaaaaaagcggcc

SEQ ID NO: 98943 - DNA, 229 bp, Zea mays
  unsure (1)..(229): unsure at all n locations
  Clone ID: MRT4577_21749C.1
tcgtttgcgtccagccaggaccagaacgggaggggggagcgagagacctctcgattctccccatcccgccgtgcttcccgtccacaccaaatcctgcgacacgatggagcgcctgctcataccccacccctgggccgacggctatgtctcaaagatccaccttggcgtatgccgccttggtggtgccgnggaatccggcgtgcgtcgagagagaatactgtgggggaag

SEQ ID NO: 98944 - DNA, 757 bp, Zea mays
  unsure (1)..(757): unsure at all n locations
  Clone ID: MRT4577_2174C.1
ggtacactcgggctggccgggaactgttgnataaaaggcataccagtccatgataggttcattactttatctttgtgctagtagaccggacattatgctaagtgtatgcatgtgtgctagatatcaattcgaccccaaagagtgtcaccttgtggccgttaagcgaactcttagatatttagttgctacgccttgcttcgggatctggtatccaaaggggtctacctttgacttaattggatactcggactccgattatgttggatgcaaggttgataggaagagcacatcagggacgtgccaattcctaggaaggtccctggtgtcttggagttccaagaaacagacattcgttgccctatccaccgctgaggccgagtacgttgccgtaggatagtgttgcgcgcaactactttggatgaggcaaaccctctgggactttggctacaatctgaacaaagtcccactcttatgtgacaatgagagtgcaatccgcatggcggataatcctgttgaacacaaccgcactaagtacatagacatccgacatcacttcctgagggaccaccagcaaaagggagatatcgaggtgtaccatattagcaccgagaaccagctagctgatatctttaccaagccgttggatgagaaaaccttttgcaggttgcgtagtgagctaaatgttttagattcgcgtaacttggattgatctatagcatacatgtgttctatgcctttgatcatgttactttatgca

SEQ ID NO: 98945 - DNA, 1230 bp, Zea mays
  unsure (1)..(1230): unsure at all n locations
  Clone ID: MRT4577_21750C.1
catctccagacgcgccccgccgcccgctgccatgggacccacggaatccaacctcccccgccggctgccgctcggctgccctccggcctccgggcatcgccatcggagtgtgcaggaaccaggaggaggccggtagagtccgtgcacccgggtcccactcccctgaggccgtccgtggctccgtgcaagatggggattgcgcaagggtgcgaggtcaccatccccgcgccgtgtcgtcagtgtgagttgagattctgcgtctcctcgctcgatttacttgcagccacatgcttgcgagttgcggtacccagcttagctttttcgagtccttgcaaatcttggtggggacgacggagacctgatgctatgcttccttccctccctgtgctgttgagttccgcttccacagctcgtgtatggccgacacggtaatcgctgcgaaacgaggtcatgcgcgccttccttgtgctttcggatgcaccgcggcttgccatccaaaattcgctgcgatgcttagctagatcgaaggcctacttacgctcagaggtgtcagctttggggatccccatcttttatctcttgtcgtggttaaaacagcgacctgatatgtcaggtgtttgttccgcaaaagggttgtatttcccacgtttagggatgagagtttgttcggaatagcttgctcaaagtcatggcatttggtcgcagggagtgatcaagtaggtactaggacagtcctctccctttggtggtgctgttgattccttgcaagacctgtacctctgtgctcagataatccagcatgtgctgcattcagatgggagattgaatgaaagtgtgtaataccagtagcttcctcaaatactgcagattgaatgcatgacaggaacattccaactttgttgtcggtatccattcttcatgaaggcgtcagtatagccggctccactgaattcttcaaatggaacaccttgttaattatctgcaaaattttgtaaacaataatggagcacttggaggttcagagaagctacatttagtagctggatttttaaattggtttctctttggngaaaaaaaaaaaaaaaaaaaaaaaaaaaaaaaaaaaaaaaaaaaaaaaaaaaaaaaaaaaaaaaaaaaaaaaaaaaaaaaaaaaaaaaaaaaaaaaanggggggcggcctttttaaaggatcaaagttatactccccgggcttgcaacgtaatattttttt

SEQ ID NO: 98946 - DNA, 221 bp, Zea mays
  unsure (1)..(221): unsure at all n locations
  Clone ID: MRT4577_21751C.1
gctagatttggggggagagagaagggagtcggcgcgtaggggcgctgtagggggcaccgctgcggccgtggagtgccccctacagccccatgcaaggggagggggatgacgagggggctgcgttgcgcacagcctcagatctacgcaccgtattcagctggttggatggcaccatgcacggcggcaggtgcagcatgttgngtttggtgaatgatttaggg

SEQ ID NO: 98947 - DNA, 613 bp, Zea mays
  Clone ID: MRT4577_21752C.1
aaaccagccgccgacatgtcgaagcgatgtaggagaggttcggctgagaacaagttcgcgatgacactgcgacgaccgtgggcgtacacggggaactgcccggacaacacgggcgccaagaacctctacataacctccaccaaggctatcaaggggcgactcaaccgcctcccgaccgcctgtgtcgcggacgtggccatgaccaccgcaaggaaagcaaagcccgacctcaggaagaaagcgatgcccgacggcatccccccccagtgcaaggcgaggggacgcaaggacggcgtctacatgtacttcaaatataatgctgaaatgatggtgaatcccaagggagacatgaaagggtcagcaatcacaggacctatcgacaaggaatgcgctgacctttggcctacgatcgctagagcatcaaatgccatcgatagagaccttgttgaaatgtggttaaactggagtatgatcatctcaatagcgtgtcgcatgtgtggtaaagctgctattgaacttgaaggctccttttatgctcggtcactcaatgttgaagcgaacagaaatttgactaccctgggtgcctcaagtttgctgccggatagctgacgaa

SEQ ID NO: 98948 - DNA, 272 bp, Zea mays
  Clone ID: MRT4577_21753C.1
ccttccgaattaccgactcgacccaacgcaccagtcgcttctcaaccaggccctaagtatttcatccgagggacctgctctcgctcgggggcactaacctcgaggtcaacaagcacgctcgcctgtgctgtcacgtcatcctcactccggagctgtattgcatggtcgtctctgtcccccaacctaatacccgggaaattccctaatggccttcctcgaccaatgtcaaagtgcggcttttgactctgtgagccttcctttatttccctgtc

SEQ ID NO: 98949 - DNA, 214 bp, Zea mays
  Clone ID: MRT4577_21754C.1
cgggtcgacccatcgcgtccgaatctaatctatgaggggaggtggggctcatagctgccagcggacattgttactatactttagatagatatttgttgattgccaatttatatgggtcgggggaggtaatttttgataaagtgagcatgtccccttatttgtatatattatggattggaatattaggttgccaagtggtcttccagcaataaaa

SEQ ID NO: 98950 - DNA, 514 bp, Zea mays
  Clone ID: MRT4577_21755C.1
ccgggacacctcccgatctccgaactcaagcttcgcttctcgtcgcgacgactgggcgagaccgccgacgccgccgccgcctgagttctttacaaatggctgatggcgaggacatccagcctcttgtctgcacaatggcactggaatgggcaaggctggttttgccggcgacgatgcaccaagggctgctttccctagtattgctggccgacctcgccacactgacgttatgggagggatgggacaaaaagacgcgaatgatgctgactaggaacaaaacaagagaggctgtctcactctcaaaaatccgatctatcgtggtattgggagcaactgcgatagacataggacaaaatcgtgcattacactcactacaatgagcttggggccgacccattggagcacactgtgctgctcactgatgctcctctgaaccaagagccagcagggagatgatgacccagatgcatgttcgagacatacagaggccctgacaagtgcaatgcaattgaag

SEQ ID NO: 98951 - DNA, 323 bp, Zea mays
  Clone ID: MRT4577_21756C.1
atccacgcgttcacacaactccacatcacacatttcacatttctgtaacatcatcaactgccagggacttggtctacttcttccttactacctgcataagttgatcctacacctatatattctgaagaagacatcgatattaccagcccgtggaagaccaatgttctacctggcctcaacaagatctttgacaaggatggcaacaacgctgcatctgcacgcttcttgaaacccttcaacaaagagcacattgacaaggagattgaagacaataagacatatctgcagcccaatgtcgtggaagcctactaaacatctactcc

SEQ ID NO: 98952 - DNA, 542 bp, Zea mays
  Clone ID: MRT4577_21757C.1
gttttcccattcgcaactagaaaccctagccatctacccacgccgccgccgttcccctccggcaaccatggctgggatggcatcacgctgcgaaggcaagacaaccggcgacaaaggctactgtagtgtgatttattcaccctatccacagtcgtcgcctcttcctcctcgcctgaccgacctgttccaacactttggtctggacaagatccgcgcgatcatgaacagttctgatggtaagacgttcgagcaaaagatcgacaagttacgagaggaaatgagtgctttcgaacgtgctcgtgatgtattctacatcgtcgagggcgaggatggcgacgaggacgacgaaggcgacgaggacgacgacgtggatgtggacgagtcggatagaaagctcttagatgatgaaaagaaacccgatatcacgaaacgaccacacactcctattggagatgaggtggaatgcaagaagccaaagatagcagaaggctcaaggtgccaaggagaagaacctgaggctggagggataaagaattcctcct

SEQ ID NO: 98953 - DNA, 154 bp, Zea mays
  Clone ID: MRT4577_21758C.1
gtggggcttacggcaccaattggtagcggaccaacaggcattacaaccaaaaaaagaagcaaagaaacccgctactgaacagaagaacataaaagcctggaattccggaaccagccaggaaaatcgccggagccacggaaaatactcctacacc

SEQ ID NO: 98954 - DNA, 699 bp, Zea mays
  Clone ID: MRT4577_21759C.1
ccacgcgccatcgccgatcacatcccagtcatccgtcacaagctagatgccgcgctctgaccgtatgaccaggcttgtcccccagcagctgctcgtggtggtcgtcggagcagcagccatcaccgtcgcaacggcatcggcggcgcacgtcgactccttcagctacccgaccttcgacgccaccacgacgcaggacctcgtggcggcaacaaacacctccatcctgacgtcggcctccctcctcttcggccacgacgccgacttcaacttcaaccgcaccgagggcttcatcctgctctcgcgcaccgtcgacgtctggcgcgccggccccggcggcgggccggcgcgcgaggcctccttcaacaccagcttcgcgctgagcggcgccgcgcccgtcgcgtacgtcgtactccgcgacagctacccgccgctgcacggcacgggcggcctccgcggcttcgccaactacagcgcgtcggacgccgaggatggcgccaccccccgcaacgcctccagcggactcgcgtccgtcgaggtaggccccgtgcggtcgtacggcccggacgacccggccgtcggcctcaacgtcaccgtcacgcccaccggcggcacggcgcctggtggtggtggtggcggtgccggcgcccgcgccgtgtggatcgagtacgacgccgccaagcacaggctgtccgtgtacgt

SEQ ID NO: 98955 - DNA, 336 bp, Zea mays
  unsure (1)..(336): unsure at all n locations
  Clone ID: MRT4577_2175C.1
ctacaatcacagaaagataaaaggggggggaaaggttttgtttctggttccatgangaccatcatgtgcaccctgaagacatctttgaagctgacttccccgcacattatggttttacttggactcaaatatcgtgggaagggtcacacttcacggacaaatcggtcagattaagatcgagcgggcgggaatcactcacagagagaattccatgtgacagcgaagatgaaaaaagcgcgggtgagagccgagaaacaggcagcgttggttcacatgctcacaggcccattcttggattacaaccatgtggaccactaactctcgaagatgttaaaa

SEQ ID NO: 98956 - DNA, 169 bp, Zea mays
  Clone ID: MRT4577_21760C.1
tacgatccaaacttacttactccttcattctacttcctacctcctctataatatcacctatattgcatggacttatccaaatttgacaacttcctgcctccaaaaaacctcctctcatacaaatctaaatctcctatcaatacatttcctctctctcacacctatcata

SEQ ID NO: 98957 - DNA, 782 bp, Zea mays
  Clone ID: MRT4577_21761C.1
cctcgaggccggccgggatcgcgggcataaactaatccggccggctgcggctgcagctactcatcggcaaagctgcagtataaattcaggggagctccatcgacgagtgagctccctgggggaccaggctgggagtgggagagcccccgtcaggccccctcctcctcctggtctcctctcttctatccgagctcggcattcagggctagtacacctgcttacatccatcgttcatgatgcatacaatggtatgcgcatatgcactgcattgttcgttcaaaataaataagtagaccatgcaactgctacatacacagtggaaaaggtttttgatcgagaggcaacgcaattgcaatggtgatcaggatacaagcagggtgtgctcgaggtcgatcgtgcatcatggccgcatgcatgcatgggagatgcagcaggcgttggcgtcgtctgtcgccacagcttggatagcggaaccaaaaataagggtcatgtggctagcagcttctgtttattttcactttcttcgttcatcgcatgctcttgttgttcactgttgtactatctagtagttctctttatctggtgcttccaatctaactagaataagtggcgcccttacgggcgccctatcgagacaatagtattcttgagtaaattgctatatacctttcatataaattgttctcgagttttggcagattggggcaatagtaataaaatactttaggtgtgcatgaaaaaaaaaaaaaaattaatgagcatacaatatatgtttgttcgag

SEQ ID NO: 98958 - DNA, 396 bp, Zea mays
  Clone ID: MRT4577_21762C.1
attgtactgcttgctccctttttatctttgggtatcctgaaccatcgagcgcgggctgtcaagctgactcgccttcacagtctacgcgaacgccttggtgccaccttcttctcccatctcaatgaactgatagcactctctttcaggtatgttcaccatggcaagggaatgcttcagcgccattagctgcttgcggagtttgatgccctgtttgattgtgatcaaggataataatgtaccttttgaagacattttttttgctgctcattattttaattctctccctctcatgggttttactttgctattcttgtcatggtcttggtatattgtttattacattttttatagtttatttctttctttttatctttttctatgtatctttattgtttt

SEQ ID NO: 98959 - DNA, 272 bp, Zea mays
  unsure (1)..(272): unsure at all n locations
  Clone ID: MRT4577_21763C.1
gttcattctatgatgttacattatttgtagtaacttgtgctatctgtgatcaaccaattagctttggtaaaccttttttcctacttttagtaacaacattttttttcattcaatcaactgtgtggagtgaaccctgctgcttatttgnagcaacaactattaccattaagacagttagctactgtctactctaatcaacaacaacttgttggatttaaccaattgggcttattgaaccggggtgtttatttggagtaaaaaatactactacc

SEQ ID NO: 98960 - DNA, 539 bp, Zea mays
  Clone ID: MRT4577_21764C.1
gggttgttgggggttttttttttttttttttttttttttttttttttttttttttttttttttttttttttggcaaacccaacggggggcctaaaccccggggtattacacaacccaacccaggttttgttacaaggcaaaaaagaacggggggggggggggaatttacaagcaaacaaaaaaccgggccaaaaggaaaacaaaagcggggacccccccccctaggcgacggggtagcttgaaaaaacgggcaaaaaaagccgccggggaagggtttattaggccgggggggcaaaacccttttggaggggggccttgaaccccagcgggtacttgccgaagggccccccaacctttttggggaagggcccgccccggccattgagggagaaaaaggccctggcttacgaaaacctgccccccccgcggaacaaattccccttttcttcccggccccggaggtccctcaccaacttggagaagttttcttttgggacattggacaccctcccaaaccggaaactagagggggccgggga

SEQ ID NO: 98961 - DNA, 347 bp, Zea mays
  Clone ID: MRT4577_21765C.1
atctctcccctgccctgagcacgcttgctcgaagcaagcaccaccatccgccatcgtcgacgagggcgattttccagaaaccctagctccagaagaaggacaagagtccgacctccccgaagcagagcctctgacccatgagaacttcgatgaaggcaagaccattctacccttgatgcataaattacccagtcttttacaccaaaaacctaagttgggtgattgggaagggattttttgcatatgtgagaagcgttttggcctgcataaattatacactatgttttcaatatgaaatgagggaaaatggttgattttagaaaggaaaaatgtttgtgaaaatttgg

SEQ ID NO: 98962 - DNA, 571 bp, Zea mays
  Clone ID: MRT4577_21766C.1
ggccacggccatgcccggtggcggcggctcgatgcggaagcccggcacgctgtcctcctgcgagctgtagtggtggctggtgctcttctggttggcgcgcgcctgcctgtgcctccgctggtagtcggcaatggcgtcctgagctggcgcggcgcccttggcgtcgtctctccccggtttgacggatacagagcccttgcctccgaggcccgctgcgttttgcctgctgacctcctggcctcggagcttggcgtcgtactccttgcacggcgggtacttgggcaggctcgccggatcacacgccagcggcttggtcctgaagaactcgctgtccagagcagaggccaccgtgccccgtgccgacggctcgatggcgagcagcgtgtccaggagcgccagggccgagggcgggaagtccttgaacgtctcggcgatcttgcgccggtacggccgctgcggcttgaagagcgtcacgtccggtagcttcgccttggcccagtagtcctcggacggcgagccacaaagcttgaagatcttgtgcagctgctcgatcttcgccgacgcgtgggtc

SEQ ID NO: 98963 - DNA, 212 bp, Zea mays
  Clone ID: MRT4577_21767C.1
cccacgcgttcgcggacgcgtacggactgtcattgcacgcctagtgaaacaggggggtgatgcttctaatgacacggatgactctggtaccactgtgcaccactggtatgacataatcacttttcactgaggtgtccatatctttttttggtgtaaggaatgcccctgaagtcttgcgggcaaactaaatgtttgttaaggctgtcttgacc

SEQ ID NO: 98964 - DNA, 570 bp, Zea mays
  unsure (1)..(570): unsure at all n locations
  Clone ID: MRT4577_21768C.1
ttcccttttttaccaatgtgggtcaaacaaagggcgcacctcctcgggcacacagccttcactgggctgtctaatgacnngtgcatgatgtggtntgtgtgtatttatgtgtgcgtgtgtgtnaatatatactagaagggaaaaaccnaaagtatgtactgtgctgcgcctttgtattgctgtgctgccaaattgattaccttgggctcacagagcattcaccttgtgcttgctggggggcggtgaccgtgggggganggaccgggaagcttttgaagaagacgcaccagagtcatcttgggaagtgagatttttgtgggtggaaccatgtgctgctgaggctttgggcatctggtgaatgcattgcgccctcaggatggtttttgctgcgctttttgaaagggtggctcgtgccttttgggtttttggttggaggcttttggcttgcgccatgggccttagctggaactgtgggcacagggtgagggcctcgggcccttagtccttttggctgccgccgccgatcacgtaatggactgttgcttgatggcttctgccaccgtggggccc

SEQ ID NO: 98965 - DNA, 185 bp, Zea mays
  Clone ID: MRT4577_21769C.1
gaaggagagcagtctttatatatccataaaggggaatccagggcggttctgagatccaactggtgaacgaaagaacactgtaatcggcattaacttcagctgggaacatatatctatctctactagcggaatggctaccatggaaatgtaaatatcaccccatcgaagctcagcaaccactcttt

SEQ ID NO: 98966 - DNA, 853 bp, Zea mays
  Clone ID: MRT4577_2176C.1
acttgcgatctctctctcccttgcagtgaagcccctgcttgctctttttgtttccctccctttccgtccctcgctcgcctctctctctcccccgcaccgcacggatccggggtggagaggaggggactgggaccctaggaggaagcgacgctccgtacttctcaccgaaggtctccacacaagcaccgacacggggggacgtgcatcgcgaggtcgtgcatggccgatctgctctgcctccgccagtgaaggtggattgttggatgcgtctagcttcgtacggcaagagactgcagatcttgcaggattggtctggtttggttcggaggtgtaagaaacaggtgaacactaagtttttgaggaaaaagtagctagcatggacgagggcagttttcagcactggccggaggaatggtttcagacatatcagatgaattcacccattgggctggggacaaacaatgaagctggtccggctgaaggtactggcttcagtagaaaagcagacaaaatacctaagagtaaaaagcacaggcccaaggtagtcaaagagaaaaaaatagccaaaatacagaagtatacaactgcgaagcatgccaaggagaaggagactcactcaactggcaagaggaaatatgtccgcaaaaagggactaaacgcaacaacgaaccaacctccagcagaagattctgatatgcagaacagagtggaaaaattaaaagccaggagaagcttgaagttcaatgaggatgatatgcgaaaaaatgctgatctagcatcacaagcccagggtactggagcgtctttcatccagaggatcctcggtcatcaatatatgcagctgaaagactct

SEQ ID NO: 98967 - DNA, 318 bp, Zea mays
  Clone ID: MRT4577_21770C.1
gggataaaataagggtccccgggaataaaatgggctttttgccggtgaaacttgtccacccctttccaacatgggggcttttaaaattgccccctggaactaaccctaaagtggtttggttggttccaaggcaaaccccctttacccgtttcccacttttttaatatagcgggaatccaagcttttttttactgcaaatgtttggggtacaaattacttgttccagggtaaggtcatgcacccggctccaaagcctttttgtttcttggcgccttccccttgatgcctccaattgttgggcagattccaaaatttggg

SEQ ID NO: 98968 - DNA, 721 bp, Zea mays
  Clone ID: MRT4577_21771C.1
taatttttatcgtattacaattttttttatttttttttttttttttgagtccaacaagtacaaatccataggccatagccgcacactgaatcacaacaaagtgatctgttcaggtttggtacaacattccatcttacaagaaaatcaacatcgatgaaaacaatgcatcttctgcatcctgtcatagcagcatcgtgctgtcgttactgaaccttagggttttgtaattgagctcttcctgcaatgacagtaattgctgcaaacaaatctgtaggatagctaatacctatagagcgacccagaaatcagaggaagccctcatttggcaaagaacgggaatcaatagcccccacagggaaaaaaaaactgaatgacgtgcttgttagttgactggcatgatctaatgagagctagctgacttgcaatggtatatctatgttttttggctaccagtgtagagtcatacaacccaagtttcaaggcccatagacctgcaaatttcaggagcagaccaaattctggctcatgtctttgtctacaaacttcatcgtcccattttcttcttcaactccggctgtattgctctttgcctgccctgccttctctgtaaggtcaggccacagattctgatccgcggcagaatcaacttttgacccggcttttaggggaactcttgataaggttctttcttgatccgacttttgaagaaaccgctttttag

SEQ ID NO: 98969 - DNA, 225 bp, Zea mays
  Clone ID: MRT4577_21772C.1
gtctttttttaagagcgcggagaagatctgctcgggatacgacgacggagtgtcccatggggacacattcttaccgatgcaatgatagcccgtaccaatggtgccacccagggagaaggggctggccagtagaactgtgtggagaagcactatgcgtactgtactagaccaccagtgcaatgtgctgaggggctctacctgaggacaaactcacgaccagaggtt

SEQ ID NO: 98970 - DNA, 2940 bp, Zea mays
  Clone ID: MRT4577_21773C.1
cgtaagcttggatcctctagagcggccggcccttttttttttttttttttttttttttttggtacaacattccatcttacaagaaaatcaacatcgatgaaaacaatgcatcttctgcatcctgtcatagcagcatcgtgctgccgttacttgtaattgagcccttcctgcaatgacagtaatcgctgcaaacaaatctgtaggatagctaatacctatagagcgacccagaaatcagaggaagccctcagttggcaaagaacgggaatcaatagcccccacaggaaagaaaagaaaaagaaaaaaaactgaatgacgtgcttgttagttgactggcatgatctaatgagagctagctgacttgcaatggtatatctatgttttttggctaccagtgtagagtcatacaagccaagtttcaaggcccatagacctgcaaatttcaggagcaatccaaattctggctcatgtctttgtctacaaacttcatcgtcccattttcttcttcaactcctgctgtattgctttttgcctgccctgccttctctgtaaggtcaggccacagattctgatccgcggcagaatcaacttttgacccggcttttaggggaactcttgctaaggttctttcttgatccgacttttgaagaaaccgcttttttagagatggtagcatccctgtttatgcatacattagattcttccatcacagtcccctctggttctttaggttgcatactaggtgtcactgggctattagtattttgggggctatgcttatctggactgatgcctttcctggaagaagctaaccttgcaaaatgacgcctattttcaaaccatctgttgacctgatgaaatgttagccctagttcttctgccaagctttctttaagagaacgactagggtatggttgtgtcttaaaatgttcatgtagcttctgactaatcactggaccaaaatgtcctttcctatctttgatattgctgccattagaagtaagatctccatgtttctcatctactgaaccatgaagagaatgcaagctttctttagtgttttgtgtagtcagttcattatggtgcgcaactctagagccttttcctgcaggagaaccaacttcaccctcttcattgctttttattggtgtgttcttcccagaccattcttcttcatcactagaatcagatgatgcttcaccatatgcctcatcatacagccttttgtagtccaaccgttcagcttgacgtctccttgatactggtaaaaccacactctggtctatttcagtctccatagggtcgtcagcagaacttgttgtgttagactgagcagtgttcttttccatatcacccaccctgacatcgggtaatggaggcgatgaaacttcatcatgtccaccagattttttaatctccttacaaaaatcatccgagtcagacgtgaaatcagactcatcagaatttgacttcttttcgacatctttatccgaatcaggacctgctggatcatagtcatcatcctctgaatcttcagaaggtaatcccaggtcatcaaccttctttttatctatcaaaggttccaaatcatcagaacaggttaagaagtcagagtcgtcagagtctgatcctccgtcatcatcctcttcctcttcagaagatccttcttccttactagccacatgctcttcaggcatattggggtcaaaatcattgtcatccgaatcatcagatggaagatcaaatgcttcatcttgcttagagccattggtcatagcagctgcctctggaaaaactttctcccaagggtcctcaatggagatgtcactgccctggagttcatttattagatctatacagtctaacttgcaatcacatgctgggcagagccatccttcatctcccatgggaatatcttcagtacgcagaggaggatttagacagttctggtggaaccctctgtcacaagctccatcacagagaatgatatcattacccaatgtagcatttttcgaaccacaagtagcacaaaagatatcttcacaagatatttctccttcagaatcaaataaagattcgtcaattttccccttggatagaagagaatcaatattttggaagacttcccgtattctcaatttgcatcgtaagatttctgatttggctcgttcaagctccttctcaggtcttatcttatccaaactttgatttttccagccttcactagcataagcttcaattaggctttgctcataattcattcggttcaaaatgtatctaacccgtttacgaatttgtgagaactcatctgtcgaatttttgtttgaggctctgctcctttttcttctcttggcagctggttgtcctggaggctgcacatgctcagtagatgttgtctttgaacctgatgtagagcgaagcaccctgacatcaatatcagatgacctcaatgtatatgcctgacctgttagtccttgggaaccctttttacctctgtttgctgcccttttatagtttttccttatccccaagttatttggcacagtttgagatgcagacagcaaaactggatgctcaagggtctcaggattctgactagagctcgtaccattttcaatctcaccattaccctcagccggaacgtgaactgtctttttttccatagtatatgatcaccaaaatttcatcaatttacagtagacagaaagcagtctcagcaaacctgtcttctgaggacaacaataaaaaagatctatgtggccaagccagattcaccagcaccttgaaatcgctgcgagctggcgacgcagcgccgcggagaagcttccaggcccggcggctctcctcctctcctgcgtggggcgagtgtggcggggaggaagagcgggaggcgtggccgcgtgagcgaagcggcgggcagaataaaaagtgtctatgcac

SEQ ID NO: 98971 - DNA, 623 bp, Zea mays
  Clone ID: MRT4577_21774C.1
gtatattgccttcatatatataggacgactatgaccgaccagcgctaactagcgctcctggtccataggcagagcggtggcagtgtgttccatggaccaccctaaaatctaatccaaggttaaactgtagtagatactatttatataaaattacaaagattgtacatggaccattctataatttggttttagatctaagatgaaccaccctaactataaatcctaactacgccactgccctggctgacgactaaggctatctctagtagtatccctatcccacatcctatctcactccctatttcaaactccctctataaacagtgcaaaacagtgttttgcacggccatatgcgcgctctgctgagcacaacttaactgcgactagttgcctggtcgttcccatggtgagatgaagactgactagacaacgtgataacattgatcatgtatgttagttaacacctgaatttataaatatgtgcacatcatagttgtcaaggtgtcgcctaggcggcaaggcgccccagtaacttaaggggtcctgctcgccttactccggcacctaaggtgagtgggagaggccatcggtgtctctaccagcggcgcggcggctgctatagc

SEQ ID NO: 98972 - DNA, 212 bp, Zea mays
  Clone ID: MRT4577_21775C.1
cagccaccgcaggcagcaagcacaaccagcaggcacgaacggacaagaagcaagccaagagagaagggcagaacgagcaaagaagcagcgcgcgaagacgcaagacagggcgccgagagacggcacgccggagcgcagcacccagccgccgccggggcgggcgggcaagagccaggcaagcgccggaacaatgagaaccgcaaccaccagac

SEQ ID NO: 98973 - DNA, 745 bp, Zea mays
  Clone ID: MRT4577_21776C.1
taggcaagaaggtgattgaccgcggtgagtttgttgatgagcccaagccacaacgttcagaacactgtgtatctctacttgccgagctcgacacattcagcaaccaacaagtccagtcaccttcaccatcaaatatgaaagagcttgccaagaggacactgaaagcataccttaatgtccggcgaggcgtcgagcagctgatgagcaagtacactgtgaaagcatgtgggtactgctctgaggtccatgttggtccgtggggccacaatgtgaagctctgtggggctttcaagcaccagtggcgggatggcaagcatggatggcaggacgcggtggttgatgaggtcatcccgcccaactacgtgtggcatgtccctgaccccagtggctctcctctcagatcctctctcaggagtttctatggcaaagctccagctgtcgtagagctgtgtgtgcaggctggggctgaaatacctgacgagtatcgggccatgatgaggactgacattgtcatcccggactctgtggaagctcggatggctgcataacaacaatgttctgagcttctacgactactatcctgcagttcttgtccagagtacagattccaaccaaatgtgccgctttctgggcatgctgtgatggtgggtctcttagccctgtggtaattactcaaggagcagcagatgcatagtttgtataatataattagcttagctaaatcatgatcgtttgggatttaaag

SEQ ID NO: 98974 - DNA, 382 bp, Zea mays
  Clone ID: MRT4577_21777C.1
gcgtgggaatgattaataaatagcccttaataaaagacaacctatacatttaccgctatgacactgatatcacggggagcgggtgcaacaaaaacaaccagagaatacgcacctatcatcagcaattgattagaaaacatgacatcatacacctttatgacagacctaaaaatatccatacctgatcaaatattatatctaaccggtaaacagactcatcataggacagatacaaatccattctagcatgaacctcatgcattactaactgtctctcccaatatatgagcaaaaacaagacgtaataaaaaaggatcgactcagaaagtgccgatcgttataggatctacacattgacgagcacttgccatccactgcatat

SEQ ID NO: 98975 - DNA, 136 bp, Zea mays
  unsure (1)..(136): unsure at all n locations
  Clone ID: MRT4577_21778C.1
ntcgatgaatggcgtcttcgnggccctgcatgcctccaccatccacgtgacacccgnagggaagggtttncaagctacggcaaggctacgaaagctattgaaactttcgaccccagctcactggtctacagcggat

SEQ ID NO: 98976 - DNA, 253 bp, Zea mays
  Clone ID: MRT4577_21779C.1
atatttttttttttttttttttttttttagtaggcacagatcgatccaagtttatttctggcacgacagcatcaacgggaaaaaacacttagaactcggcaggaaagggggccggatgatgtatttctattcagacacacacacacaggtctagtgacagaaactatctgcctgccgctttttgaatgagatgaaccaacgtccctctcgttcgggttatgagcttgcctggtcatgacacaagccatcacct

SEQ ID NO: 98977 - DNA, 4647 bp, Zea mays
  Clone ID: MRT4577_2177C.1
atggatcctaaagggaagggaatcgtgatcaacgacaaggagaaggaatccttcgtcaacgagccaagggatgacaagtccaacgactcgggctcgggccacagacgcaaagatgggaagaagaagaagacaagacacatcaaggagatcgtctactacgacagcgatgagtctacttcctcccaaaaggacgacgaccacaacgaatatgagagaaagaaaccggtcaattcgaacttttcttttgattactctcgtattcctcaaagtactaatgctcatttattatctattccaattggtaaacctcctcattttgatggagaggactacggattttggagtcacaaaatgcgtagtcacttgttctctctccatcctagcatatgggagattgtagaaagtggaatgcactttgatagtacggatagtcccatgtttattaatgaacagattcataaaaatgcacaagctactactgtgttgctagcctctttgtgcagggacgagtaccataaggtgagcggcttggacaatgccaagcagatctgggacaccctcaagatctctcatgagggaaacgatgtcaccttgctcaccaaaatggagttggtggaaggcgaacttggacggttcgcgatgataaggggggaggagccgacgcaaacatacaaccggctcaagacccttatcaacaaaataaggagctacgggagcacgcgatggacggaccacgacgtcgtccgcctaatgctaaggtcatttaccgttcttgatcctcatttggtgaacaatatacgtgaaaatcccaggtacaccaagatgtcgcccgaagaagttcttgggaaattcgttagtgggcgaatgatgatcaaggaggcaaggtacgtggacgacgccttgaatggtccgatcaacgagccgcaaccccttgctctcaaggcaacacgaagcaaggaggctctacctagcaaggtggcacagattgaggcggccggacttaatgatgaagagatggctctcatcatcaaaagattcaagacggtgcttaaaggtcgcaagggacagccaagcaagactaaagccaaggggaagcgctcatgcttcaaatgcggtaagcttggtcattttattgctaactgtcccgacaatgatagtgatcaggatcaagggaacaagagggagaaaaagaagaactataagaaggcaaagggcgaggctcatcttggcaaggagtgggattcggactactcttcgtctgactccgacaatgaaggactcgccgccactgccttcaacaagtcatccctcttccccaacgagcgacacacttgcctcatggcaagggagaagaaagtaagcactcataatactagtacttatgcttcttcaagtgaggatgagtccagtgatgatgatgagatagattactcatgcttattcaagggattagatagaaccaaggtagacaaaattaatgaattgattgatgccttgaatgataggaatatacttttagaaaagcaagaggatttgttgtatgaagaacatgataaatttgtagaagctcagaaatctcttgctctagaaattaagagaaatgaaatgctctctagtgaactatcttcttgtcatgaaactattgctaagttaaagagttttaatgatgatttaaatgctagactagaagtagctagtaaatctaattcttgtgtagaaattgttgaaacttgcaataggtgtaaagattttgacattgatgcttgtagtgaacacctagtttcaatttccaaacttaatgatgaattggctagtcttaatgctcaacttaagactagcaagagtaattttgataagctaaaatttgcaagggatgcctacacaattggtagacacccctcaattaaggatggacttggcttcaagagagaagccaagaacttaacaagccataaggctcccattcccgccaaggagaaagggaaggcccctatggctagtagtgtgcaaaagaaccatgcgtttatgtatcatgataagagacaaactagaaatactaatagaagttacaatgcttatgatgattttgattctcatgacatatttgcttctagttctttctatgtgcatgatagaaatgttggtaggaaaaatactgttcacaatatgcctaggagaaatgttgttaatgttcctaggagaattaatgaaccttctacaatatatcatgctttgaatacttcctttgctatttgtagaaaggataggaaaatagttgctaggaagttaggggcaaaatgcaagggagacaaaacttgcatttgggtccctaaggagatttgcactaaccttgtaggacccaacataagttgggtttatgcatccgggggttcaagctggattgtcgacagcggatgcacaaaccatatgacgggggagaagaagatgttcacctcctacgtcaagaataaggattcccaagattcaattatattcggtgatgggaatcaaggcaaggataagtctgaaacccaagggaccctcaagcgcttcctcaggagagctcaaaatgagtttgagctcaaggtgaagaagataaggagcgataacgggtccgagttcaagaactttcaagtggaagagttccttgaggaggaagggatcaagcatgagttctccgctccctacacaccacagcaaaatggtgtggtagagaggaagaacaggacgctaatcgacatggcgaggacgatgcttggagaattcaagacccccgagcgtttttggtcgaaagccgtgaacacggcttgccacgccatcaacagggtctaccttcatcgcctcctcaagaagacttcgtatgagctactaaccagtaacaaacccaatgtatcttactttcgtgtatttgggagcaagtgctacattctagtgaagaagggtagaaattctaaatttgctcccaaagctgtagaagggtttttgttaggttatgattcaaatacaaaggcgtatagagtcttcaacaaatcatcgggtttggttgaagtctctagcgacattgtatttgatgagactaatggctctccaagagagcaagttgttgattgtgatgatcctttcagggtagaggaggccttgctagatccagattgggtattggccatgcaggaggaactcaacaacttcaagcgcaatgaagtttggacactggtgcctcgtcccaagcaaaatgttgtgggaaccaagtgggtgttccgcaacaaacaggacgagcacggggtggtgacgaggaacaaggctcgacttgtggcaaaaggttatgcccaagtcgcaggtttggactttgaggagacgtttgctcctgtggctaggctagaatcaattcgtatcttgctagcatatgccgctcaccattctttcaggttgtaccaaatggatgtgaagagcgctttcctcaatgggccaatcaaggaggaggtgtatgtggagcaaccccctggcttcgaggatgaacggtaccccgaccacgtgtgtaagctctctaaggcgctctatggacttaagcaagccccaagagcatggtatgaatgccttagagatttcttaattgctaatgctttcaaggttgggaaagccgatccaactctttttacaaagacatgtgatggtgatttgtttgtgtgccaaatttatgtcgatgacataatatttggttctactaaccaaaagtcttgtgaagagtttagcagggtgatgacgcagaaattcgagatgtcgatgatgggcgagttgaactacttccttgggttccaagtgaagcaactcaaggacggcaccttcatctcccaaacaaagtacacgcaagacttgctgaagcggtttgggatgaaggacgccaagcccgcaaagactccgatggggaccgacggaaacaccgacctcaacaaaggaggtaagtccgttgatcaaaaagcataccggtcaatgataggttctttgctttatttatgtgctagcagaccggatattatgcttagcgtatgcatgtgtgctagatttcaatccgaccctaaggagtgtcacttagtggcggtgaagcgaattcttagatatttggttgctacgccttgcttcgggctctggtatccaaaggggtctacttttgacttggttggatactcagactccgactatgctggatgtaaggtcgataggaagagtacatcggggacgtgccaattcttaggaaggtccctggtgtcatggaactctaagaaacaaacttccgttgccctatccaccgctgaggccgagtatgttgccgcaggacagtgttgcgcgcaactactttggatgaggcaaaccctccgggactttggctacaatctgagcaaagtcccactcctatgtgataatgagagtgctatccgcatggcggaaaatcctgttgaacacagccgcacaaagcacattgacatccgacaccactttttgagagaccaccagcaaaagggagatatcgaagtgtttcatgttagcaccgagaaccagctagccgatatctttaccaagcctctagatgagaagaccttttgcaggttgcgtagtgagctaaatgtcttagattcgcggaacatggattga
